United States Patent Application Publication US 2007/0214517 A1 - sequence listing, part 36

SEQ ID NO: 42157 - protein, 338 aa, Arabidopsis thaliana; identical to SEQ ID NO: 24106
  peptide (1)..(338): Ceres Seq. ID no. 13493835
  misc_feature (1)..(303): Pfam Name: Dehydrogenase E1 component Pfam Description: Dehydrogenase E1 component
  misc_feature (1)..(303): Pfam Name: Dehydrogenase E1 component Pfam Description: Dehydrogenase E1 component
  misc_feature (1)..(303): Pfam Name: Dehydrogenase E1 component Pfam Description: Dehydrogenase E1 component
  misc_feature (1)..(312): Homolog of NCBI NO: 33861844 NR Description: Pyruvate dehydrogenase E1 alpha subunit
  misc_feature (1)..(312): Homolog of NCBI NO: 22298712 NR Description: pyruvate dehydrogenase E1 component, alpha
  misc_feature (1)..(312): Homolog of NCBI NO: 11465733 NR Description: pyruvate dehydrogenase E1 component alpha subunit
  misc_feature (1)..(312): Homolog of NCBI NO: 16331186 NR Description: pyruvate dehydrogenase E1 component, alpha
  misc_feature (1)..(312): Homolog of NCBI NO: 23128827 NR Description: hypothetical protein [Nostoc punctiforme]
  misc_feature (1)..(312): Homolog of NCBI NO: 33861844 NR Description: Pyruvate dehydrogenase E1 alpha subunit
  misc_feature (1)..(312): Homolog of NCBI NO: 11465733 NR Description: pyruvate dehydrogenase E1 component alpha subunit
  misc_feature (1)..(312): Homolog of NCBI NO: 23128827 NR Description: hypothetical protein [Nostoc punctiforme]
  misc_feature (1)..(312): Homolog of NCBI NO: 16331186 NR Description: pyruvate dehydrogenase E1 component, alpha
  misc_feature (1)..(312): Homolog of NCBI NO: 11465733 NR Description: pyruvate dehydrogenase E1 component alpha subunit
  misc_feature (1)..(312): Homolog of NCBI NO: 22298712 NR Description: pyruvate dehydrogenase E1 component, alpha
  misc_feature (1)..(312): Homolog of NCBI NO: 33861844 NR Description: Pyruvate dehydrogenase E1 alpha subunit
  misc_feature (1)..(338): Homolog of NCBI NO: 15223294 NR Description: pyruvate dehydrogenase E1 alpha subunit
  misc_feature (1)..(327): Homolog of NCBI NO: 6715645 NR Description: T25K16.8 [Arabidopsis thaliana]
  misc_feature (1)..(338): Homolog of NCBI NO: 38344868 NR Description: OSJNBa0020P07.11 [Oryza sativa (japonica
  misc_feature (1)..(312): Homolog of NCBI NO: 23041416 NR Description: hypothetical protein [Trichodesmium erythraeum
  misc_feature (1)..(312): Homolog of NCBI NO: 17230200 NR Description: pyruvate dehydrogenase E1 component, alpha
  misc_feature (1)..(338): Homolog of NCBI NO: 15223294 NR Description: pyruvate dehydrogenase E1 alpha subunit
  misc_feature (1)..(327): Homolog of NCBI NO: 6715645 NR Description: T25K16.8 [Arabidopsis thaliana]
  misc_feature (1)..(338): Homolog of NCBI NO: 38344868 NR Description: OSJNBa0020P07.11 [Oryza sativa (japonica
  misc_feature (1)..(312): Homolog of NCBI NO: 23041416 NR Description: hypothetical protein [Trichodesmium erythraeum
  misc_feature (1)..(312): Homolog of NCBI NO: 17230200 NR Description: pyruvate dehydrogenase E1 component, alpha
  misc_feature (1)..(312): Homolog of NCBI NO: 23128827 NR Description: hypothetical protein [Nostoc punctiforme]
  misc_feature (1)..(312): Homolog of NCBI NO: 16331186 NR Description: pyruvate dehydrogenase E1 component, alpha
  misc_feature (1)..(312): Homolog of NCBI NO: 22298712 NR Description: pyruvate dehydrogenase E1 component, alpha
  misc_feature (1)..(312): Homolog of NCBI NO: 17230200 NR Description: pyruvate dehydrogenase E1 component, alpha
  misc_feature (1)..(312): Homolog of NCBI NO: 23041416 NR Description: hypothetical protein [Trichodesmium erythraeum
  misc_feature (1)..(338): Homolog of NCBI NO: 38344868 NR Description: OSJNBa0020P07.11 [Oryza sativa (japonica
  misc_feature (1)..(327): Homolog of NCBI NO: 6715645 NR Description: T25K16.8 [Arabidopsis thaliana]
  misc_feature (1)..(338): Homolog of NCBI NO: 15223294 NR Description: pyruvate dehydrogenase E1 alpha subunit

SEQ ID NO: 42158 - DNA, 1093 bp, Arabidopsis thaliana
  misc_feature (1)..(1093): Ceres Seq. ID no. 13592776
  misc_feature: MA Experiment ID: 20000328 Result: Down-regulated in Transcription
  misc_feature: MA Experiment 20000328 PARAMETER Experiment Name: At_42deg_Heat_Sub_P Parameter: Age (day) Value: 14
  misc_feature: MA Experiment 20000328 PARAMETER Experiment Name: At_42deg_Heat_Sub_P Parameter: Organism Value: A. thaliana
  misc_feature: MA Experiment 20000328 PARAMETER Experiment Name: At_42deg_Heat_Sub_P Parameter: Plant Line Value: WS
  misc_feature: MA Experiment 20000328 PARAMETER Experiment Name: At_42deg_Heat_Sub_P Parameter: Temperature (deg C) Value: 42 vs. 22
  misc_feature: MA Experiment 20000328 PARAMETER Experiment Name: At_42deg_Heat_Sub_P Parameter: Timepoint (hr) Value: 6
  misc_feature: MA Experiment 20000328 PARAMETER Experiment Name: At_42deg_Heat_Sub_P Parameter: Tissue Value: Aerial
  misc_feature: MA Experiment ID: 20000355 Result: Down-regulated in Transcription
  misc_feature: MA Experiment 20000355 PARAMETER Experiment Name: At_Siliques_Sub_P Parameter: Age (day) Value: 21
  misc_feature: MA Experiment 20000355 PARAMETER Experiment Name: At_Siliques_Sub_P Parameter: Organism Value: A. thaliana
  misc_feature: MA Experiment 20000355 PARAMETER Experiment Name: At_Siliques_Sub_P Parameter: Plant Line Value: WS
  misc_feature: MA Experiment 20000355 PARAMETER Experiment Name: At_Siliques_Sub_P Parameter: Tissue Value: Less Than 5mm Siliques vs. Whole Plant
accgaaagctccacaaaccccattaattaacaaaaaaccaaaagaaggcggcgcaaacaaaagataatgcaaccagagacctcagatcagatgttgtactcgtttcttgccggaaacgaagtcggcggtggagggtactgcgtctccggcgactacatgacgactatgcagagcttatgtgggtcttcgtcgtcgacgtcatcgtattacccactggcgatctccggcatcggagaaacgatggctcaagacagagctttagctgctttgaggaaccacaaagaagctgagagaagaaggagagagaggatcaattctcatctcaacaagcttcgtaacgtactctcttgtaattctaagaccgataaagccacactgctcgccaaagtagttcaacgagtcagagaacttaaacagcaaaccctagagacctccgactccgaccaaacattattaccatcagagaccgacgaaattagtgttctacactttggagactattcaaacgacggtcatataatcttcaaagcctctctatgttgtgaagatagatcagatctcttgccggaccttatggagattctcaagtctcttaacatgaagactctccgagctgagatggtaaccattggtggtcggacaagaagtgttcttgtcgtagctgctgacaaagagatgcacggcgtcgagtctgtgcattttttgcaaaatgctctcaagtcgctgcttgagcggtcaagcaagtcgttgatggaacgtagttctggtggtggaggaggagaacggtcaaagcggcgtcgtgcgctggatcacatcataatggtgtgaaatgatgagaattgagcacactaaaaagtctataattgattaatatatatagggtatgatcataattaacttggttataattaccaaaaccttttttattcctctttaataatatatatgttatatggttttagttactaagtcttgggagtgtaagcaaatgttgtaagtaggtttggtgtgttctttttcttttcttttttttctttttcaagaaaaagaaaaagatctatattatatataaagaatatttgtcatgttattt

SEQ ID NO: 42159 - protein, 253 aa, Arabidopsis thaliana
  peptide (1)..(253): Ceres Seq. ID no. 13592777
  misc_feature (67)..(116): Pfam Name: Helix-loop-helix DNA-binding domain Pfam Description: Helix-loop-helix DNA-binding domain
  misc_feature (30)..(236): Homolog of NCBI NO: 15233658 NR Description: bHLH protein family [Arabidopsis thaliana]
  misc_feature (30)..(236): Homolog of NCBI NO: 33111975 NR Description: putative bHLH131 transcription factor
  misc_feature (61)..(242): Homolog of NCBI NO: 34904034 NR Description: P0665D10.15 [Oryza sativa (japonica
  misc_feature (40)..(245): Homolog of NCBI NO: 15225658 NR Description: bHLH protein family [Arabidopsis thaliana]
  misc_feature (53)..(248): Homolog of NCBI NO: 34896028 NR Description: ESTs C26093(C11622),AU090634(C12429) correspond a region of the predicted gene.~Similar to Arabidopsis thaliana
  misc_feature (55)..(205): Homolog of NCBI NO: 15230869 NR Description: bHLH protein family [Arabidopsis thaliana]
  misc_feature (55)..(249): Homolog of NCBI NO: 18409132 NR Description: bHLH protein family [Arabidopsis thaliana]
  misc_feature (37)..(253): Homolog of NCBI NO: 15229004 NR Description: bHLH protein family [Arabidopsis thaliana]
  misc_feature (9)..(253): Homolog of NCBI NO: 18491261 NR Description: At2g41130/T3K9.10 [Arabidopsis thaliana]
  misc_feature (1)..(253): Homolog of NCBI NO: 15226839 NR Description: bHLH protein family [Arabidopsis thaliana]
MQPETSDQMLYSFLAGNEVGGGGYCVSGDYMTTMQSLCGSSSSTSSYYPLAISGIGETMAQDRALAALRNHKEAERRRRERINSHLNKLRNVLSCNSKTDKATLLAKVVQRVRELKQQTLETSDSDQTLLPSETDEISVLHFGDYSNDGHIIFKASLCCEDRSDLLPDLMEILKSLNMKTLRAEMVTIGGRTRSVLVVAADKEMHGVESVHFLQNALKSLLERSSKSLMERSSGGGGGERSKRRRALDHIIMV

SEQ ID NO: 42160 - protein, 245 aa, Arabidopsis thaliana
  peptide (1)..(245): Ceres Seq. ID no. 13592778
  misc_feature (59)..(108): Pfam Name: Helix-loop-helix DNA-binding domain Pfam Description: Helix-loop-helix DNA-binding domain
  misc_feature (22)..(228): Homolog of NCBI NO: 15233658 NR Description: bHLH protein family [Arabidopsis thaliana]
  misc_feature (22)..(228): Homolog of NCBI NO: 33111975 NR Description: putative bHLH131 transcription factor
  misc_feature (53)..(234): Homolog of NCBI NO: 34904034 NR Description: P0665D10.15 [Oryza sativa (japonica
  misc_feature (32)..(237): Homolog of NCBI NO: 15225658 NR Description: bHLH protein family [Arabidopsis thaliana]
  misc_feature (45)..(240): Homolog of NCBI NO: 34896028 NR Description: ESTs C26093(C11622),AU090634(C12429) correspond a region of the predicted gene.~Similar to Arabidopsis thaliana
  misc_feature (47)..(197): Homolog of NCBI NO: 15230869 NR Description: bHLH protein family [Arabidopsis thaliana]
  misc_feature (47)..(241): Homolog of NCBI NO: 18409132 NR Description: bHLH protein family [Arabidopsis thaliana]
  misc_feature (29)..(245): Homolog of NCBI NO: 15229004 NR Description: bHLH protein family [Arabidopsis thaliana]
  misc_feature (1)..(245): Homolog of NCBI NO: 18491261 NR Description: At2g41130/T3K9.10 [Arabidopsis thaliana]
  misc_feature (1)..(245): Homolog of NCBI NO: 15226839 NR Description: bHLH protein family [Arabidopsis thaliana]
MLYSFLAGNEVGGGGYCVSGDYMTTMQSLCGSSSSTSSYYPLAISGIGETMAQDRALAALRNHKEAERRRRERINSHLNKLRNVLSCNSKTDKATLLAKVVQRVRELKQQTLETSDSDQTLLPSETDEISVLHFGDYSNDGHIIFKASLCCEDRSDLLPDLMEILKSLNMKTLRAEMVTIGGRTRSVLVVAADKEMHGVESVHFLQNALKSLLERSSKSLMERSSGGGGGERSKRRRALDHIIMV

SEQ ID NO: 42161 - protein, 223 aa, Arabidopsis thaliana
  peptide (1)..(223): Ceres Seq. ID no. 13592779
  misc_feature (37)..(86): Pfam Name: Helix-loop-helix DNA-binding domain Pfam Description: Helix-loop-helix DNA-binding domain
  misc_feature (1)..(206): Homolog of NCBI NO: 15233658 NR Description: bHLH protein family [Arabidopsis thaliana]
  misc_feature (1)..(206): Homolog of NCBI NO: 33111975 NR Description: putative bHLH131 transcription factor
  misc_feature (31)..(212): Homolog of NCBI NO: 34904034 NR Description: P0665D10.15 [Oryza sativa (japonica
  misc_feature (10)..(215): Homolog of NCBI NO: 15225658 NR Description: bHLH protein family [Arabidopsis thaliana]
  misc_feature (23)..(218): Homolog of NCBI NO: 34896028 NR Description: ESTs C26093(C11622),AU090634(C12429) correspond a region of the predicted gene.~Similar to Arabidopsis thaliana
  misc_feature (25)..(175): Homolog of NCBI NO: 15230869 NR Description: bHLH protein family [Arabidopsis thaliana]
  misc_feature (25)..(219): Homolog of NCBI NO: 18409132 NR Description: bHLH protein family [Arabidopsis thaliana]
  misc_feature (7)..(223): Homolog of NCBI NO: 15229004 NR Description: bHLH protein family [Arabidopsis thaliana]
  misc_feature (1)..(223): Homolog of NCBI NO: 18491261 NR Description: At2g41130/T3K9.10 [Arabidopsis thaliana]
  misc_feature (1)..(223): Homolog of NCBI NO: 15226839 NR Description: bHLH protein family [Arabidopsis thaliana]
MTTMQSLCGSSSSTSSYYPLAISGIGETMAQDRALAALRNHKEAERRRRERINSHLNKLRNVLSCNSKTDKATLLAKVVQRVRELKQQTLETSDSDQTLLPSETDEISVLHFGDYSNDGHIIFKASLCCEDRSDLLPDLMEILKSLNMKTLRAEMVTIGGRTRSVLVVAADKEMHGVESVHFLQNALKSLLERSSKSLMERSSGGGGGERSKRRRALDHIIMV

SEQ ID NO: 42162 - DNA, 1332 bp, Arabidopsis thaliana
  misc_feature (1)..(1332): Ceres Seq. ID no. 12329037
  misc_feature: MA Experiment ID: 108577 Result: Up-regulated in Transcription
  misc_feature: MA Experiment 108577 PARAMETER Experiment Name: At_42deg_Heat_cDNA_P Parameter: Temperature (deg C) Value: 42 vs. 22
  misc_feature: MA Experiment 108577 PARAMETER Experiment Name: At_42deg_Heat_cDNA_P Parameter: Timepoint (hr) Value: 6
  misc_feature: MA Experiment 108577 PARAMETER Experiment Name: At_42deg_Heat_cDNA_P Parameter: Tissue Value: Aerial
  misc_feature: MA Experiment ID: 20000087 Result: Up-regulated in Transcription
  misc_feature: MA Experiment 20000087 PARAMETER Experiment Name: At_100uM_ABA_Mutants_cDNA_P Parameter: Plant Line Value: WS
  misc_feature: MA Experiment 20000087 PARAMETER Experiment Name: At_100uM_ABA_Mutants_cDNA_P Parameter: Timepoint (hr) Value: 6
  misc_feature: MA Experiment 20000087 PARAMETER Experiment Name: At_100uM_ABA_Mutants_cDNA_P Parameter: Tissue Value: Aerial
  misc_feature: MA Experiment 20000087 PARAMETER Experiment Name: At_100uM_ABA_Mutants_cDNA_P Parameter: Treatment Value: 100uM ABA vs. No Treatment
  misc_feature: MA Experiment ID: 20000111 Result: Up-regulated in Transcription
  misc_feature: MA Experiment 20000111 PARAMETER Experiment Name: At_42deg_Heat_cDNA_P Parameter: Temperature (deg C) Value: 42 vs. 22
  misc_feature: MA Experiment 20000111 PARAMETER Experiment Name: At_42deg_Heat_cDNA_P Parameter: Timepoint (hr) Value: 6
  misc_feature: MA Experiment 20000111 PARAMETER Experiment Name: At_42deg_Heat_cDNA_P Parameter: Tissue Value: Aerial
  misc_feature: MA Experiment ID: 20000180 Result: Up-regulated in Transcription
  misc_feature: MA Experiment 20000180 PARAMETER Experiment Name: At_Germinating_Seeds_P Parameter: Age (hr) Value: 24 vs. 0
  misc_feature: MA Experiment 20000180 PARAMETER Experiment Name: At_Germinating_Seeds_P Parameter: Tissue Value: Germinating Seeds
  misc_feature: MA Experiment ID: 20000224 Result: Up-regulated in Transcription
  misc_feature: MA Experiment ID: 20000234 Result: Down-regulated in Transcription
  misc_feature: MA Experiment 20000234 PARAMETER Experiment Name: At_Siliques_P Parameter: Age (day) Value: 21
  misc_feature: MA Experiment 20000234 PARAMETER Experiment Name: At_Siliques_P Parameter: Organism Value: A. thaliana
  misc_feature: MA Experiment 20000234 PARAMETER Experiment Name: At_Siliques_P Parameter: Plant Line Value: WS
  misc_feature: MA Experiment 20000234 PARAMETER Experiment Name: At_Siliques_P Parameter: Tissue Value: Less Than 5mm Siliques vs. Whole Plant
  misc_feature: MA Experiment ID: 20000264 Result: Down-regulated in Transcription
  misc_feature: MA Experiment 20000264 PARAMETER Experiment Name: At_Open_Flower_P Parameter: Age (day) Value: 21
  misc_feature: MA Experiment 20000264 PARAMETER Experiment Name: At_Open_Flower_P Parameter: Plant Line Value: WS
  misc_feature: MA Experiment 20000264 PARAMETER Experiment Name: At_Open_Flower_P Parameter: Tissue Value: Open Flower vs. Whole Plant
  misc_feature: MA Experiment ID: 20000265 Result: Down-regulated in Transcription
  misc_feature: MA Experiment 20000265 PARAMETER Experiment Name: At_Open_Flower_P Parameter: Age (day) Value: 21
  misc_feature: MA Experiment 20000265 PARAMETER Experiment Name: At_Open_Flower_P Parameter: Plant Line Value: WS
  misc_feature: MA Experiment 20000265 PARAMETER Experiment Name: At_Open_Flower_P Parameter: Tissue Value: Closed Flower vs. Whole Plant
  misc_feature: MA Experiment ID: 20000286 Result: Down-regulated in Transcription
  misc_feature: MA Experiment 20000286 PARAMETER Experiment Name: At_Open_Flower_P Parameter: Age (day) Value: 21
  misc_feature: MA Experiment 20000286 PARAMETER Experiment Name: At_Open_Flower_P Parameter: Plant Line Value: WS
  misc_feature: MA Experiment 20000286 PARAMETER Experiment Name: At_Open_Flower_P Parameter: Tissue Value: Half Open vs. Whole Plant
aacattgttgcgaagaccagactctcagactcagactcgggagatggcagtccactactggacagccctgtttctattgctgtcatgccttttctgtatttcaaatgctagtgctggcgatgctgatccagattacaggacatgtgtttcagaatgtgagataagcggttgtgttggaccactttgctttcctcagtgcaattcttcatccgatggtggtccatggtacatccaagaacctctgtatttacaatggaaaaaatggggttgtcaaggtgattgccgttatcaatgtatggttaatagagagagtgaacgggaaactctcggtcaagccccagtcaagtaccatggtaaatggcccttcaagcgtgtacttgggattcaggagcctgcttctgttgctttctctgtactcaacctagcaatgcatttccatggttggctttcctttttcatcatgatctactataagttacctctgaaacaagataggacagcgtactatgaatacgtcggtttgtggcatatctacggtctcctgtccatgaactcttggttctggagtgctgttttccacagccgggatgttgaccttacagagaggttggactactcatccgcagtagcgattctcggattctcactcatcttagccattttacgaacatttgatattcgggtcgaggctgcaagggtcatggtatccgctccaatactagcttttgtaaccacccacatactctacataaacttctacaaactcgactatggctggaacatgattgtgtgtgtggcaatgggagtctcacagcttttcctatgggcaagatgggccgctgtctcaagccacccttctaattggaaactttgggtggttgtgatagctggaggattagccatgcttctagagatatatgattttcctccatatgaaggctacttcgatgctcactcgatctggcacgctgccacaattcccttaaccattctctggtggagcttcattagagacgatgctgagttcagaacttccagcctcctcaagaaaactaagacgaaggcaaagtgagtctctttgctaagttttacaaggatttttattcgaccatacaagtatgcagacacgagggaaaaacaaaaagtggaaatggatttaaacatcacgaagaaggcagagtcttttgtttaaagctagctggtttatggattcacaggtttcttcagtttttttttttttttttttttttattgttacataaactgtggaatttgctttgagcctttcagtgtttttctttggccttacttttggttaagaaagatttcgat

SEQ ID NO: 42163 - protein, 356 aa, Arabidopsis thaliana
  peptide (1)..(356): Ceres Seq. ID no. 12329038
  misc_feature (78)..(348): Pfam Name: Per1-like Pfam Description: Per1-like
  misc_feature (22)..(119): Homolog of NCBI NO: 22761646 NR Description: unnamed protein product [Homo sapiens]
  misc_feature (178)..(356): Homolog of NCBI NO: 22761646 NR Description: unnamed protein product [Homo sapiens]
  misc_feature (22)..(356): Homolog of NCBI NO: 28372501 NR Description: CAB2 [Homo sapiens]
  misc_feature (21)..(355): Homolog of NCBI NO: 19921698 NR Description: CG3271-PB [Drosophila melanogaster]
  misc_feature (62)..(356): Homolog of NCBI NO: 32949296 NR Description: CAB2 protein [Homo sapiens]
  misc_feature (49)..(195): Homolog of NCBI NO: 20260110 NR Description: unknown protein [Arabidopsis thaliana]
  misc_feature (77)..(352): Homolog of NCBI NO: 10176931 NR Description: gene_id:MTG10.16~unknown protein [Arabidopsis
  misc_feature (20)..(352): Homolog of NCBI NO: 37536224 NR Description: unknown protein [Oryza sativa (japonica
  misc_feature (20)..(352): Homolog of NCBI NO: 18424554 NR Description: putative protein
  misc_feature (15)..(356): Homolog of NCBI NO: 15219283 NR Description: unknown protein; protein id: At1g16560.1
TLLRRPDSQTQTREMAVHYWTALFLLLSCLFCISNASAGDADPDYRTCVSECEISGCVGPLCFPQCNSSSDGGPWYIQEPLYLQWKKWGCQGDCRYQCMVNRESERETLGQAPVKYHGKWPFKRVLGIQEPASVAFSVLNLAMHFHGWLSFFIMIYYKLPLKQDRTAYYEYVGLWHIYGLLSMNSWFWSAVFHSRDVDLTERLDYSSAVAILGFSLILAILRTFDIRVEAARVMVSAPILAFVTTHILYINFYKLDYGWNMIVCVAMGVSQLFLWARWAAVSSHPSNWKLWVVVIAGGLAMLLEIYDFPPYEGYFDAHSIWHAATIPLTILWWSFIRDDAEFRTSSLLKKTKTKAK

SEQ ID NO: 42164 - protein, 342 aa, Arabidopsis thaliana
  peptide (1)..(342): Ceres Seq. ID no. 12329039
  misc_feature (64)..(334): Pfam Name: Per1-like Pfam Description: Per1-like
  misc_feature (8)..(105): Homolog of NCBI NO: 22761646 NR Description: unnamed protein product [Homo sapiens]
  misc_feature (164)..(342): Homolog of NCBI NO: 22761646 NR Description: unnamed protein product [Homo sapiens]
  misc_feature (8)..(342): Homolog of NCBI NO: 28372501 NR Description: CAB2 [Homo sapiens]
  misc_feature (7)..(341): Homolog of NCBI NO: 19921698 NR Description: CG3271-PB [Drosophila melanogaster]
  misc_feature (48)..(342): Homolog of NCBI NO: 32949296 NR Description: CAB2 protein [Homo sapiens]
  misc_feature (35)..(181): Homolog of NCBI NO: 20260110 NR Description: unknown protein [Arabidopsis thaliana]
  misc_feature (63)..(338): Homolog of NCBI NO: 10176931 NR Description: gene_id:MTG10.16~unknown protein [Arabidopsis
  misc_feature (6)..(338): Homolog of NCBI NO: 37536224 NR Description: unknown protein [Oryza sativa (japonica
  misc_feature (6)..(338): Homolog of NCBI NO: 18424554 NR Description: putative protein
  misc_feature (1)..(342): Homolog of NCBI NO: 15219283 NR Description: unknown protein; protein id: At1g16560.1
MAVHYWTALFLLLSCLFCISNASAGDADPDYRTCVSECEISGCVGPLCFPQCNSSSDGGPWYIQEPLYLQWKKWGCQGDCRYQCMVNRESERETLGQAPVKYHGKWPFKRVLGIQEPASVAFSVLNLAMHFHGWLSFFIMIYYKLPLKQDRTAYYEYVGLWHIYGLLSMNSWFWSAVFHSRDVDLTERLDYSSAVAILGFSLILAILRTFDIRVEAARVMVSAPILAFVTTHILYINFYKLDYGWNMIVCVAMGVSQLFLWARWAAVSSHPSNWKLWVVVIAGGLAMLLEIYDFPPYEGYFDAHSIWHAATIPLTILWWSFIRDDAEFRTSSLLKKTKTKAK

SEQ ID NO: 42165 - protein, 258 aa, Arabidopsis thaliana
  peptide (1)..(258): Ceres Seq. ID no. 12329040
  misc_feature (1)..(250): Pfam Name: Per1-like Pfam Description: Per1-like
  misc_feature (1)..(21): Homolog of NCBI NO: 22761646 NR Description: unnamed protein product [Homo sapiens]
  misc_feature (80)..(258): Homolog of NCBI NO: 22761646 NR Description: unnamed protein product [Homo sapiens]
  misc_feature (1)..(258): Homolog of NCBI NO: 28372501 NR Description: CAB2 [Homo sapiens]
  misc_feature (1)..(257): Homolog of NCBI NO: 19921698 NR Description: CG3271-PB [Drosophila melanogaster]
  misc_feature (1)..(258): Homolog of NCBI NO: 32949296 NR Description: CAB2 protein [Homo sapiens]
  misc_feature (1)..(97): Homolog of NCBI NO: 20260110 NR Description: unknown protein [Arabidopsis thaliana]
  misc_feature (1)..(254): Homolog of NCBI NO: 10176931 NR Description: gene_id:MTG10.16~unknown protein [Arabidopsis
  misc_feature (1)..(254): Homolog of NCBI NO: 37536224 NR Description: unknown protein [Oryza sativa (japonica
  misc_feature (1)..(254): Homolog of NCBI NO: 18424554 NR Description: putative protein
  misc_feature (1)..(258): Homolog of NCBI NO: 15219283 NR Description: unknown protein; protein id: At1g16560.1
MVNRESERETLGQAPVKYHGKWPFKRVLGIQEPASVAFSVLNLAMHFHGWLSFFIMIYYKLPLKQDRTAYYEYVGLWHIYGLLSMNSWFWSAVFHSRDVDLTERLDYSSAVAILGFSLILAILRTFDIRVEAARVMVSAPILAFVTTHILYINFYKLDYGWNMIVCVAMGVSQLFLWARWAAVSSHPSNWKLWVVVIAGGLAMLLEIYDFPPYEGYFDAHSIWHAATIPLTILWWSFIRDDAEFRTSSLLKKTKTKAK

SEQ ID NO: 42166 - DNA, 1485 bp, Arabidopsis thaliana
  misc_feature (1)..(1485): Ceres Seq. ID no. 13497269
  misc_feature: MA Experiment ID: 108579 Result: Down-regulated in Transcription
  misc_feature: MA Experiment 108579 PARAMETER Experiment Name: At_4deg_Cold_cDNA_P Parameter: Temperature (deg C) Value: 4 vs. 22
  misc_feature: MA Experiment 108579 PARAMETER Experiment Name: At_4deg_Cold_cDNA_P Parameter: Timepoint (hr) Value: 6
  misc_feature: MA Experiment 108579 PARAMETER Experiment Name: At_4deg_Cold_cDNA_P Parameter: Tissue Value: Aerial
  misc_feature: MA Experiment ID: 20000264 Result: Down-regulated in Transcription
  misc_feature: MA Experiment 20000264 PARAMETER Experiment Name: At_Open_Flower_P Parameter: Age (day) Value: 21
  misc_feature: MA Experiment 20000264 PARAMETER Experiment Name: At_Open_Flower_P Parameter: Plant Line Value: WS
  misc_feature: MA Experiment 20000264 PARAMETER Experiment Name: At_Open_Flower_P Parameter: Tissue Value: Open Flower vs. Whole Plant
  misc_feature: MA Experiment ID: 20000265 Result: Down-regulated in Transcription
  misc_feature: MA Experiment 20000265 PARAMETER Experiment Name: At_Open_Flower_P Parameter: Age (day) Value: 21
  misc_feature: MA Experiment 20000265 PARAMETER Experiment Name: At_Open_Flower_P Parameter: Plant Line Value: WS
  misc_feature: MA Experiment 20000265 PARAMETER Experiment Name: At_Open_Flower_P Parameter: Tissue Value: Closed Flower vs. Whole Plant
gaaattgtcctctcagttcctacgcgaagttttcaacagattcgccggagaatcttcgaatcaacggcggagaaatggctctatcacgcctctcatcacgatccaacatcatcactcgtcccttctccgccgccttcagccgattaatctcaacggacacaactccgatcacaatcgagacttcgcttcctttcacagctcacttatgtgatccaccgtcacgctccgtcgaatcatcgagtcaagagcttctcgatttcttcagaaccatggcgttgatgcgacgtatggaaatcgcagccgattcgctttacaaagcgaagctaatccgagggttttgtcatctctacgacggccaagaagctgtagctataggcatggaagctgcgattacaaagaaagacgcgattattactgcttatcgtgatcactgtattttcttaggtcgtggtggttcgcttcatgaggttttctcagagcttatgggaagacaagctggttgttctaaagggaaaggtggatctatgcacttctataagaaggaatcgtcgttttacggtggtcatgggattgttggtgctcaggttccattaggttgtggtattgcttttgctcagaagtataacaaggaagaggctgtcacatttgctttgtatggtgatggtgctgcgaatcagggacagttgtttgaagctttgaatatttctgctctttgggatttgcctgcaattttggtctgcgagaacaatcactatggaatgggaactgctgaatggagagccgctaagagtccatcttactacaagcgtggtgattatgttcctggactcaaggtagatggtatggatgcatttgctgtcaaacaagcttgcaaatttgctaagcagcatgcgttggagaaggggccaataattcttgagatggacacatacaggtaccacggtcactccatgtctgatcctgggagcacataccgtacccgagatgagatatctggtgtgaggcaggaacgggatccaattgagagaataaagaagctggtactatctcatgacctagcaaccgagaaagagcttaaggatatggagaaggaaattagaaaagaagtagatgacgccattgccaaagctaaggattgcccgatgccagagccttctgagctctttaccaatgtgtatgtgaagggatttggcaccgagtcatttggacctgacagaaaagaagtcaaagcttcccttccatgatcatggagctcttgttcgttaaactgccacgtgtcatgagaaagttggctgatagagaaatctatgaatatgaataaagatctgattgtatactctctctctcccccccccccccccttctgagttttaatctctctgtatctttgtttacaaacataaggagaaacatgttattcttgtgaagctttagtagtctcgtgtttaatattcaagcaatcgagttgagatctcattttgtgct

SEQ ID NO: 42167 - protein, 413 aa, Arabidopsis thaliana
  peptide (1)..(413): Ceres Seq. ID no. 13497270
  misc_feature (27)..(413): Homolog of NCBI NO: 28465343 NR Description: pyruvate dehydrogenase E1alpha subunit [Beta
  misc_feature (27)..(413): Homolog of NCBI NO: 3851005 NR Description: pyruvate dehydrogenase E1 alpha subunit [Zea mays]
  misc_feature (25)..(413): Homolog of NCBI NO: 12003246 NR Description: pyruvate dehydrogenase [Lycopersicon esculentum]
  misc_feature (25)..(413): Homolog of NCBI NO: 1709453 NR Description: Pyruvate dehydrogenase E1 component alpha
  misc_feature (25)..(413): Homolog of NCBI NO: 23306664 NR Description: pyruvate dehydrogenase E1a-like subunit IAR4
  misc_feature (25)..(413): Homolog of NCBI NO: 15221692 NR Description: pyruvate dehydrogenase E1 alpha subunit
  misc_feature (25)..(413): Homolog of NCBI NO: 1709449 NR Description: Pyruvate dehydrogenase E1 component alpha
  misc_feature (25)..(413): Homolog of NCBI NO: 2117533 NR Description: pyruvate dehydrogenase (lipoamide) (EC 1.2.4.1)
  misc_feature (25)..(413): Homolog of NCBI NO: 13430788 NR Description: putative pyruvate dehydrogenase e1 alpha subunit
  misc_feature (25)..(413): Homolog of NCBI NO: 15218940 NR Description: pyruvate dehydrogenase e1 alpha subunit -related
NCPLSSYAKFSTDSPENLRINGGEMALSRLSSRSNIITRPFSAAFSRLISTDTTPITIETSLPFTAHLCDPPSRSVESSSQELLDFFRTMALMRRMEIAADSLYKAKLIRGFCHLYDGQEAVAIGMEAAITKKDAIITAYRDHCIFLGRGGSLHEVFSELMGRQAGCSKGKGGSMHFYKKESSFYGGHGIVGAQVPLGCGIAFAQKYNKEEAVTFALYGDGAANQGQLFEALNISALWDLPAILVCENNHYGMGTAEWRAAKSPSYYKRGDYVPGLKVDGMDAFAVKQACKFAKQHALEKGPIILEMDTYRYHGHSMSDPGSTYRTRDEISGVRQERDPIERIKKLVLSHDLATEKELKDMEKEIRKEVDDAIAKAKDCPMPEPSELFTNVYVKGFGTESFGPDRKEVKASLP

SEQ ID NO: 42168 - protein, 389 aa, Arabidopsis thaliana; identical to SEQ ID NO: 24019
  peptide (1)..(389): Ceres Seq. ID no. 13497271
  misc_feature (3)..(389): Homolog of NCBI NO: 28465343 NR Description: pyruvate dehydrogenase E1alpha subunit [Beta
  misc_feature (3)..(389): Homolog of NCBI NO: 3851005 NR Description: pyruvate dehydrogenase E1 alpha subunit [Zea mays]
  misc_feature (1)..(389): Homolog of NCBI NO: 12003246 NR Description: pyruvate dehydrogenase [Lycopersicon esculentum]
  misc_feature (1)..(389): Homolog of NCBI NO: 1709453 NR Description: Pyruvate dehydrogenase E1 component alpha
  misc_feature (1)..(389): Homolog of NCBI NO: 23306664 NR Description: pyruvate dehydrogenase E1a-like subunit IAR4
  misc_feature (1)..(389): Homolog of NCBI NO: 15221692 NR Description: pyruvate dehydrogenase E1 alpha subunit
  misc_feature (1)..(389): Homolog of NCBI NO: 1709449 NR Description: Pyruvate dehydrogenase E1 component alpha
  misc_feature (1)..(389): Homolog of NCBI NO: 2117533 NR Description: pyruvate dehydrogenase (lipoamide) (EC 1.2.4.1)
  misc_feature (1)..(389): Homolog of NCBI NO: 13430788 NR Description: putative pyruvate dehydrogenase e1 alpha subunit
  misc_feature (1)..(389): Homolog of NCBI NO: 15218940 NR Description: pyruvate dehydrogenase e1 alpha subunit -related

SEQ ID NO: 42169 - protein, 324 aa, Arabidopsis thaliana; identical to SEQ ID NO: 24020
  peptide (1)..(324): Ceres Seq. ID no. 13497272
  misc_feature (1)..(324): Homolog of NCBI NO: 28465343 NR Description: pyruvate dehydrogenase E1alpha subunit [Beta
  misc_feature (1)..(324): Homolog of NCBI NO: 3851005 NR Description: pyruvate dehydrogenase E1 alpha subunit [Zea mays]
  misc_feature (1)..(324): Homolog of NCBI NO: 12003246 NR Description: pyruvate dehydrogenase [Lycopersicon esculentum]
  misc_feature (1)..(324): Homolog of NCBI NO: 1709453 NR Description: Pyruvate dehydrogenase E1 component alpha
  misc_feature (1)..(324): Homolog of NCBI NO: 23306664 NR Description: pyruvate dehydrogenase E1a-like subunit IAR4
  misc_feature (1)..(324): Homolog of NCBI NO: 15221692 NR Description: pyruvate dehydrogenase E1 alpha subunit
  misc_feature (1)..(324): Homolog of NCBI NO: 1709449 NR Description: Pyruvate dehydrogenase E1 component alpha
  misc_feature (1)..(324): Homolog of NCBI NO: 2117533 NR Description: pyruvate dehydrogenase (lipoamide) (EC 1.2.4.1)
  misc_feature (1)..(324): Homolog of NCBI NO: 13430788 NR Description: putative pyruvate dehydrogenase e1 alpha subunit
  misc_feature (1)..(324): Homolog of NCBI NO: 15218940 NR Description: pyruvate dehydrogenase e1 alpha subunit -related

SEQ ID NO: 42170 - DNA, 1650 bp, Arabidopsis thaliana
  misc_feature (1)..(1650): Ceres Seq. ID no. 12326297
  misc_feature: MA Experiment ID: 108434 Result: Up-regulated in Transcription
  misc_feature: MA Experiment 108434 PARAMETER Experiment Name: At_Root_Tips_cDNA_P Parameter: Tissue Value: Root Tips
  misc_feature: MA Experiment ID: 108462 Result: Down-regulated in Transcription
  misc_feature: MA Experiment 108462 PARAMETER Experiment Name: At_Germinating_Seeds_cDNA_P Parameter: Age (day) Value: 2 vs. 0
  misc_feature: MA Experiment 108462 PARAMETER Experiment Name: At_Germinating_Seeds_cDNA_P Parameter: Tissue Value: Germinating Seeds
  misc_feature: MA Experiment ID: 108463 Result: Down-regulated in Transcription
  misc_feature: MA Experiment 108463 PARAMETER Experiment Name: At_Germinating_Seeds_cDNA_P Parameter: Age (day) Value: 3 vs. 0
  misc_feature: MA Experiment 108463 PARAMETER Experiment Name: At_Germinating_Seeds_cDNA_P Parameter: Tissue Value: Germinating Seeds
  misc_feature: MA Experiment ID: 108464 Result: Down-regulated in Transcription
  misc_feature: MA Experiment 108464 PARAMETER Experiment Name: At_Germinating_Seeds_cDNA_P Parameter: Age (day) Value: 4 vs. 0
  misc_feature: MA Experiment 108464 PARAMETER Experiment Name: At_Germinating_Seeds_cDNA_P Parameter: Tissue Value: Germinating Seeds
  misc_feature: MA Experiment ID: 20000111 Result: Up-regulated in Transcription
  misc_feature: MA Experiment 20000111 PARAMETER Experiment Name: At_42deg_Heat_cDNA_P Parameter: Temperature (deg C) Value: 42 vs. 22
  misc_feature: MA Experiment 20000111 PARAMETER Experiment Name: At_42deg_Heat_cDNA_P Parameter: Timepoint (hr) Value: 6
  misc_feature: MA Experiment 20000111 PARAMETER Experiment Name: At_42deg_Heat_cDNA_P Parameter: Tissue Value: Aerial
  misc_feature: MA Experiment ID: 20000227 Result: Up-regulated in Transcription
  misc_feature: MA Experiment 20000227 PARAMETER Experiment Name: At_Root-Tips-vs-Tops_P Parameter: Tissue Value: Root Tips vs. Root Tops
  misc_feature: MA Experiment ID: 20000794 Result: Down-regulated in Transcription
  misc_feature: MA Experiment 20000794 PARAMETER Experiment Name: At_Petals_P Parameter: Age (day) Value: 23-25 days
  misc_feature: MA Experiment 20000794 PARAMETER Experiment Name: At_Petals_P Parameter: Plant Line Value: WS
  misc_feature: MA Experiment 20000794 PARAMETER Experiment Name: At_Petals_P Parameter: Tissue Value: Petals vs. Whole plant
  misc_feature: MA Experiment ID: 20001558 Result: Up-regulated in Transcription
  misc_feature: MA Experiment 20001558 PARAMETER Experiment Name: At_Drought_Soil_Dry_P Parameter: Age (day) Value: 27
  misc_feature: MA Experiment 20001558 PARAMETER Experiment Name: At_Drought_Soil_Dry_P Parameter: Organism Value: A. thaliana
  misc_feature: MA Experiment 20001558 PARAMETER Experiment Name: At_Drought_Soil_Dry_P Parameter: Plant Line Value: WS
  misc_feature: MA Experiment 20001558 PARAMETER Experiment Name: At_Drought_Soil_Dry_P Parameter: Post Timepoint (hr) Value: 6
  misc_feature: MA Experiment 20001558 PARAMETER Experiment Name: At_Drought_Soil_Dry_P Parameter: Post-Treatment Value: Re-Water vs. No Drought
  misc_feature: MA Experiment 20001558 PARAMETER Experiment Name: At_Drought_Soil_Dry_P Parameter: Timepoint (day) Value: 13
  misc_feature: MA Experiment 20001558 PARAMETER Experiment Name: At_Drought_Soil_Dry_P Parameter: Treatment Value: Drought vs. No Drought
  misc_feature: MA Experiment ID: 20001559 Result: Up-regulated in Transcription
  misc_feature: MA Experiment 20001559 PARAMETER Experiment Name: At_Drought_Soil_Dry_P Parameter: Age (day) Value: 28
  misc_feature: MA Experiment 20001559 PARAMETER Experiment Name: At_Drought_Soil_Dry_P Parameter: Organism Value: A. thaliana
  misc_feature: MA Experiment 20001559 PARAMETER Experiment Name: At_Drought_Soil_Dry_P Parameter: Plant Line Value: WS
  misc_feature: MA Experiment 20001559 PARAMETER Experiment Name: At_Drought_Soil_Dry_P Parameter: Post Timepoint (hr) Value: 29
  misc_feature: MA Experiment 20001559 PARAMETER Experiment Name: At_Drought_Soil_Dry_P Parameter: Post-Treatment Value: Re-Water vs. No Drought
  misc_feature: MA Experiment 20001559 PARAMETER Experiment Name: At_Drought_Soil_Dry_P Parameter: Timepoint (day) Value: 14
  misc_feature: MA Experiment 20001559 PARAMETER Experiment Name: At_Drought_Soil_Dry_P Parameter: Treatment Value: Drought vs. No Drought
  misc_feature: MA Experiment ID: 20001905 Result: Down-regulated in Transcription
  misc_feature: MA Experiment 20001905 PARAMETER Experiment Name: At_Drought_Reproduction_P Parameter: Age (day) Value: 40
  misc_feature: MA Experiment 20001905 PARAMETER Experiment Name: At_Drought_Reproduction_P Parameter: Organism Value: A. thaliana
  misc_feature: MA Experiment 20001905 PARAMETER Experiment Name: At_Drought_Reproduction_P Parameter: Plant Line Value: WS
  misc_feature: MA Experiment 20001905 PARAMETER Experiment Name: At_Drought_Reproduction_P Parameter: Timepoint (day) Value: 10
  misc_feature: MA Experiment 20001905 PARAMETER Experiment Name: At_Drought_Reproduction_P Parameter: Tissue Value: Rosettes
  misc_feature: MA Experiment 20001905 PARAMETER Experiment Name: At_Drought_Reproduction_P Parameter: Treatment Value: Drought vs. No Drought
aatttccacactctaatactatttctcgccgccgcttttgtatcttcttctctctcgctttgctctctcggaattgtttttgcagaaagctctctcatctgaactcagaaaatctccgagttcgtatatcttctccgtttgagcaatggcgttggtcatgcacacatacaagggaaacaaaggtgccaataaggcacttattgctgcagagtatgcgggtgtgaagatcgaggagtccgcagactttcagatgggcgtcactaacaagtcacctgagttccttaagatgaaccctattggaaaggttcctgtgcttgagactcctgaaggtcccatatttgagagcaatgccattgcccgatatgtgagccgtaagaatggtgacaactctttgaatggatcctcccttattgaatacgctcacattgagcaatggatcgatttctcctcattggagattgatgctaacatgttgaagtggtttgctccaagaatgggctatgctcccttctctgccccagctgaggaagcggcaatttctgcattgaagagaggacttgaggctctgaacacacatctcgcctccaacactttccttgttggacactctgtcacccttgctgatattgtcacaatctgcaacttgaacttgggatttgccaccgtgatgaccaagaaatttacctctgcattccctcatgttgagagatacttctggacaatggttaaccagccagaattcaagaaggtgttgggtgatgccaaacaaaccgaagctgtccctccagttcctactaagaaagctccacagcctgctaagcccaaggaggagcccaagaaggcagcccctgtagcagaggcaccaaagcctgctgaggaggaggaagcaccaaagcctaaagccaagaatcctcttgacttgctaccaccaagcccaatggttctcgatgactggaagaggctttactcgaacaccaaatccaacttccgtgaggttgctatcaaaggattctgggacatgtatgacccggaggggtactcactatggttctgtgactataagtacaacgatgagaacatggtctcctttgttacactcaacaaggtaggagggttccttcagcgtatggacttggcacgtaaatactcctttggaaagatgcttatttgcgggtcagagggtcctttcaaggtgaagggtttatggcttttccgtggaccagagatccccaagttcataatggatgaggtgtacgacatggagctgtacgagtggactaaggttgatatctccgatgaagcacagaaggagcgtgttagccagatgattgaagacgctgagccatttgaaggcgaggctcttttggacgccaaatgctttaagtgaaaaggctctttgtatctccgtagaggtttactctgttactcgtgttttgataccttctagagagtccttaccaccttttgaatcgtactcgggtttaagaactagttgcttctcaatgttattttgacagaatattgttcttaaatacattacaacttctagttattgtttttattttgttttttattatccaaactcgtgtgtgtgacattctctctttaaattagttgcttggaagatgcaaagaatctcgtttaatgggg

SEQ ID NO: 42171 - protein, 413 aa, Arabidopsis thaliana
  peptide (1)..(413): Ceres Seq. ID no. 12326298
  misc_feature (252)..(360): Pfam Name: Elongation factor 1 gamma, conserved domain Pfam Description: Elongation factor 1 gamma, conserved domain
  misc_feature (70)..(413): Homolog of NCBI NO: 19423960 NR Description: unknown protein [Arabidopsis thaliana]
  misc_feature (1)..(413): Homolog of NCBI NO: 13626392 NR Description: Elongation factor 1-gamma (EF-1-gamma) (eEF-1B
  misc_feature (10)..(413): Homolog of NCBI NO: 29367403 NR Description: elongation factor 1 gamma-like protein
  misc_feature (1)..(413): Homolog of NCBI NO: 13626515 NR Description: Elongation factor 1-gamma (EF-1-gamma) (eEF-1B
  misc_feature (1)..(413): Homolog of NCBI NO: 18391048 NR Description: elongation factor 1B-gamma, putative (eEF-1B
  misc_feature (1)..(413): Homolog of NCBI NO: 14334818 NR Description: putative elongation factor 1B gamma [Arabidopsis
  misc_feature (1)..(413): Homolog of NCBI NO: 15223649 NR Description: elongation factor 1B-gamma, putative (eEF-1B
MALVMHTYKGNKGANKALIAAEYAGVKIEESADFQMGVTNKSPEFLKMNPIGKVPVLETPEGPIFESNAIARYVSRKNGDNSLNGSSLIEYAHIEQWIDFSSLEIDANMLKWFAPRMGYAPFSAPAEEAAISALKRGLEALNTHLASNTFLVGHSVTLADIVTICNLNLGFATVMTKKFTSAFPHVERYFWTMVNQPEFKKVLGDAKQTEAVPPVPTKKAPQPAKPKEEPKKAAPVAEAPKPAEEEEAPKPKAKNPLDLLPPSPMVLDDWKRLYSNTKSNFREVAIKGFWDMYDPEGYSLWFCDYKYNDENMVSFVTLNKVGGFLQRMDLARKYSFGKMLICGSEGPFKVKGLWLFRGPEIPKFIMDEVYDMELYEWTKVDISDEAQKERVSQMIEDAEPFEGEALLDAKCFK

SEQ ID NO: 42172 - protein, 409 aa, Arabidopsis thaliana
  peptide (1)..(409): Ceres Seq. ID no. 12326299
  misc_feature (248)..(356): Pfam Name: Elongation factor 1 gamma, conserved domain Pfam Description: Elongation factor 1 gamma, conserved domain
  misc_feature (66)..(409): Homolog of NCBI NO: 19423960 NR Description: unknown protein [Arabidopsis thaliana]
  misc_feature (1)..(409): Homolog of NCBI NO: 13626392 NR Description: Elongation factor 1-gamma (EF-1-gamma) (eEF-1B
  misc_feature (6)..(409): Homolog of NCBI NO: 29367403 NR Description: elongation factor 1 gamma-like protein
  misc_feature (1)..(409): Homolog of NCBI NO: 13626515 NR Description: Elongation factor 1-gamma (EF-1-gamma) (eEF-1B
  misc_feature (1)..(409): Homolog of NCBI NO: 18391048 NR Description: elongation factor 1B-gamma, putative (eEF-1B
  misc_feature (1)..(409): Homolog of NCBI NO: 14334818 NR Description: putative elongation factor 1B gamma [Arabidopsis
  misc_feature (1)..(409): Homolog of NCBI NO: 15223649 NR Description: elongation factor 1B-gamma, putative (eEF-1B
MHTYKGNKGANKALIAAEYAGVKIEESADFQMGVTNKSPEFLKMNPIGKVPVLETPEGPIFESNAIARYVSRKNGDNSLNGSSLIEYAHIEQWIDFSSLEIDANMLKWFAPRMGYAPFSAPAEEAAISALKRGLEALNTHLASNTFLVGHSVTLADIVTICNLNLGFATVMTKKFTSAFPHVERYFWTMVNQPEFKKVLGDAKQTEAVPPVPTKKAPQPAKPKEEPKKAAPVAEAPKPAEEEEAPKPKAKNPLDLLPPSPMVLDDWKRLYSNTKSNFREVAIKGFWDMYDPEGYSLWFCDYKYNDENMVSFVTLNKVGGFLQRMDLARKYSFGKMLICGSEGPFKVKGLWLFRGPEIPKFIMDEVYDMELYEWTKVDISDEAQKERVSQMIEDAEPFEGEALLDAKCFK

SEQ ID NO: 42173 - protein, 378 aa, Arabidopsis thaliana
  peptide (1)..(378): Ceres Seq. ID no. 12326300
  misc_feature (217)..(325): Pfam Name: Elongation factor 1 gamma, conserved domain Pfam Description: Elongation factor 1 gamma, conserved domain
  misc_feature (35)..(378): Homolog of NCBI NO: 19423960 NR Description: unknown protein [Arabidopsis thaliana]
  misc_feature (1)..(378): Homolog of NCBI NO: 13626392 NR Description: Elongation factor 1-gamma (EF-1-gamma) (eEF-1B
  misc_feature (1)..(378): Homolog of NCBI NO: 29367403 NR Description: elongation factor 1 gamma-like protein
  misc_feature (1)..(378): Homolog of NCBI NO: 13626515 NR Description: Elongation factor 1-gamma (EF-1-gamma) (eEF-1B
  misc_feature (1)..(378): Homolog of NCBI NO: 18391048 NR Description: elongation factor 1B-gamma, putative (eEF-1B
  misc_feature (1)..(378): Homolog of NCBI NO: 14334818 NR Description: putative elongation factor 1B gamma [Arabidopsis
  misc_feature (1)..(378): Homolog of NCBI NO: 15223649 NR Description: elongation factor 1B-gamma, putative (eEF-1B
MGVTNKSPEFLKMNPIGKVPVLETPEGPIFESNAIARYVSRKNGDNSLNGSSLIEYAHIEQWIDFSSLEIDANMLKWFAPRMGYAPFSAPAEEAAISALKRGLEALNTHLASNTFLVGHSVTLADIVTICNLNLGFATVMTKKFTSAFPHVERYFWTMVNQPEFKKVLGDAKQTEAVPPVPTKKAPQPAKPKEEPKKAAPVAEAPKPAEEEEAPKPKAKNPLDLLPPSPMVLDDWKRLYSNTKSNFREVAIKGFWDMYDPEGYSLWFCDYKYNDENMVSFVTLNKVGGFLQRMDLARKYSFGKMLICGSEGPFKVKGLWLFRGPEIPKFIMDEVYDMELYEWTKVDISDEAQKERVSQMIEDAEPFEGEALLDAKCFK

SEQ ID NO: 42174 - DNA, 1387 bp, Arabidopsis thaliana
  misc_feature (1)..(1387): Ceres Seq. ID no. 12328902
  misc_feature: MA Experiment ID: 108462 Result: Down-regulated in Transcription
  misc_feature: MA Experiment 108462 PARAMETER Experiment Name: At_Germinating_Seeds_cDNA_P Parameter: Age (day) Value: 2 vs. 0
  misc_feature: MA Experiment 108462 PARAMETER Experiment Name: At_Germinating_Seeds_cDNA_P Parameter: Tissue Value: Germinating Seeds
  misc_feature: MA Experiment ID: 108463 Result: Down-regulated in Transcription
  misc_feature: MA Experiment 108463 PARAMETER Experiment Name: At_Germinating_Seeds_cDNA_P Parameter: Age (day) Value: 3 vs. 0
  misc_feature: MA Experiment 108463 PARAMETER Experiment Name: At_Germinating_Seeds_cDNA_P Parameter: Tissue Value: Germinating Seeds
  misc_feature: MA Experiment ID: 108464 Result: Down-regulated in Transcription
  misc_feature: MA Experiment 108464 PARAMETER Experiment Name: At_Germinating_Seeds_cDNA_P Parameter: Age (day) Value: 4 vs. 0
  misc_feature: MA Experiment 108464 PARAMETER Experiment Name: At_Germinating_Seeds_cDNA_P Parameter: Tissue Value: Germinating Seeds
  misc_feature: MA Experiment ID: 20000184 Result: Down-regulated in Transcription
  misc_feature: MA Experiment 20000184 PARAMETER Experiment Name: At_Shoots__P Parameter: Age (day) Value: 7
  misc_feature: MA Experiment 20000184 PARAMETER Experiment Name: At_Shoots__P Parameter: Tissue Value: Shoots vs. Whole Plant
  misc_feature: MA Experiment ID: 20001451 Result: Down-regulated in Transcription
  misc_feature: MA Experiment 20001451 PARAMETER Experiment Name: At_Far-red-induction_P Parameter: Age (day) Value: 7
  misc_feature: MA Experiment 20001451 PARAMETER Experiment Name: At_Far-red-induction_P Parameter: Light Value: Far-red vs. White
  misc_feature: MA Experiment 20001451 PARAMETER Experiment Name: At_Far-red-induction_P Parameter: Organism Value: A. thaliana
  misc_feature: MA Experiment 20001451 PARAMETER Experiment Name: At_Far-red-induction_P Parameter: Plant Line Value: Columbia
  misc_feature: MA Experiment 20001451 PARAMETER Experiment Name: At_Far-red-induction_P Parameter: Timepoint (hr) Value: 24
  misc_feature: MA Experiment 20001451 PARAMETER Experiment Name: At_Far-red-induction_P Parameter: Tissue Value: Whole Plant
agattaaaaacctcagctcgcaggaaagaaatcagcgaatttgtgaacttcagagaaaaattggtcgtcaatggcgtctgctctatgtagaactgcaagccgtcttcgttccgttcaactttttcgtcggattcgcgtctccagcgatctactatcggcatcgtctccttctccggcgtgcatctccgacgcgcttcgtcatggagatttctctcttcctcgatcgtttttttcacttaactgtggaatcgaaatgctgaaaatggatcagagatgtttgctgagtacttctgcttctgatactacctcgaaacatgactcaggtaaaccggaaacaaaatcttcggagaaaaatgagaaatctggaggatcggagagttctgatggtggttcagatcataaaaacgagcgtgcttctggaaaagacgttcgtggagggccggtttcatggatgagctttttcttgctgtttgctactggagctggattggtctactattatgacacacaaaagaaacgtcatatcgaagatataaataagaactctatagccgtcaaggaggggccatctgctggaaaagcagccattggaggaccattcagccttataagagacgatgggaaacgtgtgacggagaaaaacttgatgggaaaatggaccattttatactttggtttcactcattgtcccgatatctgtcctgacgaacttattaagttagctgctgccattgacaaaataaaggaaaattcgggagtagacgtggtgccagtgtttatctctgtggaccctgaaagagacacagttcagcaagtacatgaatatgtcaaagaatttcacccgaaattgatcgggttaactgggagccctgaagaaatcaaatcggtggcccgatcttaccgggtttactacatgaagaccgaagaggaagattcagactatctcgttgatcactctatagtcatgtacttgatgagtccggagatgaattttgtgaaattctacgggaagaatcacgatgttgactcgttgacagacggcgttgtaaaagagatccgtcagtaccggaagtaaagaaccttcgaagtacacttaggtgattaatatacattattcccatttttggaagctcatcattaataaggatttctcagaacacggagctgcttgtgtttccttgaaaaaacatcagtttttgttgtggccgagcatgcacacaacggtagtatccatactataagggcattaagggatcaattgagattattccgattacccgtgtcccataaattgatcacacttcttcgtatagaattttaaggcctaaattatcggcagtgcttaaatgtcgaactaagaggcagtgcttaattacccgttattgct

SEQ ID NO: 42175 - protein, 334 aa, Arabidopsis thaliana
  peptide (1)..(334): Ceres Seq. ID no. 12328903
  misc_feature (130)..(317): Pfam Name: SCO1/SenC Pfam Description: SCO1/SenC
  misc_feature (127)..(332): Homolog of NCBI NO: 6319498 NR Description: Originally identified as a multicopy suppressor
  misc_feature (89)..(332): Homolog of NCBI NO: 6319511 NR Description: inner mitochondrial membrane protein; Sco1p
  misc_feature (84)..(333): Homolog of NCBI NO: 39595078 NR Description: Hypothetical protein CBG03655 [Caenorhabditis
  misc_feature (123)..(325): Homolog of NCBI NO: 19112079 NR Description: putative cytochrome C oxidase assembly protein
  misc_feature (150)..(334): Homolog of NCBI NO: 4406651 NR Description: h-sco1 [Homo sapiens]
  misc_feature (123)..(334): Homolog of NCBI NO: 40740887 NR Description: hypothetical protein AN4842.2 [Aspergillus
  misc_feature (115)..(332): Homolog of NCBI NO: 19920710 NR Description: CG8885-PA [Drosophila melanogaster]
  misc_feature (116)..(334): Homolog of NCBI NO: 4759068 NR Description: cytochrome oxidase deficient homolog 1 [Homo
  misc_feature (62)..(334): Homolog of NCBI NO: 6403490 NR Description: putative SCO1 protein [Arabidopsis thaliana]
  misc_feature (1)..(334): Homolog of NCBI NO: 18398306 NR Description: putative SCO1 protein
MASALCRTASRLRSVQLFRRIRVSSDLLSASSPSPACISDALRHGDFSLPRSFFSLNCGIEMLKMDQRCLLSTSASDTTSKHDSGKPETKSSEKNEKSGGSESSDGGSDHKNERASGKDVRGGPVSWMSFFLLFATGAGLVYYYDTQKKRHIEDINKNSIAVKEGPSAGKAAIGGPFSLIRDDGKRVTEKNLMGKWTILYFGFTHCPDICPDELIKLAAAIDKIKENSGVDVVPVFISVDPERDTVQQVHEYVKEFHPKLIGLTGSPEEIKSVARSYRVYYMKTEEEDSDYLVDHSIVMYLMSPEMNFVKFYGKNHDVDSLTDGVVKEIRQYRK

SEQ ID NO: 42176 - protein, 273 aa, Arabidopsis thaliana
  peptide (1)..(273): Ceres Seq. ID no. 12328904
  misc_feature (69)..(256): Pfam Name: SCO1/SenC Pfam Description: SCO1/SenC
  misc_feature (66)..(271): Homolog of NCBI NO: 6319498 NR Description: Originally identified as a multicopy suppressor
  misc_feature (28)..(271): Homolog of NCBI NO: 6319511 NR Description: inner mitochondrial membrane protein; Sco1p
  misc_feature (23)..(272): Homolog of NCBI NO: 39595078 NR Description: Hypothetical protein CBG03655 [Caenorhabditis
  misc_feature (62)..(264): Homolog of NCBI NO: 19112079 NR Description: putative cytochrome C oxidase assembly protein
  misc_feature (89)..(273): Homolog of NCBI NO: 4406651 NR Description: h-sco1 [Homo sapiens]
  misc_feature (62)..(273): Homolog of NCBI NO: 40740887 NR Description: hypothetical protein AN4842.2 [Aspergillus
  misc_feature (54)..(271): Homolog of NCBI NO: 19920710 NR Description: CG8885-PA [Drosophila melanogaster]
  misc_feature (55)..(273): Homolog of NCBI NO: 4759068 NR Description: cytochrome oxidase deficient homolog 1 [Homo
  misc_feature (1)..(273): Homolog of NCBI NO: 6403490 NR Description: putative SCO1 protein [Arabidopsis thaliana]
  misc_feature (1)..(273): Homolog of NCBI NO: 18398306 NR Description: putative SCO1 protein
MLKMDQRCLLSTSASDTTSKHDSGKPETKSSEKNEKSGGSESSDGGSDHKNERASGKDVRGGPVSWMSFFLLFATGAGLVYYYDTQKKRHIEDINKNSIAVKEGPSAGKAAIGGPFSLIRDDGKRVTEKNLMGKWTILYFGFTHCPDICPDELIKLAAAIDKIKENSGVDVVPVFISVDPERDTVQQVHEYVKEFHPKLIGLTGSPEEIKSVARSYRVYYMKTEEEDSDYLVDHSIVMYLMSPEMNFVKFYGKNHDVDSLTDGVVKEIRQYRK

SEQ ID NO: 42177 - protein, 270 aa, Arabidopsis thaliana
  peptide (1)..(270): Ceres Seq. ID no. 12328905
  misc_feature (66)..(253): Pfam Name: SCO1/SenC Pfam Description: SCO1/SenC
  misc_feature (63)..(268): Homolog of NCBI NO: 6319498 NR Description: Originally identified as a multicopy suppressor
  misc_feature (25)..(268): Homolog of NCBI NO: 6319511 NR Description: inner mitochondrial membrane protein; Sco1p
  misc_feature (20)..(269): Homolog of NCBI NO: 39595078 NR Description: Hypothetical protein CBG03655 [Caenorhabditis
  misc_feature (59)..(261): Homolog of NCBI NO: 19112079 NR Description: putative cytochrome C oxidase assembly protein
  misc_feature (86)..(270): Homolog of NCBI NO: 4406651 NR Description: h-sco1 [Homo sapiens]
  misc_feature (59)..(270): Homolog of NCBI NO: 40740887 NR Description: hypothetical protein AN4842.2 [Aspergillus
  misc_feature (51)..(268): Homolog of NCBI NO: 19920710 NR Description: CG8885-PA [Drosophila melanogaster]
  misc_feature (52)..(270): Homolog of NCBI NO: 4759068 NR Description: cytochrome oxidase deficient homolog 1 [Homo
  misc_feature (1)..(270): Homolog of NCBI NO: 6403490 NR Description: putative SCO1 protein [Arabidopsis thaliana]
  misc_feature (1)..(270): Homolog of NCBI NO: 18398306 NR Description: putative SCO1 protein
MDQRCLLSTSASDTTSKHDSGKPETKSSEKNEKSGGSESSDGGSDHKNERASGKDVRGGPVSWMSFFLLFATGAGLVYYYDTQKKRHIEDINKNSIAVKEGPSAGKAAIGGPFSLIRDDGKRVTEKNLMGKWTILYFGFTHCPDICPDELIKLAAAIDKIKENSGVDVVPVFISVDPERDTVQQVHEYVKEFHPKLIGLTGSPEEIKSVARSYRVYYMKTEEEDSDYLVDHSIVMYLMSPEMNFVKFYGKNHDVDSLTDGVVKEIRQYRK

SEQ ID NO: 42178 - DNA, 1057 bp, Arabidopsis thaliana
  misc_feature (1)..(1057): Ceres Seq. ID no. 12395778
  misc_feature: MA Experiment ID: 108434 Result: Down-regulated in Transcription
  misc_feature: MA Experiment 108434 PARAMETER Experiment Name: At_Root_Tips_cDNA_P Parameter: Tissue Value: Root Tips
  misc_feature: MA Experiment ID: 108488 Result: Down-regulated in Transcription
  misc_feature: MA Experiment ID: 108576 Result: Up-regulated in Transcription
  misc_feature: MA Experiment 108576 PARAMETER Experiment Name: At_42deg_Heat_cDNA_P Parameter: Temperature (deg C) Value: 42 vs. 22
  misc_feature: MA Experiment 108576 PARAMETER Experiment Name: At_42deg_Heat_cDNA_P Parameter: Timepoint (hr) Value: 1
  misc_feature: MA Experiment 108576 PARAMETER Experiment Name: At_42deg_Heat_cDNA_P Parameter: Tissue Value: Aerial
  misc_feature: MA Experiment ID: 108577 Result: Up-regulated in Transcription
  misc_feature: MA Experiment 108577 PARAMETER Experiment Name: At_42deg_Heat_cDNA_P Parameter: Temperature (deg C) Value: 42 vs. 22
  misc_feature: MA Experiment 108577 PARAMETER Experiment Name: At_42deg_Heat_cDNA_P Parameter: Timepoint (hr) Value: 6
  misc_feature: MA Experiment 108577 PARAMETER Experiment Name: At_42deg_Heat_cDNA_P Parameter: Tissue Value: Aerial
  misc_feature: MA Experiment ID: 108579 Result: Up-regulated in Transcription
  misc_feature: MA Experiment 108579 PARAMETER Experiment Name: At_4deg_Cold_cDNA_P Parameter: Temperature (deg C) Value: 4 vs. 22
  misc_feature: MA Experiment 108579 PARAMETER Experiment Name: At_4deg_Cold_cDNA_P Parameter: Timepoint (hr) Value: 6
  misc_feature: MA Experiment 108579 PARAMETER Experiment Name: At_4deg_Cold_cDNA_P Parameter: Tissue Value: Aerial
  misc_feature: MA Experiment ID: 108595 Result: Up-regulated in Transcription
  misc_feature: MA Experiment 108595 PARAMETER Experiment Name: At_Ler-pi_Ovule_cDNA_P Parameter: Plant Line Value: null
  misc_feature: MA Experiment ID: 108668 Result: Up-regulated in Transcription
  misc_feature: MA Experiment 108668 PARAMETER Experiment Name: At_2mM_SA_cDNA_P Parameter: Plant Line Value: WS
  misc_feature: MA Experiment 108668 PARAMETER Experiment Name: At_2mM_SA_cDNA_P Parameter: Timepoint (hr) Value: 6
  misc_feature: MA Experiment 108668 PARAMETER Experiment Name: At_2mM_SA_cDNA_P Parameter: Treatment Value: 2mM SA vs. No Treatment
  misc_feature: MA Experiment ID: 20000069 Result: Up-regulated in Transcription
  misc_feature: MA Experiment 20000069 PARAMETER Experiment Name: At_100uM_ABA_Mutants_cDNA_P Parameter: Plant Line Value: CS23
  misc_feature: MA Experiment 20000069 PARAMETER Experiment Name: At_100uM_ABA_Mutants_cDNA_P Parameter: Timepoint (hr) Value: 6
  misc_feature: MA Experiment 20000069 PARAMETER Experiment Name: At_100uM_ABA_Mutants_cDNA_P Parameter: Tissue Value: Aerial
  misc_feature: MA Experiment 20000069 PARAMETER Experiment Name: At_100uM_ABA_Mutants_cDNA_P Parameter: Treatment Value: 100uM ABA vs. No Treatment
  misc_feature: MA Experiment ID: 20000087 Result: Up-regulated in Transcription
  misc_feature: MA Experiment 20000087 PARAMETER Experiment Name: At_100uM_ABA_Mutants_cDNA_P Parameter: Plant Line Value: WS
  misc_feature: MA Experiment 20000087 PARAMETER Experiment Name: At_100uM_ABA_Mutants_cDNA_P Parameter: Timepoint (hr) Value: 6
  misc_feature: MA Experiment 20000087 PARAMETER Experiment Name: At_100uM_ABA_Mutants_cDNA_P Parameter: Tissue Value: Aerial
  misc_feature: MA Experiment 20000087 PARAMETER Experiment Name: At_100uM_ABA_Mutants_cDNA_P Parameter: Treatment Value: 100uM ABA vs. No Treatment
  misc_feature: MA Experiment ID: 20000089 Result: Up-regulated in Transcription
  misc_feature: MA Experiment ID: 20000090 Result: Up-regulated in Transcription
  misc_feature: MA Experiment ID: 20000093 Result: Up-regulated in Transcription
  misc_feature: MA Experiment 20000093 PARAMETER Experiment Name: At_42deg_Heat_cDNA_P Parameter: Temperature (deg C) Value: 42 vs. 22
  misc_feature: MA Experiment 20000093 PARAMETER Experiment Name: At_42deg_Heat_cDNA_P Parameter: Timepoint (hr) Value: 0.5
  misc_feature: MA Experiment 20000093 PARAMETER Experiment Name: At_42deg_Heat_cDNA_P Parameter: Tissue Value: Aerial
  misc_feature: MA Experiment ID: 20000111 Result: Up-regulated in Transcription
  misc_feature: MA Experiment 20000111 PARAMETER Experiment Name: At_42deg_Heat_cDNA_P Parameter: Temperature (deg C) Value: 42 vs. 22
  misc_feature: MA Experiment 20000111 PARAMETER Experiment Name: At_42deg_Heat_cDNA_P Parameter: Timepoint (hr) Value: 6
  misc_feature: MA Experiment 20000111 PARAMETER Experiment Name: At_42deg_Heat_cDNA_P Parameter: Tissue Value: Aerial
  misc_feature: MA Experiment ID: 20000112 Result: Up-regulated in Transcription
  misc_feature: MA Experiment 20000112 PARAMETER Experiment Name: At_42deg_Heat_cDNA_P Parameter: Temperature (deg C) Value: 42 vs. 22
  misc_feature: MA Experiment 20000112 PARAMETER Experiment Name: At_42deg_Heat_cDNA_P Parameter: Timepoint (hr) Value: 2
  misc_feature: MA Experiment 20000112 PARAMETER Experiment Name: At_42deg_Heat_cDNA_P Parameter: Tissue Value: Aerial
  misc_feature: MA Experiment ID: 20000113 Result: Up-regulated in Transcription
  misc_feature: MA Experiment 20000113 PARAMETER Experiment Name: At_42deg_Heat_cDNA_P Parameter: Temperature (deg C) Value: 42 vs. 22
  misc_feature: MA Experiment 20000113 PARAMETER Experiment Name: At_42deg_Heat_cDNA_P Parameter: Timepoint (hr) Value: 8
  misc_feature: MA Experiment 20000113 PARAMETER Experiment Name: At_42deg_Heat_cDNA_P Parameter: Tissue Value: Aerial
  misc_feature: MA Experiment ID: 20000144 Result: Up-regulated in Transcription
  misc_feature: MA Experiment 20000144 PARAMETER Experiment Name: At_42deg_Heat_cDNA_P Parameter: Temperature (deg C) Value: 42 vs. 22
  misc_feature: MA Experiment 20000144 PARAMETER Experiment Name: At_42deg_Heat_cDNA_P Parameter: Timepoint (hr) Value: 1
  misc_feature: MA Experiment 20000144 PARAMETER Experiment Name: At_42deg_Heat_cDNA_P Parameter: Tissue Value: Aerial
  misc_feature: MA Experiment ID: 20000171 Result: Up-regulated in Transcription
  misc_feature: MA Experiment 20000171 PARAMETER Experiment Name: At_42deg_Heat_P Parameter: Age (day) Value: 14
  misc_feature: MA Experiment 20000171 PARAMETER Experiment Name: At_42deg_Heat_P Parameter: Organism Value: A. thaliana
  misc_feature: MA Experiment 20000171 PARAMETER Experiment Name: At_42deg_Heat_P Parameter: Plant Line Value: WS
  misc_feature: MA Experiment 20000171 PARAMETER Experiment Name: At_42deg_Heat_P Parameter: Temperature (deg C) Value: 42 vs. 22
  misc_feature: MA Experiment 20000171 PARAMETER Experiment Name: At_42deg_Heat_P Parameter: Timepoint (hr) Value: 1
  misc_feature: MA Experiment 20000171 PARAMETER Experiment Name: At_42deg_Heat_P Parameter: Tissue Value: Aerial
  misc_feature: MA Experiment ID: 20000173 Result: Up-regulated in Transcription
  misc_feature: MA Experiment 20000173 PARAMETER Experiment Name: At_42deg_Heat_P Parameter: Age (day) Value: 14
  misc_feature: MA Experiment 20000173 PARAMETER Experiment Name: At_42deg_Heat_P Parameter: Organism Value: A. thaliana
  misc_feature: MA Experiment 20000173 PARAMETER Experiment Name: At_42deg_Heat_P Parameter: Plant Line Value: WS
  misc_feature: MA Experiment 20000173 PARAMETER Experiment Name: At_42deg_Heat_P Parameter: Temperature (deg C) Value: 42 vs. 22
  misc_feature: MA Experiment 20000173 PARAMETER Experiment Name: At_42deg_Heat_P Parameter: Timepoint (hr) Value: 6
  misc_feature: MA Experiment 20000173 PARAMETER Experiment Name: At_42deg_Heat_P Parameter: Tissue Value: Aerial
gattcccgatagttacccgccgactctctgctccggcgccgcgaattaggttttatcattctacgatccgatttgctcatttccgaagattcacaacggcttctccttcaatgagccagcagactggcgaaatcgatgccgtcgtcgatgcttcgtcggcggagaaacccgacgacgtcgtggtgcaatacgttgtgcttcgacgagatctaatcgattcgtggccacttgggagcgttgtaacacaaggatgtcatgcgtcagtggcagcgatctggtcgttcaaagacgatccggtcacgcttcagtactgtgatccgcagcacattgattctatgcataaggtgactctggaagttaaaggggaaacgcagatgatgaatttgtcagagaagctgaaattaggaggaatctctcataagctatggatggagcagccggagaatattccgacgtgtattgctacaaagccttatcctaaatcccaagtctcttctttcttcaaaaagctcaagctttgcaagtgatcattcttgttctccaaaatcccaatttcttaaaattctcattttcataatcatgattcatacatatacagagaaatcataaaagagaagacatgttcttttctttttcttacaaacgtttagaaacacgatacacaaagcaagtcagagatttggatatatgtacatatagaaatgatctcgtatgaggtgggagttttgttttcagccatggacgatgagtcgtttgccgcaagtggaacagagatgacgacgtttggatttattagagagaggaacgaagcagaatctccactggctatttacgtcaaccacttgaaccgctcctccgcagtacggacacgctccaggagctgcgtaccttccgatcaccctctcgtcctgatcacacacgaacaccaaacacatccttcttcttcttctcttctagacaatgaaaacaaatggaaccgttcttagttttttgtttccgcgttaaaaagggttgtagttttgatgatatttataaggatgagattgagactccatgg

SEQ ID NO: 42179 - protein, 174 aa, Arabidopsis thaliana
  peptide (1)..(174): Ceres Seq. ID no. 12395779
  misc_feature (59)..(174): Homolog of NCBI NO: 29248553 NR Description: GLP_162_41645_41277 [Giardia lamblia ATCC 50803]
  misc_feature (61)..(172): Homolog of NCBI NO: 39585949 NR Description: Hypothetical protein CBG13912 [Caenorhabditis
  misc_feature (35)..(172): Homolog of NCBI NO: 25148624 NR Description: Low molecular weight phosphotyrosine protein
  misc_feature (57)..(174): Homolog of NCBI NO: 23612187 NR Description: hypothetical protein [Plasmodium falciparum 3D7]
  misc_feature (50)..(174): Homolog of NCBI NO: 27716785 NR Description: similar to CG14903-PA
  misc_feature (50)..(174): Homolog of NCBI NO: 37546977 NR Description: similar to ENSANGP00000018456 [Homo sapiens]
  misc_feature (57)..(174): Homolog of NCBI NO: 23479593 NR Description: Drosophila melanogaster CG14903 gene product
  misc_feature (60)..(174): Homolog of NCBI NO: 24647481 NR Description: CG14903-PA [Drosophila melanogaster]
  misc_feature (31)..(174): Homolog of NCBI NO: 38346909 NR Description: OSJNBb0015N08.9 [Oryza sativa (japonica
  misc_feature (1)..(174): Homolog of NCBI NO: 15238224 NR Description: putative protein; protein id: At5g10700.1
FPIVTRRLSAPAPRIRFYHSTIRFAHFRRFTTASPSMSQQTGEIDAVVDASSAEKPDDVVVQYVVLRRDLIDSWPLGSVVTQGCHASVAAIWSFKDDPVTLQYCDPQHIDSMHKVTLEVKGETQMMNLSEKLKLGGISHKLWMEQPENIPTCIATKPYPKSQVSSFFKKLKLCK

SEQ ID NO: 42180 - protein, 138 aa, Arabidopsis thaliana
  peptide (1)..(138): Ceres Seq. ID no. 12395780
  misc_feature (23)..(138): Homolog of NCBI NO: 29248553 NR Description: GLP_162_41645_41277 [Giardia lamblia ATCC 50803]
  misc_feature (25)..(136): Homolog of NCBI NO: 39585949 NR Description: Hypothetical protein CBG13912 [Caenorhabditis
  misc_feature (1)..(136): Homolog of NCBI NO: 25148624 NR Description: Low molecular weight phosphotyrosine protein
  misc_feature (21)..(138): Homolog of NCBI NO: 23612187 NR Description: hypothetical protein [Plasmodium falciparum 3D7]
  misc_feature (14)..(138): Homolog of NCBI NO: 27716785 NR Description: similar to CG14903-PA
  misc_feature (14)..(138): Homolog of NCBI NO: 37546977 NR Description: similar to ENSANGP00000018456 [Homo sapiens]
  misc_feature (21)..(138): Homolog of NCBI NO: 23479593 NR Description: Drosophila melanogaster CG14903 gene product
  misc_feature (24)..(138): Homolog of NCBI NO: 24647481 NR Description: CG14903-PA [Drosophila melanogaster]
  misc_feature (1)..(138): Homolog of NCBI NO: 38346909 NR Description: OSJNBb0015N08.9 [Oryza sativa (japonica
  misc_feature (1)..(138): Homolog of NCBI NO: 15238224 NR Description: putative protein; protein id: At5g10700.1
MSQQTGEIDAVVDASSAEKPDDVVVQYVVLRRDLIDSWPLGSVVTQGCHASVAAIWSFKDDPVTLQYCDPQHIDSMHKVTLEVKGETQMMNLSEKLKLGGISHKLWMEQPENIPTCIATKPYPKSQVSSFFKKLKLCK

SEQ ID NO: 42181 - protein, 94 aa, Arabidopsis thaliana
  peptide (1)..(94): Ceres Seq. ID no. 12395781
MISYEVGVLFSAMDDESFAASGTEMTTFGFIRERNEAESPLAIYVNHLNRSSAVRTRSRSCVPSDHPLVLITHEHQTHPSSSSLLDNENKWNRS

SEQ ID NO: 42182 - DNA, 1222 bp, Arabidopsis thaliana
  misc_feature (1)..(1222): Ceres Seq. ID no. 12328906
  misc_feature: MA Experiment ID: 108434 Result: Down-regulated in Transcription
  misc_feature: MA Experiment 108434 PARAMETER Experiment Name: At_Root_Tips_cDNA_P Parameter: Tissue Value: Root Tips
  misc_feature: MA Experiment ID: 108461 Result: Up-regulated in Transcription
  misc_feature: MA Experiment 108461 PARAMETER Experiment Name: At_Germinating_Seeds_cDNA_P Parameter: Age (day) Value: 1 vs. 0
  misc_feature: MA Experiment 108461 PARAMETER Experiment Name: At_Germinating_Seeds_cDNA_P Parameter: Tissue Value: Germinating Seeds
  misc_feature: MA Experiment ID: 108462 Result: Up-regulated in Transcription
  misc_feature: MA Experiment 108462 PARAMETER Experiment Name: At_Germinating_Seeds_cDNA_P Parameter: Age (day) Value: 2 vs. 0
  misc_feature: MA Experiment 108462 PARAMETER Experiment Name: At_Germinating_Seeds_cDNA_P Parameter: Tissue Value: Germinating Seeds
  misc_feature: MA Experiment ID: 108463 Result: Up-regulated in Transcription
  misc_feature: MA Experiment 108463 PARAMETER Experiment Name: At_Germinating_Seeds_cDNA_P Parameter: Age (day) Value: 3 vs. 0
  misc_feature: MA Experiment 108463 PARAMETER Experiment Name: At_Germinating_Seeds_cDNA_P Parameter: Tissue Value: Germinating Seeds
  misc_feature: MA Experiment ID: 108464 Result: Up-regulated in Transcription
  misc_feature: MA Experiment 108464 PARAMETER Experiment Name: At_Germinating_Seeds_cDNA_P Parameter: Age (day) Value: 4 vs. 0
  misc_feature: MA Experiment 108464 PARAMETER Experiment Name: At_Germinating_Seeds_cDNA_P Parameter: Tissue Value: Germinating Seeds
  misc_feature: MA Experiment ID: 108474 Result: Down-regulated in Transcription
  misc_feature: MA Experiment 108474 PARAMETER Experiment Name: At_Drought_Flowers_cDNA_P Parameter: Timepoint (hr) Value: null
  misc_feature: MA Experiment 108474 PARAMETER Experiment Name: At_Drought_Flowers_cDNA_P Parameter: Treatment Value: Drought vs. No Drought
  misc_feature: MA Experiment ID: 108573 Result: Up-regulated in Transcription
  misc_feature: MA Experiment 108573 PARAMETER Experiment Name: At_Drought_cDNA_P Parameter: Timepoint (hr) Value: 6
  misc_feature: MA Experiment 108573 PARAMETER Experiment Name: At_Drought_cDNA_P Parameter: Tissue Value: Aerial
  misc_feature: MA Experiment 108573 PARAMETER Experiment Name: At_Drought_cDNA_P Parameter: Treatment Value: Drought vs. No Drought
  misc_feature: MA Experiment ID: 108594 Result: Down-regulated in Transcription
  misc_feature: MA Experiment 108594 PARAMETER Experiment Name: At_Ler-rhl_Root_cDNA_P Parameter: Plant Line Value: null
  misc_feature: MA Experiment ID: 108595 Result: Up-regulated in Transcription
  misc_feature: MA Experiment 108595 PARAMETER Experiment Name: At_Ler-pi_Ovule_cDNA_P Parameter: Plant Line Value: null
  misc_feature: MA Experiment ID: 20000071 Result: Up-regulated in Transcription
  misc_feature: MA Experiment 20000071 PARAMETER Experiment Name: At_100uM_ABA_Mutants_cDNA_P Parameter: Plant Line Value: CS8104
  misc_feature: MA Experiment 20000071 PARAMETER Experiment Name: At_100uM_ABA_Mutants_cDNA_P Parameter: Timepoint (hr) Value: 6
  misc_feature: MA Experiment 20000071 PARAMETER Experiment Name: At_100uM_ABA_Mutants_cDNA_P Parameter: Tissue Value: Aerial
  misc_feature: MA Experiment 20000071 PARAMETER Experiment Name: At_100uM_ABA_Mutants_cDNA_P Parameter: Treatment Value: 100uM ABA vs. No Treatment
  misc_feature: MA Experiment ID: 20000171 Result: Up-regulated in Transcription
  misc_feature: MA Experiment 20000171 PARAMETER Experiment Name: At_42deg_Heat_P Parameter: Age (day) Value: 14
  misc_feature: MA Experiment 20000171 PARAMETER Experiment Name: At_42deg_Heat_P Parameter: Organism Value: A. thaliana
  misc_feature: MA Experiment 20000171 PARAMETER Experiment Name: At_42deg_Heat_P Parameter: Plant Line Value: WS
  misc_feature: MA Experiment 20000171 PARAMETER Experiment Name: At_42deg_Heat_P Parameter: Temperature (deg C) Value: 42 vs. 22
  misc_feature: MA Experiment 20000171 PARAMETER Experiment Name: At_42deg_Heat_P Parameter: Timepoint (hr) Value: 1
  misc_feature: MA Experiment 20000171 PARAMETER Experiment Name: At_42deg_Heat_P Parameter: Tissue Value: Aerial
  misc_feature: MA Experiment ID: 20000180 Result: Up-regulated in Transcription
  misc_feature: MA Experiment 20000180 PARAMETER Experiment Name: At_Germinating_Seeds_P Parameter: Age (hr) Value: 24 vs. 0
  misc_feature: MA Experiment 20000180 PARAMETER Experiment Name: At_Germinating_Seeds_P Parameter: Tissue Value: Germinating Seeds
  misc_feature: MA Experiment ID: 20000184 Result: Down-regulated in Transcription
  misc_feature: MA Experiment 20000184 PARAMETER Experiment Name: At_Shoots__P Parameter: Age (day) Value: 7
  misc_feature: MA Experiment 20000184 PARAMETER Experiment Name: At_Shoots__P Parameter: Tissue Value: Shoots vs. Whole Plant
  misc_feature: MA Experiment ID: 20000185 Result: Down-regulated in Transcription
  misc_feature: MA Experiment 20000185 PARAMETER Experiment Name: At_Roots__P Parameter: Age (day) Value: 7 vs. 21
  misc_feature: MA Experiment 20000185 PARAMETER Experiment Name: At_Roots__P Parameter: Organism Value: A. thaliana
  misc_feature: MA Experiment 20000185 PARAMETER Experiment Name: At_Roots__P Parameter: Tissue Value: Roots vs. Whole Plant
  misc_feature: MA Experiment ID: 20000234 Result: Down-regulated in Transcription
  misc_feature: MA Experiment 20000234 PARAMETER Experiment Name: At_Siliques_P Parameter: Age (day) Value: 21
  misc_feature: MA Experiment 20000234 PARAMETER Experiment Name: At_Siliques_P Parameter: Organism Value: A. thaliana
  misc_feature: MA Experiment 20000234 PARAMETER Experiment Name: At_Siliques_P Parameter: Plant Line Value: WS
  misc_feature: MA Experiment 20000234 PARAMETER Experiment Name: At_Siliques_P Parameter: Tissue Value: Less Than 5mm Siliques vs. Whole Plant
  misc_feature: MA Experiment ID: 20000264 Result: Down-regulated in Transcription
  misc_feature: MA Experiment 20000264 PARAMETER Experiment Name: At_Open_Flower_P Parameter: Age (day) Value: 21
  misc_feature: MA Experiment 20000264 PARAMETER Experiment Name: At_Open_Flower_P Parameter: Plant Line Value: WS
  misc_feature: MA Experiment 20000264 PARAMETER Experiment Name: At_Open_Flower_P Parameter: Tissue Value: Open Flower vs. Whole Plant
  misc_feature: MA Experiment ID: 20000265 Result: Down-regulated in Transcription
  misc_feature: MA Experiment 20000265 PARAMETER Experiment Name: At_Open_Flower_P Parameter: Age (day) Value: 21
  misc_feature: MA Experiment 20000265 PARAMETER Experiment Name: At_Open_Flower_P Parameter: Plant Line Value: WS
  misc_feature: MA Experiment 20000265 PARAMETER Experiment Name: At_Open_Flower_P Parameter: Tissue Value: Closed Flower vs. Whole Plant
  misc_feature: MA Experiment ID: 20000286 Result: Down-regulated in Transcription
  misc_feature: MA Experiment 20000286 PARAMETER Experiment Name: At_Open_Flower_P Parameter: Age (day) Value: 21
  misc_feature: MA Experiment 20000286 PARAMETER Experiment Name: At_Open_Flower_P Parameter: Plant Line Value: WS
  misc_feature: MA Experiment 20000286 PARAMETER Experiment Name: At_Open_Flower_P Parameter: Tissue Value: Half Open vs. Whole Plant
  misc_feature: MA Experiment ID: 20000438 Result: Down-regulated in Transcription
  misc_feature: MA Experiment 20000438 PARAMETER Experiment Name: At_Shoots__P Parameter: Age (day) Value: 14
  misc_feature: MA Experiment 20000438 PARAMETER Experiment Name: At_Shoots__P Parameter: Tissue Value: Shoots vs. Whole Plant
  misc_feature: MA Experiment ID: 20000439 Result: Down-regulated in Transcription
  misc_feature: MA Experiment 20000439 PARAMETER Experiment Name: At_Roots__P Parameter: Age (day) Value: 14 vs. 21
  misc_feature: MA Experiment 20000439 PARAMETER Experiment Name: At_Roots__P Parameter: Organism Value: A. thaliana
  misc_feature: MA Experiment 20000439 PARAMETER Experiment Name: At_Roots__P Parameter: Tissue Value: Roots vs. Whole Plant
  misc_feature: MA Experiment ID: 20000794 Result: Down-regulated in Transcription
  misc_feature: MA Experiment 20000794 PARAMETER Experiment Name: At_Petals_P Parameter: Age (day) Value: 23-25 days
  misc_feature: MA Experiment 20000794 PARAMETER Experiment Name: At_Petals_P Parameter: Plant Line Value: WS
  misc_feature: MA Experiment 20000794 PARAMETER Experiment Name: At_Petals_P Parameter: Tissue Value: Petals vs. Whole plant
  misc_feature: MA Experiment ID: 20001556 Result: Down-regulated in Transcription
  misc_feature: MA Experiment 20001556 PARAMETER Experiment Name: At_Drought_Soil_Dry_P Parameter: Age (day) Value: 26
  misc_feature: MA Experiment 20001556 PARAMETER Experiment Name: At_Drought_Soil_Dry_P Parameter: Organism Value: A. thaliana
  misc_feature: MA Experiment 20001556 PARAMETER Experiment Name: At_Drought_Soil_Dry_P Parameter: Plant Line Value: WS
  misc_feature: MA Experiment 20001556 PARAMETER Experiment Name: At_Drought_Soil_Dry_P Parameter: Post Timepoint (hr) Value: None
  misc_feature: MA Experiment 20001556 PARAMETER Experiment Name: At_Drought_Soil_Dry_P Parameter: Post-Treatment Value: None
  misc_feature: MA Experiment 20001556 PARAMETER Experiment Name: At_Drought_Soil_Dry_P Parameter: Timepoint (day) Value: 12
  misc_feature: MA Experiment 20001556 PARAMETER Experiment Name: At_Drought_Soil_Dry_P Parameter: Treatment Value: Drought vs. No Drought
  misc_feature: MA Experiment ID: 20001557 Result: Down-regulated in Transcription
  misc_feature: MA Experiment 20001557 PARAMETER Experiment Name: At_Drought_Soil_Dry_P Parameter: Age (day) Value: 27
  misc_feature: MA Experiment 20001557 PARAMETER Experiment Name: At_Drought_Soil_Dry_P Parameter: Organism Value: A. thaliana
  misc_feature: MA Experiment 20001557 PARAMETER Experiment Name: At_Drought_Soil_Dry_P Parameter: Plant Line Value: WS
  misc_feature: MA Experiment 20001557 PARAMETER Experiment Name: At_Drought_Soil_Dry_P Parameter: Post Timepoint (hr) Value: 3
  misc_feature: MA Experiment 20001557 PARAMETER Experiment Name: At_Drought_Soil_Dry_P Parameter: Post-Treatment Value: Re-Water vs. No Drought
  misc_feature: MA Experiment 20001557 PARAMETER Experiment Name: At_Drought_Soil_Dry_P Parameter: Timepoint (day) Value: 13
  misc_feature: MA Experiment 20001557 PARAMETER Experiment Name: At_Drought_Soil_Dry_P Parameter: Treatment Value: Drought vs. No Drought
  misc_feature: MA Experiment ID: 20001558 Result: Down-regulated in Transcription
  misc_feature: MA Experiment 20001558 PARAMETER Experiment Name: At_Drought_Soil_Dry_P Parameter: Age (day) Value: 27
  misc_feature: MA Experiment 20001558 PARAMETER Experiment Name: At_Drought_Soil_Dry_P Parameter: Organism Value: A. thaliana
  misc_feature: MA Experiment 20001558 PARAMETER Experiment Name: At_Drought_Soil_Dry_P Parameter: Plant Line Value: WS
  misc_feature: MA Experiment 20001558 PARAMETER Experiment Name: At_Drought_Soil_Dry_P Parameter: Post Timepoint (hr) Value: 6
  misc_feature: MA Experiment 20001558 PARAMETER Experiment Name: At_Drought_Soil_Dry_P Parameter: Post-Treatment Value: Re-Water vs. No Drought
  misc_feature: MA Experiment 20001558 PARAMETER Experiment Name: At_Drought_Soil_Dry_P Parameter: Timepoint (day) Value: 13
  misc_feature: MA Experiment 20001558 PARAMETER Experiment Name: At_Drought_Soil_Dry_P Parameter: Treatment Value: Drought vs. No Drought
  misc_feature: MA Experiment ID: 20001559 Result: Down-regulated in Transcription
  misc_feature: MA Experiment 20001559 PARAMETER Experiment Name: At_Drought_Soil_Dry_P Parameter: Age (day) Value: 28
  misc_feature: MA Experiment 20001559 PARAMETER Experiment Name: At_Drought_Soil_Dry_P Parameter: Organism Value: A. thaliana
  misc_feature: MA Experiment 20001559 PARAMETER Experiment Name: At_Drought_Soil_Dry_P Parameter: Plant Line Value: WS
  misc_feature: MA Experiment 20001559 PARAMETER Experiment Name: At_Drought_Soil_Dry_P Parameter: Post Timepoint (hr) Value: 29
  misc_feature: MA Experiment 20001559 PARAMETER Experiment Name: At_Drought_Soil_Dry_P Parameter: Post-Treatment Value: Re-Water vs. No Drought
  misc_feature: MA Experiment 20001559 PARAMETER Experiment Name: At_Drought_Soil_Dry_P Parameter: Timepoint (day) Value: 14
  misc_feature: MA Experiment 20001559 PARAMETER Experiment Name: At_Drought_Soil_Dry_P Parameter: Treatment Value: Drought vs. No Drought
  misc_feature: MA Experiment ID: 20001560 Result: Down-regulated in Transcription
  misc_feature: MA Experiment 20001560 PARAMETER Experiment Name: At_Drought_Soil_Dry_P Parameter: Age (day) Value: 28
  misc_feature: MA Experiment 20001560 PARAMETER Experiment Name: At_Drought_Soil_Dry_P Parameter: Organism Value: A. thaliana
  misc_feature: MA Experiment 20001560 PARAMETER Experiment Name: At_Drought_Soil_Dry_P Parameter: Plant Line Value: WS
  misc_feature: MA Experiment 20001560 PARAMETER Experiment Name: At_Drought_Soil_Dry_P Parameter: Post Timepoint (hr) Value: None
  misc_feature: MA Experiment 20001560 PARAMETER Experiment Name: At_Drought_Soil_Dry_P Parameter: Post-Treatment Value: None
  misc_feature: MA Experiment 20001560 PARAMETER Experiment Name: At_Drought_Soil_Dry_P Parameter: Timepoint (day) Value: 14
  misc_feature: MA Experiment 20001560 PARAMETER Experiment Name: At_Drought_Soil_Dry_P Parameter: Treatment Value: Drought vs. No Drought
  misc_feature: MA Experiment ID: 20001768 Result: Up-regulated in Transcription
  misc_feature: MA Experiment 20001768 PARAMETER Experiment Name: At_Far-red-enriched-adult_P Parameter: Age (day) Value: 28
  misc_feature: MA Experiment 20001768 PARAMETER Experiment Name: At_Far-red-enriched-adult_P Parameter: Light Value: Far-red enriched vs. White
  misc_feature: MA Experiment 20001768 PARAMETER Experiment Name: At_Far-red-enriched-adult_P Parameter: Organism Value: A. thaliana
  misc_feature: MA Experiment 20001768 PARAMETER Experiment Name: At_Far-red-enriched-adult_P Parameter: Plant Line Value: Columbia
  misc_feature: MA Experiment 20001768 PARAMETER Experiment Name: At_Far-red-enriched-adult_P Parameter: Timepoint (hr) Value: 1
  misc_feature: MA Experiment 20001768 PARAMETER Experiment Name: At_Far-red-enriched-adult_P Parameter: Tissue Value: Aerial
  misc_feature: MA Experiment ID: 20001773 Result: Up-regulated in Transcription
  misc_feature: MA Experiment 20001773 PARAMETER Experiment Name: At_Far-red-enriched-adult_P Parameter: Age (day) Value: 30
  misc_feature: MA Experiment 20001773 PARAMETER Experiment Name: At_Far-red-enriched-adult_P Parameter: Light Value: Far-red enriched vs. White
  misc_feature: MA Experiment 20001773 PARAMETER Experiment Name: At_Far-red-enriched-adult_P Parameter: Organism Value: A. thaliana
  misc_feature: MA Experiment 20001773 PARAMETER Experiment Name: At_Far-red-enriched-adult_P Parameter: Plant Line Value: Columbia
  misc_feature: MA Experiment 20001773 PARAMETER Experiment Name: At_Far-red-enriched-adult_P Parameter: Timepoint (hr) Value: 48
  misc_feature: MA Experiment 20001773 PARAMETER Experiment Name: At_Far-red-enriched-adult_P Parameter: Tissue Value: Aerial
  misc_feature: MA Experiment ID: 20001906 Result: Down-regulated in Transcription
  misc_feature: MA Experiment 20001906 PARAMETER Experiment Name: At_Drought_Reproduction_P Parameter: Age (day) Value: 35
  misc_feature: MA Experiment 20001906 PARAMETER Experiment Name: At_Drought_Reproduction_P Parameter: Organism Value: A. thaliana
  misc_feature: MA Experiment 20001906 PARAMETER Experiment Name: At_Drought_Reproduction_P Parameter: Plant Line Value: WS
  misc_feature: MA Experiment 20001906 PARAMETER Experiment Name: At_Drought_Reproduction_P Parameter: Timepoint (day) Value: 5
  misc_feature: MA Experiment 20001906 PARAMETER Experiment Name: At_Drought_Reproduction_P Parameter: Tissue Value: Siliques
  misc_feature: MA Experiment 20001906 PARAMETER Experiment Name: At_Drought_Reproduction_P Parameter: Treatment Value: Drought vs. No Drought
acaatggtcacattgatagacgaagaaaaagacaaaaaaaaatcaaccatggtttcgaaaccgctattctccctattgcttctcacggttgcattggttgtgtttcaaaccggaacccttgtcaacgctgaagattccgagccttcgagttcaacgagaaagcctctggtgaagattgtgaaaggtaaaaaattatgcgacaaaggatgggaatgcaaaggatggtccgagtattgttgcaaccatacaatctccgatttttttgagacatatcaattcgagaatctattctctaagcgtaacagtccagtggctcacgccgtcggcttttgggattaccgatcattcattactgcggctgccgagtaccagcctcttggtttcggtactgctggtgagaaacttcaagggatgaaggaagtcgctgcgtttcttggccacgttgggagcaaaacctcatgcgggtacggggttgcaacaggcggaccattagcttggggattgtgttacaacaaggagatgagtcctgatcagctttattgcgatgattactacaaattgacatatccttgtactcctggtgtctcgtaccacggtcgaggagctttaccggtttactggaattacaattatggtcaaaccggggaggctttgaaagtggatctactgagtcatccagagtatctcgagaacaatgctacgttagcgtttcaagcggcgatttggcggtggatgacgccaccgaagaagcatttaccgtcggcgcacgatgttttcgtcggaaaatggaagccaacaaagaatgacactgctgcaaaacgaactccggggtttggagccaccataaacgttctttacggcgatcaaatctgcaacagcggattcgataacgatgagatgaacaacattgtttctcattatttgtattatcttgatctgataggtgttggacgagaagaagctggtcctcacgagaagctgtcatgcgcagatcaagaacctttctcttcttcctcctctgctcctccgagttctggttcctcttcttgagtgaaagttttataacctctggttcggtgacttttgaaaaagaaagttgactttggtgtatatgtgttttgcatgggcttggttttaatattttgtaaaaatatacgtacgaacgattgcaatattttccacaccattttcttttcaaaaaatataaatatatattgcatgc

SEQ ID NO: 42183 - protein, 349 aa, Arabidopsis thaliana
  peptide (1)..(349): Ceres Seq. ID no. 12328907
  misc_feature (84)..(337): Homolog of NCBI NO: 7798678 NR Description: class I chitinase [Arabis parishii]
  misc_feature (84)..(337): Homolog of NCBI NO: 7798666 NR Description: class I chitinase [Arabis lignifera]
  misc_feature (84)..(335): Homolog of NCBI NO: 7798656 NR Description: class I chitinase [Halimolobos perplexa var.
  misc_feature (72)..(337): Homolog of NCBI NO: 7798640 NR Description: class I chitinase [Arabis blepharophylla]
  misc_feature (84)..(337): Homolog of NCBI NO: 7798664 NR Description: class I chitinase [Arabis lignifera]
  misc_feature (84)..(337): Homolog of NCBI NO: 7798632 NR Description: class I chitinase [Arabis holboellii]
  misc_feature (84)..(337): Homolog of NCBI NO: 7798670 NR Description: class I chitinase [Arabis microphylla]
  misc_feature (64)..(339): Homolog of NCBI NO: 27817867 NR Description: OJ1081_B12.16 [Oryza sativa (japonica
  misc_feature (24)..(348): Homolog of NCBI NO: 15221283 NR Description: glycosyl hydrolase family 19 (chitinase)
  misc_feature (17)..(349): Homolog of NCBI NO: 15228911 NR Description: glycosyl hydrolase family 19 (chitinase)
TMVTLIDEEKDKKKSTMVSKPLFSLLLLTVALVVFQTGTLVNAEDSEPSSSTRKPLVKIVKGKKLCDKGWECKGWSEYCCNHTISDFFETYQFENLFSKRNSPVAHAVGFWDYRSFITAAAEYQPLGFGTAGEKLQGMKEVAAFLGHVGSKTSCGYGVATGGPLAWGLCYNKEMSPDQLYCDDYYKLTYPCTPGVSYHGRGALPVYWNYNYGQTGEALKVDLLSHPEYLENNATLAFQAAIWRWMTPPKKHLPSAHDVFVGKWKPTKNDTAAKRTPGFGATINVLYGDQICNSGFDNDEMNNIVSHYLYYLDLIGVGREEAGPHEKLSCADQEPFSSSSSAPPSSGSSS

SEQ ID NO: 42184 - protein, 348 aa, Arabidopsis thaliana
  peptide (1)..(348): Ceres Seq. ID no. 12328908
  misc_feature (83)..(336): Homolog of NCBI NO: 7798678 NR Description: class I chitinase [Arabis parishii]
  misc_feature (83)..(336): Homolog of NCBI NO: 7798666 NR Description: class I chitinase [Arabis lignifera]
  misc_feature (83)..(334): Homolog of NCBI NO: 7798656 NR Description: class I chitinase [Halimolobos perplexa var.
  misc_feature (71)..(336): Homolog of NCBI NO: 7798640 NR Description: class I chitinase [Arabis blepharophylla]
  misc_feature (83)..(336): Homolog of NCBI NO: 7798664 NR Description: class I chitinase [Arabis lignifera]
  misc_feature (83)..(336): Homolog of NCBI NO: 7798632 NR Description: class I chitinase [Arabis holboellii]
  misc_feature (83)..(336): Homolog of NCBI NO: 7798670 NR Description: class I chitinase [Arabis microphylla]
  misc_feature (63)..(338): Homolog of NCBI NO: 27817867 NR Description: OJ1081_B12.16 [Oryza sativa (japonica
  misc_feature (23)..(347): Homolog of NCBI NO: 15221283 NR Description: glycosyl hydrolase family 19 (chitinase)
  misc_feature (16)..(348): Homolog of NCBI NO: 15228911 NR Description: glycosyl hydrolase family 19 (chitinase)
MVTLIDEEKDKKKSTMVSKPLFSLLLLTVALVVFQTGTLVNAEDSEPSSSTRKPLVKIVKGKKLCDKGWECKGWSEYCCNHTISDFFETYQFENLFSKRNSPVAHAVGFWDYRSFITAAAEYQPLGFGTAGEKLQGMKEVAAFLGHVGSKTSCGYGVATGGPLAWGLCYNKEMSPDQLYCDDYYKLTYPCTPGVSYHGRGALPVYWNYNYGQTGEALKVDLLSHPEYLENNATLAFQAAIWRWMTPPKKHLPSAHDVFVGKWKPTKNDTAAKRTPGFGATINVLYGDQICNSGFDNDEMNNIVSHYLYYLDLIGVGREEAGPHEKLSCADQEPFSSSSSAPPSSGSSS

SEQ ID NO: 42185 - protein, 333 aa, Arabidopsis thaliana
  peptide (1)..(333): Ceres Seq. ID no. 12328909
  misc_feature (68)..(321): Homolog of NCBI NO: 7798678 NR Description: class I chitinase [Arabis parishii]
  misc_feature (68)..(321): Homolog of NCBI NO: 7798666 NR Description: class I chitinase [Arabis lignifera]
  misc_feature (68)..(319): Homolog of NCBI NO: 7798656 NR Description: class I chitinase [Halimolobos perplexa var.
  misc_feature (56)..(321): Homolog of NCBI NO: 7798640 NR Description: class I chitinase [Arabis blepharophylla]
  misc_feature (68)..(321): Homolog of NCBI NO: 7798664 NR Description: class I chitinase [Arabis lignifera]
  misc_feature (68)..(321): Homolog of NCBI NO: 7798632 NR Description: class I chitinase [Arabis holboellii]
  misc_feature (68)..(321): Homolog of NCBI NO: 7798670 NR Description: class I chitinase [Arabis microphylla]
  misc_feature (48)..(323): Homolog of NCBI NO: 27817867 NR Description: OJ1081_B12.16 [Oryza sativa (japonica
  misc_feature (8)..(332): Homolog of NCBI NO: 15221283 NR Description: glycosyl hydrolase family 19 (chitinase)
  misc_feature (1)..(333): Homolog of NCBI NO: 15228911 NR Description: glycosyl hydrolase family 19 (chitinase)
MVSKPLFSLLLLTVALVVFQTGTLVNAEDSEPSSSTRKPLVKIVKGKKLCDKGWECKGWSEYCCNHTISDFFETYQFENLFSKRNSPVAHAVGFWDYRSFITAAAEYQPLGFGTAGEKLQGMKEVAAFLGHVGSKTSCGYGVATGGPLAWGLCYNKEMSPDQLYCDDYYKLTYPCTPGVSYHGRGALPVYWNYNYGQTGEALKVDLLSHPEYLENNATLAFQAAIWRWMTPPKKHLPSAHDVFVGKWKPTKNDTAAKRTPGFGATINVLYGDQICNSGFDNDEMNNIVSHYLYYLDLIGVGREEAGPHEKLSCADQEPFSSSSSAPPSSGSSS

SEQ ID NO: 42186 - DNA, 1270 bp, Arabidopsis thaliana
  misc_feature (1)..(1270): Ceres Seq. ID no. 12328910
  misc_feature: MA Experiment ID: 108501 Result: Down-regulated in Transcription
  misc_feature: MA Experiment 108501 PARAMETER Experiment Name: At_ap2_floral_buds_cDNA_P Parameter: Plant Line Value: ap2 (Ler.)
  misc_feature: MA Experiment 108501 PARAMETER Experiment Name: At_ap2_floral_buds_cDNA_P Parameter: Tissue Value: Closed Flower
  misc_feature: MA Experiment ID: 20000179 Result: Up-regulated in Transcription
  misc_feature: MA Experiment 20000179 PARAMETER Experiment Name: At_Germinating_Seeds_P Parameter: Age (hr) Value: 6 vs. 0
  misc_feature: MA Experiment 20000179 PARAMETER Experiment Name: At_Germinating_Seeds_P Parameter: Tissue Value: Germinating Seeds
  misc_feature: MA Experiment ID: 20001248 Result: Up-regulated in Transcription
  misc_feature: MA Experiment 20001248 PARAMETER Experiment Name: At_Far-red-induction_P Parameter: Age (day) Value: 7
  misc_feature: MA Experiment 20001248 PARAMETER Experiment Name: At_Far-red-induction_P Parameter: Light Value: Far-red vs. White
  misc_feature: MA Experiment 20001248 PARAMETER Experiment Name: At_Far-red-induction_P Parameter: Organism Value: A. thaliana
  misc_feature: MA Experiment 20001248 PARAMETER Experiment Name: At_Far-red-induction_P Parameter: Plant Line Value: Columbia
  misc_feature: MA Experiment 20001248 PARAMETER Experiment Name: At_Far-red-induction_P Parameter: Timepoint (hr) Value: 4
  misc_feature: MA Experiment 20001248 PARAMETER Experiment Name: At_Far-red-induction_P Parameter: Tissue Value: Whole Plant
cttttgatccaagtttggttgcccagaaatatcaaagaaaaaaaaacaaagctttgttgtttctggcagtagaatcattcatggctttctttgcgtgttaaacattcactaacctaaaaactaaaacttcgttttcagcaatcatgagattcaacaagggaactaaagtcgaagtgttgagcaaatcatcggttccatctggcgcctggcggtctgcagagatcatatcaggaaatgggcattactacactgtcatgtatgatcataatgatggtacagagagggtaccgaggaagagtatgaggcctgagcctcctcgtttacaagttcttgatgcttggtgtcctggtgacattcttgaggttttccaaagttgttcgtggaagatggcaatcgtttccaaggttttaggaaacggttgtttcttggttagattacttggttcctcactgaagttcaaggtgactaaatccgatattcgggttagacaatcttggcaagataacgagtggatcatgattggacagggtacatcaagattaagcgcacagacttcaacaggagaactaaggagaaaggtgaatccgaaaggcgactacatttcatctgagagcaaagacaagcttgatgagtctgatgtacctttgtcagtaggtctaaagaaacggacttactctttggttgaacctcacaatcaaactagagctttagctgcttatcctccaaggtttcgtgaagaagtgaaagaagaagaagaagatagagagagtgttgcttcttctgttggtagttgttgcatggatactgatggtctcagtgctgtttcattcaatcccattgaaaccggtaactctagtgacacagagtcatcgtcttgtggctacgggaaggtcaagaagttggtggttccaagaaaaggctcagaggctgctgatgttcataggttagagctggatgcataccgaagcagtatcgagagattgcacgcatccggaccaatcataacatgggaacaagaaacgtggattacaaatctccgtctcaaattgaacatttcgaatgaggaacatctgatgcagataagaaaccttatctctgacgataacagtactatatacagatagcagcagcagcagcattgagaactacagtttgtgttacatagaataaaaactgagtgtagattgtacaaatgtcattttatttttcattcaggtttttttatttaattccaaacttgtgaaagaaaatttgatcatctttactcttc

SEQ ID NO: 42187 - protein, 326 aa, Arabidopsis thaliana
  peptide (1)..(326): Ceres Seq. ID no. 12328911
  misc_feature (3)..(61): Pfam Name: Agenet domain Pfam Description: Agenet domain
  misc_feature (196)..(318): Homolog of NCBI NO: 15236804 NR Description: putative protein; protein id: At4g32440.1
  misc_feature (207)..(318): Homolog of NCBI NO: 34393474 NR Description: hypothetical protein [Oryza sativa (japonica
  misc_feature (43)..(161): Homolog of NCBI NO: 34393474 NR Description: hypothetical protein [Oryza sativa (japonica
  misc_feature (1)..(131): Homolog of NCBI NO: 15224760 NR Description: hypothetical protein; protein id: At2g25590.1
  misc_feature (1)..(249): Homolog of NCBI NO: 15236804 NR Description: putative protein; protein id: At4g32440.1
  misc_feature (1)..(326): Homolog of NCBI NO: 15241247 NR Description: putative protein
MRFNKGTKVEVLSKSSVPSGAWRSAEIISGNGHYYTVMYDHNDGTERVPRKSMRPEPPRLQVLDAWCPGDILEVFQSCSWKMAIVSKVLGNGCFLVRLLGSSLKFKVTKSDIRVRQSWQDNEWIMIGQGTSRLSAQTSTGELRRKVNPKGDYISSESKDKLDESDVPLSVGLKKRTYSLVEPHNQTRALAAYPPRFREEVKEEEEDRESVASSVGSCCMDTDGLSAVSFNPIETGNSSDTESSSCGYGKVKKLVVPRKGSEAADVHRLELDAYRSSIERLHASGPIITWEQETWITNLRLKLNISNEEHLMQIRNLISDDNSTIYR

SEQ ID NO: 42188 - protein, 289 aa, Arabidopsis thaliana
  peptide (1)..(289): Ceres Seq. ID no. 12328912
  misc_feature (159)..(281): Homolog of NCBI NO: 15236804 NR Description: putative protein; protein id: At4g32440.1
  misc_feature (170)..(281): Homolog of NCBI NO: 34393474 NR Description: hypothetical protein [Oryza sativa (japonica
  misc_feature (6)..(124): Homolog of NCBI NO: 34393474 NR Description: hypothetical protein [Oryza sativa (japonica
  misc_feature (1)..(94): Homolog of NCBI NO: 15224760 NR Description: hypothetical protein; protein id: At2g25590.1
  misc_feature (1)..(212): Homolog of NCBI NO: 15236804 NR Description: putative protein; protein id: At4g32440.1
  misc_feature (1)..(289): Homolog of NCBI NO: 15241247 NR Description: putative protein
MYDHNDGTERVPRKSMRPEPPRLQVLDAWCPGDILEVFQSCSWKMAIVSKVLGNGCFLVRLLGSSLKFKVTKSDIRVRQSWQDNEWIMIGQGTSRLSAQTSTGELRRKVNPKGDYISSESKDKLDESDVPLSVGLKKRTYSLVEPHNQTRALAAYPPRFREEVKEEEEDRESVASSVGSCCMDTDGLSAVSFNPIETGNSSDTESSSCGYGKVKKLVVPRKGSEAADVHRLELDAYRSSIERLHASGPIITWEQETWITNLRLKLNISNEEHLMQIRNLISDDNSTIYR

SEQ ID NO: 42189 - protein, 274 aa, Arabidopsis thaliana
  peptide (1)..(274): Ceres Seq. ID no. 12328913
  misc_feature (144)..(266): Homolog of NCBI NO: 15236804 NR Description: putative protein; protein id: At4g32440.1
  misc_feature (155)..(266): Homolog of NCBI NO: 34393474 NR Description: hypothetical protein [Oryza sativa (japonica
  misc_feature (1)..(109): Homolog of NCBI NO: 34393474 NR Description: hypothetical protein [Oryza sativa (japonica
  misc_feature (1)..(79): Homolog of NCBI NO: 15224760 NR Description: hypothetical protein; protein id: At2g25590.1
  misc_feature (1)..(197): Homolog of NCBI NO: 15236804 NR Description: putative protein; protein id: At4g32440.1
  misc_feature (1)..(274): Homolog of NCBI NO: 15241247 NR Description: putative protein
MRPEPPRLQVLDAWCPGDILEVFQSCSWKMAIVSKVLGNGCFLVRLLGSSLKFKVTKSDIRVRQSWQDNEWIMIGQGTSRLSAQTSTGELRRKVNPKGDYISSESKDKLDESDVPLSVGLKKRTYSLVEPHNQTRALAAYPPRFREEVKEEEEDRESVASSVGSCCMDTDGLSAVSFNPIETGNSSDTESSSCGYGKVKKLVVPRKGSEAADVHRLELDAYRSSIERLHASGPIITWEQETWITNLRLKLNISNEEHLMQIRNLISDDNSTIYR

SEQ ID NO: 42190 - DNA, 1464 bp, Arabidopsis thaliana
  misc_feature (1)..(1464): Ceres Seq. ID no. 13488192
  misc_feature: MA Experiment ID: 108488 Result: Down-regulated in Transcription
  misc_feature: MA Experiment ID: 20000111 Result: Down-regulated in Transcription
  misc_feature: MA Experiment 20000111 PARAMETER Experiment Name: At_42deg_Heat_cDNA_P Parameter: Temperature (deg C) Value: 42 vs. 22
  misc_feature: MA Experiment 20000111 PARAMETER Experiment Name: At_42deg_Heat_cDNA_P Parameter: Timepoint (hr) Value: 6
  misc_feature: MA Experiment 20000111 PARAMETER Experiment Name: At_42deg_Heat_cDNA_P Parameter: Tissue Value: Aerial
  misc_feature: MA Experiment ID: 20000173 Result: Down-regulated in Transcription
  misc_feature: MA Experiment 20000173 PARAMETER Experiment Name: At_42deg_Heat_P Parameter: Age (day) Value: 14
  misc_feature: MA Experiment 20000173 PARAMETER Experiment Name: At_42deg_Heat_P Parameter: Organism Value: A. thaliana
  misc_feature: MA Experiment 20000173 PARAMETER Experiment Name: At_42deg_Heat_P Parameter: Plant Line Value: WS
  misc_feature: MA Experiment 20000173 PARAMETER Experiment Name: At_42deg_Heat_P Parameter: Temperature (deg C) Value: 42 vs. 22
  misc_feature: MA Experiment 20000173 PARAMETER Experiment Name: At_42deg_Heat_P Parameter: Timepoint (hr) Value: 6
  misc_feature: MA Experiment 20000173 PARAMETER Experiment Name: At_42deg_Heat_P Parameter: Tissue Value: Aerial
  misc_feature: MA Experiment ID: 20000180 Result: Up-regulated in Transcription
  misc_feature: MA Experiment 20000180 PARAMETER Experiment Name: At_Germinating_Seeds_P Parameter: Age (hr) Value: 24 vs. 0
  misc_feature: MA Experiment 20000180 PARAMETER Experiment Name: At_Germinating_Seeds_P Parameter: Tissue Value: Germinating Seeds
  misc_feature: MA Experiment ID: 20000184 Result: Down-regulated in Transcription
  misc_feature: MA Experiment 20000184 PARAMETER Experiment Name: At_Shoots__P Parameter: Age (day) Value: 7
  misc_feature: MA Experiment 20000184 PARAMETER Experiment Name: At_Shoots__P Parameter: Tissue Value: Shoots vs. Whole Plant
  misc_feature: MA Experiment ID: 20000224 Result: Up-regulated in Transcription
  misc_feature: MA Experiment ID: 20000438 Result: Down-regulated in Transcription
  misc_feature: MA Experiment 20000438 PARAMETER Experiment Name: At_Shoots__P Parameter: Age (day) Value: 14
  misc_feature: MA Experiment 20000438 PARAMETER Experiment Name: At_Shoots__P Parameter: Tissue Value: Shoots vs. Whole Plant
  misc_feature: MA Experiment ID: 20001904 Result: Up-regulated in Transcription
  misc_feature: MA Experiment 20001904 PARAMETER Experiment Name: At_Drought_Reproduction_P Parameter: Age (day) Value: 37
  misc_feature: MA Experiment 20001904 PARAMETER Experiment Name: At_Drought_Reproduction_P Parameter: Organism Value: A. thaliana
  misc_feature: MA Experiment 20001904 PARAMETER Experiment Name: At_Drought_Reproduction_P Parameter: Plant Line Value: WS
  misc_feature: MA Experiment 20001904 PARAMETER Experiment Name: At_Drought_Reproduction_P Parameter: Timepoint (day) Value: 7
  misc_feature: MA Experiment 20001904 PARAMETER Experiment Name: At_Drought_Reproduction_P Parameter: Tissue Value: Rosettes
  misc_feature: MA Experiment 20001904 PARAMETER Experiment Name: At_Drought_Reproduction_P Parameter: Treatment Value: Drought vs. No Drought
  misc_feature: MA Experiment ID: 20001905 Result: Up-regulated in Transcription
  misc_feature: MA Experiment 20001905 PARAMETER Experiment Name: At_Drought_Reproduction_P Parameter: Age (day) Value: 40
  misc_feature: MA Experiment 20001905 PARAMETER Experiment Name: At_Drought_Reproduction_P Parameter: Organism Value: A. thaliana
  misc_feature: MA Experiment 20001905 PARAMETER Experiment Name: At_Drought_Reproduction_P Parameter: Plant Line Value: WS
  misc_feature: MA Experiment 20001905 PARAMETER Experiment Name: At_Drought_Reproduction_P Parameter: Timepoint (day) Value: 10
  misc_feature: MA Experiment 20001905 PARAMETER Experiment Name: At_Drought_Reproduction_P Parameter: Tissue Value: Rosettes
  misc_feature: MA Experiment 20001905 PARAMETER Experiment Name: At_Drought_Reproduction_P Parameter: Treatment Value: Drought vs. No Drought
tgaagggaaacaaaaataaattcctcgagagatagaagtaaaaaaaaaagaaggggattttcgcatttgccctgagcgaaagagagagaatgtatttgacgagttccaggagaaatcagagctagagaaatctagtggtaatggggagagaacttgtagacaaacacatggataagaaagcgaatagtttgacagctagctcgacgggatcttcagatgataataaagtcccaagtccgtctactaatgaagctgcagaggtgaaagaatgcaccgagcagaatttggttgcggatgatgctcgtttgaggcaacaagggataactgagacacctggatcccataaatcttctgttaaacctcgtgttactgcgaaaacaactgttccaaagccgttttccctgtcggctgaaaagcctagaagagcagcggttgataataattcattaggaaatggtgctagccataactcttcttcagcatcaagagtttcacagctaaactctcctttaccaactaggaggataccagatcataagatgcaccatgatgaagaagatagtttttctgttgcttcctcatcagctacatccataagaagttttaaacccaagataacgattggagttgctccaacatttagtagcacatcgcgactggagagacgaagagagttttaccagaagttagaggaaaaacagaaagcacttgaagcagagaaaagagaaaacgagaaaaggcttaaggaagagcaagaagcagtcactaagcaacttaggaagaacatggcttacaaagctaatccggtaccaagtttctaccaagagggtcctccaccgaaacaaccattgaaaaagtttccattgactcggcctaagtcaccaaaccttaaccgtagaaagagctgcagcgacacagttaacgcatcatatcaggaagtgaaggggaagcattgtgctcgacatcgtcacagtgtaggtggttgcaaggatgaagtcaaaacgaacagtgtcccaaggacaccaaatagcagcagcaaagatcagatgagaaagtccaaaaagggaacaccaaagtctgaagaagtacatgaaatgtttaatagtggccatgatggagagactggtgagaatggcgttggtgttgtggaggagtgaagcttcgcgtagttgtagtttcgttttgactaactttggtgaatgagaaaaacaagaaaaatggtgagaagcaactgcaaggagaagaacaggttttagagtgaaagaacaagtttaaagtttgtttgtttgtttgttgtctaatgttctgcagattgattgttctaaatttgattgctaaaatcagctgctctattttcgtatgatcttttcttatctgtttgacaattaatgtgaaatgtatattaaagttgttgttgtatggatcccaaattcccaattattataactagattaatggttaagc

SEQ ID NO: 42191 - protein, 338 aa, Arabidopsis thaliana
  peptide (1)..(338): Ceres Seq. ID no. 13488193
  misc_feature (57)..(313): Homolog of NCBI NO: 34393229 NR Description: putative seed specific protein
  misc_feature (87)..(318): Homolog of NCBI NO: 18396961 NR Description: expressed protein [Arabidopsis thaliana]
  misc_feature (87)..(318): Homolog of NCBI NO: 21618286 NR Description: unknown [Arabidopsis thaliana]
  misc_feature (87)..(318): Homolog of NCBI NO: 6175167 NR Description: unknown protein [Arabidopsis thaliana]
  misc_feature (87)..(318): Homolog of NCBI NO: 30679219 NR Description: expressed protein [Arabidopsis thaliana]
  misc_feature (7)..(293): Homolog of NCBI NO: 34897180 NR Description: unknown protein [Oryza sativa (japonica
  misc_feature (1)..(128): Homolog of NCBI NO: 25405735 NR Description: hypothetical protein F20D21.28 [imported] -
  misc_feature (162)..(338): Homolog of NCBI NO: 25405735 NR Description: hypothetical protein F20D21.28 [imported] -
  misc_feature (1)..(338): Homolog of NCBI NO: 21553401 NR Description: unknown [Arabidopsis thaliana]
  misc_feature (1)..(338): Homolog of NCBI NO: 18404945 NR Description: expressed protein [Arabidopsis thaliana]
MGRELVDKHMDKKANSLTASSTGSSDDNKVPSPSTNEAAEVKECTEQNLVADDARLRQQGITETPGSHKSSVKPRVTAKTTVPKPFSLSAEKPRRAAVDNNSLGNGASHNSSSASRVSQLNSPLPTRRIPDHKMHHDEEDSFSVASSSATSIRSFKPKITIGVAPTFSSTSRLERRREFYQKLEEKQKALEAEKRENEKRLKEEQEAVTKQLRKNMAYKANPVPSFYQEGPPPKQPLKKFPLTRPKSPNLNRRKSCSDTVNASYQEVKGKHCARHRHSVGGCKDEVKTNSVPRTPNSSSKDQMRKSKKGTPKSEEVHEMFNSGHDGETGENGVGVVEE

SEQ ID NO: 42192 - protein, 329 aa, Arabidopsis thaliana
  peptide (1)..(329): Ceres Seq. ID no. 13488194
  misc_feature (48)..(304): Homolog of NCBI NO: 34393229 NR Description: putative seed specific protein
  misc_feature (78)..(309): Homolog of NCBI NO: 21618286 NR Description: unknown [Arabidopsis thaliana]
  misc_feature (78)..(309): Homolog of NCBI NO: 18396961 NR Description: expressed protein [Arabidopsis thaliana]
  misc_feature (78)..(309): Homolog of NCBI NO: 6175167 NR Description: unknown protein [Arabidopsis thaliana]
  misc_feature (78)..(309): Homolog of NCBI NO: 30679219 NR Description: expressed protein [Arabidopsis thaliana]
  misc_feature (1)..(284): Homolog of NCBI NO: 34897180 NR Description: unknown protein [Oryza sativa (japonica
  misc_feature (1)..(119): Homolog of NCBI NO: 25405735 NR Description: hypothetical protein F20D21.28 [imported] -
  misc_feature (153)..(329): Homolog of NCBI NO: 25405735 NR Description: hypothetical protein F20D21.28 [imported] -
  misc_feature (1)..(329): Homolog of NCBI NO: 21553401 NR Description: unknown [Arabidopsis thaliana]
  misc_feature (1)..(329): Homolog of NCBI NO: 18404945 NR Description: expressed protein [Arabidopsis thaliana]
MDKKANSLTASSTGSSDDNKVPSPSTNEAAEVKECTEQNLVADDARLRQQGITETPGSHKSSVKPRVTAKTTVPKPFSLSAEKPRRAAVDNNSLGNGASHNSSSASRVSQLNSPLPTRRIPDHKMHHDEEDSFSVASSSATSIRSFKPKITIGVAPTFSSTSRLERRREFYQKLEEKQKALEAEKRENEKRLKEEQEAVTKQLRKNMAYKANPVPSFYQEGPPPKQPLKKFPLTRPKSPNLNRRKSCSDTVNASYQEVKGKHCARHRHSVGGCKDEVKTNSVPRTPNSSSKDQMRKSKKGTPKSEEVHEMFNSGHDGETGENGVGVVEE

SEQ ID NO: 42193 - protein, 205 aa, Arabidopsis thaliana
  peptide (1)..(205): Ceres Seq. ID no. 13488195
  misc_feature (1)..(133): Homolog of NCBI NO: 28453880 NR Description: WAVE-DAMPENED2 [Arabidopsis thaliana]
  misc_feature (1)..(180): Homolog of NCBI NO: 34393229 NR Description: putative seed specific protein
  misc_feature (1)..(185): Homolog of NCBI NO: 21618286 NR Description: unknown [Arabidopsis thaliana]
  misc_feature (1)..(185): Homolog of NCBI NO: 18396961 NR Description: expressed protein [Arabidopsis thaliana]
  misc_feature (1)..(185): Homolog of NCBI NO: 6175167 NR Description: unknown protein [Arabidopsis thaliana]
  misc_feature (1)..(185): Homolog of NCBI NO: 30679219 NR Description: expressed protein [Arabidopsis thaliana]
  misc_feature (1)..(160): Homolog of NCBI NO: 34897180 NR Description: unknown protein [Oryza sativa (japonica
  misc_feature (29)..(205): Homolog of NCBI NO: 25405735 NR Description: hypothetical protein F20D21.28 [imported] -
  misc_feature (1)..(205): Homolog of NCBI NO: 21553401 NR Description: unknown [Arabidopsis thaliana]
  misc_feature (1)..(205): Homolog of NCBI NO: 18404945 NR Description: expressed protein [Arabidopsis thaliana]
MHHDEEDSFSVASSSATSIRSFKPKITIGVAPTFSSTSRLERRREFYQKLEEKQKALEAEKRENEKRLKEEQEAVTKQLRKNMAYKANPVPSFYQEGPPPKQPLKKFPLTRPKSPNLNRRKSCSDTVNASYQEVKGKHCARHRHSVGGCKDEVKTNSVPRTPNSSSKDQMRKSKKGTPKSEEVHEMFNSGHDGETGENGVGVVEE

SEQ ID NO: 42194 - DNA, 1515 bp, Arabidopsis thaliana
  misc_feature (1)..(1515): Ceres Seq. ID no. 12422354
  misc_feature: MA Experiment ID: 108434 Result: Up-regulated in Transcription
  misc_feature: MA Experiment 108434 PARAMETER Experiment Name: At_Root_Tips_cDNA_P Parameter: Tissue Value: Root Tips
  misc_feature: MA Experiment ID: 108462 Result: Up-regulated in Transcription
  misc_feature: MA Experiment 108462 PARAMETER Experiment Name: At_Germinating_Seeds_cDNA_P Parameter: Age (day) Value: 2 vs. 0
  misc_feature: MA Experiment 108462 PARAMETER Experiment Name: At_Germinating_Seeds_cDNA_P Parameter: Tissue Value: Germinating Seeds
  misc_feature: MA Experiment ID: 108463 Result: Up-regulated in Transcription
  misc_feature: MA Experiment 108463 PARAMETER Experiment Name: At_Germinating_Seeds_cDNA_P Parameter: Age (day) Value: 3 vs. 0
  misc_feature: MA Experiment 108463 PARAMETER Experiment Name: At_Germinating_Seeds_cDNA_P Parameter: Tissue Value: Germinating Seeds
  misc_feature: MA Experiment ID: 108464 Result: Up-regulated in Transcription
  misc_feature: MA Experiment 108464 PARAMETER Experiment Name: At_Germinating_Seeds_cDNA_P Parameter: Age (day) Value: 4 vs. 0
  misc_feature: MA Experiment 108464 PARAMETER Experiment Name: At_Germinating_Seeds_cDNA_P Parameter: Tissue Value: Germinating Seeds
  misc_feature: MA Experiment ID: 108576 Result: Down-regulated in Transcription
  misc_feature: MA Experiment 108576 PARAMETER Experiment Name: At_42deg_Heat_cDNA_P Parameter: Temperature (deg C) Value: 42 vs. 22
  misc_feature: MA Experiment 108576 PARAMETER Experiment Name: At_42deg_Heat_cDNA_P Parameter: Timepoint (hr) Value: 1
  misc_feature: MA Experiment 108576 PARAMETER Experiment Name: At_42deg_Heat_cDNA_P Parameter: Tissue Value: Aerial
  misc_feature: MA Experiment ID: 108577 Result: Down-regulated in Transcription
  misc_feature: MA Experiment 108577 PARAMETER Experiment Name: At_42deg_Heat_cDNA_P Parameter: Temperature (deg C) Value: 42 vs. 22
  misc_feature: MA Experiment 108577 PARAMETER Experiment Name: At_42deg_Heat_cDNA_P Parameter: Timepoint (hr) Value: 6
  misc_feature: MA Experiment 108577 PARAMETER Experiment Name: At_42deg_Heat_cDNA_P Parameter: Tissue Value: Aerial
  misc_feature: MA Experiment ID: 108595 Result: Down-regulated in Transcription
  misc_feature: MA Experiment 108595 PARAMETER Experiment Name: At_Ler-pi_Ovule_cDNA_P Parameter: Plant Line Value: null
  misc_feature: MA Experiment ID: 20000111 Result: Down-regulated in Transcription
  misc_feature: MA Experiment 20000111 PARAMETER Experiment Name: At_42deg_Heat_cDNA_P Parameter: Temperature (deg C) Value: 42 vs. 22
  misc_feature: MA Experiment 20000111 PARAMETER Experiment Name: At_42deg_Heat_cDNA_P Parameter: Timepoint (hr) Value: 6
  misc_feature: MA Experiment 20000111 PARAMETER Experiment Name: At_42deg_Heat_cDNA_P Parameter: Tissue Value: Aerial
  misc_feature: MA Experiment ID: 20000112 Result: Down-regulated in Transcription
  misc_feature: MA Experiment 20000112 PARAMETER Experiment Name: At_42deg_Heat_cDNA_P Parameter: Temperature (deg C) Value: 42 vs. 22
  misc_feature: MA Experiment 20000112 PARAMETER Experiment Name: At_42deg_Heat_cDNA_P Parameter: Timepoint (hr) Value: 2
  misc_feature: MA Experiment 20000112 PARAMETER Experiment Name: At_42deg_Heat_cDNA_P Parameter: Tissue Value: Aerial
  misc_feature: MA Experiment ID: 20000113 Result: Down-regulated in Transcription
  misc_feature: MA Experiment 20000113 PARAMETER Experiment Name: At_42deg_Heat_cDNA_P Parameter: Temperature (deg C) Value: 42 vs. 22
  misc_feature: MA Experiment 20000113 PARAMETER Experiment Name: At_42deg_Heat_cDNA_P Parameter: Timepoint (hr) Value: 8
  misc_feature: MA Experiment 20000113 PARAMETER Experiment Name: At_42deg_Heat_cDNA_P Parameter: Tissue Value: Aerial
  misc_feature: MA Experiment ID: 20000171 Result: Down-regulated in Transcription
  misc_feature: MA Experiment 20000171 PARAMETER Experiment Name: At_42deg_Heat_P Parameter: Age (day) Value: 14
  misc_feature: MA Experiment 20000171 PARAMETER Experiment Name: At_42deg_Heat_P Parameter: Organism Value: A. thaliana
  misc_feature: MA Experiment 20000171 PARAMETER Experiment Name: At_42deg_Heat_P Parameter: Plant Line Value: WS
  misc_feature: MA Experiment 20000171 PARAMETER Experiment Name: At_42deg_Heat_P Parameter: Temperature (deg C) Value: 42 vs. 22
  misc_feature: MA Experiment 20000171 PARAMETER Experiment Name: At_42deg_Heat_P Parameter: Timepoint (hr) Value: 1
  misc_feature: MA Experiment 20000171 PARAMETER Experiment Name: At_42deg_Heat_P Parameter: Tissue Value: Aerial
  misc_feature: MA Experiment ID: 20000173 Result: Down-regulated in Transcription
  misc_feature: MA Experiment 20000173 PARAMETER Experiment Name: At_42deg_Heat_P Parameter: Age (day) Value: 14
  misc_feature: MA Experiment 20000173 PARAMETER Experiment Name: At_42deg_Heat_P Parameter: Organism Value: A. thaliana
  misc_feature: MA Experiment 20000173 PARAMETER Experiment Name: At_42deg_Heat_P Parameter: Plant Line Value: WS
  misc_feature: MA Experiment 20000173 PARAMETER Experiment Name: At_42deg_Heat_P Parameter: Temperature (deg C) Value: 42 vs. 22
  misc_feature: MA Experiment 20000173 PARAMETER Experiment Name: At_42deg_Heat_P Parameter: Timepoint (hr) Value: 6
  misc_feature: MA Experiment 20000173 PARAMETER Experiment Name: At_42deg_Heat_P Parameter: Tissue Value: Aerial
  misc_feature: MA Experiment ID: 20000180 Result: Up-regulated in Transcription
  misc_feature: MA Experiment 20000180 PARAMETER Experiment Name: At_Germinating_Seeds_P Parameter: Age (hr) Value: 24 vs. 0
  misc_feature: MA Experiment 20000180 PARAMETER Experiment Name: At_Germinating_Seeds_P Parameter: Tissue Value: Germinating Seeds
  misc_feature: MA Experiment ID: 20000794 Result: Up-regulated in Transcription
  misc_feature: MA Experiment 20000794 PARAMETER Experiment Name: At_Petals_P Parameter: Age (day) Value: 23-25 days
  misc_feature: MA Experiment 20000794 PARAMETER Experiment Name: At_Petals_P Parameter: Plant Line Value: WS
  misc_feature: MA Experiment 20000794 PARAMETER Experiment Name: At_Petals_P Parameter: Tissue Value: Petals vs. Whole plant
  misc_feature: MA Experiment ID: 20001905 Result: Down-regulated in Transcription
  misc_feature: MA Experiment 20001905 PARAMETER Experiment Name: At_Drought_Reproduction_P Parameter: Age (day) Value: 40
  misc_feature: MA Experiment 20001905 PARAMETER Experiment Name: At_Drought_Reproduction_P Parameter: Organism Value: A. thaliana
  misc_feature: MA Experiment 20001905 PARAMETER Experiment Name: At_Drought_Reproduction_P Parameter: Plant Line Value: WS
  misc_feature: MA Experiment 20001905 PARAMETER Experiment Name: At_Drought_Reproduction_P Parameter: Timepoint (day) Value: 10
  misc_feature: MA Experiment 20001905 PARAMETER Experiment Name: At_Drought_Reproduction_P Parameter: Tissue Value: Rosettes
  misc_feature: MA Experiment 20001905 PARAMETER Experiment Name: At_Drought_Reproduction_P Parameter: Treatment Value: Drought vs. No Drought
gtttttgattatctgagagagagagagaagaaacttgttgaaacaaaatcaacaacaacttatagaagaccaaaaaaagattcataggatcttttgcttgacaatgaaagaaggaaaggatgggtttgttcgagcagatcagattgatctaaaaagcttagacgagcaactagagagacacttaagcagagctttgactttagagaagaacaagaagaaagatgaagaagacacaaccgccgtcgccatcggtggctctgcttcttcttcccctgtcactctaaacggcggcggatttgttggcaagaggaaacagagacttgagtgggagatcgatccttctaaacttatcatcaagactgttcttgctcgtggcacttttggtaccgttcatcgtggtatctacgacggtcaagatgttgccgtgaagttgcttgattggggtgaagaaggtcatagatcagaagctgagatttgtgtctttgagagctgattttgctcaggaggttgctgtttggcataaattggatcatcctaatgtcaccaagtttataggagcaacaatgggtgcatcagggttacagttgcaaacagagagtggtccattagctatgccaaacaatatatgttgtgttgttgttgaatatcttccaggtggtgctttaaaatcttacctgatcaagaacagaagaagaaaactaacatttaaaattgttgttcagctcgctcttgatctcgctagagggttgagttaccttcattcgcagaagattgttcaccgagatgtaaagacagagaatatgttgttagacaaaacccggactgttaaaatcgcagattttggagttgcgagagttgaagcatctaaccctaatgacatgacaggagagactggcacacttggctacatggcgcctgaggttctcaatggaaacccgtataatcgaaaatgcgatgtatacagtttcgggatctgcttatgggagatatattgctgtgacatgccataccctgaccttactttctctgaggtcacttcagccgtcgtccgccagaacctgagacccgatataccgaggtgttgcccgagcgcacttgcagctgtgatgaagcgatgttgggatgcaaatccggacaagagaccggagatggatgaggttgtaccaatgttggagagtattgacacaaccaagggaggagggatgattcctaacgaccagcaacagggttgcctatgcttccgaaggaaacgtggtccttaattcccaaagaccaatctaagatcattcaaaactcaagattcgtgtccttgcttcttttctttttctttttataatccagaaggaaaaaaaatgggaaggcttgttagggatctaatggttgctaaaatttacgtaaagagtatgatttggtttccatattcttcaacatttcttgttttgctctatttgtgagagttgcttattaaatatttatggtcacgtatatcatcatctctaatcatatatttgatat

SEQ ID NO: 42195 - protein, 232 aa, Arabidopsis thaliana
  peptide (1)..(232): Ceres Seq. ID no. 12422355
  misc_feature (1)..(203): Pfam Name: Protein kinase domain Pfam Description: Protein kinase domain
  misc_feature (1)..(231): Homolog of NCBI NO: 14626298 NR Description: putative protein kinase [Oryza sativa (japonica
  misc_feature (1)..(232): Homolog of NCBI NO: 21554375 NR Description: ATMRK1 [Arabidopsis thaliana]
  misc_feature (1)..(232): Homolog of NCBI NO: 15229398 NR Description: ATMRK1
  misc_feature (1)..(232): Homolog of NCBI NO: 15233574 NR Description: kinase like protein; protein id: At4g14780.1
  misc_feature (1)..(232): Homolog of NCBI NO: 18403507 NR Description: expressed protein
  misc_feature (1)..(232): Homolog of NCBI NO: 34911620 NR Description: protein kinase -like [Oryza sativa (japonica
  misc_feature (1)..(232): Homolog of NCBI NO: 29367399 NR Description: putative protein kinase [Oryza sativa (japonica
  misc_feature (1)..(232): Homolog of NCBI NO: 15232131 NR Description: putative protein kinase
  misc_feature (1)..(232): Homolog of NCBI NO: 21553402 NR Description: protein kinase [Arabidopsis thaliana]
  misc_feature (1)..(232): Homolog of NCBI NO: 15240597 NR Description: protein kinase
MGASGLQLQTESGPLAMPNNICCVVVEYLPGGALKSYLIKNRRRKLTFKIVVQLALDLARGLSYLHSQKIVHRDVKTENMLLDKTRTVKIADFGVARVEASNPNDMTGETGTLGYMAPEVLNGNPYNRKCDVYSFGICLWEIYCCDMPYPDLTFSEVTSAVVRQNLRPDIPRCCPSALAAVMKRCWDANPDKRPEMDEVVPMLESIDTTKGGGMIPNDQQQGCLCFRRKRGP

SEQ ID NO: 42196 - protein, 216 aa, Arabidopsis thaliana
  peptide (1)..(216): Ceres Seq. ID no. 12422356
  misc_feature (1)..(187): Pfam Name: Protein kinase domain Pfam Description: Protein kinase domain
  misc_feature (1)..(215): Homolog of NCBI NO: 14626298 NR Description: putative protein kinase [Oryza sativa (japonica
  misc_feature (1)..(216): Homolog of NCBI NO: 21554375 NR Description: ATMRK1 [Arabidopsis thaliana]
  misc_feature (1)..(216): Homolog of NCBI NO: 15229398 NR Description: ATMRK1
  misc_feature (1)..(216): Homolog of NCBI NO: 15233574 NR Description: kinase like protein; protein id: At4g14780.1
  misc_feature (1)..(216): Homolog of NCBI NO: 18403507 NR Description: expressed protein
  misc_feature (1)..(216): Homolog of NCBI NO: 34911620 NR Description: protein kinase -like [Oryza sativa (japonica
  misc_feature (1)..(216): Homolog of NCBI NO: 29367399 NR Description: putative protein kinase [Oryza sativa (japonica
  misc_feature (1)..(216): Homolog of NCBI NO: 15232131 NR Description: putative protein kinase
  misc_feature (1)..(216): Homolog of NCBI NO: 21553402 NR Description: protein kinase [Arabidopsis thaliana]
  misc_feature (1)..(216): Homolog of NCBI NO: 15240597 NR Description: protein kinase
MPNNICCVVVEYLPGGALKSYLIKNRRRKLTFKIVVQLALDLARGLSYLHSQKIVHRDVKTENMLLDKTRTVKIADFGVARVEASNPNDMTGETGTLGYMAPEVLNGNPYNRKCDVYSFGICLWEIYCCDMPYPDLTFSEVTSAVVRQNLRPDIPRCCPSALAAVMKRCWDANPDKRPEMDEVVPMLESIDTTKGGGMIPNDQQQGCLCFRRKRGP

SEQ ID NO: 42197 - protein, 153 aa, Arabidopsis thaliana
  peptide (1)..(153): Ceres Seq. ID no. 12422357
  misc_feature (1)..(124): Pfam Name: Protein kinase domain Pfam Description: Protein kinase domain
  misc_feature (1)..(152): Homolog of NCBI NO: 14626298 NR Description: putative protein kinase [Oryza sativa (japonica
  misc_feature (1)..(153): Homolog of NCBI NO: 21554375 NR Description: ATMRK1 [Arabidopsis thaliana]
  misc_feature (1)..(153): Homolog of NCBI NO: 15229398 NR Description: ATMRK1
  misc_feature (1)..(153): Homolog of NCBI NO: 15233574 NR Description: kinase like protein; protein id: At4g14780.1
  misc_feature (1)..(153): Homolog of NCBI NO: 18403507 NR Description: expressed protein
  misc_feature (1)..(153): Homolog of NCBI NO: 34911620 NR Description: protein kinase -like [Oryza sativa (japonica
  misc_feature (1)..(153): Homolog of NCBI NO: 29367399 NR Description: putative protein kinase [Oryza sativa (japonica
  misc_feature (1)..(153): Homolog of NCBI NO: 15232131 NR Description: putative protein kinase
  misc_feature (1)..(153): Homolog of NCBI NO: 21553402 NR Description: protein kinase [Arabidopsis thaliana]
  misc_feature (1)..(153): Homolog of NCBI NO: 15240597 NR Description: protein kinase
MLLDKTRTVKIADFGVARVEASNPNDMTGETGTLGYMAPEVLNGNPYNRKCDVYSFGICLWEIYCCDMPYPDLTFSEVTSAVVRQNLRPDIPRCCPSALAAVMKRCWDANPDKRPEMDEVVPMLESIDTTKGGGMIPNDQQQGCLCFRRKRGP

SEQ ID NO: 42198 - DNA, 1934 bp, Arabidopsis thaliana
  misc_feature (1)..(1934): Ceres Seq. ID no. 13489363
  misc_feature: MA Experiment ID: 108434 Result: Down-regulated in Transcription
  misc_feature: MA Experiment 108434 PARAMETER Experiment Name: At_Root_Tips_cDNA_P Parameter: Tissue Value: Root Tips
  misc_feature: MA Experiment ID: 108461 Result: Up-regulated in Transcription
  misc_feature: MA Experiment 108461 PARAMETER Experiment Name: At_Germinating_Seeds_cDNA_P Parameter: Age (day) Value: 1 vs. 0
  misc_feature: MA Experiment 108461 PARAMETER Experiment Name: At_Germinating_Seeds_cDNA_P Parameter: Tissue Value: Germinating Seeds
  misc_feature: MA Experiment ID: 108463 Result: Down-regulated in Transcription
  misc_feature: MA Experiment 108463 PARAMETER Experiment Name: At_Germinating_Seeds_cDNA_P Parameter: Age (day) Value: 3 vs. 0
  misc_feature: MA Experiment 108463 PARAMETER Experiment Name: At_Germinating_Seeds_cDNA_P Parameter: Tissue Value: Germinating Seeds
  misc_feature: MA Experiment ID: 108464 Result: Down-regulated in Transcription
  misc_feature: MA Experiment 108464 PARAMETER Experiment Name: At_Germinating_Seeds_cDNA_P Parameter: Age (day) Value: 4 vs. 0
  misc_feature: MA Experiment 108464 PARAMETER Experiment Name: At_Germinating_Seeds_cDNA_P Parameter: Tissue Value: Germinating Seeds
  misc_feature: MA Experiment ID: 108569 Result: Up-regulated in Transcription
  misc_feature: MA Experiment 108569 PARAMETER Experiment Name: At_0.001%_MeJA__cDNA_P Parameter: Timepoint (hr) Value: 6
  misc_feature: MA Experiment 108569 PARAMETER Experiment Name: At_0.001%_MeJA__cDNA_P Parameter: Tissue Value: Aerial
  misc_feature: MA Experiment 108569 PARAMETER Experiment Name: At_0.001%_MeJA__cDNA_P Parameter: Treatment Value: 0.001% MeJA vs. No Treatment
  misc_feature: MA Experiment ID: 108573 Result: Up-regulated in Transcription
  misc_feature: MA Experiment 108573 PARAMETER Experiment Name: At_Drought_cDNA_P Parameter: Timepoint (hr) Value: 6
  misc_feature: MA Experiment 108573 PARAMETER Experiment Name: At_Drought_cDNA_P Parameter: Tissue Value: Aerial
  misc_feature: MA Experiment 108573 PARAMETER Experiment Name: At_Drought_cDNA_P Parameter: Treatment Value: Drought vs. No Drought
  misc_feature: MA Experiment ID: 108576 Result: Down-regulated in Transcription
  misc_feature: MA Experiment 108576 PARAMETER Experiment Name: At_42deg_Heat_cDNA_P Parameter: Temperature (deg C) Value: 42 vs. 22
  misc_feature: MA Experiment 108576 PARAMETER Experiment Name: At_42deg_Heat_cDNA_P Parameter: Timepoint (hr) Value: 1
  misc_feature: MA Experiment 108576 PARAMETER Experiment Name: At_42deg_Heat_cDNA_P Parameter: Tissue Value: Aerial
  misc_feature: MA Experiment ID: 108577 Result: Down-regulated in Transcription
  misc_feature: MA Experiment 108577 PARAMETER Experiment Name: At_42deg_Heat_cDNA_P Parameter: Temperature (deg C) Value: 42 vs. 22
  misc_feature: MA Experiment 108577 PARAMETER Experiment Name: At_42deg_Heat_cDNA_P Parameter: Timepoint (hr) Value: 6
  misc_feature: MA Experiment 108577 PARAMETER Experiment Name: At_42deg_Heat_cDNA_P Parameter: Tissue Value: Aerial
  misc_feature: MA Experiment ID: 108579 Result: Up-regulated in Transcription
  misc_feature: MA Experiment 108579 PARAMETER Experiment Name: At_4deg_Cold_cDNA_P Parameter: Temperature (deg C) Value: 4 vs. 22
  misc_feature: MA Experiment 108579 PARAMETER Experiment Name: At_4deg_Cold_cDNA_P Parameter: Timepoint (hr) Value: 6
  misc_feature: MA Experiment 108579 PARAMETER Experiment Name: At_4deg_Cold_cDNA_P Parameter: Tissue Value: Aerial
  misc_feature: MA Experiment ID: 108585 Result: Up-regulated in Transcription
  misc_feature: MA Experiment 108585 PARAMETER Experiment Name: At_5mM_NaNP_cDNA_P Parameter: Timepoint (hr) Value: 6
  misc_feature: MA Experiment 108585 PARAMETER Experiment Name: At_5mM_NaNP_cDNA_P Parameter: Tissue Value: Aerial
  misc_feature: MA Experiment 108585 PARAMETER Experiment Name: At_5mM_NaNP_cDNA_P Parameter: Treatment Value: null
  misc_feature: MA Experiment ID: 108595 Result: Down-regulated in Transcription
  misc_feature: MA Experiment 108595 PARAMETER Experiment Name: At_Ler-pi_Ovule_cDNA_P Parameter: Plant Line Value: null
  misc_feature: MA Experiment ID: 20000068 Result: Down-regulated in Transcription
  misc_feature: MA Experiment ID: 20000087 Result: Down-regulated in Transcription
  misc_feature: MA Experiment 20000087 PARAMETER Experiment Name: At_100uM_ABA_Mutants_cDNA_P Parameter: Plant Line Value: WS
  misc_feature: MA Experiment 20000087 PARAMETER Experiment Name: At_100uM_ABA_Mutants_cDNA_P Parameter: Timepoint (hr) Value: 6
  misc_feature: MA Experiment 20000087 PARAMETER Experiment Name: At_100uM_ABA_Mutants_cDNA_P Parameter: Tissue Value: Aerial
  misc_feature: MA Experiment 20000087 PARAMETER Experiment Name: At_100uM_ABA_Mutants_cDNA_P Parameter: Treatment Value: 100uM ABA vs. No Treatment
  misc_feature: MA Experiment ID: 20000117 Result: Down-regulated in Transcription
  misc_feature: MA Experiment 20000117 PARAMETER Experiment Name: At_100uM_ABA_Mutants_cDNA_P Parameter: Plant Line Value: Columbia
  misc_feature: MA Experiment 20000117 PARAMETER Experiment Name: At_100uM_ABA_Mutants_cDNA_P Parameter: Timepoint (hr) Value: 6
  misc_feature: MA Experiment 20000117 PARAMETER Experiment Name: At_100uM_ABA_Mutants_cDNA_P Parameter: Tissue Value: Aerial
  misc_feature: MA Experiment 20000117 PARAMETER Experiment Name: At_100uM_ABA_Mutants_cDNA_P Parameter: Treatment Value: 100uM ABA vs. No Treatment
  misc_feature: MA Experiment ID: 20000179 Result: Up-regulated in Transcription
  misc_feature: MA Experiment 20000179 PARAMETER Experiment Name: At_Germinating_Seeds_P Parameter: Age (hr) Value: 6 vs. 0
  misc_feature: MA Experiment 20000179 PARAMETER Experiment Name: At_Germinating_Seeds_P Parameter: Tissue Value: Germinating Seeds
  misc_feature: MA Experiment ID: 20000180 Result: Up-regulated in Transcription
  misc_feature: MA Experiment 20000180 PARAMETER Experiment Name: At_Germinating_Seeds_P Parameter: Age (hr) Value: 24 vs. 0
  misc_feature: MA Experiment 20000180 PARAMETER Experiment Name: At_Germinating_Seeds_P Parameter: Tissue Value: Germinating Seeds
  misc_feature: MA Experiment ID: 20000185 Result: Down-regulated in Transcription
  misc_feature: MA Experiment 20000185 PARAMETER Experiment Name: At_Roots__P Parameter: Age (day) Value: 7 vs. 21
  misc_feature: MA Experiment 20000185 PARAMETER Experiment Name: At_Roots__P Parameter: Organism Value: A. thaliana
  misc_feature: MA Experiment 20000185 PARAMETER Experiment Name: At_Roots__P Parameter: Tissue Value: Roots vs. Whole Plant
  misc_feature: MA Experiment ID: 20000224 Result: Down-regulated in Transcription
  misc_feature: MA Experiment ID: 20000264 Result: Down-regulated in Transcription
  misc_feature: MA Experiment 20000264 PARAMETER Experiment Name: At_Open_Flower_P Parameter: Age (day) Value: 21
  misc_feature: MA Experiment 20000264 PARAMETER Experiment Name: At_Open_Flower_P Parameter: Plant Line Value: WS
  misc_feature: MA Experiment 20000264 PARAMETER Experiment Name: At_Open_Flower_P Parameter: Tissue Value: Open Flower vs. Whole Plant
  misc_feature: MA Experiment ID: 20000439 Result: Down-regulated in Transcription
  misc_feature: MA Experiment 20000439 PARAMETER Experiment Name: At_Roots__P Parameter: Age (day) Value: 14 vs. 21
  misc_feature: MA Experiment 20000439 PARAMETER Experiment Name: At_Roots__P Parameter: Organism Value: A. thaliana
  misc_feature: MA Experiment 20000439 PARAMETER Experiment Name: At_Roots__P Parameter: Tissue Value: Roots vs. Whole Plant
  misc_feature: MA Experiment ID: 20000495 Result: Down-regulated in Transcription
  misc_feature: MA Experiment 20000495 PARAMETER Experiment Name: At_Guard_Cells_P Parameter: Harvest Date Value: 8/2/2002
  misc_feature: MA Experiment 20000495 PARAMETER Experiment Name: At_Guard_Cells_P Parameter: Organism Value: A. thaliana
  misc_feature: MA Experiment 20000495 PARAMETER Experiment Name: At_Guard_Cells_P Parameter: Tissue Value: Guard Cells vs. Leaves
  misc_feature: MA Experiment ID: 20000496 Result: Down-regulated in Transcription
  misc_feature: MA Experiment 20000496 PARAMETER Experiment Name: At_Guard_Cells_P Parameter: Harvest Date Value: 7/19/2002
  misc_feature: MA Experiment 20000496 PARAMETER Experiment Name: At_Guard_Cells_P Parameter: Organism Value: Canola
  misc_feature: MA Experiment 20000496 PARAMETER Experiment Name: At_Guard_Cells_P Parameter: Tissue Value: Guard Cells vs. Leaves
  misc_feature: MA Experiment ID: 20000574 Result: Up-regulated in Transcription
  misc_feature: MA Experiment 20000574 PARAMETER Experiment Name: At_100uM_ABA_Mutants__P Parameter: Organism Value: A. thaliana
  misc_feature: MA Experiment 20000574 PARAMETER Experiment Name: At_100uM_ABA_Mutants__P Parameter: Plant Line Value: CS23 vs. Ler wt
  misc_feature: MA Experiment 20000574 PARAMETER Experiment Name: At_100uM_ABA_Mutants__P Parameter: Timepoint (hr) Value: N/A
  misc_feature: MA Experiment 20000574 PARAMETER Experiment Name: At_100uM_ABA_Mutants__P Parameter: Tissue Value: Whole Plant
  misc_feature: MA Experiment 20000574 PARAMETER Experiment Name: At_100uM_ABA_Mutants__P Parameter: Treatment Value: None
  misc_feature: MA Experiment ID: 20000606 Result: Up-regulated in Transcription
  misc_feature: MA Experiment 20000606 PARAMETER Experiment Name: At_CS8548_Mutant_P Parameter: Age (day) Value: 14
  misc_feature: MA Experiment 20000606 PARAMETER Experiment Name: At_CS8548_Mutant_P Parameter: Plant Line Value: CS8548 vs. wt
  misc_feature: MA Experiment 20000606 PARAMETER Experiment Name: At_CS8548_Mutant_P Parameter: Tissue Value: Whole Plant
  misc_feature: MA Experiment ID: 20000794 Result: Down-regulated in Transcription
  misc_feature: MA Experiment 20000794 PARAMETER Experiment Name: At_Petals_P Parameter: Age (day) Value: 23-25 days
  misc_feature: MA Experiment 20000794 PARAMETER Experiment Name: At_Petals_P Parameter: Plant Line Value: WS
  misc_feature: MA Experiment 20000794 PARAMETER Experiment Name: At_Petals_P Parameter: Tissue Value: Petals vs. Whole plant
  misc_feature: MA Experiment ID: 20001247 Result: Up-regulated in Transcription
  misc_feature: MA Experiment 20001247 PARAMETER Experiment Name: At_Far-red-induction_P Parameter: Age (day) Value: 7
  misc_feature: MA Experiment 20001247 PARAMETER Experiment Name: At_Far-red-induction_P Parameter: Light Value: Far-red vs. White
  misc_feature: MA Experiment 20001247 PARAMETER Experiment Name: At_Far-red-induction_P Parameter: Organism Value: A. thaliana
  misc_feature: MA Experiment 20001247 PARAMETER Experiment Name: At_Far-red-induction_P Parameter: Plant Line Value: Columbia
  misc_feature: MA Experiment 20001247 PARAMETER Experiment Name: At_Far-red-induction_P Parameter: Timepoint (hr) Value: 1
  misc_feature: MA Experiment 20001247 PARAMETER Experiment Name: At_Far-red-induction_P Parameter: Tissue Value: Whole Plant
  misc_feature: MA Experiment ID: 20001248 Result: Up-regulated in Transcription
  misc_feature: MA Experiment 20001248 PARAMETER Experiment Name: At_Far-red-induction_P Parameter: Age (day) Value: 7
  misc_feature: MA Experiment 20001248 PARAMETER Experiment Name: At_Far-red-induction_P Parameter: Light Value: Far-red vs. White
  misc_feature: MA Experiment 20001248 PARAMETER Experiment Name: At_Far-red-induction_P Parameter: Organism Value: A. thaliana
  misc_feature: MA Experiment 20001248 PARAMETER Experiment Name: At_Far-red-induction_P Parameter: Plant Line Value: Columbia
  misc_feature: MA Experiment 20001248 PARAMETER Experiment Name: At_Far-red-induction_P Parameter: Timepoint (hr) Value: 4
  misc_feature: MA Experiment 20001248 PARAMETER Experiment Name: At_Far-red-induction_P Parameter: Tissue Value: Whole Plant
  misc_feature: MA Experiment ID: 20001451 Result: Down-regulated in Transcription
  misc_feature: MA Experiment 20001451 PARAMETER Experiment Name: At_Far-red-induction_P Parameter: Age (day) Value: 7
  misc_feature: MA Experiment 20001451 PARAMETER Experiment Name: At_Far-red-induction_P Parameter: Light Value: Far-red vs. White
  misc_feature: MA Experiment 20001451 PARAMETER Experiment Name: At_Far-red-induction_P Parameter: Organism Value: A. thaliana
  misc_feature: MA Experiment 20001451 PARAMETER Experiment Name: At_Far-red-induction_P Parameter: Plant Line Value: Columbia
  misc_feature: MA Experiment 20001451 PARAMETER Experiment Name: At_Far-red-induction_P Parameter: Timepoint (hr) Value: 24
  misc_feature: MA Experiment 20001451 PARAMETER Experiment Name: At_Far-red-induction_P Parameter: Tissue Value: Whole Plant
  misc_feature: MA Experiment ID: 20001554 Result: Down-regulated in Transcription
  misc_feature: MA Experiment 20001554 PARAMETER Experiment Name: At_Drought_Soil_Dry_P Parameter: Age (day) Value: 21
  misc_feature: MA Experiment 20001554 PARAMETER Experiment Name: At_Drought_Soil_Dry_P Parameter: Organism Value: A. thaliana
  misc_feature: MA Experiment 20001554 PARAMETER Experiment Name: At_Drought_Soil_Dry_P Parameter: Plant Line Value: WS
  misc_feature: MA Experiment 20001554 PARAMETER Experiment Name: At_Drought_Soil_Dry_P Parameter: Post Timepoint (hr) Value: None
  misc_feature: MA Experiment 20001554 PARAMETER Experiment Name: At_Drought_Soil_Dry_P Parameter: Post-Treatment Value: None
  misc_feature: MA Experiment 20001554 PARAMETER Experiment Name: At_Drought_Soil_Dry_P Parameter: Timepoint (day) Value: 7
  misc_feature: MA Experiment 20001554 PARAMETER Experiment Name: At_Drought_Soil_Dry_P Parameter: Treatment Value: Drought vs. No Drought
  misc_feature: MA Experiment ID: 20001556 Result: Down-regulated in Transcription
  misc_feature: MA Experiment 20001556 PARAMETER Experiment Name: At_Drought_Soil_Dry_P Parameter: Age (day) Value: 26
  misc_feature: MA Experiment 20001556 PARAMETER Experiment Name: At_Drought_Soil_Dry_P Parameter: Organism Value: A. thaliana
  misc_feature: MA Experiment 20001556 PARAMETER Experiment Name: At_Drought_Soil_Dry_P Parameter: Plant Line Value: WS
  misc_feature: MA Experiment 20001556 PARAMETER Experiment Name: At_Drought_Soil_Dry_P Parameter: Post Timepoint (hr) Value: None
  misc_feature: MA Experiment 20001556 PARAMETER Experiment Name: At_Drought_Soil_Dry_P Parameter: Post-Treatment Value: None
  misc_feature: MA Experiment 20001556 PARAMETER Experiment Name: At_Drought_Soil_Dry_P Parameter: Timepoint (day) Value: 12
  misc_feature: MA Experiment 20001556 PARAMETER Experiment Name: At_Drought_Soil_Dry_P Parameter: Treatment Value: Drought vs. No Drought
  misc_feature: MA Experiment ID: 20001557 Result: Up-regulated in Transcription
  misc_feature: MA Experiment 20001557 PARAMETER Experiment Name: At_Drought_Soil_Dry_P Parameter: Age (day) Value: 27
  misc_feature: MA Experiment 20001557 PARAMETER Experiment Name: At_Drought_Soil_Dry_P Parameter: Organism Value: A. thaliana
  misc_feature: MA Experiment 20001557 PARAMETER Experiment Name: At_Drought_Soil_Dry_P Parameter: Plant Line Value: WS
  misc_feature: MA Experiment 20001557 PARAMETER Experiment Name: At_Drought_Soil_Dry_P Parameter: Post Timepoint (hr) Value: 3
  misc_feature: MA Experiment 20001557 PARAMETER Experiment Name: At_Drought_Soil_Dry_P Parameter: Post-Treatment Value: Re-Water vs. No Drought
  misc_feature: MA Experiment 20001557 PARAMETER Experiment Name: At_Drought_Soil_Dry_P Parameter: Timepoint (day) Value: 13
  misc_feature: MA Experiment 20001557 PARAMETER Experiment Name: At_Drought_Soil_Dry_P Parameter: Treatment Value: Drought vs. No Drought
  misc_feature: MA Experiment ID: 20001558 Result: Up-regulated in Transcription
  misc_feature: MA Experiment 20001558 PARAMETER Experiment Name: At_Drought_Soil_Dry_P Parameter: Age (day) Value: 27
  misc_feature: MA Experiment 20001558 PARAMETER Experiment Name: At_Drought_Soil_Dry_P Parameter: Organism Value: A. thaliana
  misc_feature: MA Experiment 20001558 PARAMETER Experiment Name: At_Drought_Soil_Dry_P Parameter: Plant Line Value: WS
  misc_feature: MA Experiment 20001558 PARAMETER Experiment Name: At_Drought_Soil_Dry_P Parameter: Post Timepoint (hr) Value: 6
  misc_feature: MA Experiment 20001558 PARAMETER Experiment Name: At_Drought_Soil_Dry_P Parameter: Post-Treatment Value: Re-Water vs. No Drought
  misc_feature: MA Experiment 20001558 PARAMETER Experiment Name: At_Drought_Soil_Dry_P Parameter: Timepoint (day) Value: 13
  misc_feature: MA Experiment 20001558 PARAMETER Experiment Name: At_Drought_Soil_Dry_P Parameter: Treatment Value: Drought vs. No Drought
  misc_feature: MA Experiment ID: 20001560 Result: Up-regulated in Transcription
  misc_feature: MA Experiment 20001560 PARAMETER Experiment Name: At_Drought_Soil_Dry_P Parameter: Age (day) Value: 28
  misc_feature: MA Experiment 20001560 PARAMETER Experiment Name: At_Drought_Soil_Dry_P Parameter: Organism Value: A. thaliana
  misc_feature: MA Experiment 20001560 PARAMETER Experiment Name: At_Drought_Soil_Dry_P Parameter: Plant Line Value: WS
  misc_feature: MA Experiment 20001560 PARAMETER Experiment Name: At_Drought_Soil_Dry_P Parameter: Post Timepoint (hr) Value: None
  misc_feature: MA Experiment 20001560 PARAMETER Experiment Name: At_Drought_Soil_Dry_P Parameter: Post-Treatment Value: None
  misc_feature: MA Experiment 20001560 PARAMETER Experiment Name: At_Drought_Soil_Dry_P Parameter: Timepoint (day) Value: 14
  misc_feature: MA Experiment 20001560 PARAMETER Experiment Name: At_Drought_Soil_Dry_P Parameter: Treatment Value: Drought vs. No Drought
  misc_feature: MA Experiment ID: 20001911 Result: Down-regulated in Transcription
  misc_feature: MA Experiment 20001911 PARAMETER Experiment Name: At_Drought_Reproduction_P Parameter: Age (day) Value: 40
  misc_feature: MA Experiment 20001911 PARAMETER Experiment Name: At_Drought_Reproduction_P Parameter: Organism Value: A. thaliana
  misc_feature: MA Experiment 20001911 PARAMETER Experiment Name: At_Drought_Reproduction_P Parameter: Plant Line Value: WS
  misc_feature: MA Experiment 20001911 PARAMETER Experiment Name: At_Drought_Reproduction_P Parameter: Timepoint (day) Value: 10
  misc_feature: MA Experiment 20001911 PARAMETER Experiment Name: At_Drought_Reproduction_P Parameter: Tissue Value: Flowers
  misc_feature: MA Experiment 20001911 PARAMETER Experiment Name: At_Drought_Reproduction_P Parameter: Treatment Value: Drought vs. No Drought
agagttagagagagagagaccacgccagatatacctttcttgtttcaccggttttcatacacaaaaatggcgggcagtgcctcattcgccgccgcattattcatcggactctctcttctcttcgccgtcacggctgaagatccgtacagattctttgaatggaacataacttacggcgatatatacccactcggtgttcgccaacagggtattttgatcaacggggcgtttccgggaccggacattcattcggttactaatgacaatctcatcatcaacgtctacaatagcctcgacgaacctttccttctttcatggaatggaattcaacagaggaggaactctttcgttgatggagtgtatggaacgacatgcccaatcccgccggggaagaactacacttacattcttcagatgaaggatcagatcggaagtttttactacttcccttctctcggctttcacaaagccgccggtggatttggtggcattcgtatcctcagtcgtcctagaatcccggtccctttccctgatcccgccggagataccactgtccttatcggagactggtacaaagcaaaccacacggatttgagagcacagcttgataatggtaagaagcttcctttaccagacggcatcctcatcaatggtcgttcaagtggtgcaactcttaatgttgaacaaggtaagacatacaggtttagaatatccaatgtagggttacaagactctctcaacttccgcattcaagaccataagatgaaagtggtggaagtcgaaggaacacacactcttcagactactttctcttcactagatgttcatgttggacaatcttactcagtccttgtaaccgcggaccagactccacgggattattacgtggtcgtctcttctcggtttacctcaaatgtccttactaccacgggtattttccgatacagtaattctgctggtggtgtttctggacctattcctggtggacctaccattcaaatcgactggtccttgaaccaggctcgagccatcaggactaacctttcagcgagcggaccaaggccaaatccacaaggatcgtaccactacggtatgataaacactacaagaacgatcagacttgctagctctgctggtcaggttgatgggaagcaacgatacgctgtgaacagtgtctcattcaaacccgcagacactcctctgaaaatcgcggactacttcaagattgacggtgtttacagaagtggaagcatacagtaccaacccactggtggaggaatatacctcgacacatctgttatgcaagttgattacagaacctttgtggagattattttcgaaaattctgaggatattgtccagagctggcatcttgatggttactctttctgggttgttggaatggatggtggacagtggagtccagatagtaggaacgagtataacctacgcgatgcagtcgctcgctgcaccgttcaggtatacccaagctcatggacggctatattgatagcactcgacaacgtaggaatgtggaatctaagacccgagttctgggcgaggcaatacttaggacaacaattgtatttacgtgtgtacacaccctcaacttctctcagagatgaatatccaatccccaagaacgctcttctctgcgggagagccagtggtcgcagcaccagaccgctttgagctggtggttagatatagaaatgacggagagatggtcagccaaaccagctgacgcgttcttgaggcgggtttcttgttttatacacattcttcattttgctaatgaatgagaagagtttatgttaaaatcagtatatcagtttgtaacgatctcagctcgaggtctcattcttgattcttatattctttctttttctatggaacgaaacatttattcaatataattccacagtttcatcgtg

SEQ ID NO: 42199 - protein, 563 aa, Arabidopsis thaliana
  peptide (1)..(563): Ceres Seq. ID no. 13489364
  misc_feature (27)..(556): Homolog of NCBI NO: 15219120 NR Description: pectinesterase (pectin methylesterase), putative
  misc_feature (32)..(560): Homolog of NCBI NO: 15219118 NR Description: pectinesterase (pectin methylesterase), putative
  misc_feature (46)..(547): Homolog of NCBI NO: 7432997 NR Description: pollen-specific protein homolog - tomato
  misc_feature (30)..(563): Homolog of NCBI NO: 1255951 NR Description: PS60 [Nicotiana tabacum]
  misc_feature (23)..(563): Homolog of NCBI NO: 25285550 NR Description: probable pectinesterase [imported] - Arabidopsis
  misc_feature (23)..(563): Homolog of NCBI NO: 18400509 NR Description: pectinesterase (pectin methylesterase) -related
  misc_feature (23)..(563): Homolog of NCBI NO: 16648889 NR Description: Unknown protein [Arabidopsis thaliana]
  misc_feature (23)..(563): Homolog of NCBI NO: 15982771 NR Description: At1g76160/T23E18_10 [Arabidopsis thaliana]
  misc_feature (23)..(563): Homolog of NCBI NO: 15222981 NR Description: pectinesterase (pectin methylesterase), putative
  misc_feature (23)..(563): Homolog of NCBI NO: 22531132 NR Description: pectinesterase, putative [Arabidopsis thaliana]
RVRERETTPDIPFLFHRFSYTKMAGSASFAAALFIGLSLLFAVTAEDPYRFFEWNITYGDIYPLGVRQQGILINGAFPGPDIHSVTNDNLIINVYNSLDEPFLLSWNGIQQRRNSFVDGVYGTTCPIPPGKNYTYILQMKDQIGSFYYFPSLGFHKAAGGFGGIRILSRPRIPVPFPDPAGDTTVLIGDWYKANHTDLRAQLDNGKKLPLPDGILINGRSSGATLNVEQGKTYRFRISNVGLQDSLNFRIQDHKMKVVEVEGTHTLQTTFSSLDVHVGQSYSVLVTADQTPRDYYVVVSSRFTSNVLTTTGIFRYSNSAGGVSGPIPGGPTIQIDWSLNQARAIRTNLSASGPRPNPQGSYHYGMINTTRTIRLASSAGQVDGKQRYAVNSVSFKPADTPLKIADYFKIDGVYRSGSIQYQPTGGGIYLDTSVMQVDYRTFVEIIFENSEDIVQSWHLDGYSFWVVGMDGGQWSPDSRNEYNLRDAVARCTVQVYPSSWTAILIALDNVGMWNLRPEFWARQYLGQQLYLRVYTPSTSLRDEYPIPKNALLCGRASGRSTRPL

SEQ ID NO: 42200 - protein, 541 aa, Arabidopsis thaliana
  peptide (1)..(541): Ceres Seq. ID no. 13489365
  misc_feature (5)..(534): Homolog of NCBI NO: 15219120 NR Description: pectinesterase (pectin methylesterase), putative
  misc_feature (10)..(538): Homolog of NCBI NO: 15219118 NR Description: pectinesterase (pectin methylesterase), putative
  misc_feature (24)..(525): Homolog of NCBI NO: 7432997 NR Description: pollen-specific protein homolog - tomato
  misc_feature (8)..(541): Homolog of NCBI NO: 1255951 NR Description: PS60 [Nicotiana tabacum]
  misc_feature (1)..(541): Homolog of NCBI NO: 25285550 NR Description: probable pectinesterase [imported] - Arabidopsis
  misc_feature (1)..(541): Homolog of NCBI NO: 18400509 NR Description: pectinesterase (pectin methylesterase) -related
  misc_feature (1)..(541): Homolog of NCBI NO: 16648889 NR Description: Unknown protein [Arabidopsis thaliana]
  misc_feature (1)..(541): Homolog of NCBI NO: 15982771 NR Description: At1g76160/T23E18_10 [Arabidopsis thaliana]
  misc_feature (1)..(541): Homolog of NCBI NO: 15222981 NR Description: pectinesterase (pectin methylesterase), putative
  misc_feature (1)..(541): Homolog of NCBI NO: 22531132 NR Description: pectinesterase, putative [Arabidopsis thaliana]
MAGSASFAAALFIGLSLLFAVTAEDPYRFFEWNITYGDIYPLGVRQQGILINGAFPGPDIHSVTNDNLIINVYNSLDEPFLLSWNGIQQRRNSFVDGVYGTTCPIPPGKNYTYILQMKDQIGSFYYFPSLGFHKAAGGFGGIRILSRPRIPVPFPDPAGDTTVLIGDWYKANHTDLRAQLDNGKKLPLPDGILINGRSSGATLNVEQGKTYRFRISNVGLQDSLNFRIQDHKMKVVEVEGTHTLQTTFSSLDVHVGQSYSVLVTADQTPRDYYVVVSSRFTSNVLTTTGIFRYSNSAGGVSGPIPGGPTIQIDWSLNQARAIRTNLSASGPRPNPQGSYHYGMINTTRTIRLASSAGQVDGKQRYAVNSVSFKPADTPLKIADYFKIDGVYRSGSIQYQPTGGGIYLDTSVMQVDYRTFVEIIFENSEDIVQSWHLDGYSFWVVGMDGGQWSPDSRNEYNLRDAVARCTVQVYPSSWTAILIALDNVGMWNLRPEFWARQYLGQQLYLRVYTPSTSLRDEYPIPKNALLCGRASGRSTRPL

SEQ ID NO: 42201 - protein, 425 aa, Arabidopsis thaliana
  peptide (1)..(425): Ceres Seq. ID no. 13489366
  misc_feature (1)..(418): Homolog of NCBI NO: 15219120 NR Description: pectinesterase (pectin methylesterase), putative
  misc_feature (1)..(422): Homolog of NCBI NO: 15219118 NR Description: pectinesterase (pectin methylesterase), putative
  misc_feature (1)..(409): Homolog of NCBI NO: 7432997 NR Description: pollen-specific protein homolog - tomato
  misc_feature (1)..(425): Homolog of NCBI NO: 1255951 NR Description: PS60 [Nicotiana tabacum]
  misc_feature (1)..(425): Homolog of NCBI NO: 18400509 NR Description: pectinesterase (pectin methylesterase) -related
  misc_feature (1)..(425): Homolog of NCBI NO: 25285550 NR Description: probable pectinesterase [imported] - Arabidopsis
  misc_feature (1)..(425): Homolog of NCBI NO: 16648889 NR Description: Unknown protein [Arabidopsis thaliana]
  misc_feature (1)..(425): Homolog of NCBI NO: 15982771 NR Description: At1g76160/T23E18_10 [Arabidopsis thaliana]
  misc_feature (1)..(425): Homolog of NCBI NO: 15222981 NR Description: pectinesterase (pectin methylesterase), putative
  misc_feature (1)..(425): Homolog of NCBI NO: 22531132 NR Description: pectinesterase, putative [Arabidopsis thaliana]
MKDQIGSFYYFPSLGFHKAAGGFGGIRILSRPRIPVPFPDPAGDTTVLIGDWYKANHTDLRAQLDNGKKLPLPDGILINGRSSGATLNVEQGKTYRFRISNVGLQDSLNFRIQDHKMKVVEVEGTHTLQTTFSSLDVHVGQSYSVLVTADQTPRDYYVVVSSRFTSNVLTTTGIFRYSNSAGGVSGPIPGGPTIQIDWSLNQARAIRTNLSASGPRPNPQGSYHYGMINTTRTIRLASSAGQVDGKQRYAVNSVSFKPADTPLKIADYFKIDGVYRSGSIQYQPTGGGIYLDTSVMQVDYRTFVEIIFENSEDIVQSWHLDGYSFWVVGMDGGQWSPDSRNEYNLRDAVARCTVQVYPSSWTAILIALDNVGMWNLRPEFWARQYLGQQLYLRVYTPSTSLRDEYPIPKNALLCGRASGRSTRPL

SEQ ID NO: 42202 - DNA, 1605 bp, Arabidopsis thaliana
  misc_feature (1)..(1605): Ceres Seq. ID no. 13488652
  misc_feature: MA Experiment ID: 108461 Result: Down-regulated in Transcription
  misc_feature: MA Experiment 108461 PARAMETER Experiment Name: At_Germinating_Seeds_cDNA_P Parameter: Age (day) Value: 1 vs. 0
  misc_feature: MA Experiment 108461 PARAMETER Experiment Name: At_Germinating_Seeds_cDNA_P Parameter: Tissue Value: Germinating Seeds
  misc_feature: MA Experiment ID: 108462 Result: Down-regulated in Transcription
  misc_feature: MA Experiment 108462 PARAMETER Experiment Name: At_Germinating_Seeds_cDNA_P Parameter: Age (day) Value: 2 vs. 0
  misc_feature: MA Experiment 108462 PARAMETER Experiment Name: At_Germinating_Seeds_cDNA_P Parameter: Tissue Value: Germinating Seeds
  misc_feature: MA Experiment ID: 108573 Result: Up-regulated in Transcription
  misc_feature: MA Experiment 108573 PARAMETER Experiment Name: At_Drought_cDNA_P Parameter: Timepoint (hr) Value: 6
  misc_feature: MA Experiment 108573 PARAMETER Experiment Name: At_Drought_cDNA_P Parameter: Tissue Value: Aerial
  misc_feature: MA Experiment 108573 PARAMETER Experiment Name: At_Drought_cDNA_P Parameter: Treatment Value: Drought vs. No Drought
  misc_feature: MA Experiment ID: 108576 Result: Up-regulated in Transcription
  misc_feature: MA Experiment 108576 PARAMETER Experiment Name: At_42deg_Heat_cDNA_P Parameter: Temperature (deg C) Value: 42 vs. 22
  misc_feature: MA Experiment 108576 PARAMETER Experiment Name: At_42deg_Heat_cDNA_P Parameter: Timepoint (hr) Value: 1
  misc_feature: MA Experiment 108576 PARAMETER Experiment Name: At_42deg_Heat_cDNA_P Parameter: Tissue Value: Aerial
  misc_feature: MA Experiment ID: 108577 Result: Up-regulated in Transcription
  misc_feature: MA Experiment 108577 PARAMETER Experiment Name: At_42deg_Heat_cDNA_P Parameter: Temperature (deg C) Value: 42 vs. 22
  misc_feature: MA Experiment 108577 PARAMETER Experiment Name: At_42deg_Heat_cDNA_P Parameter: Timepoint (hr) Value: 6
  misc_feature: MA Experiment 108577 PARAMETER Experiment Name: At_42deg_Heat_cDNA_P Parameter: Tissue Value: Aerial
  misc_feature: MA Experiment ID: 108585 Result: Up-regulated in Transcription
  misc_feature: MA Experiment 108585 PARAMETER Experiment Name: At_5mM_NaNP_cDNA_P Parameter: Timepoint (hr) Value: 6
  misc_feature: MA Experiment 108585 PARAMETER Experiment Name: At_5mM_NaNP_cDNA_P Parameter: Tissue Value: Aerial
  misc_feature: MA Experiment 108585 PARAMETER Experiment Name: At_5mM_NaNP_cDNA_P Parameter: Treatment Value: null
  misc_feature: MA Experiment ID: 108595 Result: Down-regulated in Transcription
  misc_feature: MA Experiment 108595 PARAMETER Experiment Name: At_Ler-pi_Ovule_cDNA_P Parameter: Plant Line Value: null
  misc_feature: MA Experiment ID: 108668 Result: Up-regulated in Transcription
  misc_feature: MA Experiment 108668 PARAMETER Experiment Name: At_2mM_SA_cDNA_P Parameter: Plant Line Value: WS
  misc_feature: MA Experiment 108668 PARAMETER Experiment Name: At_2mM_SA_cDNA_P Parameter: Timepoint (hr) Value: 6
  misc_feature: MA Experiment 108668 PARAMETER Experiment Name: At_2mM_SA_cDNA_P Parameter: Treatment Value: 2mM SA vs. No Treatment
  misc_feature: MA Experiment ID: 20000093 Result: Up-regulated in Transcription
  misc_feature: MA Experiment 20000093 PARAMETER Experiment Name: At_42deg_Heat_cDNA_P Parameter: Temperature (deg C) Value: 42 vs. 22
  misc_feature: MA Experiment 20000093 PARAMETER Experiment Name: At_42deg_Heat_cDNA_P Parameter: Timepoint (hr) Value: 0.5
  misc_feature: MA Experiment 20000093 PARAMETER Experiment Name: At_42deg_Heat_cDNA_P Parameter: Tissue Value: Aerial
  misc_feature: MA Experiment ID: 20000111 Result: Up-regulated in Transcription
  misc_feature: MA Experiment 20000111 PARAMETER Experiment Name: At_42deg_Heat_cDNA_P Parameter: Temperature (deg C) Value: 42 vs. 22
  misc_feature: MA Experiment 20000111 PARAMETER Experiment Name: At_42deg_Heat_cDNA_P Parameter: Timepoint (hr) Value: 6
  misc_feature: MA Experiment 20000111 PARAMETER Experiment Name: At_42deg_Heat_cDNA_P Parameter: Tissue Value: Aerial
  misc_feature: MA Experiment ID: 20000144 Result: Up-regulated in Transcription
  misc_feature: MA Experiment 20000144 PARAMETER Experiment Name: At_42deg_Heat_cDNA_P Parameter: Temperature (deg C) Value: 42 vs. 22
  misc_feature: MA Experiment 20000144 PARAMETER Experiment Name: At_42deg_Heat_cDNA_P Parameter: Timepoint (hr) Value: 1
  misc_feature: MA Experiment 20000144 PARAMETER Experiment Name: At_42deg_Heat_cDNA_P Parameter: Tissue Value: Aerial
  misc_feature: MA Experiment ID: 20000173 Result: Up-regulated in Transcription
  misc_feature: MA Experiment 20000173 PARAMETER Experiment Name: At_42deg_Heat_P Parameter: Age (day) Value: 14
  misc_feature: MA Experiment 20000173 PARAMETER Experiment Name: At_42deg_Heat_P Parameter: Organism Value: A. thaliana
  misc_feature: MA Experiment 20000173 PARAMETER Experiment Name: At_42deg_Heat_P Parameter: Plant Line Value: WS
  misc_feature: MA Experiment 20000173 PARAMETER Experiment Name: At_42deg_Heat_P Parameter: Temperature (deg C) Value: 42 vs. 22
  misc_feature: MA Experiment 20000173 PARAMETER Experiment Name: At_42deg_Heat_P Parameter: Timepoint (hr) Value: 6
  misc_feature: MA Experiment 20000173 PARAMETER Experiment Name: At_42deg_Heat_P Parameter: Tissue Value: Aerial
  misc_feature: MA Experiment ID: 20000179 Result: Down-regulated in Transcription
  misc_feature: MA Experiment 20000179 PARAMETER Experiment Name: At_Germinating_Seeds_P Parameter: Age (hr) Value: 6 vs. 0
  misc_feature: MA Experiment 20000179 PARAMETER Experiment Name: At_Germinating_Seeds_P Parameter: Tissue Value: Germinating Seeds
  misc_feature: MA Experiment ID: 20000180 Result: Down-regulated in Transcription
  misc_feature: MA Experiment 20000180 PARAMETER Experiment Name: At_Germinating_Seeds_P Parameter: Age (hr) Value: 24 vs. 0
  misc_feature: MA Experiment 20000180 PARAMETER Experiment Name: At_Germinating_Seeds_P Parameter: Tissue Value: Germinating Seeds
  misc_feature: MA Experiment ID: 20001905 Result: Up-regulated in Transcription
  misc_feature: MA Experiment 20001905 PARAMETER Experiment Name: At_Drought_Reproduction_P Parameter: Age (day) Value: 40
  misc_feature: MA Experiment 20001905 PARAMETER Experiment Name: At_Drought_Reproduction_P Parameter: Organism Value: A. thaliana
  misc_feature: MA Experiment 20001905 PARAMETER Experiment Name: At_Drought_Reproduction_P Parameter: Plant Line Value: WS
  misc_feature: MA Experiment 20001905 PARAMETER Experiment Name: At_Drought_Reproduction_P Parameter: Timepoint (day) Value: 10
  misc_feature: MA Experiment 20001905 PARAMETER Experiment Name: At_Drought_Reproduction_P Parameter: Tissue Value: Rosettes
  misc_feature: MA Experiment 20001905 PARAMETER Experiment Name: At_Drought_Reproduction_P Parameter: Treatment Value: Drought vs. No Drought
  misc_feature: MA Experiment ID: 20001911 Result: Up-regulated in Transcription
  misc_feature: MA Experiment 20001911 PARAMETER Experiment Name: At_Drought_Reproduction_P Parameter: Age (day) Value: 40
  misc_feature: MA Experiment 20001911 PARAMETER Experiment Name: At_Drought_Reproduction_P Parameter: Organism Value: A. thaliana
  misc_feature: MA Experiment 20001911 PARAMETER Experiment Name: At_Drought_Reproduction_P Parameter: Plant Line Value: WS
  misc_feature: MA Experiment 20001911 PARAMETER Experiment Name: At_Drought_Reproduction_P Parameter: Timepoint (day) Value: 10
  misc_feature: MA Experiment 20001911 PARAMETER Experiment Name: At_Drought_Reproduction_P Parameter: Tissue Value: Flowers
  misc_feature: MA Experiment 20001911 PARAMETER Experiment Name: At_Drought_Reproduction_P Parameter: Treatment Value: Drought vs. No Drought
gtcgtcgtccacaagaacaaccaaatttgtttccgtcttctgctaacatatcctctttttcatctgggaaccctaatttcttgactaacttagggttttatttatccatttgagatactctgtaattgaaaggttgaatttttagaagagacatgggaggttcgtcggagacaaagatcttacaagaactcatactttacgcggcgagcgctgctttcagctgcttggttctctttgcgggtcttcgtcatctcgatcctaatcgtgaggcttctaaaaaagctctcgagcataagaaggaaatctctaaacgtttgggtcgtcctcttgttcagaccaatccatacgaggatgtaattgcatgtgatgtgataaatccagaccacattgatgtggagtttggttctattggagggttggagaccatcaagcaggctttgtatgagcttgtgattttaccactgaaaagacctgagctttttgcttacgggaagcttcttggacctcaaaaaggtgtcttgctctatggacctcctggtactggaaagactatgcttgctaaggctattgccaaagagtcaggagctgttttcattaatgttagggtttcaaacctgatgagcaagtggtttggagatgctcagaagcttgtttctgctgtgtttagcttggcctacaaactccaacctgctatcatttttattgatgaggttgagagctttcttggtcagcgccgttcaacagatcatgaagctatggccaacatgaagactgagtttatggctttatgggatggattctctactgatccgcatgcaagggttatggttcttgctgcaactaacagaccgtcagagcttgatgaagcaatattaaggcgtcttcctcaggcctttgagattggaatacctgatcgccgggagagagctgagatattgaaagtgactctgaaaggagagagggtggaacctgatattgactttgatcacatagctcgcttatgcgaaggctataccggatcagacatttttgagctatgcaagaaagcagcttacttccctatcagagaaatcctagatgcagagagaaaggggaaaccatgtttggaccctaggccattatcacagttagatttggagaaggttcttgcaacgtcaaagaagacacaagttgcagcaggcgagtactcattgagctcgcagtcctcggcttggagaggctcaagggaaccagatgaggtccaggcagcgataagtgggatctcgaagcttctagtttctcagatcattaacctacagtcagaatctcaggattcatggcagcgggatcccgaagaagattcccgatgaaattccggatcacttttataaacgttctggtgttttcattggaagtttagaatttgtcacacacttcagtttattctgtaaaacttttcttttctttttggtaggatcatttgataacttatgactgtactaaaaagtctctcaagtttctacattactgaatctctcttgttcataatatggccactgttctcactcatgggttacttaagtgttaactctttcttcactttacttaatcgttaatggaaccttg

SEQ ID NO: 42203 - protein, 398 aa, Arabidopsis thaliana
  peptide (1)..(398): Ceres Seq. ID no. 13488653
  misc_feature (121)..(305): Pfam Name: ATPase family associated with various cellular Pfam Description: ATPase family associated with various cellular
  misc_feature (31)..(308): Homolog of NCBI NO: 31232156 NR Description: ENSANGP00000010224 [Anopheles gambiae]
  misc_feature (57)..(313): Homolog of NCBI NO: 15234019 NR Description: expressed protein [Arabidopsis thaliana]
  misc_feature (55)..(313): Homolog of NCBI NO: 25518408 NR Description: hypothetical protein F22D16.11 - Arabidopsis
  misc_feature (48)..(313): Homolog of NCBI NO: 33146850 NR Description: putative MSP1(mitochondrial sorting of proteins)
  misc_feature (45)..(313): Homolog of NCBI NO: 30678418 NR Description: expressed protein [Arabidopsis thaliana]
  misc_feature (49)..(352): Homolog of NCBI NO: 30679158 NR Description: expressed protein [Arabidopsis thaliana]
  misc_feature (49)..(352): Homolog of NCBI NO: 20259341 NR Description: unknown protein [Arabidopsis thaliana]
  misc_feature (49)..(352): Homolog of NCBI NO: 7487016 NR Description: hypothetical protein T14P8.7 - Arabidopsis
  misc_feature (3)..(397): Homolog of NCBI NO: 15238774 NR Description: 26S proteasome regulatory particle chain
  misc_feature (1)..(398): Homolog of NCBI NO: 15234242 NR Description: expressed protein [Arabidopsis thaliana]
MGGSSETKILQELILYAASAAFSCLVLFAGLRHLDPNREASKKALEHKKEISKRLGRPLVQTNPYEDVIACDVINPDHIDVEFGSIGGLETIKQALYELVILPLKRPELFAYGKLLGPQKGVLLYGPPGTGKTMLAKAIAKESGAVFINVRVSNLMSKWFGDAQKLVSAVFSLAYKLQPAIIFIDEVESFLGQRRSTDHEAMANMKTEFMALWDGFSTDPHARVMVLAATNRPSELDEAILRRLPQAFEIGIPDRRERAEILKVTLKGERVEPDIDFDHIARLCEGYTGSDIFELCKKAAYFPIREILDAERKGKPCLDPRPLSQLDLEKVLATSKKTQVAAGEYSLSSQSSAWRGSREPDEVQAAISGISKLLVSQIINLQSESQDSWQRDPEEDSR

SEQ ID NO: 42204 - protein, 265 aa, Arabidopsis thaliana
  peptide (1)..(265): Ceres Seq. ID no. 13488654
  misc_feature (1)..(172): Pfam Name: ATPase family associated with various cellular Pfam Description: ATPase family associated with various cellular
  misc_feature (1)..(175): Homolog of NCBI NO: 31232156 NR Description: ENSANGP00000010224 [Anopheles gambiae]
  misc_feature (1)..(180): Homolog of NCBI NO: 15234019 NR Description: expressed protein [Arabidopsis thaliana]
  misc_feature (1)..(180): Homolog of NCBI NO: 25518408 NR Description: hypothetical protein F22D16.11 - Arabidopsis
  misc_feature (1)..(180): Homolog of NCBI NO: 33146850 NR Description: putative MSP1(mitochondrial sorting of proteins)
  misc_feature (1)..(180): Homolog of NCBI NO: 30678418 NR Description: expressed protein [Arabidopsis thaliana]
  misc_feature (1)..(219): Homolog of NCBI NO: 30679158 NR Description: expressed protein [Arabidopsis thaliana]
  misc_feature (1)..(219): Homolog of NCBI NO: 20259341 NR Description: unknown protein [Arabidopsis thaliana]
  misc_feature (1)..(219): Homolog of NCBI NO: 7487016 NR Description: hypothetical protein T14P8.7 - Arabidopsis
  misc_feature (1)..(264): Homolog of NCBI NO: 15238774 NR Description: 26S proteasome regulatory particle chain
  misc_feature (1)..(265): Homolog of NCBI NO: 15234242 NR Description: expressed protein [Arabidopsis thaliana]
MLAKAIAKESGAVFINVRVSNLMSKWFGDAQKLVSAVFSLAYKLQPAIIFIDEVESFLGQRRSTDHEAMANMKTEFMALWDGFSTDPHARVMVLAATNRPSELDEAILRRLPQAFEIGIPDRRERAEILKVTLKGERVEPDIDFDHIARLCEGYTGSDIFELCKKAAYFPIREILDAERKGKPCLDPRPLSQLDLEKVLATSKKTQVAAGEYSLSSQSSAWRGSREPDEVQAAISGISKLLVSQIINLQSESQDSWQRDPEEDSR

SEQ ID NO: 42205 - protein, 243 aa, Arabidopsis thaliana
  peptide (1)..(243): Ceres Seq. ID no. 13488655
  misc_feature (1)..(150): Pfam Name: ATPase family associated with various cellular Pfam Description: ATPase family associated with various cellular
  misc_feature (1)..(153): Homolog of NCBI NO: 31232156 NR Description: ENSANGP00000010224 [Anopheles gambiae]
  misc_feature (1)..(158): Homolog of NCBI NO: 15234019 NR Description: expressed protein [Arabidopsis thaliana]
  misc_feature (1)..(158): Homolog of NCBI NO: 25518408 NR Description: hypothetical protein F22D16.11 - Arabidopsis
  misc_feature (1)..(158): Homolog of NCBI NO: 33146850 NR Description: putative MSP1(mitochondrial sorting of proteins)
  misc_feature (1)..(158): Homolog of NCBI NO: 30678418 NR Description: expressed protein [Arabidopsis thaliana]
  misc_feature (1)..(197): Homolog of NCBI NO: 30679158 NR Description: expressed protein [Arabidopsis thaliana]
  misc_feature (1)..(197): Homolog of NCBI NO: 20259341 NR Description: unknown protein [Arabidopsis thaliana]
  misc_feature (1)..(197): Homolog of NCBI NO: 7487016 NR Description: hypothetical protein T14P8.7 - Arabidopsis
  misc_feature (1)..(242): Homolog of NCBI NO: 15238774 NR Description: 26S proteasome regulatory particle chain
  misc_feature (1)..(243): Homolog of NCBI NO: 15234242 NR Description: expressed protein [Arabidopsis thaliana]
MSKWFGDAQKLVSAVFSLAYKLQPAIIFIDEVESFLGQRRSTDHEAMANMKTEFMALWDGFSTDPHARVMVLAATNRPSELDEAILRRLPQAFEIGIPDRRERAEILKVTLKGERVEPDIDFDHIARLCEGYTGSDIFELCKKAAYFPIREILDAERKGKPCLDPRPLSQLDLEKVLATSKKTQVAAGEYSLSSQSSAWRGSREPDEVQAAISGISKLLVSQIINLQSESQDSWQRDPEEDSR

SEQ ID NO: 42206 - DNA, 1780 bp, Arabidopsis thaliana
  misc_feature (1)..(1780): Ceres Seq. ID no. 12327983
  misc_feature: MA Experiment ID: 108434 Result: Up-regulated in Transcription
  misc_feature: MA Experiment 108434 PARAMETER Experiment Name: At_Root_Tips_cDNA_P Parameter: Tissue Value: Root Tips
  misc_feature: MA Experiment ID: 108462 Result: Down-regulated in Transcription
  misc_feature: MA Experiment 108462 PARAMETER Experiment Name: At_Germinating_Seeds_cDNA_P Parameter: Age (day) Value: 2 vs. 0
  misc_feature: MA Experiment 108462 PARAMETER Experiment Name: At_Germinating_Seeds_cDNA_P Parameter: Tissue Value: Germinating Seeds
  misc_feature: MA Experiment ID: 108463 Result: Down-regulated in Transcription
  misc_feature: MA Experiment 108463 PARAMETER Experiment Name: At_Germinating_Seeds_cDNA_P Parameter: Age (day) Value: 3 vs. 0
  misc_feature: MA Experiment 108463 PARAMETER Experiment Name: At_Germinating_Seeds_cDNA_P Parameter: Tissue Value: Germinating Seeds
  misc_feature: MA Experiment ID: 20000180 Result: Down-regulated in Transcription
  misc_feature: MA Experiment 20000180 PARAMETER Experiment Name: At_Germinating_Seeds_P Parameter: Age (hr) Value: 24 vs. 0
  misc_feature: MA Experiment 20000180 PARAMETER Experiment Name: At_Germinating_Seeds_P Parameter: Tissue Value: Germinating Seeds
  misc_feature: MA Experiment ID: 20001557 Result: Up-regulated in Transcription
  misc_feature: MA Experiment 20001557 PARAMETER Experiment Name: At_Drought_Soil_Dry_P Parameter: Age (day) Value: 27
  misc_feature: MA Experiment 20001557 PARAMETER Experiment Name: At_Drought_Soil_Dry_P Parameter: Organism Value: A. thaliana
  misc_feature: MA Experiment 20001557 PARAMETER Experiment Name: At_Drought_Soil_Dry_P Parameter: Plant Line Value: WS
  misc_feature: MA Experiment 20001557 PARAMETER Experiment Name: At_Drought_Soil_Dry_P Parameter: Post Timepoint (hr) Value: 3
  misc_feature: MA Experiment 20001557 PARAMETER Experiment Name: At_Drought_Soil_Dry_P Parameter: Post-Treatment Value: Re-Water vs. No Drought
  misc_feature: MA Experiment 20001557 PARAMETER Experiment Name: At_Drought_Soil_Dry_P Parameter: Timepoint (day) Value: 13
  misc_feature: MA Experiment 20001557 PARAMETER Experiment Name: At_Drought_Soil_Dry_P Parameter: Treatment Value: Drought vs. No Drought
gtttcagacaaagtagtgacatttttctaacaattaaaccaatatcgccgtagtcaaccaccgcataacgttttggcgccgcctgaggctgacctggggctgctaaagattttatcgcgacgactctctttctctctcaaactgtttcagctgcttgcgaattggaaatggcttgtaattcctcaggctgtgagtcaggttgctatgaccgtgagaaagataatggaagtaagatagtggatgatgcagtatctggtggcggtaatcatgagagtgtctgcgtcaagtgtaaatgcaatgcgcctatgacatttggtgacggtggcttcgacgatggaagattctgcgcagattgttttaggaacaatgtctttgggaaattccgtcttgctgttacttctcatgctatgatcactccttcagataacgtccttgttgctttctctggcggatcatcttccagggtttctcttcaatttgtgcacgagttgcaaatcaaggctttgaagaattacgaggcgagtcgagatagatctttacctgtgtttggtgttggtgttgcttttgtggatgaaactgcagcttttcctgctctttccactgaaatgattgatgcaattgagtgggttcgatatactgtctcgtgtttgtctccacctgctaaggatctccatgttgttcaagtcgaaagcatatttggttcagactctcttgacgcacgggatagacttctgaagctattagattctgttcctgacgatactggaaaagaagaccttctgctgcatctgaaaatgttatctttgcaaaaggttgccgctgaaaatgggtacaatagattagtgttgggatcatgcacgtcgagaattgcttcccatgttcttacggctactgtcaagggacgaggttattcactatcagcagatattcagcatgttgatgctagatggaaggttcccattgtacttccacttcgagattgtgttcgactggaaataactagactctgccttttggatggacttaagactgtggagttggcttgtcgttctcaatgcggaatcaatgatttggtgtcttcatttgtcgctctgttgcaggaagaaaatccttcccgggaatgcacaattgtacggacagctgcgaagctgactccattttacttcaataaaattccggaaacagacgactctaatgtacctatggccactcagaggcgcctaaagagattcaatctcaaatatgatggatcaatgactactgaagctttctgtcctatctgcaatggcccgctaaatagatcagactcatcagagttggatacttttgaagaaggccaggaatctgatgtcctctatgctgcttgctgttcaagttgccggtttcaaatacttccacaggatggatcatctcttgagcaattcagttcatttctaccagatcacatgatttcccaagtgaaacatcaaaaagttgatagtcaagcttatctgagggagaaaattaaagactgtctgctcttggacgatgaagaggttgtctaaatctgcattcggatgcttgcacaaggtatgagaggaagtttaaatcctgtcatgcttatcaaggattattcctagaaacctaagatcatcttagtttaatgtcgatctgatatcatcgtagatgttaaaagtgtttttactcattcgttacaatgattgtctcaatgtgaagcaaaatcactgagcaattgaatgaagcatctacagttttacacatataatacaagaatcatggg

SEQ ID NO: 42207 - protein, 458 aa, Arabidopsis thaliana
  peptide (1)..(458): Ceres Seq. ID no. 12327984
  misc_feature (1)..(400): Homolog of NCBI NO: 31213451 NR Description: ENSANGP00000021847 [Anopheles gambiae]
  misc_feature (33)..(136): Homolog of NCBI NO: 39645134 NR Description: Unknown (protein for IMAGE:3877613) [Homo sapiens]
  misc_feature (186)..(328): Homolog of NCBI NO: 39645134 NR Description: Unknown (protein for IMAGE:3877613) [Homo sapiens]
  misc_feature (286)..(453): Homolog of NCBI NO: 7486391 NR Description: hypothetical protein F4B14.180 - Arabidopsis
  misc_feature (1)..(285): Homolog of NCBI NO: 7486391 NR Description: hypothetical protein F4B14.180 - Arabidopsis
  misc_feature (1)..(458): Homolog of NCBI NO: 18419746 NR Description: putative protein
  misc_feature (1)..(458): Homolog of NCBI NO: 21553405 NR Description: unknown [Arabidopsis thaliana]
MACNSSGCESGCYDREKDNGSKIVDDAVSGGGNHESVCVKCKCNAPMTFGDGGFDDGRFCADCFRNNVFGKFRLAVTSHAMITPSDNVLVAFSGGSSSRVSLQFVHELQIKALKNYEASRDRSLPVFGVGVAFVDETAAFPALSTEMIDAIEWVRYTVSCLSPPAKDLHVVQVESIFGSDSLDARDRLLKLLDSVPDDTGKEDLLLHLKMLSLQKVAAENGYNRLVLGSCTSRIASHVLTATVKGRGYSLSADIQHVDARWKVPIVLPLRDCVRLEITRLCLLDGLKTVELACRSQCGINDLVSSFVALLQEENPSRECTIVRTAAKLTPFYFNKIPETDDSNVPMATQRRLKRFNLKYDGSMTTEAFCPICNGPLNRSDSSELDTFEEGQESDVLYAACCSSCRFQILPQDGSSLEQFSSFLPDHMISQVKHQKVDSQAYLREKIKDCLLLDDEEVV

SEQ ID NO: 42208 - protein, 412 aa, Arabidopsis thaliana
  peptide (1)..(412): Ceres Seq. ID no. 12327985
  misc_feature (1)..(354): Homolog of NCBI NO: 31213451 NR Description: ENSANGP00000021847 [Anopheles gambiae]
  misc_feature (1)..(90): Homolog of NCBI NO: 39645134 NR Description: Unknown (protein for IMAGE:3877613) [Homo sapiens]
  misc_feature (140)..(282): Homolog of NCBI NO: 39645134 NR Description: Unknown (protein for IMAGE:3877613) [Homo sapiens]
  misc_feature (240)..(407): Homolog of NCBI NO: 7486391 NR Description: hypothetical protein F4B14.180 - Arabidopsis
  misc_feature (1)..(239): Homolog of NCBI NO: 7486391 NR Description: hypothetical protein F4B14.180 - Arabidopsis
  misc_feature (1)..(412): Homolog of NCBI NO: 18419746 NR Description: putative protein
  misc_feature (1)..(412): Homolog of NCBI NO: 21553405 NR Description: unknown [Arabidopsis thaliana]
MTFGDGGFDDGRFCADCFRNNVFGKFRLAVTSHAMITPSDNVLVAFSGGSSSRVSLQFVHELQIKALKNYEASRDRSLPVFGVGVAFVDETAAFPALSTEMIDAIEWVRYTVSCLSPPAKDLHVVQVESIFGSDSLDARDRLLKLLDSVPDDTGKEDLLLHLKMLSLQKVAAENGYNRLVLGSCTSRIASHVLTATVKGRGYSLSADIQHVDARWKVPIVLPLRDCVRLEITRLCLLDGLKTVELACRSQCGINDLVSSFVALLQEENPSRECTIVRTAAKLTPFYFNKIPETDDSNVPMATQRRLKRFNLKYDGSMTTEAFCPICNGPLNRSDSSELDTFEEGQESDVLYAACCSSCRFQILPQDGSSLEQFSSFLPDHMISQVKHQKVDSQAYLREKIKDCLLLDDEEVV

SEQ ID NO: 42209 - protein, 378 aa, Arabidopsis thaliana
  peptide (1)..(378): Ceres Seq. ID no. 12327986
  misc_feature (1)..(320): Homolog of NCBI NO: 31213451 NR Description: ENSANGP00000021847 [Anopheles gambiae]
  misc_feature (1)..(56): Homolog of NCBI NO: 39645134 NR Description: Unknown (protein for IMAGE:3877613) [Homo sapiens]
  misc_feature (106)..(248): Homolog of NCBI NO: 39645134 NR Description: Unknown (protein for IMAGE:3877613) [Homo sapiens]
  misc_feature (206)..(373): Homolog of NCBI NO: 7486391 NR Description: hypothetical protein F4B14.180 - Arabidopsis
  misc_feature (1)..(205): Homolog of NCBI NO: 7486391 NR Description: hypothetical protein F4B14.180 - Arabidopsis
  misc_feature (1)..(378): Homolog of NCBI NO: 18419746 NR Description: putative protein
  misc_feature (1)..(378): Homolog of NCBI NO: 21553405 NR Description: unknown [Arabidopsis thaliana]
MITPSDNVLVAFSGGSSSRVSLQFVHELQIKALKNYEASRDRSLPVFGVGVAFVDETAAFPALSTEMIDAIEWVRYTVSCLSPPAKDLHVVQVESIFGSDSLDARDRLLKLLDSVPDDTGKEDLLLHLKMLSLQKVAAENGYNRLVLGSCTSRIASHVLTATVKGRGYSLSADIQHVDARWKVPIVLPLRDCVRLEITRLCLLDGLKTVELACRSQCGINDLVSSFVALLQEENPSRECTIVRTAAKLTPFYFNKIPETDDSNVPMATQRRLKRFNLKYDGSMTTEAFCPICNGPLNRSDSSELDTFEEGQESDVLYAACCSSCRFQILPQDGSSLEQFSSFLPDHMISQVKHQKVDSQAYLREKIKDCLLLDDEEVV

SEQ ID NO: 42210 - DNA, 1132 bp, Arabidopsis thaliana
  misc_feature (1)..(1132): Ceres Seq. ID no. 13487470
  misc_feature: MA Experiment ID: 108434 Result: Up-regulated in Transcription
  misc_feature: MA Experiment 108434 PARAMETER Experiment Name: At_Root_Tips_cDNA_P Parameter: Tissue Value: Root Tips
  misc_feature: MA Experiment ID: 20000087 Result: Up-regulated in Transcription
  misc_feature: MA Experiment 20000087 PARAMETER Experiment Name: At_100uM_ABA_Mutants_cDNA_P Parameter: Plant Line Value: WS
  misc_feature: MA Experiment 20000087 PARAMETER Experiment Name: At_100uM_ABA_Mutants_cDNA_P Parameter: Timepoint (hr) Value: 6
  misc_feature: MA Experiment 20000087 PARAMETER Experiment Name: At_100uM_ABA_Mutants_cDNA_P Parameter: Tissue Value: Aerial
  misc_feature: MA Experiment 20000087 PARAMETER Experiment Name: At_100uM_ABA_Mutants_cDNA_P Parameter: Treatment Value: 100uM ABA vs. No Treatment
  misc_feature: MA Experiment ID: 20000112 Result: Up-regulated in Transcription
  misc_feature: MA Experiment 20000112 PARAMETER Experiment Name: At_42deg_Heat_cDNA_P Parameter: Temperature (deg C) Value: 42 vs. 22
  misc_feature: MA Experiment 20000112 PARAMETER Experiment Name: At_42deg_Heat_cDNA_P Parameter: Timepoint (hr) Value: 2
  misc_feature: MA Experiment 20000112 PARAMETER Experiment Name: At_42deg_Heat_cDNA_P Parameter: Tissue Value: Aerial
gaaagacgcttcgagagagatagatcatctccgttaaaccctagcgattggaatacggatatactccaaatggctttcttaagtaaagttggaaggttattcagtcagaccagcagccatgtcactgcctctagctcgatgctacagagcatccgttgcatgtcttcatcaaaaatctttgttggaggtatctcctacagcactgatgagtttggcttaagagaagcttttagcaaatatggagaagttgttgatgcaaagattattgtggaccgtgaaacaggcagatctaggggctttgctttcgtaacatttacttcgactgaggaggctagtaatgccatgcaattggatggacaggaccttcatggtcgaagaattagggtgaattatgcaactgaaagaggaagtgggtttggaggaaggggattcggtggtcctggtggtggttatggtgcttcagatggtggttatggtgctccagctggtggttatggaggtggtgccggtggttacggaggcaactcttcttatagtggaaatgctgggggtggtggtggttatggtggtaactcttcctatggtggaaatgctggtggttatggaggtaaccctccttatagtggcaatgctgttggtggtggcggtggctatggaagcaattttggcggcggcggtggatatggtgttgcaggtggtgttggtggaagtgaaaactttgcccaaggcagctccactaatgctggctttgatgacaagtttgagagcaaccaaccattaggcaatgatacggatcatcagactgaaagcggtttgggaggcgatgaacaatttggtggcagtgacaatcaatttggagatgcagagaacggtaacacagagaatggtccagttgggtttgatcaaactgacgatggcgatgttgccaagagagcctagtctccacgatgttgtgccgtgtatgtttacgtcatggaacttttgttttgcagtttcagtctaaaacttacgaactttcttaatctctctatttaacgtttgaggttgtttatcatgtagagagacctctttagttggtctgtttttcttaaaatgttggccaattaataaaaactgtaataacttctgagtt

SEQ ID NO: 42211 - protein, 312 aa, Arabidopsis thaliana
  peptide (1)..(312): Ceres Seq. ID no. 13487471
  misc_feature (59)..(129): Pfam Name: RNA recognition motif. (a.k.a. RRM, RBD, or RNP domain) Pfam Description: RNA recognition motif. (a.k.a. RRM, RBD, or RNP
  misc_feature (58)..(227): Homolog of NCBI NO: 7439981 NR Description: glycine-rich RNA-binding protein GRP1 - wheat
  misc_feature (58)..(227): Homolog of NCBI NO: 10799202 NR Description: glycine-rich RNA-binding protein [Sorghum bicolor]
  misc_feature (58)..(228): Homolog of NCBI NO: 1346181 NR Description: Glycine-rich RNA-binding protein GRP2A
  misc_feature (58)..(227): Homolog of NCBI NO: 544423 NR Description: Glycine-rich RNA-binding protein 2
  misc_feature (58)..(228): Homolog of NCBI NO: 1346180 NR Description: Glycine-rich RNA-binding protein GRP1A
  misc_feature (24)..(264): Homolog of NCBI NO: 15822703 NR Description: RNA-binding protein precursor [Nicotiana tabacum]
  misc_feature (24)..(258): Homolog of NCBI NO: 1084415 NR Description: RNA-binding protein - wood tobacco
  misc_feature (24)..(300): Homolog of NCBI NO: 15822705 NR Description: RNA-binding protein precursor [Solanum tuberosum]
  misc_feature (24)..(312): Homolog of NCBI NO: 15239505 NR Description: RNA-binding protein, putative [Arabidopsis
  misc_feature (24)..(312): Homolog of NCBI NO: 15221187 NR Description: glycine-rich RNA-binding protein [Arabidopsis
ERRFERDRSSPLNPSDWNTDILQMAFLSKVGRLFSQTSSHVTASSSMLQSIRCMSSSKIFVGGISYSTDEFGLREAFSKYGEVVDAKIIVDRETGRSRGFAFVTFTSTEEASNAMQLDGQDLHGRRIRVNYATERGSGFGGRGFGGPGGGYGASDGGYGAPAGGYGGGAGGYGGNSSYSGNAGGGGGYGGNSSYGGNAGGYGGNPPYSGNAVGGGGGYGSNFGGGGGYGVAGGVGGSENFAQGSSTNAGFDDKFESNQPLGNDTDHQTESGLGGDEQFGGSDNQFGDAENGNTENGPVGFDQTDDGDVAKRA

SEQ ID NO: 42212 - protein, 289 aa, Arabidopsis thaliana
  peptide (1)..(289): Ceres Seq. ID no. 13487472
  misc_feature (36)..(106): Pfam Name: RNA recognition motif. (a.k.a. RRM, RBD, or RNP domain) Pfam Description: RNA recognition motif. (a.k.a. RRM, RBD, or RNP
  misc_feature (35)..(204): Homolog of NCBI NO: 7439981 NR Description: glycine-rich RNA-binding protein GRP1 - wheat
  misc_feature (35)..(204): Homolog of NCBI NO: 10799202 NR Description: glycine-rich RNA-binding protein [Sorghum bicolor]
  misc_feature (35)..(205): Homolog of NCBI NO: 1346181 NR Description: Glycine-rich RNA-binding protein GRP2A
  misc_feature (35)..(204): Homolog of NCBI NO: 544423 NR Description: Glycine-rich RNA-binding protein 2
  misc_feature (35)..(205): Homolog of NCBI NO: 1346180 NR Description: Glycine-rich RNA-binding protein GRP1A
  misc_feature (1)..(241): Homolog of NCBI NO: 15822703 NR Description: RNA-binding protein precursor [Nicotiana tabacum]
  misc_feature (1)..(235): Homolog of NCBI NO: 1084415 NR Description: RNA-binding protein - wood tobacco
  misc_feature (1)..(277): Homolog of NCBI NO: 15822705 NR Description: RNA-binding protein precursor [Solanum tuberosum]
  misc_feature (1)..(289): Homolog of NCBI NO: 15239505 NR Description: RNA-binding protein, putative [Arabidopsis
  misc_feature (1)..(289): Homolog of NCBI NO: 15221187 NR Description: glycine-rich RNA-binding protein [Arabidopsis
MAFLSKVGRLFSQTSSHVTASSSMLQSIRCMSSSKIFVGGISYSTDEFGLREAFSKYGEVVDAKIIVDRETGRSRGFAFVTFTSTEEASNAMQLDGQDLHGRRIRVNYATERGSGFGGRGFGGPGGGYGASDGGYGAPAGGYGGGAGGYGGNSSYSGNAGGGGGYGGNSSYGGNAGGYGGNPPYSGNAVGGGGGYGSNFGGGGGYGVAGGVGGSENFAQGSSTNAGFDDKFESNQPLGNDTDHQTESGLGGDEQFGGSDNQFGDAENGNTENGPVGFDQTDDGDVAKRA

SEQ ID NO: 42213 - protein, 266 aa, Arabidopsis thaliana
  peptide (1)..(266): Ceres Seq. ID no. 13487473
  misc_feature (13)..(83): Pfam Name: RNA recognition motif. (a.k.a. RRM, RBD, or RNP domain) Pfam Description: RNA recognition motif. (a.k.a. RRM, RBD, or RNP
  misc_feature (12)..(181): Homolog of NCBI NO: 7439981 NR Description: glycine-rich RNA-binding protein GRP1 - wheat
  misc_feature (12)..(181): Homolog of NCBI NO: 10799202 NR Description: glycine-rich RNA-binding protein [Sorghum bicolor]
  misc_feature (12)..(182): Homolog of NCBI NO: 1346181 NR Description: Glycine-rich RNA-binding protein GRP2A
  misc_feature (12)..(181): Homolog of NCBI NO: 544423 NR Description: Glycine-rich RNA-binding protein 2
  misc_feature (12)..(182): Homolog of NCBI NO: 1346180 NR Description: Glycine-rich RNA-binding protein GRP1A
  misc_feature (1)..(218): Homolog of NCBI NO: 15822703 NR Description: RNA-binding protein precursor [Nicotiana tabacum]
  misc_feature (1)..(212): Homolog of NCBI NO: 1084415 NR Description: RNA-binding protein - wood tobacco
  misc_feature (1)..(254): Homolog of NCBI NO: 15822705 NR Description: RNA-binding protein precursor [Solanum tuberosum]
  misc_feature (1)..(266): Homolog of NCBI NO: 15239505 NR Description: RNA-binding protein, putative [Arabidopsis
  misc_feature (1)..(266): Homolog of NCBI NO: 15221187 NR Description: glycine-rich RNA-binding protein [Arabidopsis
MLQSIRCMSSSKIFVGGISYSTDEFGLREAFSKYGEVVDAKIIVDRETGRSRGFAFVTFTSTEEASNAMQLDGQDLHGRRIRVNYATERGSGFGGRGFGGPGGGYGASDGGYGAPAGGYGGGAGGYGGNSSYSGNAGGGGGYGGNSSYGGNAGGYGGNPPYSGNAVGGGGGYGSNFGGGGGYGVAGGVGGSENFAQGSSTNAGFDDKFESNQPLGNDTDHQTESGLGGDEQFGGSDNQFGDAENGNTENGPVGFDQTDDGDVAKRA

SEQ ID NO: 42214 - DNA, 1048 bp, Arabidopsis thaliana
  misc_feature (1)..(1048): Ceres Seq. ID no. 13503932
  misc_feature: MA Experiment ID: 108434 Result: Down-regulated in Transcription
  misc_feature: MA Experiment 108434 PARAMETER Experiment Name: At_Root_Tips_cDNA_P Parameter: Tissue Value: Root Tips
  misc_feature: MA Experiment ID: 108435 Result: Up-regulated in Transcription
  misc_feature: MA Experiment 108435 PARAMETER Experiment Name: At_stm_Mutants_cDNA_P Parameter: Plant Line Value: wt Landsburg vs stm
  misc_feature: MA Experiment 108435 PARAMETER Experiment Name: At_stm_Mutants_cDNA_P Parameter: Tissue Value: Shoot Apical Meristem Region
  misc_feature: MA Experiment ID: 108461 Result: Down-regulated in Transcription
  misc_feature: MA Experiment 108461 PARAMETER Experiment Name: At_Germinating_Seeds_cDNA_P Parameter: Age (day) Value: 1 vs. 0
  misc_feature: MA Experiment 108461 PARAMETER Experiment Name: At_Germinating_Seeds_cDNA_P Parameter: Tissue Value: Germinating Seeds
  misc_feature: MA Experiment ID: 108572 Result: Down-regulated in Transcription
  misc_feature: MA Experiment 108572 PARAMETER Experiment Name: At_Drought_cDNA_P Parameter: Timepoint (hr) Value: 1
  misc_feature: MA Experiment 108572 PARAMETER Experiment Name: At_Drought_cDNA_P Parameter: Tissue Value: Aerial
  misc_feature: MA Experiment 108572 PARAMETER Experiment Name: At_Drought_cDNA_P Parameter: Treatment Value: Drought vs. No Drought
  misc_feature: MA Experiment ID: 108574 Result: Up-regulated in Transcription
  misc_feature: MA Experiment 108574 PARAMETER Experiment Name: At_Wounding__cDNA_P Parameter: Timepoint (hr) Value: 1
  misc_feature: MA Experiment 108574 PARAMETER Experiment Name: At_Wounding__cDNA_P Parameter: Tissue Value: Aerial
  misc_feature: MA Experiment 108574 PARAMETER Experiment Name: At_Wounding__cDNA_P Parameter: Treatment Value: Wounding vs. No Wounding
  misc_feature: MA Experiment ID: 108577 Result: Down-regulated in Transcription
  misc_feature: MA Experiment 108577 PARAMETER Experiment Name: At_42deg_Heat_cDNA_P Parameter: Temperature (deg C) Value: 42 vs. 22
  misc_feature: MA Experiment 108577 PARAMETER Experiment Name: At_42deg_Heat_cDNA_P Parameter: Timepoint (hr) Value: 6
  misc_feature: MA Experiment 108577 PARAMETER Experiment Name: At_42deg_Heat_cDNA_P Parameter: Tissue Value: Aerial
  misc_feature: MA Experiment ID: 108579 Result: Up-regulated in Transcription
  misc_feature: MA Experiment 108579 PARAMETER Experiment Name: At_4deg_Cold_cDNA_P Parameter: Temperature (deg C) Value: 4 vs. 22
  misc_feature: MA Experiment 108579 PARAMETER Experiment Name: At_4deg_Cold_cDNA_P Parameter: Timepoint (hr) Value: 6
  misc_feature: MA Experiment 108579 PARAMETER Experiment Name: At_4deg_Cold_cDNA_P Parameter: Tissue Value: Aerial
  misc_feature: MA Experiment ID: 108585 Result: Up-regulated in Transcription
  misc_feature: MA Experiment 108585 PARAMETER Experiment Name: At_5mM_NaNP_cDNA_P Parameter: Timepoint (hr) Value: 6
  misc_feature: MA Experiment 108585 PARAMETER Experiment Name: At_5mM_NaNP_cDNA_P Parameter: Tissue Value: Aerial
  misc_feature: MA Experiment 108585 PARAMETER Experiment Name: At_5mM_NaNP_cDNA_P Parameter: Treatment Value: null
  misc_feature: MA Experiment ID: 108667 Result: Up-regulated in Transcription
  misc_feature: MA Experiment 108667 PARAMETER Experiment Name: At_2mM_SA_cDNA_P Parameter: Plant Line Value: WS
  misc_feature: MA Experiment 108667 PARAMETER Experiment Name: At_2mM_SA_cDNA_P Parameter: Timepoint (hr) Value: 1
  misc_feature: MA Experiment 108667 PARAMETER Experiment Name: At_2mM_SA_cDNA_P Parameter: Treatment Value: 2mM SA vs. No Treatment
  misc_feature: MA Experiment ID: 20000069 Result: Up-regulated in Transcription
  misc_feature: MA Experiment 20000069 PARAMETER Experiment Name: At_100uM_ABA_Mutants_cDNA_P Parameter: Plant Line Value: CS23
  misc_feature: MA Experiment 20000069 PARAMETER Experiment Name: At_100uM_ABA_Mutants_cDNA_P Parameter: Timepoint (hr) Value: 6
  misc_feature: MA Experiment 20000069 PARAMETER Experiment Name: At_100uM_ABA_Mutants_cDNA_P Parameter: Tissue Value: Aerial
  misc_feature: MA Experiment 20000069 PARAMETER Experiment Name: At_100uM_ABA_Mutants_cDNA_P Parameter: Treatment Value: 100uM ABA vs. No Treatment
  misc_feature: MA Experiment ID: 20000090 Result: Down-regulated in Transcription
  misc_feature: MA Experiment ID: 20000144 Result: Down-regulated in Transcription
  misc_feature: MA Experiment 20000144 PARAMETER Experiment Name: At_42deg_Heat_cDNA_P Parameter: Temperature (deg C) Value: 42 vs. 22
  misc_feature: MA Experiment 20000144 PARAMETER Experiment Name: At_42deg_Heat_cDNA_P Parameter: Timepoint (hr) Value: 1
  misc_feature: MA Experiment 20000144 PARAMETER Experiment Name: At_42deg_Heat_cDNA_P Parameter: Tissue Value: Aerial
  misc_feature: MA Experiment ID: 20000224 Result: Down-regulated in Transcription
  misc_feature: MA Experiment ID: 20000306 Result: Down-regulated in Transcription
  misc_feature: MA Experiment 20000306 PARAMETER Experiment Name: At_Germinating_Seeds_Sub_P Parameter: Age (hr) Value: 6 vs. 0
  misc_feature: MA Experiment 20000306 PARAMETER Experiment Name: At_Germinating_Seeds_Sub_P Parameter: Organism Value: A. thaliana
  misc_feature: MA Experiment 20000306 PARAMETER Experiment Name: At_Germinating_Seeds_Sub_P Parameter: Plant Line Value: WS
  misc_feature: MA Experiment 20000306 PARAMETER Experiment Name: At_Germinating_Seeds_Sub_P Parameter: Tissue Value: Germinating Seeds
  misc_feature: MA Experiment ID: 20000307 Result: Down-regulated in Transcription
  misc_feature: MA Experiment 20000307 PARAMETER Experiment Name: At_Germinating_Seeds_Sub_P Parameter: Age (hr) Value: 24 vs. 0
  misc_feature: MA Experiment 20000307 PARAMETER Experiment Name: At_Germinating_Seeds_Sub_P Parameter: Organism Value: A. thaliana
  misc_feature: MA Experiment 20000307 PARAMETER Experiment Name: At_Germinating_Seeds_Sub_P Parameter: Plant Line Value: WS
  misc_feature: MA Experiment 20000307 PARAMETER Experiment Name: At_Germinating_Seeds_Sub_P Parameter: Tissue Value: Germinating Seeds
  misc_feature: MA Experiment ID: 20000314 Result: Up-regulated in Transcription
  misc_feature: MA Experiment 20000314 PARAMETER Experiment Name: At_14day_Shoots-Roots_Sub_P Parameter: Age (day) Value: 14
  misc_feature: MA Experiment 20000314 PARAMETER Experiment Name: At_14day_Shoots-Roots_Sub_P Parameter: Organism Value: A. thaliana
  misc_feature: MA Experiment 20000314 PARAMETER Experiment Name: At_14day_Shoots-Roots_Sub_P Parameter: Plant Line Value: WS
  misc_feature: MA Experiment 20000314 PARAMETER Experiment Name: At_14day_Shoots-Roots_Sub_P Parameter: Tissue Value: Roots vs. Whole Plant
  misc_feature: MA Experiment ID: 20000328 Result: Down-regulated in Transcription
  misc_feature: MA Experiment 20000328 PARAMETER Experiment Name: At_42deg_Heat_Sub_P Parameter: Age (day) Value: 14
  misc_feature: MA Experiment 20000328 PARAMETER Experiment Name: At_42deg_Heat_Sub_P Parameter: Organism Value: A. thaliana
  misc_feature: MA Experiment 20000328 PARAMETER Experiment Name: At_42deg_Heat_Sub_P Parameter: Plant Line Value: WS
  misc_feature: MA Experiment 20000328 PARAMETER Experiment Name: At_42deg_Heat_Sub_P Parameter: Temperature (deg C) Value: 42 vs. 22
  misc_feature: MA Experiment 20000328 PARAMETER Experiment Name: At_42deg_Heat_Sub_P Parameter: Timepoint (hr) Value: 6
  misc_feature: MA Experiment 20000328 PARAMETER Experiment Name: At_42deg_Heat_Sub_P Parameter: Tissue Value: Aerial
  misc_feature: MA Experiment ID: 20000332 Result: Up-regulated in Transcription
  misc_feature: MA Experiment 20000332 PARAMETER Experiment Name: At_4deg_Cold_Sub_P Parameter: Age (day) Value: 14
  misc_feature: MA Experiment 20000332 PARAMETER Experiment Name: At_4deg_Cold_Sub_P Parameter: Organism Value: A. thaliana
  misc_feature: MA Experiment 20000332 PARAMETER Experiment Name: At_4deg_Cold_Sub_P Parameter: Plant Line Value: WS
  misc_feature: MA Experiment 20000332 PARAMETER Experiment Name: At_4deg_Cold_Sub_P Parameter: Temperature (deg C) Value: 4 vs. 22
  misc_feature: MA Experiment 20000332 PARAMETER Experiment Name: At_4deg_Cold_Sub_P Parameter: Timepoint (hr) Value: 2
  misc_feature: MA Experiment 20000332 PARAMETER Experiment Name: At_4deg_Cold_Sub_P Parameter: Tissue Value: Aerial
  misc_feature: MA Experiment ID: 20000346 Result: Up-regulated in Transcription
  misc_feature: MA Experiment 20000346 PARAMETER Experiment Name: At_2mM_SA_Sub_P Parameter: Age (day) Value: 14
  misc_feature: MA Experiment 20000346 PARAMETER Experiment Name: At_2mM_SA_Sub_P Parameter: Organism Value: A. thaliana
  misc_feature: MA Experiment 20000346 PARAMETER Experiment Name: At_2mM_SA_Sub_P Parameter: Plant Line Value: WS
  misc_feature: MA Experiment 20000346 PARAMETER Experiment Name: At_2mM_SA_Sub_P Parameter: Timepoint (hr) Value: 1
  misc_feature: MA Experiment 20000346 PARAMETER Experiment Name: At_2mM_SA_Sub_P Parameter: Tissue Value: Aerial
  misc_feature: MA Experiment 20000346 PARAMETER Experiment Name: At_2mM_SA_Sub_P Parameter: Treatment Value: 2mM SA vs. No Treatment
  misc_feature: MA Experiment ID: 20000347 Result: Up-regulated in Transcription
  misc_feature: MA Experiment 20000347 PARAMETER Experiment Name: At_2mM_SA_Sub_P Parameter: Age (day) Value: 14
  misc_feature: MA Experiment 20000347 PARAMETER Experiment Name: At_2mM_SA_Sub_P Parameter: Organism Value: A. thaliana
  misc_feature: MA Experiment 20000347 PARAMETER Experiment Name: At_2mM_SA_Sub_P Parameter: Plant Line Value: WS
  misc_feature: MA Experiment 20000347 PARAMETER Experiment Name: At_2mM_SA_Sub_P Parameter: Timepoint (hr) Value: 6
  misc_feature: MA Experiment 20000347 PARAMETER Experiment Name: At_2mM_SA_Sub_P Parameter: Tissue Value: Aerial
  misc_feature: MA Experiment 20000347 PARAMETER Experiment Name: At_2mM_SA_Sub_P Parameter: Treatment Value: 2mM SA vs. No Treatment
  misc_feature: MA Experiment ID: 20000355 Result: Down-regulated in Transcription
  misc_feature: MA Experiment 20000355 PARAMETER Experiment Name: At_Siliques_Sub_P Parameter: Age (day) Value: 21
  misc_feature: MA Experiment 20000355 PARAMETER Experiment Name: At_Siliques_Sub_P Parameter: Organism Value: A. thaliana
  misc_feature: MA Experiment 20000355 PARAMETER Experiment Name: At_Siliques_Sub_P Parameter: Plant Line Value: WS
  misc_feature: MA Experiment 20000355 PARAMETER Experiment Name: At_Siliques_Sub_P Parameter: Tissue Value: Less Than 5mm Siliques vs. Whole Plant
  misc_feature: MA Experiment ID: 20000440 Result: Down-regulated in Transcription
  misc_feature: MA Experiment 20000440 PARAMETER Experiment Name: At_Closed-Flower__Sub_P Parameter: Tissue Value: Closed Flower vs. Whole Plant
  misc_feature: MA Experiment ID: 20000634 Result: Up-regulated in Transcription
  misc_feature: MA Experiment 20000634 PARAMETER Experiment Name: At_10percent_PEG_Sub_P Parameter: Age (day) Value: 12
  misc_feature: MA Experiment 20000634 PARAMETER Experiment Name: At_10percent_PEG_Sub_P Parameter: Organism Value: A. thaliana
  misc_feature: MA Experiment 20000634 PARAMETER Experiment Name: At_10percent_PEG_Sub_P Parameter: Plant Line Value: WS
  misc_feature: MA Experiment 20000634 PARAMETER Experiment Name: At_10percent_PEG_Sub_P Parameter: Timepoint (day) Value: 12
  misc_feature: MA Experiment 20000634 PARAMETER Experiment Name: At_10percent_PEG_Sub_P Parameter: Tissue Value: Whole Plant
  misc_feature: MA Experiment 20000634 PARAMETER Experiment Name: At_10percent_PEG_Sub_P Parameter: Treatment Value: 10% PEG vs. No Treatment
atcaacaatacatttgagatatcaatacacctccaaaatatatacaaaaatgaagctttcttgtggtacaagttttgcgttcttgattatgtttctctttgcggcacaatctatgcatgtctatgcgggtagcttccacaaagatgttcagatacattggggtgacggccgtggaaaggtgcgcgacagagatggaaagcttctatctctctcgctcgacaaatcctctggatccggttttcagtccaaccaggagtttctctatggcaaagccgaggttcaaatgaaacttgtccctggtaactcagctggaacagtaacaacattctatcttaagtctccgggaactacgtgggatgagattgatttcgagttcttaggaaacctaagtggtcatccgtatactctccatactaatgtttacacaaaaggctcaggagacaaagaacaacaatttcatctatggttcgacccaactgttaactttcacacttattgcatcacatggaatccccaaaggattatttttacagttgatggaattcctattagagagttcaagaactccgagtcaattggagttccgttcccaacgaagcaaccaatgaggctttacgcgagtctctgggaagccgagcattgggctacaaggggagggttagagaaaacagattggtcaaaggctcctttcaccgctttctacagaaactacaatgttgaaggatgtgtatgggctaatggaaaatcatcttgtcccgcaaattcctcatggttcactcaacaactcgattcaaacggccagacaagaatgaaaggggtacagagtaagtacatggtctacaactattgtaacgacaaaagaaggtttcctcgaggtgttcctgtagagtgcagttaaattgttgattctttgatacatgaataagttacttggcattgccttagtaactcaattgagttcttacatatttttatcattcatttgttgctcatatgtatgcggtgtttgtgtaagatgattttaagaagtaataaaaataaattatgg

SEQ ID NO: 42215 - protein, 298 aa, Arabidopsis thaliana
  peptide (1)..(298): Ceres Seq. ID no. 13503933
  misc_feature (45)..(227): Pfam Name: Glycosyl hydrolases family 16 Pfam Description: Glycosyl hydrolases family 16
  misc_feature (28)..(298): Homolog of NCBI NO: 3901012 NR Description: xyloglucan endotransglycosylase 1 [Fagus
  misc_feature (24)..(297): Homolog of NCBI NO: 17064792 NR Description: xyloglucan endo-1, 4-beta-D-glucanase (XTR-6)
  misc_feature (24)..(297): Homolog of NCBI NO: 15235997 NR Description: xyloglucan endotransglycosylase (XTR-6)
  misc_feature (24)..(298): Homolog of NCBI NO: 29500891 NR Description: putative xyloglucan endotransglycosylase [Cucumis
  misc_feature (28)..(297): Homolog of NCBI NO: 15242781 NR Description: xyloglucan endotransglycosylase (TCH4)
  misc_feature (21)..(298): Homolog of NCBI NO: 15238891 NR Description: xyloglucan endotransglycosylase, putative
  misc_feature (24)..(298): Homolog of NCBI NO: 15215690 NR Description: AT4g30290/F17I23_370 [Arabidopsis thaliana]
  misc_feature (24)..(298): Homolog of NCBI NO: 15234701 NR Description: xyloglucan endotransglycosylase, putative
  misc_feature (17)..(298): Homolog of NCBI NO: 15218642 NR Description: xyloglucan endotransglycosylase, putative
  misc_feature (17)..(298): Homolog of NCBI NO: 15234681 NR Description: xyloglucan endotransglycosylase, putative
STIHLRYQYTSKIYTKMKLSCGTSFAFLIMFLFAAQSMHVYAGSFHKDVQIHWGDGRGKVRDRDGKLLSLSLDKSSGSGFQSNQEFLYGKAEVQMKLVPGNSAGTVTTFYLKSPGTTWDEIDFEFLGNLSGHPYTLHTNVYTKGSGDKEQQFHLWFDPTVNFHTYCITWNPQRIIFTVDGIPIREFKNSESIGVPFPTKQPMRLYASLWEAEHWATRGGLEKTDWSKAPFTAFYRNYNVEGCVWANGKSSCPANSSWFTQQLDSNGQTRMKGVQSKYMVYNYCNDKRRFPRGVPVECS

SEQ ID NO: 42216 - protein, 282 aa, Arabidopsis thaliana
  peptide (1)..(282): Ceres Seq. ID no. 13503934
  misc_feature (29)..(211): Pfam Name: Glycosyl hydrolases family 16 Pfam Description: Glycosyl hydrolases family 16
  misc_feature (12)..(282): Homolog of NCBI NO: 3901012 NR Description: xyloglucan endotransglycosylase 1 [Fagus
  misc_feature (8)..(281): Homolog of NCBI NO: 17064792 NR Description: xyloglucan endo-1, 4-beta-D-glucanase (XTR-6)
  misc_feature (8)..(281): Homolog of NCBI NO: 15235997 NR Description: xyloglucan endotransglycosylase (XTR-6)
  misc_feature (8)..(282): Homolog of NCBI NO: 29500891 NR Description: putative xyloglucan endotransglycosylase [Cucumis
  misc_feature (12)..(281): Homolog of NCBI NO: 15242781 NR Description: xyloglucan endotransglycosylase (TCH4)
  misc_feature (5)..(282): Homolog of NCBI NO: 15238891 NR Description: xyloglucan endotransglycosylase, putative
  misc_feature (8)..(282): Homolog of NCBI NO: 15215690 NR Description: AT4g30290/F17I23_370 [Arabidopsis thaliana]
  misc_feature (8)..(282): Homolog of NCBI NO: 15234701 NR Description: xyloglucan endotransglycosylase, putative
  misc_feature (1)..(282): Homolog of NCBI NO: 15218642 NR Description: xyloglucan endotransglycosylase, putative
  misc_feature (1)..(282): Homolog of NCBI NO: 15234681 NR Description: xyloglucan endotransglycosylase, putative
MKLSCGTSFAFLIMFLFAAQSMHVYAGSFHKDVQIHWGDGRGKVRDRDGKLLSLSLDKSSGSGFQSNQEFLYGKAEVQMKLVPGNSAGTVTTFYLKSPGTTWDEIDFEFLGNLSGHPYTLHTNVYTKGSGDKEQQFHLWFDPTVNFHTYCITWNPQRIIFTVDGIPIREFKNSESIGVPFPTKQPMRLYASLWEAEHWATRGGLEKTDWSKAPFTAFYRNYNVEGCVWANGKSSCPANSSWFTQQLDSNGQTRMKGVQSKYMVYNYCNDKRRFPRGVPVECS

SEQ ID NO: 42217 - protein, 269 aa, Arabidopsis thaliana
  peptide (1)..(269): Ceres Seq. ID no. 13503935
  misc_feature (16)..(198): Pfam Name: Glycosyl hydrolases family 16 Pfam Description: Glycosyl hydrolases family 16
  misc_feature (1)..(269): Homolog of NCBI NO: 3901012 NR Description: xyloglucan endotransglycosylase 1 [Fagus
  misc_feature (1)..(268): Homolog of NCBI NO: 17064792 NR Description: xyloglucan endo-1, 4-beta-D-glucanase (XTR-6)
  misc_feature (1)..(268): Homolog of NCBI NO: 15235997 NR Description: xyloglucan endotransglycosylase (XTR-6)
  misc_feature (1)..(269): Homolog of NCBI NO: 29500891 NR Description: putative xyloglucan endotransglycosylase [Cucumis
  misc_feature (1)..(268): Homolog of NCBI NO: 15242781 NR Description: xyloglucan endotransglycosylase (TCH4)
  misc_feature (1)..(269): Homolog of NCBI NO: 15238891 NR Description: xyloglucan endotransglycosylase, putative
  misc_feature (1)..(269): Homolog of NCBI NO: 15215690 NR Description: AT4g30290/F17I23_370 [Arabidopsis thaliana]
  misc_feature (1)..(269): Homolog of NCBI NO: 15234701 NR Description: xyloglucan endotransglycosylase, putative
  misc_feature (1)..(269): Homolog of NCBI NO: 15218642 NR Description: xyloglucan endotransglycosylase, putative
  misc_feature (1)..(269): Homolog of NCBI NO: 15234681 NR Description: xyloglucan endotransglycosylase, putative
MFLFAAQSMHVYAGSFHKDVQIHWGDGRGKVRDRDGKLLSLSLDKSSGSGFQSNQEFLYGKAEVQMKLVPGNSAGTVTTFYLKSPGTTWDEIDFEFLGNLSGHPYTLHTNVYTKGSGDKEQQFHLWFDPTVNFHTYCITWNPQRIIFTVDGIPIREFKNSESIGVPFPTKQPMRLYASLWEAEHWATRGGLEKTDWSKAPFTAFYRNYNVEGCVWANGKSSCPANSSWFTQQLDSNGQTRMKGVQSKYMVYNYCNDKRRFPRGVPVECS

SEQ ID NO: 42218 - DNA, 1226 bp, Arabidopsis thaliana
  misc_feature (1)..(1226): Ceres Seq. ID no. 12329631
  misc_feature: MA Experiment ID: 108462 Result: Down-regulated in Transcription
  misc_feature: MA Experiment 108462 PARAMETER Experiment Name: At_Germinating_Seeds_cDNA_P Parameter: Age (day) Value: 2 vs. 0
  misc_feature: MA Experiment 108462 PARAMETER Experiment Name: At_Germinating_Seeds_cDNA_P Parameter: Tissue Value: Germinating Seeds
  misc_feature: MA Experiment ID: 108463 Result: Down-regulated in Transcription
  misc_feature: MA Experiment 108463 PARAMETER Experiment Name: At_Germinating_Seeds_cDNA_P Parameter: Age (day) Value: 3 vs. 0
  misc_feature: MA Experiment 108463 PARAMETER Experiment Name: At_Germinating_Seeds_cDNA_P Parameter: Tissue Value: Germinating Seeds
  misc_feature: MA Experiment ID: 108464 Result: Down-regulated in Transcription
  misc_feature: MA Experiment 108464 PARAMETER Experiment Name: At_Germinating_Seeds_cDNA_P Parameter: Age (day) Value: 4 vs. 0
  misc_feature: MA Experiment 108464 PARAMETER Experiment Name: At_Germinating_Seeds_cDNA_P Parameter: Tissue Value: Germinating Seeds
  misc_feature: MA Experiment ID: 20000111 Result: Down-regulated in Transcription
  misc_feature: MA Experiment 20000111 PARAMETER Experiment Name: At_42deg_Heat_cDNA_P Parameter: Temperature (deg C) Value: 42 vs. 22
  misc_feature: MA Experiment 20000111 PARAMETER Experiment Name: At_42deg_Heat_cDNA_P Parameter: Timepoint (hr) Value: 6
  misc_feature: MA Experiment 20000111 PARAMETER Experiment Name: At_42deg_Heat_cDNA_P Parameter: Tissue Value: Aerial
gttcttcaaagcacaaaccaattctcgaccaaaagatcagaacaaagcgaaggcggattttctggattctcgacggccggagattcatggcgacggctaacggagcaaagagtccgtcgagtatgggccctaaggttttgttttattccatattgctcacacttcagtacggagcccagcctctgatctccaaacgctgcatcagaaaggatgttattgtaacttcatctgttttgacgtgcgagattgttaaggtcatatgtgctctgattctcatggcaagaaatggtagtttgaagggattagcaaaagagtggacgttgatgggatccttgacagcatcaggacttcctgcagccatatatgcactgcagaacagtttgctgcagatctcatacaggagtcttgattccttgacattttcaattctgaatcagacgaaaatctttttcacagcattctttactttcataatactaaggcagaagcaatcaattctacaaataggagccttgtgtctattgatcatggcagcagtccttctaagtgttggtgaaggctctaacaaagattcaagcggcattaatgcggatcaaaagctgttttatggaattatcccggtcttggcagcctctgtcctgtcgggtttagcctcttctctgtgtcaatgggcttctcaggtcaagaagcattcatcatacttaatgacggttgaaatgtctatcgttggaagcctctgtttattagtaagtactcttaaatctccagatggtgaagcgattaaaaaatatggcttctttcatggttggactgctttaacactggtcccagtaataagcaatgctcttggtgggattcttgttggcctagttacatcacatgccggtggtgtaagaaagggatttgtgattgtgtcggcattacttgtgacggcgctacttcaatttgcgtttgaaggaaaaccgccatcatcgtattgcctagttgctcttcctcttgtgatgagtagtatctcaatgtaccagaaatacccatacattgacaagaagaagaagaaggtgtaagaaaaaggttccattcagagaatagctgctagtgctaagtacaacaatgagatatcttaatgccattattattaactaagtagatgatagtgtgattcttggagcattcaaaagactttgtagtatatttacattcaaagatggaatgagtccaattgagct

SEQ ID NO: 42219 - protein, 353 aa, Arabidopsis thaliana
  peptide (1)..(353): Ceres Seq. ID no. 12329632
  misc_feature (96)..(309): Pfam Name: Nucleotide-sugar transporter Pfam Description: Nucleotide-sugar transporter
  misc_feature (49)..(340): Homolog of NCBI NO: 21450281 NR Description: RIKEN cDNA 2310050P13 [Mus musculus]
  misc_feature (37)..(351): Homolog of NCBI NO: 39593097 NR Description: Hypothetical protein CBG09317 [Caenorhabditis
  misc_feature (37)..(351): Homolog of NCBI NO: 38176083 NR Description: Hypothetical protein ZC250.3 [Caenorhabditis
  misc_feature (49)..(340): Homolog of NCBI NO: 37725001 NR Description: solute carrier family 35 member 3 [Bos taurus]
  misc_feature (44)..(340): Homolog of NCBI NO: 22204205 NR Description: SI:bZ30I22.3 (novel protein similar to vertebrate
  misc_feature (49)..(340): Homolog of NCBI NO: 6136120 NR Description: UDP N-acetylglucosamine transporter (Golgi
  misc_feature (49)..(340): Homolog of NCBI NO: 6912668 NR Description: solute carrier family 35 (UDP-N-acetylglucosamine
  misc_feature (92)..(353): Homolog of NCBI NO: 8843764 NR Description: gene_id:MXK3.23~ref|NP_036375.1~similar to
  misc_feature (29)..(353): Homolog of NCBI NO: 18086579 NR Description: AT5g65000/MXK3_23 [Arabidopsis thaliana]
  misc_feature (29)..(353): Homolog of NCBI NO: 18424900 NR Description: putative protein
SSKHKPILDQKIRTKRRRIFWILDGRRFMATANGAKSPSSMGPKVLFYSILLTLQYGAQPLISKRCIRKDVIVTSSVLTCEIVKVICALILMARNGSLKGLAKEWTLMGSLTASGLPAAIYALQNSLLQISYRSLDSLTFSILNQTKIFFTAFFTFIILRQKQSILQIGALCLLIMAAVLLSVGEGSNKDSSGINADQKLFYGIIPVLAASVLSGLASSLCQWASQVKKHSSYLMTVEMSIVGSLCLLVSTLKSPDGEAIKKYGFFHGWTALTLVPVISNALGGILVGLVTSHAGGVRKGFVIVSALLVTALLQFAFEGKPPSSYCLVALPLVMSSISMYQKYPYIDKKKKKV

SEQ ID NO: 42220 - protein, 325 aa, Arabidopsis thaliana; identical to SEQ ID NO: 21559
  peptide (1)..(325): Ceres Seq. ID no. 12329633
  misc_feature (68)..(281): Pfam Name: Nucleotide-sugar transporter Pfam Description: Nucleotide-sugar transporter
  misc_feature (21)..(312): Homolog of NCBI NO: 21450281 NR Description: RIKEN cDNA 2310050P13 [Mus musculus]
  misc_feature (9)..(323): Homolog of NCBI NO: 39593097 NR Description: Hypothetical protein CBG09317 [Caenorhabditis
  misc_feature (9)..(323): Homolog of NCBI NO: 38176083 NR Description: Hypothetical protein ZC250.3 [Caenorhabditis
  misc_feature (21)..(312): Homolog of NCBI NO: 37725001 NR Description: solute carrier family 35 member 3 [Bos taurus]
  misc_feature (16)..(312): Homolog of NCBI NO: 22204205 NR Description: SI:bZ30I22.3 (novel protein similar to vertebrate
  misc_feature (21)..(312): Homolog of NCBI NO: 6136120 NR Description: UDP N-acetylglucosamine transporter (Golgi
  misc_feature (21)..(312): Homolog of NCBI NO: 6912668 NR Description: solute carrier family 35 (UDP-N-acetylglucosamine
  misc_feature (64)..(325): Homolog of NCBI NO: 8843764 NR Description: gene_id:MXK3.23~ref|NP_036375.1~similar to
  misc_feature (1)..(325): Homolog of NCBI NO: 18086579 NR Description: AT5g65000/MXK3_23 [Arabidopsis thaliana]
  misc_feature (1)..(325): Homolog of NCBI NO: 18424900 NR Description: putative protein

SEQ ID NO: 42221 - protein, 313 aa, Arabidopsis thaliana; identical to SEQ ID NO: 21560
  peptide (1)..(313): Ceres Seq. ID no. 12329634
  misc_feature (56)..(269): Pfam Name: Nucleotide-sugar transporter Pfam Description: Nucleotide-sugar transporter
  misc_feature (9)..(300): Homolog of NCBI NO: 21450281 NR Description: RIKEN cDNA 2310050P13 [Mus musculus]
  misc_feature (1)..(311): Homolog of NCBI NO: 39593097 NR Description: Hypothetical protein CBG09317 [Caenorhabditis
  misc_feature (1)..(311): Homolog of NCBI NO: 38176083 NR Description: Hypothetical protein ZC250.3 [Caenorhabditis
  misc_feature (9)..(300): Homolog of NCBI NO: 37725001 NR Description: solute carrier family 35 member 3 [Bos taurus]
  misc_feature (4)..(300): Homolog of NCBI NO: 22204205 NR Description: SI:bZ30I22.3 (novel protein similar to vertebrate
  misc_feature (9)..(300): Homolog of NCBI NO: 6136120 NR Description: UDP N-acetylglucosamine transporter (Golgi
  misc_feature (9)..(300): Homolog of NCBI NO: 6912668 NR Description: solute carrier family 35 (UDP-N-acetylglucosamine
  misc_feature (52)..(313): Homolog of NCBI NO: 8843764 NR Description: gene_id:MXK3.23~ref|NP_036375.1~similar to
  misc_feature (1)..(313): Homolog of NCBI NO: 18086579 NR Description: AT5g65000/MXK3_23 [Arabidopsis thaliana]
  misc_feature (1)..(313): Homolog of NCBI NO: 18424900 NR Description: putative protein

SEQ ID NO: 42222 - DNA, 1570 bp, Arabidopsis thaliana
  misc_feature (1)..(1570): Ceres Seq. ID no. 12327884
  misc_feature: MA Experiment ID: 108488 Result: Down-regulated in Transcription
  misc_feature: MA Experiment ID: 108572 Result: Up-regulated in Transcription
  misc_feature: MA Experiment 108572 PARAMETER Experiment Name: At_Drought_cDNA_P Parameter: Timepoint (hr) Value: 1
  misc_feature: MA Experiment 108572 PARAMETER Experiment Name: At_Drought_cDNA_P Parameter: Tissue Value: Aerial
  misc_feature: MA Experiment 108572 PARAMETER Experiment Name: At_Drought_cDNA_P Parameter: Treatment Value: Drought vs. No Drought
  misc_feature: MA Experiment ID: 108573 Result: Up-regulated in Transcription
  misc_feature: MA Experiment 108573 PARAMETER Experiment Name: At_Drought_cDNA_P Parameter: Timepoint (hr) Value: 6
  misc_feature: MA Experiment 108573 PARAMETER Experiment Name: At_Drought_cDNA_P Parameter: Tissue Value: Aerial
  misc_feature: MA Experiment 108573 PARAMETER Experiment Name: At_Drought_cDNA_P Parameter: Treatment Value: Drought vs. No Drought
  misc_feature: MA Experiment ID: 20000071 Result: Up-regulated in Transcription
  misc_feature: MA Experiment 20000071 PARAMETER Experiment Name: At_100uM_ABA_Mutants_cDNA_P Parameter: Plant Line Value: CS8104
  misc_feature: MA Experiment 20000071 PARAMETER Experiment Name: At_100uM_ABA_Mutants_cDNA_P Parameter: Timepoint (hr) Value: 6
  misc_feature: MA Experiment 20000071 PARAMETER Experiment Name: At_100uM_ABA_Mutants_cDNA_P Parameter: Tissue Value: Aerial
  misc_feature: MA Experiment 20000071 PARAMETER Experiment Name: At_100uM_ABA_Mutants_cDNA_P Parameter: Treatment Value: 100uM ABA vs. No Treatment
  misc_feature: MA Experiment ID: 20000072 Result: Up-regulated in Transcription
  misc_feature: MA Experiment 20000072 PARAMETER Experiment Name: At_100uM_ABA_Mutants_cDNA_P Parameter: Plant Line Value: CS8105
  misc_feature: MA Experiment 20000072 PARAMETER Experiment Name: At_100uM_ABA_Mutants_cDNA_P Parameter: Timepoint (hr) Value: 6
  misc_feature: MA Experiment 20000072 PARAMETER Experiment Name: At_100uM_ABA_Mutants_cDNA_P Parameter: Tissue Value: Aerial
  misc_feature: MA Experiment 20000072 PARAMETER Experiment Name: At_100uM_ABA_Mutants_cDNA_P Parameter: Treatment Value: 100uM ABA vs. No Treatment
  misc_feature: MA Experiment ID: 20000087 Result: Up-regulated in Transcription
  misc_feature: MA Experiment 20000087 PARAMETER Experiment Name: At_100uM_ABA_Mutants_cDNA_P Parameter: Plant Line Value: WS
  misc_feature: MA Experiment 20000087 PARAMETER Experiment Name: At_100uM_ABA_Mutants_cDNA_P Parameter: Timepoint (hr) Value: 6
  misc_feature: MA Experiment 20000087 PARAMETER Experiment Name: At_100uM_ABA_Mutants_cDNA_P Parameter: Tissue Value: Aerial
  misc_feature: MA Experiment 20000087 PARAMETER Experiment Name: At_100uM_ABA_Mutants_cDNA_P Parameter: Treatment Value: 100uM ABA vs. No Treatment
  misc_feature: MA Experiment ID: 20000117 Result: Up-regulated in Transcription
  misc_feature: MA Experiment 20000117 PARAMETER Experiment Name: At_100uM_ABA_Mutants_cDNA_P Parameter: Plant Line Value: Columbia
  misc_feature: MA Experiment 20000117 PARAMETER Experiment Name: At_100uM_ABA_Mutants_cDNA_P Parameter: Timepoint (hr) Value: 6
  misc_feature: MA Experiment 20000117 PARAMETER Experiment Name: At_100uM_ABA_Mutants_cDNA_P Parameter: Tissue Value: Aerial
  misc_feature: MA Experiment 20000117 PARAMETER Experiment Name: At_100uM_ABA_Mutants_cDNA_P Parameter: Treatment Value: 100uM ABA vs. No Treatment
  misc_feature: MA Experiment ID: 20000185 Result: Up-regulated in Transcription
  misc_feature: MA Experiment 20000185 PARAMETER Experiment Name: At_Roots__P Parameter: Age (day) Value: 7 vs. 21
  misc_feature: MA Experiment 20000185 PARAMETER Experiment Name: At_Roots__P Parameter: Organism Value: A. thaliana
  misc_feature: MA Experiment 20000185 PARAMETER Experiment Name: At_Roots__P Parameter: Tissue Value: Roots vs. Whole Plant
  misc_feature: MA Experiment ID: 20000437 Result: Up-regulated in Transcription
  misc_feature: MA Experiment 20000437 PARAMETER Experiment Name: At_Drought_P Parameter: Age (day) Value: 8
  misc_feature: MA Experiment 20000437 PARAMETER Experiment Name: At_Drought_P Parameter: Organism Value: A. thaliana
  misc_feature: MA Experiment 20000437 PARAMETER Experiment Name: At_Drought_P Parameter: Plant Line Value: WS
  misc_feature: MA Experiment 20000437 PARAMETER Experiment Name: At_Drought_P Parameter: Timepoint (hr) Value: 24
  misc_feature: MA Experiment 20000437 PARAMETER Experiment Name: At_Drought_P Parameter: Tissue Value: Whole Plant
  misc_feature: MA Experiment 20000437 PARAMETER Experiment Name: At_Drought_P Parameter: Treatment Value: Drought vs. No Drought
  misc_feature: MA Experiment ID: 20000439 Result: Up-regulated in Transcription
  misc_feature: MA Experiment 20000439 PARAMETER Experiment Name: At_Roots__P Parameter: Age (day) Value: 14 vs. 21
  misc_feature: MA Experiment 20000439 PARAMETER Experiment Name: At_Roots__P Parameter: Organism Value: A. thaliana
  misc_feature: MA Experiment 20000439 PARAMETER Experiment Name: At_Roots__P Parameter: Tissue Value: Roots vs. Whole Plant
  misc_feature: MA Experiment ID: 20000495 Result: Up-regulated in Transcription
  misc_feature: MA Experiment 20000495 PARAMETER Experiment Name: At_Guard_Cells_P Parameter: Harvest Date Value: 8/2/2002
  misc_feature: MA Experiment 20000495 PARAMETER Experiment Name: At_Guard_Cells_P Parameter: Organism Value: A. thaliana
  misc_feature: MA Experiment 20000495 PARAMETER Experiment Name: At_Guard_Cells_P Parameter: Tissue Value: Guard Cells vs. Leaves
  misc_feature: MA Experiment ID: 20000794 Result: Up-regulated in Transcription
  misc_feature: MA Experiment 20000794 PARAMETER Experiment Name: At_Petals_P Parameter: Age (day) Value: 23-25 days
  misc_feature: MA Experiment 20000794 PARAMETER Experiment Name: At_Petals_P Parameter: Plant Line Value: WS
  misc_feature: MA Experiment 20000794 PARAMETER Experiment Name: At_Petals_P Parameter: Tissue Value: Petals vs. Whole plant
  misc_feature: MA Experiment ID: 20001451 Result: Up-regulated in Transcription
  misc_feature: MA Experiment 20001451 PARAMETER Experiment Name: At_Far-red-induction_P Parameter: Age (day) Value: 7
  misc_feature: MA Experiment 20001451 PARAMETER Experiment Name: At_Far-red-induction_P Parameter: Light Value: Far-red vs. White
  misc_feature: MA Experiment 20001451 PARAMETER Experiment Name: At_Far-red-induction_P Parameter: Organism Value: A. thaliana
  misc_feature: MA Experiment 20001451 PARAMETER Experiment Name: At_Far-red-induction_P Parameter: Plant Line Value: Columbia
  misc_feature: MA Experiment 20001451 PARAMETER Experiment Name: At_Far-red-induction_P Parameter: Timepoint (hr) Value: 24
  misc_feature: MA Experiment 20001451 PARAMETER Experiment Name: At_Far-red-induction_P Parameter: Tissue Value: Whole Plant
  misc_feature: MA Experiment ID: 20001558 Result: Up-regulated in Transcription
  misc_feature: MA Experiment 20001558 PARAMETER Experiment Name: At_Drought_Soil_Dry_P Parameter: Age (day) Value: 27
  misc_feature: MA Experiment 20001558 PARAMETER Experiment Name: At_Drought_Soil_Dry_P Parameter: Organism Value: A. thaliana
  misc_feature: MA Experiment 20001558 PARAMETER Experiment Name: At_Drought_Soil_Dry_P Parameter: Plant Line Value: WS
  misc_feature: MA Experiment 20001558 PARAMETER Experiment Name: At_Drought_Soil_Dry_P Parameter: Post Timepoint (hr) Value: 6
  misc_feature: MA Experiment 20001558 PARAMETER Experiment Name: At_Drought_Soil_Dry_P Parameter: Post-Treatment Value: Re-Water vs. No Drought
  misc_feature: MA Experiment 20001558 PARAMETER Experiment Name: At_Drought_Soil_Dry_P Parameter: Timepoint (day) Value: 13
  misc_feature: MA Experiment 20001558 PARAMETER Experiment Name: At_Drought_Soil_Dry_P Parameter: Treatment Value: Drought vs. No Drought
  misc_feature: MA Experiment ID: 20001560 Result: Up-regulated in Transcription
  misc_feature: MA Experiment 20001560 PARAMETER Experiment Name: At_Drought_Soil_Dry_P Parameter: Age (day) Value: 28
  misc_feature: MA Experiment 20001560 PARAMETER Experiment Name: At_Drought_Soil_Dry_P Parameter: Organism Value: A. thaliana
  misc_feature: MA Experiment 20001560 PARAMETER Experiment Name: At_Drought_Soil_Dry_P Parameter: Plant Line Value: WS
  misc_feature: MA Experiment 20001560 PARAMETER Experiment Name: At_Drought_Soil_Dry_P Parameter: Post Timepoint (hr) Value: None
  misc_feature: MA Experiment 20001560 PARAMETER Experiment Name: At_Drought_Soil_Dry_P Parameter: Post-Treatment Value: None
  misc_feature: MA Experiment 20001560 PARAMETER Experiment Name: At_Drought_Soil_Dry_P Parameter: Timepoint (day) Value: 14
  misc_feature: MA Experiment 20001560 PARAMETER Experiment Name: At_Drought_Soil_Dry_P Parameter: Treatment Value: Drought vs. No Drought
  misc_feature: MA Experiment ID: 20001757 Result: Down-regulated in Transcription
  misc_feature: MA Experiment 20001757 PARAMETER Experiment Name: At_50mM_NH4NO3_L-to-H_P Parameter: Timepoint (hr) Value: 6
  misc_feature: MA Experiment 20001757 PARAMETER Experiment Name: At_50mM_NH4NO3_L-to-H_P Parameter: Tissue Value: Leaf
  misc_feature: MA Experiment 20001757 PARAMETER Experiment Name: At_50mM_NH4NO3_L-to-H_P Parameter: Treatment Value: 50mM NH4NO3 vs 100mM Mannitol
  misc_feature: MA Experiment ID: 20001905 Result: Up-regulated in Transcription
  misc_feature: MA Experiment 20001905 PARAMETER Experiment Name: At_Drought_Reproduction_P Parameter: Age (day) Value: 40
  misc_feature: MA Experiment 20001905 PARAMETER Experiment Name: At_Drought_Reproduction_P Parameter: Organism Value: A. thaliana
  misc_feature: MA Experiment 20001905 PARAMETER Experiment Name: At_Drought_Reproduction_P Parameter: Plant Line Value: WS
  misc_feature: MA Experiment 20001905 PARAMETER Experiment Name: At_Drought_Reproduction_P Parameter: Timepoint (day) Value: 10
  misc_feature: MA Experiment 20001905 PARAMETER Experiment Name: At_Drought_Reproduction_P Parameter: Tissue Value: Rosettes
  misc_feature: MA Experiment 20001905 PARAMETER Experiment Name: At_Drought_Reproduction_P Parameter: Treatment Value: Drought vs. No Drought
  misc_feature: MA Experiment ID: 20001906 Result: Up-regulated in Transcription
  misc_feature: MA Experiment 20001906 PARAMETER Experiment Name: At_Drought_Reproduction_P Parameter: Age (day) Value: 35
  misc_feature: MA Experiment 20001906 PARAMETER Experiment Name: At_Drought_Reproduction_P Parameter: Organism Value: A. thaliana
  misc_feature: MA Experiment 20001906 PARAMETER Experiment Name: At_Drought_Reproduction_P Parameter: Plant Line Value: WS
  misc_feature: MA Experiment 20001906 PARAMETER Experiment Name: At_Drought_Reproduction_P Parameter: Timepoint (day) Value: 5
  misc_feature: MA Experiment 20001906 PARAMETER Experiment Name: At_Drought_Reproduction_P Parameter: Tissue Value: Siliques
  misc_feature: MA Experiment 20001906 PARAMETER Experiment Name: At_Drought_Reproduction_P Parameter: Treatment Value: Drought vs. No Drought
  misc_feature: MA Experiment ID: 20001911 Result: Up-regulated in Transcription
  misc_feature: MA Experiment 20001911 PARAMETER Experiment Name: At_Drought_Reproduction_P Parameter: Age (day) Value: 40
  misc_feature: MA Experiment 20001911 PARAMETER Experiment Name: At_Drought_Reproduction_P Parameter: Organism Value: A. thaliana
  misc_feature: MA Experiment 20001911 PARAMETER Experiment Name: At_Drought_Reproduction_P Parameter: Plant Line Value: WS
  misc_feature: MA Experiment 20001911 PARAMETER Experiment Name: At_Drought_Reproduction_P Parameter: Timepoint (day) Value: 10
  misc_feature: MA Experiment 20001911 PARAMETER Experiment Name: At_Drought_Reproduction_P Parameter: Tissue Value: Flowers
  misc_feature: MA Experiment 20001911 PARAMETER Experiment Name: At_Drought_Reproduction_P Parameter: Treatment Value: Drought vs. No Drought
actacttggattcctacttcttcttcttcttcctctgattctctcccattccaatcaatctctagggttcttcttcagcaatacttcagaagctggttttggccatggaacccaatgggtacaggaaagaaagaagaaaggaacaacatttggggagaatgaatggtggtggtggtgatgttgagactgatcttgatccatggactgcatgggcttacaagcctcgcactatctctcttctccttattggcgcttgttttctcatttgggctagtggagctcttgatcctgacagcactacatctgatgatcttgtcacttctgtcaaaaggggagtgtgggctatgatcgctgtctttcttgcttactctttgctccaggccccttcaacggttctaatcaggccccatcctgcaatctggcgcttagttcatggaatggccgtcatttacttagttgcacttacttttttgctctttcagagacgtgatgatgcacggcagttcatgaagtttctccaccctgaccttggaatagaacttcctgagaaatcatacggtgctgattgccgtatatatgtgcctgatcacccaacgaacaggtttaagaatctttatgacacagtatttgatgagtttttcttggctcacatctttggttgatgggggaaagcaattctgatccggaaccagccgcttctttgggtgctttcaattggttttgagttattggaggttacttttcggcatatgttaccaaatttcaacgagtgctggtgggacagtattgttcttgatatcttgatatgcaactggtttggtatctgggcaggaatgtatacagttcgatattttgatggaaaaacatatgagtgggttggcattagccgccagcctaacattattggcaaagtgaaaaggacactggggcagttcacaccagctcactgggacaaagacgagtggcatccgctgcagggaccttggcgttttattcaagtactcactctttgcatcatattcttgacagtggagctgaacacattctttctcaagtttagcctgtggatcccccctcgaaacccagtgattctctataggctgatcttgtggtggctcatagcgataccaacaacacgggagtacaattcatatcttcaagacagaaaacctgtgaaaaaggtgggagcattctgttggctgtcactggggatatgcatagtagaacttctcatctgcatcaagtttggaagtggattgtacccaacagaaatgccattgtgggtagtgacactatggggaagtgtgggacttggacttgtggccttcttgctgtcttggacatggaagatccagaagatcctcgcgcaaaagagacgttaagcgcatcattattgttgcagcagagacgagagagaaatagaggtgagacagtgaaatgccattgtggtttttttttgtaaatagggagaagaaggaacgatgtaaatgcaattttctttagggatagtgtgtgatattcaacatttacgaagattccatcaattctttcatgcatcaaaagttctttc

SEQ ID NO: 42223 - protein, 210 aa, Arabidopsis thaliana
  peptide (1)..(210): Ceres Seq. ID no. 12327885
  misc_feature (1)..(169): Pfam Name: Phosphatidyl serine synthase Pfam Description: Phosphatidyl serine synthase
  misc_feature (100)..(138): Homolog of NCBI NO: 34895332 NR Description: P0494A10.20 [Oryza sativa (japonica
  misc_feature (1)..(83): Homolog of NCBI NO: 34895332 NR Description: P0494A10.20 [Oryza sativa (japonica
  misc_feature (1)..(200): Homolog of NCBI NO: 14290490 NR Description: Similar to phosphatidylserine synthase 2 [Mus
  misc_feature (1)..(200): Homolog of NCBI NO: 31560497 NR Description: phosphatidylserine synthase 2 [Mus musculus]
  misc_feature (1)..(200): Homolog of NCBI NO: 4063700 NR Description: phosphatidylserine synthase-2 [Mus musculus]
  misc_feature (1)..(200): Homolog of NCBI NO: 2190007 NR Description: phosphatidylserine synthase II [Cricetulus
  misc_feature (1)..(200): Homolog of NCBI NO: 13540555 NR Description: phosphatidylserine synthase 2 [Homo sapiens]
  misc_feature (1)..(113): Homolog of NCBI NO: 34911216 NR Description: putative phosphatidylserine synthase
  misc_feature (1)..(210): Homolog of NCBI NO: 22329573 NR Description: putative phosphatidylserine synthase
  misc_feature (1)..(169): Homolog of NCBI NO: 25518032 NR Description: F9L1.4 protein - Arabidopsis thaliana
MLPNFNECWWDSIVLDILICNWFGIWAGMYTVRYFDGKTYEWVGISRQPNIIGKVKRTLGQFTPAHWDKDEWHPLQGPWRFIQVLTLCIIFLTVELNTFFLKFSLWIPPRNPVILYRLILWWLIAIPTTREYNSYLQDRKPVKKVGAFCWLSLGICIVELLICIKFGSGLYPTEMPLWVVTLWGSVGLGLVAFLLSWTWKIQKILAQKRR

SEQ ID NO: 42224 - protein, 185 aa, Arabidopsis thaliana
  peptide (1)..(185): Ceres Seq. ID no. 12327886
  misc_feature (101)..(185): Pfam Name: Phosphatidyl serine synthase Pfam Description: Phosphatidyl serine synthase
  misc_feature (38)..(185): Homolog of NCBI NO: 27881972 NR Description: Unknown (protein for MGC:55906) [Danio rerio]
  misc_feature (1)..(54): Homolog of NCBI NO: 34895332 NR Description: P0494A10.20 [Oryza sativa (japonica
  misc_feature (77)..(185): Homolog of NCBI NO: 14290490 NR Description: Similar to phosphatidylserine synthase 2 [Mus
  misc_feature (31)..(185): Homolog of NCBI NO: 31560497 NR Description: phosphatidylserine synthase 2 [Mus musculus]
  misc_feature (31)..(185): Homolog of NCBI NO: 4063700 NR Description: phosphatidylserine synthase-2 [Mus musculus]
  misc_feature (10)..(185): Homolog of NCBI NO: 2190007 NR Description: phosphatidylserine synthase II [Cricetulus
  misc_feature (31)..(185): Homolog of NCBI NO: 13540555 NR Description: phosphatidylserine synthase 2 [Homo sapiens]
  misc_feature (1)..(56): Homolog of NCBI NO: 34911216 NR Description: putative phosphatidylserine synthase
  misc_feature (77)..(143): Homolog of NCBI NO: 34911216 NR Description: putative phosphatidylserine synthase
  misc_feature (1)..(185): Homolog of NCBI NO: 25518032 NR Description: F9L1.4 protein - Arabidopsis thaliana
MEPNGYRKERRKEQHLGRMNGGGGDVETDLDPWTAWAYKPRTISLLLIGACFLIWASGALDPDSTTSDDLVTSVKRGVWAMIAVFLAYSLLQAPSTVLIRPHPAIWRLVHGMAVIYLVALTFLLFQRRDDARQFMKFLHPDLGIELPEKSYGADCRIYVPDHPTNRFKNLYDTVFDEFFLAHIFG

SEQ ID NO: 42225 - protein, 182 aa, Arabidopsis thaliana
  peptide (1)..(182): Ceres Seq. ID no. 12327887
  misc_feature (1)..(141): Pfam Name: Phosphatidyl serine synthase Pfam Description: Phosphatidyl serine synthase
  misc_feature (72)..(110): Homolog of NCBI NO: 34895332 NR Description: P0494A10.20 [Oryza sativa (japonica
  misc_feature (1)..(55): Homolog of NCBI NO: 34895332 NR Description: P0494A10.20 [Oryza sativa (japonica
  misc_feature (1)..(172): Homolog of NCBI NO: 14290490 NR Description: Similar to phosphatidylserine synthase 2 [Mus
  misc_feature (1)..(172): Homolog of NCBI NO: 31560497 NR Description: phosphatidylserine synthase 2 [Mus musculus]
  misc_feature (1)..(172): Homolog of NCBI NO: 4063700 NR Description: phosphatidylserine synthase-2 [Mus musculus]
  misc_feature (1)..(172): Homolog of NCBI NO: 2190007 NR Description: phosphatidylserine synthase II [Cricetulus
  misc_feature (1)..(172): Homolog of NCBI NO: 13540555 NR Description: phosphatidylserine synthase 2 [Homo sapiens]
  misc_feature (1)..(85): Homolog of NCBI NO: 34911216 NR Description: putative phosphatidylserine synthase
  misc_feature (1)..(182): Homolog of NCBI NO: 22329573 NR Description: putative phosphatidylserine synthase
  misc_feature (1)..(141): Homolog of NCBI NO: 25518032 NR Description: F9L1.4 protein - Arabidopsis thaliana
MYTVRYFDGKTYEWVGISRQPNIIGKVKRTLGQFTPAHWDKDEWHPLQGPWRFIQVLTLCIIFLTVELNTFFLKFSLWIPPRNPVILYRLILWWLIAIPTTREYNSYLQDRKPVKKVGAFCWLSLGICIVELLICIKFGSGLYPTEMPLWVVTLWGSVGLGLVAFLLSWTWKIQKILAQKRR

SEQ ID NO: 42226 - DNA, 1660 bp, Arabidopsis thaliana
  misc_feature (1)..(1660): Ceres Seq. ID no. 13499948
  misc_feature: MA Experiment ID: 108461 Result: Down-regulated in Transcription
  misc_feature: MA Experiment 108461 PARAMETER Experiment Name: At_Germinating_Seeds_cDNA_P Parameter: Age (day) Value: 1 vs. 0
  misc_feature: MA Experiment 108461 PARAMETER Experiment Name: At_Germinating_Seeds_cDNA_P Parameter: Tissue Value: Germinating Seeds
  misc_feature: MA Experiment ID: 108462 Result: Down-regulated in Transcription
  misc_feature: MA Experiment 108462 PARAMETER Experiment Name: At_Germinating_Seeds_cDNA_P Parameter: Age (day) Value: 2 vs. 0
  misc_feature: MA Experiment 108462 PARAMETER Experiment Name: At_Germinating_Seeds_cDNA_P Parameter: Tissue Value: Germinating Seeds
  misc_feature: MA Experiment ID: 108573 Result: Up-regulated in Transcription
  misc_feature: MA Experiment 108573 PARAMETER Experiment Name: At_Drought_cDNA_P Parameter: Timepoint (hr) Value: 6
  misc_feature: MA Experiment 108573 PARAMETER Experiment Name: At_Drought_cDNA_P Parameter: Tissue Value: Aerial
  misc_feature: MA Experiment 108573 PARAMETER Experiment Name: At_Drought_cDNA_P Parameter: Treatment Value: Drought vs. No Drought
  misc_feature: MA Experiment ID: 108585 Result: Up-regulated in Transcription
  misc_feature: MA Experiment 108585 PARAMETER Experiment Name: At_5mM_NaNP_cDNA_P Parameter: Timepoint (hr) Value: 6
  misc_feature: MA Experiment 108585 PARAMETER Experiment Name: At_5mM_NaNP_cDNA_P Parameter: Tissue Value: Aerial
  misc_feature: MA Experiment 108585 PARAMETER Experiment Name: At_5mM_NaNP_cDNA_P Parameter: Treatment Value: null
  misc_feature: MA Experiment ID: 20000307 Result: Down-regulated in Transcription
  misc_feature: MA Experiment 20000307 PARAMETER Experiment Name: At_Germinating_Seeds_Sub_P Parameter: Age (hr) Value: 24 vs. 0
  misc_feature: MA Experiment 20000307 PARAMETER Experiment Name: At_Germinating_Seeds_Sub_P Parameter: Organism Value: A. thaliana
  misc_feature: MA Experiment 20000307 PARAMETER Experiment Name: At_Germinating_Seeds_Sub_P Parameter: Plant Line Value: WS
  misc_feature: MA Experiment 20000307 PARAMETER Experiment Name: At_Germinating_Seeds_Sub_P Parameter: Tissue Value: Germinating Seeds
  misc_feature: MA Experiment ID: 20001807 Result: Down-regulated in Transcription
  misc_feature: MA Experiment 20001807 PARAMETER Experiment Name: At_50mM_NH4NO3_L-to-H_Sub_P Parameter: Timepoint (hr) Value: 6
  misc_feature: MA Experiment 20001807 PARAMETER Experiment Name: At_50mM_NH4NO3_L-to-H_Sub_P Parameter: Tissue Value: Leaf
  misc_feature: MA Experiment 20001807 PARAMETER Experiment Name: At_50mM_NH4NO3_L-to-H_Sub_P Parameter: Treatment Value: 50mM NH4NO3 vs 100mM Mannitol
aaacctagaaacaaatacggtcttttttttttctttttatgggtcgcgaatctctggctgttgtgtcctcgccgccatcggcgactgcgcccagtactgctgtgtcggctacctcgcttgctcctggctttcgatttcatccgactgatgaggaactcgtgagctattacttgaagaggaaggttctgggtaaacctgtacgcttcgatgcgattggagaggtagatatctacaagcatgagccctgggatttagcagtgttttcgaagttgaaaactcgggaccaagaatggtacttcttcagtgcgttagataagaagtacggtaatggtgctaggatgaatcgagcaactaacaaagggtactggaaagcaactggaaaagacagagaaatccgccgggatattcagttgctcggtatgaaaaagacgcttgttttccacagcgggcgtgctccagacggccttcggactaattgggtcatgcacgagtatcgccttgtggaatatgaaactgaaactaacggaagcctgctgcaggatgcatatgtgttgtgcagagtgtttcacaagaataacattgggccaccaagtgggaacagatatgcgccattcatggaagaagaatgggctgatggtggaggagctctgattccaggaatagacgttagggtcagggtagaggctctaccacaagccaatggaaacaaccagatggaccaggaaatgcattcagcaagcaaggatctcattaacatcaacgagctaccgagagatgctactccaatggacatcgaacctaaccaacagaatcatcatgagagtgccttcaagccacaggagagtaacaaccatagtggttatgaagaggatgaggacacactcaaacgcgagcacgcagaagaagatgagcgtcctccttctctatgcattctcaacaaagaagctccactacctctcctgcaatacaaacgtagacgccaaaacgagtccaacaacaactcaagcaggaacacacaggaccattgttcgtccacaataacaaccgtcgacaatacaaccaccttaatctcatcatctgctgctgctgctaccaacactgccatctctgcattgcttgagttctcacttatgggtatctccgacaagaaagaaaaccagcagaaagaggaaacttctcctcctagtccaattgcatctcctgaagagaaggttaatgatctccagaaggaggttcaccagatgtctgttgaaagagaaactttcaagcttgagatgatgagtgcagaggctatgatcagcattctccagtcaagaatcgatgcgctgcgtcaggagaacgaggaacttaagaagaagaacgccagtggacaagctagttaaaccaccgcaacatctctccaggtgtcttcttcttcttcttcttcttctttgcctcttagctgtaatcttcttaatagtatgagctatggatgtagcttcttcagacggatcagaaaccttatgaatctctgttgtaaaattaggataaaacggaacggagccaaccaactaggtctttttattttatccttttttactttggatgtttctgcatcttttgggaacattttcaggctgatccattgtcgtatattatcatctatctatctagtcttttc

SEQ ID NO: 42227 - protein, 447 aa, Arabidopsis thaliana
  peptide (1)..(447): Ceres Seq. ID no. 13499949
  misc_feature (27)..(155): Pfam Name: No apical meristem (NAM) protein Pfam Description: No apical meristem (NAM) protein
  misc_feature (23)..(199): Homolog of NCBI NO: 18398895 NR Description: expressed protein [Arabidopsis thaliana]
  misc_feature (23)..(199): Homolog of NCBI NO: 8567779 NR Description: NAC, putative [Arabidopsis thaliana]
  misc_feature (23)..(273): Homolog of NCBI NO: 6456751 NR Description: NAC2 [Arabidopsis thaliana]
  misc_feature (23)..(215): Homolog of NCBI NO: 21105746 NR Description: nam-like protein 9 [Petunia x hybrida]
  misc_feature (23)..(273): Homolog of NCBI NO: 15237699 NR Description: NAC2 protein [Arabidopsis thaliana]
  misc_feature (14)..(320): Homolog of NCBI NO: 21105744 NR Description: nam-like protein 8 [Petunia x hybrida]
  misc_feature (1)..(320): Homolog of NCBI NO: 21105736 NR Description: nam-like protein 4 [Petunia x hybrida]
  misc_feature (1)..(234): Homolog of NCBI NO: 18398893 NR Description: expressed protein [Arabidopsis thaliana]
  misc_feature (1)..(445): Homolog of NCBI NO: 30681347 NR Description: expressed protein [Arabidopsis thaliana]
  misc_feature (1)..(447): Homolog of NCBI NO: 18398891 NR Description: expressed protein [Arabidopsis thaliana]
MGRESLAVVSSPPSATAPSTAVSATSLAPGFRFHPTDEELVSYYLKRKVLGKPVRFDAIGEVDIYKHEPWDLAVFSKLKTRDQEWYFFSALDKKYGNGARMNRATNKGYWKATGKDREIRRDIQLLGMKKTLVFHSGRAPDGLRTNWVMHEYRLVEYETETNGSLLQDAYVLCRVFHKNNIGPPSGNRYAPFMEEEWADGGGALIPGIDVRVRVEALPQANGNNQMDQEMHSASKDLININELPRDATPMDIEPNQQNHHESAFKPQESNNHSGYEEDEDTLKREHAEEDERPPSLCILNKEAPLPLLQYKRRRQNESNNNSSRNTQDHCSSTITTVDNTTTLISSSAAAATNTAISALLEFSLMGISDKKENQQKEETSPPSPIASPEEKVNDLQKEVHQMSVERETFKLEMMSAEAMISILQSRIDALRQENEELKKKNASGQAS

SEQ ID NO: 42228 - protein, 347 aa, Arabidopsis thaliana
  peptide (1)..(347): Ceres Seq. ID no. 13499950
  misc_feature (1)..(55): Pfam Name: No apical meristem (NAM) protein Pfam Description: No apical meristem (NAM) protein
  misc_feature (1)..(99): Homolog of NCBI NO: 18398895 NR Description: expressed protein [Arabidopsis thaliana]
  misc_feature (1)..(99): Homolog of NCBI NO: 8567779 NR Description: NAC, putative [Arabidopsis thaliana]
  misc_feature (1)..(173): Homolog of NCBI NO: 6456751 NR Description: NAC2 [Arabidopsis thaliana]
  misc_feature (1)..(115): Homolog of NCBI NO: 21105746 NR Description: nam-like protein 9 [Petunia x hybrida]
  misc_feature (1)..(173): Homolog of NCBI NO: 15237699 NR Description: NAC2 protein [Arabidopsis thaliana]
  misc_feature (1)..(220): Homolog of NCBI NO: 21105744 NR Description: nam-like protein 8 [Petunia x hybrida]
  misc_feature (1)..(220): Homolog of NCBI NO: 21105736 NR Description: nam-like protein 4 [Petunia x hybrida]
  misc_feature (1)..(134): Homolog of NCBI NO: 18398893 NR Description: expressed protein [Arabidopsis thaliana]
  misc_feature (1)..(345): Homolog of NCBI NO: 30681347 NR Description: expressed protein [Arabidopsis thaliana]
  misc_feature (1)..(347): Homolog of NCBI NO: 18398891 NR Description: expressed protein [Arabidopsis thaliana]
MNRATNKGYWKATGKDREIRRDIQLLGMKKTLVFHSGRAPDGLRTNWVMHEYRLVEYETETNGSLLQDAYVLCRVFHKNNIGPPSGNRYAPFMEEEWADGGGALIPGIDVRVRVEALPQANGNNQMDQEMHSASKDLININELPRDATPMDIEPNQQNHHESAFKPQESNNHSGYEEDEDTLKREHAEEDERPPSLCILNKEAPLPLLQYKRRRQNESNNNSSRNTQDHCSSTITTVDNTTTLISSSAAAATNTAISALLEFSLMGISDKKENQQKEETSPPSPIASPEEKVNDLQKEVHQMSVERETFKLEMMSAEAMISILQSRIDALRQENEELKKKNASGQAS

SEQ ID NO: 42229 - protein, 320 aa, Arabidopsis thaliana
  peptide (1)..(320): Ceres Seq. ID no. 13499951
  misc_feature (1)..(72): Homolog of NCBI NO: 18398895 NR Description: expressed protein [Arabidopsis thaliana]
  misc_feature (1)..(72): Homolog of NCBI NO: 8567779 NR Description: NAC, putative [Arabidopsis thaliana]
  misc_feature (1)..(146): Homolog of NCBI NO: 6456751 NR Description: NAC2 [Arabidopsis thaliana]
  misc_feature (1)..(88): Homolog of NCBI NO: 21105746 NR Description: nam-like protein 9 [Petunia x hybrida]
  misc_feature (1)..(146): Homolog of NCBI NO: 15237699 NR Description: NAC2 protein [Arabidopsis thaliana]
  misc_feature (1)..(193): Homolog of NCBI NO: 21105744 NR Description: nam-like protein 8 [Petunia x hybrida]
  misc_feature (1)..(193): Homolog of NCBI NO: 21105736 NR Description: nam-like protein 4 [Petunia x hybrida]
  misc_feature (1)..(107): Homolog of NCBI NO: 18398893 NR Description: expressed protein [Arabidopsis thaliana]
  misc_feature (1)..(318): Homolog of NCBI NO: 30681347 NR Description: expressed protein [Arabidopsis thaliana]
  misc_feature (1)..(320): Homolog of NCBI NO: 18398891 NR Description: expressed protein [Arabidopsis thaliana]
MKKTLVFHSGRAPDGLRTNWVMHEYRLVEYETETNGSLLQDAYVLCRVFHKNNIGPPSGNRYAPFMEEEWADGGGALIPGIDVRVRVEALPQANGNNQMDQEMHSASKDLININELPRDATPMDIEPNQQNHHESAFKPQESNNHSGYEEDEDTLKREHAEEDERPPSLCILNKEAPLPLLQYKRRRQNESNNNSSRNTQDHCSSTITTVDNTTTLISSSAAAATNTAISALLEFSLMGISDKKENQQKEETSPPSPIASPEEKVNDLQKEVHQMSVERETFKLEMMSAEAMISILQSRIDALRQENEELKKKNASGQAS

SEQ ID NO: 42230 - DNA, 1353 bp, Arabidopsis thaliana
  misc_feature (1)..(1353): Ceres Seq. ID no. 13592834
  misc_feature: MA Experiment ID: 20000307 Result: Down-regulated in Transcription
  misc_feature: MA Experiment 20000307 PARAMETER Experiment Name: At_Germinating_Seeds_Sub_P Parameter: Age (hr) Value: 24 vs. 0
  misc_feature: MA Experiment 20000307 PARAMETER Experiment Name: At_Germinating_Seeds_Sub_P Parameter: Organism Value: A. thaliana
  misc_feature: MA Experiment 20000307 PARAMETER Experiment Name: At_Germinating_Seeds_Sub_P Parameter: Plant Line Value: WS
  misc_feature: MA Experiment 20000307 PARAMETER Experiment Name: At_Germinating_Seeds_Sub_P Parameter: Tissue Value: Germinating Seeds
  misc_feature: MA Experiment ID: 20000329 Result: Up-regulated in Transcription
  misc_feature: MA Experiment 20000329 PARAMETER Experiment Name: At_4deg_Cold_Sub_P Parameter: Age (day) Value: 14
  misc_feature: MA Experiment 20000329 PARAMETER Experiment Name: At_4deg_Cold_Sub_P Parameter: Organism Value: A. thaliana
  misc_feature: MA Experiment 20000329 PARAMETER Experiment Name: At_4deg_Cold_Sub_P Parameter: Plant Line Value: WS
  misc_feature: MA Experiment 20000329 PARAMETER Experiment Name: At_4deg_Cold_Sub_P Parameter: Temperature (deg C) Value: 4 vs. 22
  misc_feature: MA Experiment 20000329 PARAMETER Experiment Name: At_4deg_Cold_Sub_P Parameter: Timepoint (hr) Value: 6
  misc_feature: MA Experiment 20000329 PARAMETER Experiment Name: At_4deg_Cold_Sub_P Parameter: Tissue Value: Aerial
  misc_feature: MA Experiment ID: 20000355 Result: Up-regulated in Transcription
  misc_feature: MA Experiment 20000355 PARAMETER Experiment Name: At_Siliques_Sub_P Parameter: Age (day) Value: 21
  misc_feature: MA Experiment 20000355 PARAMETER Experiment Name: At_Siliques_Sub_P Parameter: Organism Value: A. thaliana
  misc_feature: MA Experiment 20000355 PARAMETER Experiment Name: At_Siliques_Sub_P Parameter: Plant Line Value: WS
  misc_feature: MA Experiment 20000355 PARAMETER Experiment Name: At_Siliques_Sub_P Parameter: Tissue Value: Less Than 5mm Siliques vs. Whole Plant
  misc_feature: MA Experiment ID: 20000440 Result: Up-regulated in Transcription
  misc_feature: MA Experiment 20000440 PARAMETER Experiment Name: At_Closed-Flower__Sub_P Parameter: Tissue Value: Closed Flower vs. Whole Plant
  misc_feature: MA Experiment ID: 20001807 Result: Up-regulated in Transcription
  misc_feature: MA Experiment 20001807 PARAMETER Experiment Name: At_50mM_NH4NO3_L-to-H_Sub_P Parameter: Timepoint (hr) Value: 6
  misc_feature: MA Experiment 20001807 PARAMETER Experiment Name: At_50mM_NH4NO3_L-to-H_Sub_P Parameter: Tissue Value: Leaf
  misc_feature: MA Experiment 20001807 PARAMETER Experiment Name: At_50mM_NH4NO3_L-to-H_Sub_P Parameter: Treatment Value: 50mM NH4NO3 vs 100mM Mannitol
aaaccctaaatctttttcttattcgaatctgttagccatccaaaacctctctctttgccgcaaaaaatgactagtacggagaacaacaacaacggctctgatgaaactcagacgacgaagttacacttcgaggatgctgatgaatcaatgcacgatggagatgacaacaatgccgatgttgctgatgacattaccagcgccgattactacttcgattcttactctcatttcggtattcatgaagaaatgttaaaggatgtagtgaggacaaagagttatcaagatgttatttacaagaacaagtttcttatcaaggacaaaattgttcttgatgttggagctggaactggaatcttgtctctcttctgtgctaaagcaggagcagctcacgtttacgcagttgagtgttctcaaatggctgacacaacaaaggagattgttaagtcgaatggattctcagatgttataacggttttgaaagggaagattgaggagatcgaacttccagttcctaaagtggatgtgattatctctgaatggatgggttactttctgttgtatgaaaatatgcttgacaccgtcttgtatgctcgcaataaatggcttgttgatggtggaattgttctaccagataaagcttctctttatgttactgccattgaggatgctcattataaagacgacaaagtagagttttgggacgacgtgtatgggtttgacatgtcgtgcatcaagagaagagcaattacagaaccgcttgttgacaccgttgatggtaaccaaatcgtgactgatagcaagctgctgaagacaatggatatctctaagatggctgctggagatgcttccttcacagctccgtttaagctcgtcgcacaacgaaatgaccatatccatgcccttgtagcctacttcgatgtgtcattcactatgtgtcacaagaagatgggtttctcaacaggaccgaaatcgcgggctacgcattggaaacaaactgtgctgtacctggaagatgtgttaaccatatgcgagggtgaaacaatcacaggaagcatgaccattgcacaaaacaaaaagaatcccagagacgtcgacataaagctcagctattctttgaacggccaacattgcaatatctcaaggacccacttctataagatgcgctaaaagctctcagaggatgtaaaatcccccacaagtacctttcatcatcttgaggctgagatggacaaatctcatttgtatctctactgtttccattattgctgcttatgtttcagaattagatattaaccatctctctttctctctcactgtgcgtctcttcctctatgatagtttcttgttcctctc

SEQ ID NO: 42231 - protein, 366 aa, Arabidopsis thaliana
  peptide (1)..(366): Ceres Seq. ID no. 13592835
  misc_feature (83)..(156): Pfam Name: Met-10+ like-protein Pfam Description: Met-10+ like-protein
  misc_feature (39)..(366): Homolog of NCBI NO: 7453577 NR Description: protein arginine N-methyltransferase 1-variant 1
  misc_feature (39)..(366): Homolog of NCBI NO: 7453575 NR Description: protein arginine N-methyltransferase 1-variant 2
  misc_feature (24)..(366): Homolog of NCBI NO: 7453576 NR Description: protein arginine N-methyltransferase 1-variant 3
  misc_feature (31)..(366): Homolog of NCBI NO: 34785428 NR Description: Unknown (protein for MGC:66201) [Danio rerio]
  misc_feature (22)..(366): Homolog of NCBI NO: 27882547 NR Description: Similar to heterogeneous nuclear
  misc_feature (41)..(366): Homolog of NCBI NO: 28207757 NR Description: CR061 protein [Chlamydomonas reinhardtii]
  misc_feature (25)..(352): Homolog of NCBI NO: 25456391 NR Description: protein-arginine N-methyltransferase (EC
  misc_feature (25)..(366): Homolog of NCBI NO: 17381028 NR Description: putative arginine methyltransferase pam1
  misc_feature (25)..(366): Homolog of NCBI NO: 15233606 NR Description: protein arginine N-methyltransferase, putative
  misc_feature (1)..(366): Homolog of NCBI NO: 15224820 NR Description: protein arginine N-methyltransferase, putative
MTSTENNNNGSDETQTTKLHFEDADESMHDGDDNNADVADDITSADYYFDSYSHFGIHEEMLKDVVRTKSYQDVIYKNKFLIKDKIVLDVGAGTGILSLFCAKAGAAHVYAVECSQMADTTKEIVKSNGFSDVITVLKGKIEEIELPVPKVDVIISEWMGYFLLYENMLDTVLYARNKWLVDGGIVLPDKASLYVTAIEDAHYKDDKVEFWDDVYGFDMSCIKRRAITEPLVDTVDGNQIVTDSKLLKTMDISKMAAGDASFTAPFKLVAQRNDHIHALVAYFDVSFTMCHKKMGFSTGPKSRATHWKQTVLYLEDVLTICEGETITGSMTIAQNKKNPRDVDIKLSYSLNGQHCNISRTHFYKMR

SEQ ID NO: 42232 - protein, 339 aa, Arabidopsis thaliana
  peptide (1)..(339): Ceres Seq. ID no. 13592836
  misc_feature (56)..(129): Pfam Name: Met-10+ like-protein Pfam Description: Met-10+ like-protein
  misc_feature (12)..(339): Homolog of NCBI NO: 7453577 NR Description: protein arginine N-methyltransferase 1-variant 1
  misc_feature (12)..(339): Homolog of NCBI NO: 7453575 NR Description: protein arginine N-methyltransferase 1-variant 2
  misc_feature (1)..(339): Homolog of NCBI NO: 7453576 NR Description: protein arginine N-methyltransferase 1-variant 3
  misc_feature (4)..(339): Homolog of NCBI NO: 34785428 NR Description: Unknown (protein for MGC:66201) [Danio rerio]
  misc_feature (1)..(339): Homolog of NCBI NO: 27882547 NR Description: Similar to heterogeneous nuclear
  misc_feature (14)..(339): Homolog of NCBI NO: 28207757 NR Description: CR061 protein [Chlamydomonas reinhardtii]
  misc_feature (1)..(325): Homolog of NCBI NO: 25456391 NR Description: protein-arginine N-methyltransferase (EC
  misc_feature (1)..(339): Homolog of NCBI NO: 17381028 NR Description: putative arginine methyltransferase pam1
  misc_feature (1)..(339): Homolog of NCBI NO: 15233606 NR Description: protein arginine N-methyltransferase, putative
  misc_feature (1)..(339): Homolog of NCBI NO: 15224820 NR Description: protein arginine N-methyltransferase, putative
MHDGDDNNADVADDITSADYYFDSYSHFGIHEEMLKDVVRTKSYQDVIYKNKFLIKDKIVLDVGAGTGILSLFCAKAGAAHVYAVECSQMADTTKEIVKSNGFSDVITVLKGKIEEIELPVPKVDVIISEWMGYFLLYENMLDTVLYARNKWLVDGGIVLPDKASLYVTAIEDAHYKDDKVEFWDDVYGFDMSCIKRRAITEPLVDTVDGNQIVTDSKLLKTMDISKMAAGDASFTAPFKLVAQRNDHIHALVAYFDVSFTMCHKKMGFSTGPKSRATHWKQTVLYLEDVLTICEGETITGSMTIAQNKKNPRDVDIKLSYSLNGQHCNISRTHFYKMR

SEQ ID NO: 42233 - protein, 306 aa, Arabidopsis thaliana
  peptide (1)..(306): Ceres Seq. ID no. 13592837
  misc_feature (23)..(96): Pfam Name: Met-10+ like-protein Pfam Description: Met-10+ like-protein
  misc_feature (1)..(306): Homolog of NCBI NO: 7453577 NR Description: protein arginine N-methyltransferase 1-variant 1
  misc_feature (1)..(306): Homolog of NCBI NO: 7453575 NR Description: protein arginine N-methyltransferase 1-variant 2
  misc_feature (1)..(306): Homolog of NCBI NO: 7453576 NR Description: protein arginine N-methyltransferase 1-variant 3
  misc_feature (1)..(306): Homolog of NCBI NO: 34785428 NR Description: Unknown (protein for MGC:66201) [Danio rerio]
  misc_feature (1)..(306): Homolog of NCBI NO: 27882547 NR Description: Similar to heterogeneous nuclear
  misc_feature (1)..(306): Homolog of NCBI NO: 28207757 NR Description: CR061 protein [Chlamydomonas reinhardtii]
  misc_feature (1)..(292): Homolog of NCBI NO: 25456391 NR Description: protein-arginine N-methyltransferase (EC
  misc_feature (1)..(306): Homolog of NCBI NO: 17381028 NR Description: putative arginine methyltransferase pam1
  misc_feature (1)..(306): Homolog of NCBI NO: 15233606 NR Description: protein arginine N-methyltransferase, putative
  misc_feature (1)..(306): Homolog of NCBI NO: 15224820 NR Description: protein arginine N-methyltransferase, putative
MLKDVVRTKSYQDVIYKNKFLIKDKIVLDVGAGTGILSLFCAKAGAAHVYAVECSQMADTTKEIVKSNGFSDVITVLKGKIEEIELPVPKVDVIISEWMGYFLLYENMLDTVLYARNKWLVDGGIVLPDKASLYVTAIEDAHYKDDKVEFWDDVYGFDMSCIKRRAITEPLVDTVDGNQIVTDSKLLKTMDISKMAAGDASFTAPFKLVAQRNDHIHALVAYFDVSFTMCHKKMGFSTGPKSRATHWKQTVLYLEDVLTICEGETITGSMTIAQNKKNPRDVDIKLSYSLNGQHCNISRTHFYKMR

SEQ ID NO: 42234 - DNA, 704 bp, Arabidopsis thaliana
  misc_feature (1)..(704): Ceres Seq. ID no. 12325848
  misc_feature: MA Experiment ID: 108463 Result: Up-regulated in Transcription
  misc_feature: MA Experiment 108463 PARAMETER Experiment Name: At_Germinating_Seeds_cDNA_P Parameter: Age (day) Value: 3 vs. 0
  misc_feature: MA Experiment 108463 PARAMETER Experiment Name: At_Germinating_Seeds_cDNA_P Parameter: Tissue Value: Germinating Seeds
  misc_feature: MA Experiment ID: 108464 Result: Up-regulated in Transcription
  misc_feature: MA Experiment 108464 PARAMETER Experiment Name: At_Germinating_Seeds_cDNA_P Parameter: Age (day) Value: 4 vs. 0
  misc_feature: MA Experiment 108464 PARAMETER Experiment Name: At_Germinating_Seeds_cDNA_P Parameter: Tissue Value: Germinating Seeds
  misc_feature: MA Experiment ID: 108488 Result: Down-regulated in Transcription
  misc_feature: MA Experiment ID: 108489 Result: Up-regulated in Transcription
  misc_feature: MA Experiment ID: 20000113 Result: Up-regulated in Transcription
  misc_feature: MA Experiment 20000113 PARAMETER Experiment Name: At_42deg_Heat_cDNA_P Parameter: Temperature (deg C) Value: 42 vs. 22
  misc_feature: MA Experiment 20000113 PARAMETER Experiment Name: At_42deg_Heat_cDNA_P Parameter: Timepoint (hr) Value: 8
  misc_feature: MA Experiment 20000113 PARAMETER Experiment Name: At_42deg_Heat_cDNA_P Parameter: Tissue Value: Aerial
  misc_feature: MA Experiment ID: 20000169 Result: Up-regulated in Transcription
  misc_feature: MA Experiment 20000169 PARAMETER Experiment Name: At_100uM_ABA_P Parameter: Age (day) Value: 14
  misc_feature: MA Experiment 20000169 PARAMETER Experiment Name: At_100uM_ABA_P Parameter: Organism Value: A. thaliana
  misc_feature: MA Experiment 20000169 PARAMETER Experiment Name: At_100uM_ABA_P Parameter: Plant Line Value: WS
  misc_feature: MA Experiment 20000169 PARAMETER Experiment Name: At_100uM_ABA_P Parameter: Timepoint (hr) Value: 6
  misc_feature: MA Experiment 20000169 PARAMETER Experiment Name: At_100uM_ABA_P Parameter: Tissue Value: Aerial
  misc_feature: MA Experiment 20000169 PARAMETER Experiment Name: At_100uM_ABA_P Parameter: Treatment Value: 100uM ABA vs. No Treatment
  misc_feature: MA Experiment ID: 20000171 Result: Up-regulated in Transcription
  misc_feature: MA Experiment 20000171 PARAMETER Experiment Name: At_42deg_Heat_P Parameter: Age (day) Value: 14
  misc_feature: MA Experiment 20000171 PARAMETER Experiment Name: At_42deg_Heat_P Parameter: Organism Value: A. thaliana
  misc_feature: MA Experiment 20000171 PARAMETER Experiment Name: At_42deg_Heat_P Parameter: Plant Line Value: WS
  misc_feature: MA Experiment 20000171 PARAMETER Experiment Name: At_42deg_Heat_P Parameter: Temperature (deg C) Value: 42 vs. 22
  misc_feature: MA Experiment 20000171 PARAMETER Experiment Name: At_42deg_Heat_P Parameter: Timepoint (hr) Value: 1
  misc_feature: MA Experiment 20000171 PARAMETER Experiment Name: At_42deg_Heat_P Parameter: Tissue Value: Aerial
  misc_feature: MA Experiment ID: 20000173 Result: Up-regulated in Transcription
  misc_feature: MA Experiment 20000173 PARAMETER Experiment Name: At_42deg_Heat_P Parameter: Age (day) Value: 14
  misc_feature: MA Experiment 20000173 PARAMETER Experiment Name: At_42deg_Heat_P Parameter: Organism Value: A. thaliana
  misc_feature: MA Experiment 20000173 PARAMETER Experiment Name: At_42deg_Heat_P Parameter: Plant Line Value: WS
  misc_feature: MA Experiment 20000173 PARAMETER Experiment Name: At_42deg_Heat_P Parameter: Temperature (deg C) Value: 42 vs. 22
  misc_feature: MA Experiment 20000173 PARAMETER Experiment Name: At_42deg_Heat_P Parameter: Timepoint (hr) Value: 6
  misc_feature: MA Experiment 20000173 PARAMETER Experiment Name: At_42deg_Heat_P Parameter: Tissue Value: Aerial
  misc_feature: MA Experiment ID: 20000182 Result: Up-regulated in Transcription
  misc_feature: MA Experiment 20000182 PARAMETER Experiment Name: At_2mM_SA_P Parameter: Age (day) Value: 14
  misc_feature: MA Experiment 20000182 PARAMETER Experiment Name: At_2mM_SA_P Parameter: Organism Value: A. thaliana
  misc_feature: MA Experiment 20000182 PARAMETER Experiment Name: At_2mM_SA_P Parameter: Plant Line Value: WS
  misc_feature: MA Experiment 20000182 PARAMETER Experiment Name: At_2mM_SA_P Parameter: Timepoint (hr) Value: 6
  misc_feature: MA Experiment 20000182 PARAMETER Experiment Name: At_2mM_SA_P Parameter: Tissue Value: Aerial
  misc_feature: MA Experiment 20000182 PARAMETER Experiment Name: At_2mM_SA_P Parameter: Treatment Value: 2mM SA vs. No Treatment
  misc_feature: MA Experiment ID: 20000185 Result: Up-regulated in Transcription
  misc_feature: MA Experiment 20000185 PARAMETER Experiment Name: At_Roots__P Parameter: Age (day) Value: 7 vs. 21
  misc_feature: MA Experiment 20000185 PARAMETER Experiment Name: At_Roots__P Parameter: Organism Value: A. thaliana
  misc_feature: MA Experiment 20000185 PARAMETER Experiment Name: At_Roots__P Parameter: Tissue Value: Roots vs. Whole Plant
  misc_feature: MA Experiment ID: 20000437 Result: Up-regulated in Transcription
  misc_feature: MA Experiment 20000437 PARAMETER Experiment Name: At_Drought_P Parameter: Age (day) Value: 8
  misc_feature: MA Experiment 20000437 PARAMETER Experiment Name: At_Drought_P Parameter: Organism Value: A. thaliana
  misc_feature: MA Experiment 20000437 PARAMETER Experiment Name: At_Drought_P Parameter: Plant Line Value: WS
  misc_feature: MA Experiment 20000437 PARAMETER Experiment Name: At_Drought_P Parameter: Timepoint (hr) Value: 24
  misc_feature: MA Experiment 20000437 PARAMETER Experiment Name: At_Drought_P Parameter: Tissue Value: Whole Plant
  misc_feature: MA Experiment 20000437 PARAMETER Experiment Name: At_Drought_P Parameter: Treatment Value: Drought vs. No Drought
  misc_feature: MA Experiment ID: 20000438 Result: Down-regulated in Transcription
  misc_feature: MA Experiment 20000438 PARAMETER Experiment Name: At_Shoots__P Parameter: Age (day) Value: 14
  misc_feature: MA Experiment 20000438 PARAMETER Experiment Name: At_Shoots__P Parameter: Tissue Value: Shoots vs. Whole Plant
  misc_feature: MA Experiment ID: 20000439 Result: Up-regulated in Transcription
  misc_feature: MA Experiment 20000439 PARAMETER Experiment Name: At_Roots__P Parameter: Age (day) Value: 14 vs. 21
  misc_feature: MA Experiment 20000439 PARAMETER Experiment Name: At_Roots__P Parameter: Organism Value: A. thaliana
  misc_feature: MA Experiment 20000439 PARAMETER Experiment Name: At_Roots__P Parameter: Tissue Value: Roots vs. Whole Plant
  misc_feature: MA Experiment ID: 20000453 Result: Up-regulated in Transcription
  misc_feature: MA Experiment 20000453 PARAMETER Experiment Name: At_100uM_ABA_P Parameter: Age (day) Value: 15
  misc_feature: MA Experiment 20000453 PARAMETER Experiment Name: At_100uM_ABA_P Parameter: Organism Value: A. thaliana
  misc_feature: MA Experiment 20000453 PARAMETER Experiment Name: At_100uM_ABA_P Parameter: Plant Line Value: WS
  misc_feature: MA Experiment 20000453 PARAMETER Experiment Name: At_100uM_ABA_P Parameter: Timepoint (hr) Value: 24
  misc_feature: MA Experiment 20000453 PARAMETER Experiment Name: At_100uM_ABA_P Parameter: Tissue Value: Aerial
  misc_feature: MA Experiment 20000453 PARAMETER Experiment Name: At_100uM_ABA_P Parameter: Treatment Value: 100uM ABA vs. No Treatment
  misc_feature: MA Experiment ID: 20000527 Result: Down-regulated in Transcription
  misc_feature: MA Experiment 20000527 PARAMETER Experiment Name: At_10percent_PEG_P Parameter: Age (day) Value: 20
  misc_feature: MA Experiment 20000527 PARAMETER Experiment Name: At_10percent_PEG_P Parameter: Organism Value: A. thaliana
  misc_feature: MA Experiment 20000527 PARAMETER Experiment Name: At_10percent_PEG_P Parameter: Plant Line Value: WS
  misc_feature: MA Experiment 20000527 PARAMETER Experiment Name: At_10percent_PEG_P Parameter: Timepoint (day) Value: 20
  misc_feature: MA Experiment 20000527 PARAMETER Experiment Name: At_10percent_PEG_P Parameter: Tissue Value: Whole Plant
  misc_feature: MA Experiment 20000527 PARAMETER Experiment Name: At_10percent_PEG_P Parameter: Treatment Value: 10percent PEG vs. No Treatment
  misc_feature: MA Experiment ID: 20000794 Result: Up-regulated in Transcription
  misc_feature: MA Experiment 20000794 PARAMETER Experiment Name: At_Petals_P Parameter: Age (day) Value: 23-25 days
  misc_feature: MA Experiment 20000794 PARAMETER Experiment Name: At_Petals_P Parameter: Plant Line Value: WS
  misc_feature: MA Experiment 20000794 PARAMETER Experiment Name: At_Petals_P Parameter: Tissue Value: Petals vs. Whole plant
  misc_feature: MA Experiment ID: 20001556 Result: Up-regulated in Transcription
  misc_feature: MA Experiment 20001556 PARAMETER Experiment Name: At_Drought_Soil_Dry_P Parameter: Age (day) Value: 26
  misc_feature: MA Experiment 20001556 PARAMETER Experiment Name: At_Drought_Soil_Dry_P Parameter: Organism Value: A. thaliana
  misc_feature: MA Experiment 20001556 PARAMETER Experiment Name: At_Drought_Soil_Dry_P Parameter: Plant Line Value: WS
  misc_feature: MA Experiment 20001556 PARAMETER Experiment Name: At_Drought_Soil_Dry_P Parameter: Post Timepoint (hr) Value: None
  misc_feature: MA Experiment 20001556 PARAMETER Experiment Name: At_Drought_Soil_Dry_P Parameter: Post-Treatment Value: None
  misc_feature: MA Experiment 20001556 PARAMETER Experiment Name: At_Drought_Soil_Dry_P Parameter: Timepoint (day) Value: 12
  misc_feature: MA Experiment 20001556 PARAMETER Experiment Name: At_Drought_Soil_Dry_P Parameter: Treatment Value: Drought vs. No Drought
  misc_feature: MA Experiment ID: 20001904 Result: Up-regulated in Transcription
  misc_feature: MA Experiment 20001904 PARAMETER Experiment Name: At_Drought_Reproduction_P Parameter: Age (day) Value: 37
  misc_feature: MA Experiment 20001904 PARAMETER Experiment Name: At_Drought_Reproduction_P Parameter: Organism Value: A. thaliana
  misc_feature: MA Experiment 20001904 PARAMETER Experiment Name: At_Drought_Reproduction_P Parameter: Plant Line Value: WS
  misc_feature: MA Experiment 20001904 PARAMETER Experiment Name: At_Drought_Reproduction_P Parameter: Timepoint (day) Value: 7
  misc_feature: MA Experiment 20001904 PARAMETER Experiment Name: At_Drought_Reproduction_P Parameter: Tissue Value: Rosettes
  misc_feature: MA Experiment 20001904 PARAMETER Experiment Name: At_Drought_Reproduction_P Parameter: Treatment Value: Drought vs. No Drought
  misc_feature: MA Experiment ID: 20001905 Result: Up-regulated in Transcription
  misc_feature: MA Experiment 20001905 PARAMETER Experiment Name: At_Drought_Reproduction_P Parameter: Age (day) Value: 40
  misc_feature: MA Experiment 20001905 PARAMETER Experiment Name: At_Drought_Reproduction_P Parameter: Organism Value: A. thaliana
  misc_feature: MA Experiment 20001905 PARAMETER Experiment Name: At_Drought_Reproduction_P Parameter: Plant Line Value: WS
  misc_feature: MA Experiment 20001905 PARAMETER Experiment Name: At_Drought_Reproduction_P Parameter: Timepoint (day) Value: 10
  misc_feature: MA Experiment 20001905 PARAMETER Experiment Name: At_Drought_Reproduction_P Parameter: Tissue Value: Rosettes
  misc_feature: MA Experiment 20001905 PARAMETER Experiment Name: At_Drought_Reproduction_P Parameter: Treatment Value: Drought vs. No Drought
cttctcgaacaatcaaaaacgaactaaccaaacataaaattgaacacatcctcttcctctgctctctgcaaacaaaaaaacaccgattcggtcaggaatcattcgtcgtgaaatctgtaatggggattgttgtcaagtctttcaaggatcaattctcctctgatgagagattgaaggagtcgaacaacatcattgcgaaatatccagatagaatacctgtgatcattgagaaatattcaaacgcagatctgccagacatggagaagaacaaatacttggtcccacgagacatgactgttggacatttcatccatatgctaagcaaaaggatgcagttagatccatccaaagctctctttgttttcgtacacaacactcttcctcaaaccgctagtcgcatggactctctctacaatactttcaaggaagaagacgggttcttgtacatgtgctacagcaccgagaaaactttcggctaacaaaagatttgtcgcttcatatcgaaatcgaagcgcactctgaataatccatttgtttgattcctatgtttgtgaataacgtcagctcttgttgttactgttattgttgttgttagctgacattgtacagaaaagctaaaaaaaagaaagacatttgactttgtaaattatgtataatccaactatggcaataataataagaccaagtgatgatgattcacacgc

SEQ ID NO: 42235 - protein, 158 aa, Arabidopsis thaliana
  peptide (1)..(158): Ceres Seq. ID no. 12325849
  misc_feature (55)..(158): Pfam Name: Microtubule associated protein 1A/1B, light chain 3 Pfam Description: Microtubule associated protein 1A/1B, light
  misc_feature (42)..(158): Homolog of NCBI NO: 15224577 NR Description: putative microtubule-associated protein
  misc_feature (46)..(158): Homolog of NCBI NO: 15233593 NR Description: putative symbiosis-related protein
  misc_feature (42)..(158): Homolog of NCBI NO: 21592920 NR Description: putative microtubule-associated protein
  misc_feature (46)..(158): Homolog of NCBI NO: 38344173 NR Description: OSJNBa0053K19.12 [Oryza sativa (japonica
  misc_feature (46)..(158): Homolog of NCBI NO: 40253647 NR Description: putative microtubial binding protein
  misc_feature (46)..(158): Homolog of NCBI NO: 21553487 NR Description: symbiosis-related like protein [Arabidopsis
  misc_feature (46)..(158): Homolog of NCBI NO: 18415813 NR Description: symbiosis-related like protein
  misc_feature (44)..(158): Homolog of NCBI NO: 18400815 NR Description: expressed protein
  misc_feature (40)..(158): Homolog of NCBI NO: 6437547 NR Description: hypothetical protein [Arabidopsis thaliana]
  misc_feature (40)..(158): Homolog of NCBI NO: 18397569 NR Description: expressed protein
SRTIKNELTKHKIEHILFLCSLQTKKHRFGQESFVVKSVMGIVVKSFKDQFSSDERLKESNNIIAKYPDRIPVIIEKYSNADLPDMEKNKYLVPRDMTVGHFIHMLSKRMQLDPSKALFVFVHNTLPQTASRMDSLYNTFKEEDGFLYMCYSTEKTFG

SEQ ID NO: 42236 - protein, 119 aa, Arabidopsis thaliana
  peptide (1)..(119): Ceres Seq. ID no. 12325850
  misc_feature (16)..(119): Pfam Name: Microtubule associated protein 1A/1B, light chain 3 Pfam Description: Microtubule associated protein 1A/1B, light
  misc_feature (3)..(119): Homolog of NCBI NO: 15224577 NR Description: putative microtubule-associated protein
  misc_feature (7)..(119): Homolog of NCBI NO: 15233593 NR Description: putative symbiosis-related protein
  misc_feature (3)..(119): Homolog of NCBI NO: 21592920 NR Description: putative microtubule-associated protein
  misc_feature (7)..(119): Homolog of NCBI NO: 38344173 NR Description: OSJNBa0053K19.12 [Oryza sativa (japonica
  misc_feature (7)..(119): Homolog of NCBI NO: 40253647 NR Description: putative microtubial binding protein
  misc_feature (7)..(119): Homolog of NCBI NO: 21553487 NR Description: symbiosis-related like protein [Arabidopsis
  misc_feature (7)..(119): Homolog of NCBI NO: 18415813 NR Description: symbiosis-related like protein
  misc_feature (5)..(119): Homolog of NCBI NO: 18400815 NR Description: expressed protein
  misc_feature (1)..(119): Homolog of NCBI NO: 6437547 NR Description: hypothetical protein [Arabidopsis thaliana]
  misc_feature (1)..(119): Homolog of NCBI NO: 18397569 NR Description: expressed protein
MGIVVKSFKDQFSSDERLKESNNIIAKYPDRIPVIIEKYSNADLPDMEKNKYLVPRDMTVGHFIHMLSKRMQLDPSKALFVFVHNTLPQTASRMDSLYNTFKEEDGFLYMCYSTEKTFG

SEQ ID NO: 42237 - DNA, 1484 bp, Arabidopsis thaliana
  misc_feature (1)..(1484): Ceres Seq. ID no. 12389109
  misc_feature: MA Experiment ID: 108434 Result: Up-regulated in Transcription
  misc_feature: MA Experiment 108434 PARAMETER Experiment Name: At_Root_Tips_cDNA_P Parameter: Tissue Value: Root Tips
  misc_feature: MA Experiment ID: 108461 Result: Up-regulated in Transcription
  misc_feature: MA Experiment 108461 PARAMETER Experiment Name: At_Germinating_Seeds_cDNA_P Parameter: Age (day) Value: 1 vs. 0
  misc_feature: MA Experiment 108461 PARAMETER Experiment Name: At_Germinating_Seeds_cDNA_P Parameter: Tissue Value: Germinating Seeds
  misc_feature: MA Experiment ID: 108595 Result: Down-regulated in Transcription
  misc_feature: MA Experiment 108595 PARAMETER Experiment Name: At_Ler-pi_Ovule_cDNA_P Parameter: Plant Line Value: null
  misc_feature: MA Experiment ID: 20000111 Result: Down-regulated in Transcription
  misc_feature: MA Experiment 20000111 PARAMETER Experiment Name: At_42deg_Heat_cDNA_P Parameter: Temperature (deg C) Value: 42 vs. 22
  misc_feature: MA Experiment 20000111 PARAMETER Experiment Name: At_42deg_Heat_cDNA_P Parameter: Timepoint (hr) Value: 6
  misc_feature: MA Experiment 20000111 PARAMETER Experiment Name: At_42deg_Heat_cDNA_P Parameter: Tissue Value: Aerial
  misc_feature: MA Experiment ID: 20000179 Result: Up-regulated in Transcription
  misc_feature: MA Experiment 20000179 PARAMETER Experiment Name: At_Germinating_Seeds_P Parameter: Age (hr) Value: 6 vs. 0
  misc_feature: MA Experiment 20000179 PARAMETER Experiment Name: At_Germinating_Seeds_P Parameter: Tissue Value: Germinating Seeds
  misc_feature: MA Experiment ID: 20000180 Result: Up-regulated in Transcription
  misc_feature: MA Experiment 20000180 PARAMETER Experiment Name: At_Germinating_Seeds_P Parameter: Age (hr) Value: 24 vs. 0
  misc_feature: MA Experiment 20000180 PARAMETER Experiment Name: At_Germinating_Seeds_P Parameter: Tissue Value: Germinating Seeds
  misc_feature: MA Experiment ID: 20000437 Result: Down-regulated in Transcription
  misc_feature: MA Experiment 20000437 PARAMETER Experiment Name: At_Drought_P Parameter: Age (day) Value: 8
  misc_feature: MA Experiment 20000437 PARAMETER Experiment Name: At_Drought_P Parameter: Organism Value: A. thaliana
  misc_feature: MA Experiment 20000437 PARAMETER Experiment Name: At_Drought_P Parameter: Plant Line Value: WS
  misc_feature: MA Experiment 20000437 PARAMETER Experiment Name: At_Drought_P Parameter: Timepoint (hr) Value: 24
  misc_feature: MA Experiment 20000437 PARAMETER Experiment Name: At_Drought_P Parameter: Tissue Value: Whole Plant
  misc_feature: MA Experiment 20000437 PARAMETER Experiment Name: At_Drought_P Parameter: Treatment Value: Drought vs. No Drought
  misc_feature: MA Experiment ID: 20001911 Result: Down-regulated in Transcription
  misc_feature: MA Experiment 20001911 PARAMETER Experiment Name: At_Drought_Reproduction_P Parameter: Age (day) Value: 40
  misc_feature: MA Experiment 20001911 PARAMETER Experiment Name: At_Drought_Reproduction_P Parameter: Organism Value: A. thaliana
  misc_feature: MA Experiment 20001911 PARAMETER Experiment Name: At_Drought_Reproduction_P Parameter: Plant Line Value: WS
  misc_feature: MA Experiment 20001911 PARAMETER Experiment Name: At_Drought_Reproduction_P Parameter: Timepoint (day) Value: 10
  misc_feature: MA Experiment 20001911 PARAMETER Experiment Name: At_Drought_Reproduction_P Parameter: Tissue Value: Flowers
  misc_feature: MA Experiment 20001911 PARAMETER Experiment Name: At_Drought_Reproduction_P Parameter: Treatment Value: Drought vs. No Drought
agttcctttttttttgttctccgaacgttctctcctctctgtctatcatcgaacgccgtcgctctcgccgttgacttctaccagtgaccccaacgccttcaatttccgcctcgtcggataatttcatcggagaagacaatggtgatggaagttacagagactgagcgatggtgcgttgtaactggtggtagaggattcgctgcaagacatcttgtagaaatgctcgtacgttaccaaatgttccacgttcgtatcgccgatttagctcctgcgatagtgctcgatcctcacgaggaaactggaattctcggtgaagcaattagatccggtagagttcaatacgtctccgctgatcttcggaacaaaactcaagttgtcaaaggttttcaaggagcagaagtggtgtttcatatggcagctccagattcatcgattaacaatcaccagcttcagtactcagttaatgttcaagggacaacaaatgtaattgatgcttgtattgaggttggagtaaagaggctaatctatacaagttctccgagtgttgtgtttgacggggtccatggtactttgaatgctgatgaatcactgccgtatccacctaagcataatgattcatattcagctactaaagctgaaggggaagctttgattttgaaagcgaatggaagaagtggactactcacttgttgcatacgtcctagcagcatatttggtcctggtgataaattaatggttccatcgcttgttactgctgccagggctgggaaatccaagttcattataggtgatgggagtaacttctatgatttcacttattttgaaaatgttgtgcacgcccatgtctgtgctgagcgagctctagcatcaggaggagaagtatgtgcaaaagctgctggccaggcttacttcattaccaacatggagccaattaaattttgggagtttatgtcacagcttcttgaaggacttggctatgagaggccaagtataaagatacctgcaagtctcatgatgccaatagcatatcttgtggaactagcatataaattactcggaccgtatgggatgaaagtaccagtgctaacaccttctagggttaggctactctcttgcaacagaacatttgattcttcaaaagcaaaggatcgtttaggctattctcctgttgtcccacttcaggaaggtataaagaggacaatagattcattctcacacttgaaagctcaaaatcaacccaaaacagaagagaaaatgaaagtgttcgggagcaagaagatcgactaaagaatactccaaatttgagctttgtgtaaggtaaacaacgacttattttttcctctatacattgataaacatgactcctgcgtgtgtagatggatgttgtttggtctgagttttgcgtcgtttattttacgatttgtaatttgaactctgtaactgtcgatttcggttactctgataccaaaatctatgaattgatg

SEQ ID NO: 42238 - protein, 382 aa, Arabidopsis thaliana
  peptide (1)..(382): Ceres Seq. ID no. 12389110
  misc_feature (8)..(362): Pfam Name: 3-beta hydroxysteroid dehydrogenase/isomerase family Pfam Description: 3-beta hydroxysteroid dehydrogenase/isomerase
  misc_feature (8)..(362): Pfam Name: 3-beta hydroxysteroid dehydrogenase/isomerase family Pfam Description: 3-beta hydroxysteroid dehydrogenase/isomerase
  misc_feature (65)..(362): Homolog of NCBI NO: 31127258 NR Description: Nsdhl protein [Mus musculus]
  misc_feature (249)..(381): Homolog of NCBI NO: 21539467 NR Description: 3-beta-hydroxysteroid dehydrogenase [Arabidopsis
  misc_feature (12)..(83): Homolog of NCBI NO: 25408868 NR Description: probable sterol dehydrogenase [imported] -
  misc_feature (84)..(358): Homolog of NCBI NO: 25408868 NR Description: probable sterol dehydrogenase [imported] -
  misc_feature (12)..(359): Homolog of NCBI NO: 18406234 NR Description: putative sterol dehydrogenase
  misc_feature (65)..(362): Homolog of NCBI NO: 31127258 NR Description: Nsdhl protein [Mus musculus]
  misc_feature (12)..(83): Homolog of NCBI NO: 25408868 NR Description: probable sterol dehydrogenase [imported] -
  misc_feature (12)..(359): Homolog of NCBI NO: 18406234 NR Description: putative sterol dehydrogenase
  misc_feature (3)..(382): Homolog of NCBI NO: 21553411 NR Description: 3-beta-hydroxysteroid dehydrogenase, putative
  misc_feature (1)..(382): Homolog of NCBI NO: 18401656 NR Description: 3-beta-hydroxysteroid dehydrogenase, putative
  misc_feature (1)..(370): Homolog of NCBI NO: 30694041 NR Description: 3-beta hydroxysteroid dehydrogenase/isomerase
  misc_feature (6)..(374): Homolog of NCBI NO: 15225272 NR Description: 3-beta-hydroxysteroid dehydrogenase; protein id:
  misc_feature (6)..(213): Homolog of NCBI NO: 23198272 NR Description: 3-beta-hydroxysteroid dehydrogenase [Arabidopsis
  misc_feature (84)..(358): Homolog of NCBI NO: 25408868 NR Description: probable sterol dehydrogenase [imported] -
  misc_feature (249)..(381): Homolog of NCBI NO: 21539467 NR Description: 3-beta-hydroxysteroid dehydrogenase [Arabidopsis
  misc_feature (6)..(213): Homolog of NCBI NO: 23198272 NR Description: 3-beta-hydroxysteroid dehydrogenase [Arabidopsis
  misc_feature (6)..(374): Homolog of NCBI NO: 15225272 NR Description: 3-beta-hydroxysteroid dehydrogenase; protein id:
  misc_feature (1)..(370): Homolog of NCBI NO: 30694041 NR Description: 3-beta hydroxysteroid dehydrogenase/isomerase
  misc_feature (1)..(382): Homolog of NCBI NO: 18401656 NR Description: 3-beta-hydroxysteroid dehydrogenase, putative
  misc_feature (3)..(382): Homolog of NCBI NO: 21553411 NR Description: 3-beta-hydroxysteroid dehydrogenase, putative
MVMEVTETERWCVVTGGRGFAARHLVEMLVRYQMFHVRIADLAPAIVLDPHEETGILGEAIRSGRVQYVSADLRNKTQVVKGFQGAEVVFHMAAPDSSINNHQLQYSVNVQGTTNVIDACIEVGVKRLIYTSSPSVVFDGVHGTLNADESLPYPPKHNDSYSATKAEGEALILKANGRSGLLTCCIRPSSIFGPGDKLMVPSLVTAARAGKSKFIIGDGSNFYDFTYFENVVHAHVCAERALASGGEVCAKAAGQAYFITNMEPIKFWEFMSQLLEGLGYERPSIKIPASLMMPIAYLVELAYKLLGPYGMKVPVLTPSRVRLLSCNRTFDSSKAKDRLGYSPVVPLQEGIKRTIDSFSHLKAQNQPKTEEKMKVFGSKKID

SEQ ID NO: 42239 - protein, 380 aa, Arabidopsis thaliana
  peptide (1)..(380): Ceres Seq. ID no. 12389111
  misc_feature (6)..(360): Pfam Name: 3-beta hydroxysteroid dehydrogenase/isomerase family Pfam Description: 3-beta hydroxysteroid dehydrogenase/isomerase
  misc_feature (6)..(360): Pfam Name: 3-beta hydroxysteroid dehydrogenase/isomerase family Pfam Description: 3-beta hydroxysteroid dehydrogenase/isomerase
  misc_feature (63)..(360): Homolog of NCBI NO: 31127258 NR Description: Nsdhl protein [Mus musculus]
  misc_feature (247)..(379): Homolog of NCBI NO: 21539467 NR Description: 3-beta-hydroxysteroid dehydrogenase [Arabidopsis
  misc_feature (10)..(81): Homolog of NCBI NO: 25408868 NR Description: probable sterol dehydrogenase [imported] -
  misc_feature (82)..(356): Homolog of NCBI NO: 25408868 NR Description: probable sterol dehydrogenase [imported] -
  misc_feature (10)..(357): Homolog of NCBI NO: 18406234 NR Description: putative sterol dehydrogenase
  misc_feature (63)..(360): Homolog of NCBI NO: 31127258 NR Description: Nsdhl protein [Mus musculus]
  misc_feature (10)..(81): Homolog of NCBI NO: 25408868 NR Description: probable sterol dehydrogenase [imported] -
  misc_feature (10)..(357): Homolog of NCBI NO: 18406234 NR Description: putative sterol dehydrogenase
  misc_feature (1)..(380): Homolog of NCBI NO: 21553411 NR Description: 3-beta-hydroxysteroid dehydrogenase, putative
  misc_feature (1)..(380): Homolog of NCBI NO: 18401656 NR Description: 3-beta-hydroxysteroid dehydrogenase, putative
  misc_feature (1)..(368): Homolog of NCBI NO: 30694041 NR Description: 3-beta hydroxysteroid dehydrogenase/isomerase
  misc_feature (4)..(372): Homolog of NCBI NO: 15225272 NR Description: 3-beta-hydroxysteroid dehydrogenase; protein id:
  misc_feature (4)..(211): Homolog of NCBI NO: 23198272 NR Description: 3-beta-hydroxysteroid dehydrogenase [Arabidopsis
  misc_feature (82)..(356): Homolog of NCBI NO: 25408868 NR Description: probable sterol dehydrogenase [imported] -
  misc_feature (247)..(379): Homolog of NCBI NO: 21539467 NR Description: 3-beta-hydroxysteroid dehydrogenase [Arabidopsis
  misc_feature (4)..(211): Homolog of NCBI NO: 23198272 NR Description: 3-beta-hydroxysteroid dehydrogenase [Arabidopsis
  misc_feature (4)..(372): Homolog of NCBI NO: 15225272 NR Description: 3-beta-hydroxysteroid dehydrogenase; protein id:
  misc_feature (1)..(368): Homolog of NCBI NO: 30694041 NR Description: 3-beta hydroxysteroid dehydrogenase/isomerase
  misc_feature (1)..(380): Homolog of NCBI NO: 18401656 NR Description: 3-beta-hydroxysteroid dehydrogenase, putative
  misc_feature (1)..(380): Homolog of NCBI NO: 21553411 NR Description: 3-beta-hydroxysteroid dehydrogenase, putative
MEVTETERWCVVTGGRGFAARHLVEMLVRYQMFHVRIADLAPAIVLDPHEETGILGEAIRSGRVQYVSADLRNKTQVVKGFQGAEVVFHMAAPDSSINNHQLQYSVNVQGTTNVIDACIEVGVKRLIYTSSPSVVFDGVHGTLNADESLPYPPKHNDSYSATKAEGEALILKANGRSGLLTCCIRPSSIFGPGDKLMVPSLVTAARAGKSKFIIGDGSNFYDFTYFENVVHAHVCAERALASGGEVCAKAAGQAYFITNMEPIKFWEFMSQLLEGLGYERPSIKIPASLMMPIAYLVELAYKLLGPYGMKVPVLTPSRVRLLSCNRTFDSSKAKDRLGYSPVVPLQEGIKRTIDSFSHLKAQNQPKTEEKMKVFGSKKID

SEQ ID NO: 42240 - protein, 355 aa, Arabidopsis thaliana
  peptide (1)..(355): Ceres Seq. ID no. 12389112
  misc_feature (1)..(335): Pfam Name: 3-beta hydroxysteroid dehydrogenase/isomerase family Pfam Description: 3-beta hydroxysteroid dehydrogenase/isomerase
  misc_feature (1)..(335): Pfam Name: 3-beta hydroxysteroid dehydrogenase/isomerase family Pfam Description: 3-beta hydroxysteroid dehydrogenase/isomerase
  misc_feature (38)..(335): Homolog of NCBI NO: 31127258 NR Description: Nsdhl protein [Mus musculus]
  misc_feature (222)..(354): Homolog of NCBI NO: 21539467 NR Description: 3-beta-hydroxysteroid dehydrogenase [Arabidopsis
  misc_feature (1)..(56): Homolog of NCBI NO: 25408868 NR Description: probable sterol dehydrogenase [imported] -
  misc_feature (57)..(331): Homolog of NCBI NO: 25408868 NR Description: probable sterol dehydrogenase [imported] -
  misc_feature (1)..(332): Homolog of NCBI NO: 18406234 NR Description: putative sterol dehydrogenase
  misc_feature (38)..(335): Homolog of NCBI NO: 31127258 NR Description: Nsdhl protein [Mus musculus]
  misc_feature (1)..(56): Homolog of NCBI NO: 25408868 NR Description: probable sterol dehydrogenase [imported] -
  misc_feature (1)..(332): Homolog of NCBI NO: 18406234 NR Description: putative sterol dehydrogenase
  misc_feature (1)..(355): Homolog of NCBI NO: 21553411 NR Description: 3-beta-hydroxysteroid dehydrogenase, putative
  misc_feature (1)..(355): Homolog of NCBI NO: 18401656 NR Description: 3-beta-hydroxysteroid dehydrogenase, putative
  misc_feature (1)..(343): Homolog of NCBI NO: 30694041 NR Description: 3-beta hydroxysteroid dehydrogenase/isomerase
  misc_feature (1)..(347): Homolog of NCBI NO: 15225272 NR Description: 3-beta-hydroxysteroid dehydrogenase; protein id:
  misc_feature (1)..(186): Homolog of NCBI NO: 23198272 NR Description: 3-beta-hydroxysteroid dehydrogenase [Arabidopsis
  misc_feature (57)..(331): Homolog of NCBI NO: 25408868 NR Description: probable sterol dehydrogenase [imported] -
  misc_feature (222)..(354): Homolog of NCBI NO: 21539467 NR Description: 3-beta-hydroxysteroid dehydrogenase [Arabidopsis
  misc_feature (1)..(186): Homolog of NCBI NO: 23198272 NR Description: 3-beta-hydroxysteroid dehydrogenase [Arabidopsis
  misc_feature (1)..(347): Homolog of NCBI NO: 15225272 NR Description: 3-beta-hydroxysteroid dehydrogenase; protein id:
  misc_feature (1)..(343): Homolog of NCBI NO: 30694041 NR Description: 3-beta hydroxysteroid dehydrogenase/isomerase
  misc_feature (1)..(355): Homolog of NCBI NO: 18401656 NR Description: 3-beta-hydroxysteroid dehydrogenase, putative
  misc_feature (1)..(355): Homolog of NCBI NO: 21553411 NR Description: 3-beta-hydroxysteroid dehydrogenase, putative
MLVRYQMFHVRIADLAPAIVLDPHEETGILGEAIRSGRVQYVSADLRNKTQVVKGFQGAEVVFHMAAPDSSINNHQLQYSVNVQGTTNVIDACIEVGVKRLIYTSSPSVVFDGVHGTLNADESLPYPPKHNDSYSATKAEGEALILKANGRSGLLTCCIRPSSIFGPGDKLMVPSLVTAARAGKSKFIIGDGSNFYDFTYFENVVHAHVCAERALASGGEVCAKAAGQAYFITNMEPIKFWEFMSQLLEGLGYERPSIKIPASLMMPIAYLVELAYKLLGPYGMKVPVLTPSRVRLLSCNRTFDSSKAKDRLGYSPVVPLQEGIKRTIDSFSHLKAQNQPKTEEKMKVFGSKKID

SEQ ID NO: 42241 - DNA, 1766 bp, Arabidopsis thaliana
  misc_feature (1)..(1766): Ceres Seq. ID no. 13497239
  misc_feature: MA Experiment ID: 108461 Result: Up-regulated in Transcription
  misc_feature: MA Experiment 108461 PARAMETER Experiment Name: At_Germinating_Seeds_cDNA_P Parameter: Age (day) Value: 1 vs. 0
  misc_feature: MA Experiment 108461 PARAMETER Experiment Name: At_Germinating_Seeds_cDNA_P Parameter: Tissue Value: Germinating Seeds
  misc_feature: MA Experiment ID: 108462 Result: Up-regulated in Transcription
  misc_feature: MA Experiment 108462 PARAMETER Experiment Name: At_Germinating_Seeds_cDNA_P Parameter: Age (day) Value: 2 vs. 0
  misc_feature: MA Experiment 108462 PARAMETER Experiment Name: At_Germinating_Seeds_cDNA_P Parameter: Tissue Value: Germinating Seeds
  misc_feature: MA Experiment ID: 108464 Result: Up-regulated in Transcription
  misc_feature: MA Experiment 108464 PARAMETER Experiment Name: At_Germinating_Seeds_cDNA_P Parameter: Age (day) Value: 4 vs. 0
  misc_feature: MA Experiment 108464 PARAMETER Experiment Name: At_Germinating_Seeds_cDNA_P Parameter: Tissue Value: Germinating Seeds
  misc_feature: MA Experiment ID: 108573 Result: Up-regulated in Transcription
  misc_feature: MA Experiment 108573 PARAMETER Experiment Name: At_Drought_cDNA_P Parameter: Timepoint (hr) Value: 6
  misc_feature: MA Experiment 108573 PARAMETER Experiment Name: At_Drought_cDNA_P Parameter: Tissue Value: Aerial
  misc_feature: MA Experiment 108573 PARAMETER Experiment Name: At_Drought_cDNA_P Parameter: Treatment Value: Drought vs. No Drought
  misc_feature: MA Experiment ID: 108579 Result: Down-regulated in Transcription
  misc_feature: MA Experiment 108579 PARAMETER Experiment Name: At_4deg_Cold_cDNA_P Parameter: Temperature (deg C) Value: 4 vs. 22
  misc_feature: MA Experiment 108579 PARAMETER Experiment Name: At_4deg_Cold_cDNA_P Parameter: Timepoint (hr) Value: 6
  misc_feature: MA Experiment 108579 PARAMETER Experiment Name: At_4deg_Cold_cDNA_P Parameter: Tissue Value: Aerial
  misc_feature: MA Experiment ID: 108595 Result: Down-regulated in Transcription
  misc_feature: MA Experiment 108595 PARAMETER Experiment Name: At_Ler-pi_Ovule_cDNA_P Parameter: Plant Line Value: null
  misc_feature: MA Experiment ID: 20000087 Result: Down-regulated in Transcription
  misc_feature: MA Experiment 20000087 PARAMETER Experiment Name: At_100uM_ABA_Mutants_cDNA_P Parameter: Plant Line Value: WS
  misc_feature: MA Experiment 20000087 PARAMETER Experiment Name: At_100uM_ABA_Mutants_cDNA_P Parameter: Timepoint (hr) Value: 6
  misc_feature: MA Experiment 20000087 PARAMETER Experiment Name: At_100uM_ABA_Mutants_cDNA_P Parameter: Tissue Value: Aerial
  misc_feature: MA Experiment 20000087 PARAMETER Experiment Name: At_100uM_ABA_Mutants_cDNA_P Parameter: Treatment Value: 100uM ABA vs. No Treatment
  misc_feature: MA Experiment ID: 20000179 Result: Up-regulated in Transcription
  misc_feature: MA Experiment 20000179 PARAMETER Experiment Name: At_Germinating_Seeds_P Parameter: Age (hr) Value: 6 vs. 0
  misc_feature: MA Experiment 20000179 PARAMETER Experiment Name: At_Germinating_Seeds_P Parameter: Tissue Value: Germinating Seeds
  misc_feature: MA Experiment ID: 20000180 Result: Up-regulated in Transcription
  misc_feature: MA Experiment 20000180 PARAMETER Experiment Name: At_Germinating_Seeds_P Parameter: Age (hr) Value: 24 vs. 0
  misc_feature: MA Experiment 20000180 PARAMETER Experiment Name: At_Germinating_Seeds_P Parameter: Tissue Value: Germinating Seeds
  misc_feature: MA Experiment ID: 20000573 Result: Down-regulated in Transcription
  misc_feature: MA Experiment 20000573 PARAMETER Experiment Name: At_100uM_ABA_Mutants__P Parameter: Organism Value: A. thaliana
  misc_feature: MA Experiment 20000573 PARAMETER Experiment Name: At_100uM_ABA_Mutants__P Parameter: Plant Line Value: CS22 vs. Ler wt
  misc_feature: MA Experiment 20000573 PARAMETER Experiment Name: At_100uM_ABA_Mutants__P Parameter: Timepoint (hr) Value: N/A
  misc_feature: MA Experiment 20000573 PARAMETER Experiment Name: At_100uM_ABA_Mutants__P Parameter: Tissue Value: Whole Plant
  misc_feature: MA Experiment 20000573 PARAMETER Experiment Name: At_100uM_ABA_Mutants__P Parameter: Treatment Value: None
  misc_feature: MA Experiment ID: 20000574 Result: Down-regulated in Transcription
  misc_feature: MA Experiment 20000574 PARAMETER Experiment Name: At_100uM_ABA_Mutants__P Parameter: Organism Value: A. thaliana
  misc_feature: MA Experiment 20000574 PARAMETER Experiment Name: At_100uM_ABA_Mutants__P Parameter: Plant Line Value: CS23 vs. Ler wt
  misc_feature: MA Experiment 20000574 PARAMETER Experiment Name: At_100uM_ABA_Mutants__P Parameter: Timepoint (hr) Value: N/A
  misc_feature: MA Experiment 20000574 PARAMETER Experiment Name: At_100uM_ABA_Mutants__P Parameter: Tissue Value: Whole Plant
  misc_feature: MA Experiment 20000574 PARAMETER Experiment Name: At_100uM_ABA_Mutants__P Parameter: Treatment Value: None
  misc_feature: MA Experiment ID: 20000794 Result: Up-regulated in Transcription
  misc_feature: MA Experiment 20000794 PARAMETER Experiment Name: At_Petals_P Parameter: Age (day) Value: 23-25 days
  misc_feature: MA Experiment 20000794 PARAMETER Experiment Name: At_Petals_P Parameter: Plant Line Value: WS
  misc_feature: MA Experiment 20000794 PARAMETER Experiment Name: At_Petals_P Parameter: Tissue Value: Petals vs. Whole plant
gagacgataatctcccaaatgtcatctccttcatctctcaggtaaaaaaactgagtcgagatttggtgacgtgatgaatcatttggtgataatctctgtgttcttgagctcagtattgttgttatatagaggagaatctggaatcacaagtagttttattcgatctgaatggcctgcggttgatataccacttgatcatcatgttttcaaagtcccaaaaggatataatgcaccacaacaagtacacataactcaaggtgattatgatggtaaagctgttatcatctcttgggttacacctgatgaacctggttctagccaagtacattacggtgcggttcaggggaaatatgagtttgttgctcaagggacttaccataactacacgttttacaagtataagtctggctttattcatcactgccttgtctctgaccttgagcatgatacaaaatactattacaagattgaaagcggtgaatcttctcgagagttttggtttgttacaccaccacatgtacatccagatgcttcctacaagtttggtattataggcgatatgggtcagacattcaactcgttatccacgttggaacattacatggagagtggagctcaggctgttttatttcttggagatctttcttatgctgatagatatcagtataatgacgttggtgtgagatgggatagctggggtcgttttgtggagcgtagtaccgcttatcaaccgtggctttggtctgcaggaaatcatgaagtagattacatgccatacatgggggaggtgacacctttcaggaattaccttcagcgttacactacgccttacttagcctcaaaaagtagcagtcctctttggtacgctgttaggcgtgcatctgctcatatcattgtcctctccagctattcgccttttgtgaagtataccccgcaatggcactggcttagtgaagagcttacaagagttgatagggagaaaacaccttggctaattgttttgatgcacgtcccaatatacaacagtaatgaagcacatttcatggagggtgaaagcatgcgagcagcttttgaggagtggtttgtccaacacaaagttgatgtaatctttgctgggcatgttcatgcctacgagagatcgtaccgaatatcaaatgtgcggtataacgtgtcaagcggagatcgttacccagttccagataagtcagcgcctgtttatatcacagttggagacggaggaaatcaagaaggtctggctggaaggtttacggaaccacagccagattattctgcatttcgggaagctagctatggccactctactctggatataaagaaccgaacacacgctatataccactggaaccgcaatgatgatgggaagaaagtggcaacggatgaatttgtattacacaaccagtactggggaaagaacattcgacggagaaagcttaagaagcattatatcaggagtgttgttggtggctggatcgccacttaattcactaagtctgcctcatgctttgtatcaaagtgtgtgaggatattcttttaactcggaacttattacttaatttgatgttaaatctctttcccgcttaagttttcagcaatctggaatatgaagggaattatgtattcttatcagtcttttgatgaagtgaggtctacttctgggattatggatttggtgaataatgtattccttagaacggtgttaaggaattgtttcacatgggtgtgaattgagaagtccatttgtgttt

SEQ ID NO: 42242 - protein, 475 aa, Arabidopsis thaliana
  peptide (1)..(475): Ceres Seq. ID no. 13497240
  misc_feature (155)..(353): Pfam Name: Calcineurin-like phosphoesterase Pfam Description: Calcineurin-like phosphoesterase
  misc_feature (4)..(451): Homolog of NCBI NO: 27597239 NR Description: purple acid phosphatase [Nicotiana tabacum]
  misc_feature (1)..(451): Homolog of NCBI NO: 7209894 NR Description: purple acid phosphatase [Spirodela punctata]
  misc_feature (4)..(451): Homolog of NCBI NO: 27597229 NR Description: purple acid phosphatase [Nicotiana tabacum]
  misc_feature (6)..(451): Homolog of NCBI NO: 11262828 NR Description: acid phosphatase (EC 3.1.3.2) purple 2, precursor
  misc_feature (6)..(451): Homolog of NCBI NO: 11262827 NR Description: acid phosphatase (EC 3.1.3.2) purple 1, precursor
  misc_feature (25)..(462): Homolog of NCBI NO: 14349285 NR Description: PEP phosphatase [Allium cepa]
  misc_feature (9)..(464): Homolog of NCBI NO: 29466964 NR Description: putative secretory acid phosphatase precursor
  misc_feature (9)..(464): Homolog of NCBI NO: 19879917 NR Description: acid phosphatase [Oryza sativa]
  misc_feature (1)..(469): Homolog of NCBI NO: 21464654 NR Description: acid phosphatase [Lupinus luteus]
  misc_feature (1)..(475): Homolog of NCBI NO: 15242870 NR Description: calcineurin-like phosphoesterase family
MNHLVIISVFLSSVLLLYRGESGITSSFIRSEWPAVDIPLDHHVFKVPKGYNAPQQVHITQGDYDGKAVIISWVTPDEPGSSQVHYGAVQGKYEFVAQGTYHNYTFYKYKSGFIHHCLVSDLEHDTKYYYKIESGESSREFWFVTPPHVHPDASYKFGIIGDMGQTFNSLSTLEHYMESGAQAVLFLGDLSYADRYQYNDVGVRWDSWGRFVERSTAYQPWLWSAGNHEVDYMPYMGEVTPFRNYLQRYTTPYLASKSSSPLWYAVRRASAHIIVLSSYSPFVKYTPQWHWLSEELTRVDREKTPWLIVLMHVPIYNSNEAHFMEGESMRAAFEEWFVQHKVDVIFAGHVHAYERSYRISNVRYNVSSGDRYPVPDKSAPVYITVGDGGNQEGLAGRFTEPQPDYSAFREASYGHSTLDIKNRTHAIYHWNRNDDGKKVATDEFVLHNQYWGKNIRRRKLKKHYIRSVVGGWIAT

SEQ ID NO: 42243 - protein, 313 aa, Arabidopsis thaliana
  peptide (1)..(313): Ceres Seq. ID no. 13497241
  misc_feature (1)..(191): Pfam Name: Calcineurin-like phosphoesterase Pfam Description: Calcineurin-like phosphoesterase
  misc_feature (1)..(289): Homolog of NCBI NO: 27597239 NR Description: purple acid phosphatase [Nicotiana tabacum]
  misc_feature (1)..(289): Homolog of NCBI NO: 7209894 NR Description: purple acid phosphatase [Spirodela punctata]
  misc_feature (1)..(289): Homolog of NCBI NO: 27597229 NR Description: purple acid phosphatase [Nicotiana tabacum]
  misc_feature (1)..(289): Homolog of NCBI NO: 11262828 NR Description: acid phosphatase (EC 3.1.3.2) purple 2, precursor
  misc_feature (1)..(289): Homolog of NCBI NO: 11262827 NR Description: acid phosphatase (EC 3.1.3.2) purple 1, precursor
  misc_feature (1)..(300): Homolog of NCBI NO: 14349285 NR Description: PEP phosphatase [Allium cepa]
  misc_feature (1)..(302): Homolog of NCBI NO: 29466964 NR Description: putative secretory acid phosphatase precursor
  misc_feature (1)..(302): Homolog of NCBI NO: 19879917 NR Description: acid phosphatase [Oryza sativa]
  misc_feature (1)..(307): Homolog of NCBI NO: 21464654 NR Description: acid phosphatase [Lupinus luteus]
  misc_feature (1)..(313): Homolog of NCBI NO: 15242870 NR Description: calcineurin-like phosphoesterase family
MGQTFNSLSTLEHYMESGAQAVLFLGDLSYADRYQYNDVGVRWDSWGRFVERSTAYQPWLWSAGNHEVDYMPYMGEVTPFRNYLQRYTTPYLASKSSSPLWYAVRRASAHIIVLSSYSPFVKYTPQWHWLSEELTRVDREKTPWLIVLMHVPIYNSNEAHFMEGESMRAAFEEWFVQHKVDVIFAGHVHAYERSYRISNVRYNVSSGDRYPVPDKSAPVYITVGDGGNQEGLAGRFTEPQPDYSAFREASYGHSTLDIKNRTHAIYHWNRNDDGKKVATDEFVLHNQYWGKNIRRRKLKKHYIRSVVGGWIAT

SEQ ID NO: 42244 - protein, 299 aa, Arabidopsis thaliana
  peptide (1)..(299): Ceres Seq. ID no. 13497242
  misc_feature (1)..(177): Pfam Name: Calcineurin-like phosphoesterase Pfam Description: Calcineurin-like phosphoesterase
  misc_feature (1)..(275): Homolog of NCBI NO: 27597239 NR Description: purple acid phosphatase [Nicotiana tabacum]
  misc_feature (1)..(275): Homolog of NCBI NO: 7209894 NR Description: purple acid phosphatase [Spirodela punctata]
  misc_feature (1)..(275): Homolog of NCBI NO: 27597229 NR Description: purple acid phosphatase [Nicotiana tabacum]
  misc_feature (1)..(275): Homolog of NCBI NO: 11262828 NR Description: acid phosphatase (EC 3.1.3.2) purple 2, precursor
  misc_feature (1)..(275): Homolog of NCBI NO: 11262827 NR Description: acid phosphatase (EC 3.1.3.2) purple 1, precursor
  misc_feature (1)..(286): Homolog of NCBI NO: 14349285 NR Description: PEP phosphatase [Allium cepa]
  misc_feature (1)..(288): Homolog of NCBI NO: 29466964 NR Description: putative secretory acid phosphatase precursor
  misc_feature (1)..(288): Homolog of NCBI NO: 19879917 NR Description: acid phosphatase [Oryza sativa]
  misc_feature (1)..(293): Homolog of NCBI NO: 21464654 NR Description: acid phosphatase [Lupinus luteus]
  misc_feature (1)..(299): Homolog of NCBI NO: 15242870 NR Description: calcineurin-like phosphoesterase family
MESGAQAVLFLGDLSYADRYQYNDVGVRWDSWGRFVERSTAYQPWLWSAGNHEVDYMPYMGEVTPFRNYLQRYTTPYLASKSSSPLWYAVRRASAHIIVLSSYSPFVKYTPQWHWLSEELTRVDREKTPWLIVLMHVPIYNSNEAHFMEGESMRAAFEEWFVQHKVDVIFAGHVHAYERSYRISNVRYNVSSGDRYPVPDKSAPVYITVGDGGNQEGLAGRFTEPQPDYSAFREASYGHSTLDIKNRTHAIYHWNRNDDGKKVATDEFVLHNQYWGKNIRRRKLKKHYIRSVVGGWIAT

SEQ ID NO: 42245 - DNA, 1669 bp, Arabidopsis thaliana
  misc_feature (1)..(1669): Ceres Seq. ID no. 12482563
  misc_feature: MA Experiment ID: 20000234 Result: Up-regulated in Transcription
  misc_feature: MA Experiment 20000234 PARAMETER Experiment Name: At_Siliques_P Parameter: Age (day) Value: 21
  misc_feature: MA Experiment 20000234 PARAMETER Experiment Name: At_Siliques_P Parameter: Organism Value: A. thaliana
  misc_feature: MA Experiment 20000234 PARAMETER Experiment Name: At_Siliques_P Parameter: Plant Line Value: WS
  misc_feature: MA Experiment 20000234 PARAMETER Experiment Name: At_Siliques_P Parameter: Tissue Value: Less Than 5mm Siliques vs. Whole Plant
  misc_feature: MA Experiment ID: 20000264 Result: Up-regulated in Transcription
  misc_feature: MA Experiment 20000264 PARAMETER Experiment Name: At_Open_Flower_P Parameter: Age (day) Value: 21
  misc_feature: MA Experiment 20000264 PARAMETER Experiment Name: At_Open_Flower_P Parameter: Plant Line Value: WS
  misc_feature: MA Experiment 20000264 PARAMETER Experiment Name: At_Open_Flower_P Parameter: Tissue Value: Open Flower vs. Whole Plant
  misc_feature: MA Experiment ID: 20000265 Result: Up-regulated in Transcription
  misc_feature: MA Experiment 20000265 PARAMETER Experiment Name: At_Open_Flower_P Parameter: Age (day) Value: 21
  misc_feature: MA Experiment 20000265 PARAMETER Experiment Name: At_Open_Flower_P Parameter: Plant Line Value: WS
  misc_feature: MA Experiment 20000265 PARAMETER Experiment Name: At_Open_Flower_P Parameter: Tissue Value: Closed Flower vs. Whole Plant
  misc_feature: MA Experiment ID: 20000286 Result: Up-regulated in Transcription
  misc_feature: MA Experiment 20000286 PARAMETER Experiment Name: At_Open_Flower_P Parameter: Age (day) Value: 21
  misc_feature: MA Experiment 20000286 PARAMETER Experiment Name: At_Open_Flower_P Parameter: Plant Line Value: WS
  misc_feature: MA Experiment 20000286 PARAMETER Experiment Name: At_Open_Flower_P Parameter: Tissue Value: Half Open vs. Whole Plant
  misc_feature: MA Experiment ID: 20000495 Result: Up-regulated in Transcription
  misc_feature: MA Experiment 20000495 PARAMETER Experiment Name: At_Guard_Cells_P Parameter: Harvest Date Value: 8/2/2002
  misc_feature: MA Experiment 20000495 PARAMETER Experiment Name: At_Guard_Cells_P Parameter: Organism Value: A. thaliana
  misc_feature: MA Experiment 20000495 PARAMETER Experiment Name: At_Guard_Cells_P Parameter: Tissue Value: Guard Cells vs. Leaves
  misc_feature: MA Experiment ID: 20000573 Result: Down-regulated in Transcription
  misc_feature: MA Experiment 20000573 PARAMETER Experiment Name: At_100uM_ABA_Mutants__P Parameter: Organism Value: A. thaliana
  misc_feature: MA Experiment 20000573 PARAMETER Experiment Name: At_100uM_ABA_Mutants__P Parameter: Plant Line Value: CS22 vs. Ler wt
  misc_feature: MA Experiment 20000573 PARAMETER Experiment Name: At_100uM_ABA_Mutants__P Parameter: Timepoint (hr) Value: N/A
  misc_feature: MA Experiment 20000573 PARAMETER Experiment Name: At_100uM_ABA_Mutants__P Parameter: Tissue Value: Whole Plant
  misc_feature: MA Experiment 20000573 PARAMETER Experiment Name: At_100uM_ABA_Mutants__P Parameter: Treatment Value: None
  misc_feature: MA Experiment ID: 20000574 Result: Down-regulated in Transcription
  misc_feature: MA Experiment 20000574 PARAMETER Experiment Name: At_100uM_ABA_Mutants__P Parameter: Organism Value: A. thaliana
  misc_feature: MA Experiment 20000574 PARAMETER Experiment Name: At_100uM_ABA_Mutants__P Parameter: Plant Line Value: CS23 vs. Ler wt
  misc_feature: MA Experiment 20000574 PARAMETER Experiment Name: At_100uM_ABA_Mutants__P Parameter: Timepoint (hr) Value: N/A
  misc_feature: MA Experiment 20000574 PARAMETER Experiment Name: At_100uM_ABA_Mutants__P Parameter: Tissue Value: Whole Plant
  misc_feature: MA Experiment 20000574 PARAMETER Experiment Name: At_100uM_ABA_Mutants__P Parameter: Treatment Value: None
ttcttccatctctctcaaacttctgaaaatcttcttcttcttctcaatcataaaccctaaatcttcatctcttcagatcagaaactaatgtccattcaaagacaccctgtcctgtttcatctctgtcattagtcttctgttttcagattccaattttttttcttgaattatcctcttagccatttcttgatttaacttcgattttcccggcgatgttacgagaatcagacggtgagatgagtttaggaacaacaaactcaccgataagcagcggaacagagagttgcagcagtttcagccggttatcattcgacgcgccgccgtcaactatccccgaagaagaaagcttcctttctctcaaacctcaccgatcctcagatttcgcttacgcagagatccgaagacgaaaaaaacaaggcctaaccttccgagattttcgcctcatgcgtcgtatcggcgccggcgacatcggaacagtttacttatgccgtctagccggagacgaagaagagagccggagctcgtattttgcgatgaaagttgtggataaagaagctcttgcgttgaagaagaagatgcatagagcagagatggagaaaacgattttgaaaatgcttgaccatccatttttgccgactctttacgctgagtttgaagcctcacatttctcttgcatcgttatggaatattgctccggtggtgatttacactctctccgtcatagacaacctcaccggcgattctccctctcttccgccagattttatgccgccgaagttctagtggcgttagaatatctacacatgttgggtatcatctacagagatctgaagcctgaaaatatcttagttagatccgacggtcacattatgctctctgactttgacctctctctatgctccgactcaatcgcagccgttgaatcttcctcgtcttcgccggagaatcaacaactccgttcaccgcgacgattcactcgtctcgctagacttttccaacgagtcttgcggtctaaaaaggttcagactttagaaccaacccgtctctttgttgctgaaccggttactgcccggtccggttcgttcgttggtacgcatgaatacgtggcaccagaagttgcttcaggtggatcacatggtaatgccgttgactggtgggcctttggagtgtttctctacgagatgatatatggcaagactccgttcgttgcgccgactaatgacgtcattctccgtaacattgtgaaaagacagttgagtttcccgactgattcgccggcgactatgtttgagcttcatgcgcggaatttgatttccgggttgcttaacaaagatccgactaaaagacttgggtcacggcgaggtgcggcggaggttaaagtgcatccttttttcaaaggtctaaactttgcgctcattcgtacgcttactccgccggagattccttcttccgtcgtcaagaagccgatgaaatcggcgacgtttagtggtagaagtagtaacaaaccagcggcgttcgattacttttgaacgttttctacggtcgagattagggccacgtgttagtctgttttagctgtacatattccctcgaagctgtcctttttttcgttctttaatttttaaaatttcgttaatctgacttataaattaaaaatttaggtgacttt

SEQ ID NO: 42246 - protein, 438 aa, Arabidopsis thaliana [sequence omitted]

SEQ ID NO: 42247 - protein, 430 aa, Arabidopsis thaliana
  peptide (1)..(430): Ceres Seq. ID no. 12482565
  misc_feature (67)..(386): Pfam Name: Protein kinase domain Pfam Description: Protein kinase domain
  misc_feature (273)..(403): Homolog of NCBI NO: 15225776 NR Description: putative second messenger-dependent protein kinase
  misc_feature (1)..(239): Homolog of NCBI NO: 15225776 NR Description: putative second messenger-dependent protein kinase
  misc_feature (205)..(409): Homolog of NCBI NO: 99749 NR Description: probable serine/threonine-specific protein kinase
  misc_feature (1)..(236): Homolog of NCBI NO: 99749 NR Description: probable serine/threonine-specific protein kinase
  misc_feature (205)..(406): Homolog of NCBI NO: 15241076 NR Description: serine threonine-specific protein kinase ATPK64
  misc_feature (1)..(236): Homolog of NCBI NO: 15241076 NR Description: serine threonine-specific protein kinase ATPK64
  misc_feature (261)..(430): Homolog of NCBI NO: 34910268 NR Description: putative protein kinase [Oryza sativa (japonica
  misc_feature (1)..(225): Homolog of NCBI NO: 34910268 NR Description: putative protein kinase [Oryza sativa (japonica
  misc_feature (1)..(430): Homolog of NCBI NO: 1935918 NR Description: putative serine/threonine protein kinase
  misc_feature (1)..(430): Homolog of NCBI NO: 15226800 NR Description: putative protein kinase
MSLGTTNSPISSGTESCSSFSRLSFDAPPSTIPEEESFLSLKPHRSSDFAYAEIRRRKKQGLTFRDFRLMRRIGAGDIGTVYLCRLAGDEEESRSSYFAMKVVDKEALALKKKMHRAEMEKTILKMLDHPFLPTLYAEFEASHFSCIVMEYCSGGDLHSLRHRQPHRRFSLSSARFYAAEVLVALEYLHMLGIIYRDLKPENILVRSDGHIMLSDFDLSLCSDSIAAVESSSSSPENQQLRSPRRFTRLARLFQRVLRSKKVQTLEPTRLFVAEPVTARSGSFVGTHEYVAPEVASGGSHGNAVDWWAFGVFLYEMIYGKTPFVAPTNDVILRNIVKRQLSFPTDSPATMFELHARNLISGLLNKDPTKRLGSRRGAAEVKVHPFFKGLNFALIRTLTPPEIPSSVVKKPMKSATFSGRSSNKPAAFDYF

SEQ ID NO: 42248 - protein, 361 aa, Arabidopsis thaliana
  peptide (1)..(361): Ceres Seq. ID no. 12482566
  misc_feature (1)..(317): Pfam Name: Protein kinase domain Pfam Description: Protein kinase domain
  misc_feature (204)..(334): Homolog of NCBI NO: 15225776 NR Description: putative second messenger-dependent protein kinase
  misc_feature (1)..(170): Homolog of NCBI NO: 15225776 NR Description: putative second messenger-dependent protein kinase
  misc_feature (136)..(340): Homolog of NCBI NO: 99749 NR Description: probable serine/threonine-specific protein kinase
  misc_feature (1)..(167): Homolog of NCBI NO: 99749 NR Description: probable serine/threonine-specific protein kinase
  misc_feature (136)..(337): Homolog of NCBI NO: 15241076 NR Description: serine threonine-specific protein kinase ATPK64
  misc_feature (1)..(167): Homolog of NCBI NO: 15241076 NR Description: serine threonine-specific protein kinase ATPK64
  misc_feature (192)..(361): Homolog of NCBI NO: 34910268 NR Description: putative protein kinase [Oryza sativa (japonica
  misc_feature (1)..(156): Homolog of NCBI NO: 34910268 NR Description: putative protein kinase [Oryza sativa (japonica
  misc_feature (1)..(361): Homolog of NCBI NO: 1935918 NR Description: putative serine/threonine protein kinase
  misc_feature (1)..(361): Homolog of NCBI NO: 15226800 NR Description: putative protein kinase
MRRIGAGDIGTVYLCRLAGDEEESRSSYFAMKVVDKEALALKKKMHRAEMEKTILKMLDHPFLPTLYAEFEASHFSCIVMEYCSGGDLHSLRHRQPHRRFSLSSARFYAAEVLVALEYLHMLGIIYRDLKPENILVRSDGHIMLSDFDLSLCSDSIAAVESSSSSPENQQLRSPRRFTRLARLFQRVLRSKKVQTLEPTRLFVAEPVTARSGSFVGTHEYVAPEVASGGSHGNAVDWWAFGVFLYEMIYGKTPFVAPTNDVILRNIVKRQLSFPTDSPATMFELHARNLISGLLNKDPTKRLGSRRGAAEVKVHPFFKGLNFALIRTLTPPEIPSSVVKKPMKSATFSGRSSNKPAAFDYF

SEQ ID NO: 42249 - DNA, 1338 bp, Arabidopsis thaliana
  misc_feature (1)..(1338): Ceres Seq. ID no. 12422062
  misc_feature: MA Experiment ID: 108434 Result: Up-regulated in Transcription
  misc_feature: MA Experiment 108434 PARAMETER Experiment Name: At_Root_Tips_cDNA_P Parameter: Tissue Value: Root Tips
  misc_feature: MA Experiment ID: 108461 Result: Down-regulated in Transcription
  misc_feature: MA Experiment 108461 PARAMETER Experiment Name: At_Germinating_Seeds_cDNA_P Parameter: Age (day) Value: 1 vs. 0
  misc_feature: MA Experiment 108461 PARAMETER Experiment Name: At_Germinating_Seeds_cDNA_P Parameter: Tissue Value: Germinating Seeds
  misc_feature: MA Experiment ID: 108462 Result: Down-regulated in Transcription
  misc_feature: MA Experiment 108462 PARAMETER Experiment Name: At_Germinating_Seeds_cDNA_P Parameter: Age (day) Value: 2 vs. 0
  misc_feature: MA Experiment 108462 PARAMETER Experiment Name: At_Germinating_Seeds_cDNA_P Parameter: Tissue Value: Germinating Seeds
  misc_feature: MA Experiment ID: 108463 Result: Down-regulated in Transcription
  misc_feature: MA Experiment 108463 PARAMETER Experiment Name: At_Germinating_Seeds_cDNA_P Parameter: Age (day) Value: 3 vs. 0
  misc_feature: MA Experiment 108463 PARAMETER Experiment Name: At_Germinating_Seeds_cDNA_P Parameter: Tissue Value: Germinating Seeds
  misc_feature: MA Experiment ID: 108464 Result: Down-regulated in Transcription
  misc_feature: MA Experiment 108464 PARAMETER Experiment Name: At_Germinating_Seeds_cDNA_P Parameter: Age (day) Value: 4 vs. 0
  misc_feature: MA Experiment 108464 PARAMETER Experiment Name: At_Germinating_Seeds_cDNA_P Parameter: Tissue Value: Germinating Seeds
  misc_feature: MA Experiment ID: 108573 Result: Up-regulated in Transcription
  misc_feature: MA Experiment 108573 PARAMETER Experiment Name: At_Drought_cDNA_P Parameter: Timepoint (hr) Value: 6
  misc_feature: MA Experiment 108573 PARAMETER Experiment Name: At_Drought_cDNA_P Parameter: Tissue Value: Aerial
  misc_feature: MA Experiment 108573 PARAMETER Experiment Name: At_Drought_cDNA_P Parameter: Treatment Value: Drought vs. No Drought
  misc_feature: MA Experiment ID: 20000224 Result: Down-regulated in Transcription
atatatagtttcaggtcacctgttgcacaatctctgctcagccctaaaagcttactcctttcaactttctggaggccttctcgtagcctagcgtcatagatggatttgatggagaagaacttggagttagtggagattcagaaactagaaggccacaccgatcgtgtttggagcgtagcttggaaccccgtttcttctcacgccgacggtgtttcaccgattcttgcttcttgcagtggcgataacactgttcgaatctgggaacaaagctctctctctcgctcctggacttgcaagacagttttggaagagacgcatacaagaactgtgaggtcgtgcgcttggtcaccctcaggacagttattggccactgcaagttttgatggtaccactggcatttggaagaattacggttctgagtttgagtgtatttccactttggagggacatgaaaacgaagtcaaaagtgtatcatggaatgcatctggttcatgccttgcaacatgtagtagagataagtctgtttggatttgggaagtgcttgaagggaatgaatatgactgtgctgcggtattaactgggcatacacaagatgtgaagatggttcagtggcatcccaccatggatgttttattttcttgcagttatgataacaccatcaaggtttggtggtctgaagatgatgatggtgagtatcaatgtgtccaaaccttaggtgaatctaacaacggtcactcttcaacggtatggtccatctcatttaacgctgcaggggacaagatggtcacttgtagtgatgatctaaccttgaagatatgggggacagatattgccaagatgcagtctggtgaagaatatgcaccttggattcatctttgtactctctctggctatcatgaccgtaccatatactcagctcactggtcaagggacgacattattgccagtggagcaggcgataatgctatacggttgtttgtggacagcaaacatgactctgttgatggaccttcatataatcttttgctgaagaagaataaagcacatgaaaatgatgtaaactctgtccaatggtcacccggtgaggggaaccggttgcttgcgtcggctagtgatgatgggatggtcaagatttggcagcttgcaactaaaccgtgactgctgttggtttggataggttctgaaactcctgtgttgttttactttttctgaggtctatctgtaaacaacataacattttaggtagaagagaactctatactattttgtcatacaagattagctccatgatgtttcatacgatttctgttttacttttactacgatcacttaagtttt

SEQ ID NO: 42250 - protein, 352 aa, Arabidopsis thaliana
  peptide (1)..(352): Ceres Seq. ID no. 12422063
  misc_feature (11)..(55): Pfam Name: WD domain, G-beta repeat Pfam Description: WD domain, G-beta repeat
  misc_feature (11)..(347): Homolog of NCBI NO: 28279952 NR Description: Similar to WD40 protein Ciao1 [Danio rerio]
  misc_feature (10)..(347): Homolog of NCBI NO: 12832206 NR Description: unnamed protein product [Mus musculus]
  misc_feature (10)..(347): Homolog of NCBI NO: 31542399 NR Description: WD40 protein Ciao1 [Mus musculus]
  misc_feature (10)..(347): Homolog of NCBI NO: 4757988 NR Description: WD40 protein Ciao1 [Homo sapiens]
  misc_feature (16)..(348): Homolog of NCBI NO: 19922278 NR Description: CG12797-PA [Drosophila melanogaster]
  misc_feature (93)..(327): Homolog of NCBI NO: 22329107 NR Description: G-protein beta family; protein id: At4g32990.1
  misc_feature (10)..(348): Homolog of NCBI NO: 34394959 NR Description: putative WD40 protein Ciao1
  misc_feature (273)..(352): Homolog of NCBI NO: 7446121 NR Description: hypothetical protein At2g26060 [imported] -
  misc_feature (4)..(270): Homolog of NCBI NO: 7446121 NR Description: hypothetical protein At2g26060 [imported] -
  misc_feature (1)..(352): Homolog of NCBI NO: 18401018 NR Description: G-protein beta family
MDLMEKNLELVEIQKLEGHTDRVWSVAWNPVSSHADGVSPILASCSGDNTVRIWEQSSLSRSWTCKTVLEETHTRTVRSCAWSPSGQLLATASFDGTTGIWKNYGSEFECISTLEGHENEVKSVSWNASGSCLATCSRDKSVWIWEVLEGNEYDCAAVLTGHTQDVKMVQWHPTMDVLFSCSYDNTIKVWWSEDDDGEYQCVQTLGESNNGHSSTVWSISFNAAGDKMVTCSDDLTLKIWGTDIAKMQSGEEYAPWIHLCTLSGYHDRTIYSAHWSRDDIIASGAGDNAIRLFVDSKHDSVDGPSYNLLLKKNKAHENDVNSVQWSPGEGNRLLASASDDGMVKIWQLATKP

SEQ ID NO: 42251 - protein, 349 aa, Arabidopsis thaliana
  peptide (1)..(349): Ceres Seq. ID no. 12422064
  misc_feature (8)..(52): Pfam Name: WD domain, G-beta repeat Pfam Description: WD domain, G-beta repeat
  misc_feature (8)..(344): Homolog of NCBI NO: 28279952 NR Description: Similar to WD40 protein Ciao1 [Danio rerio]
  misc_feature (7)..(344): Homolog of NCBI NO: 12832206 NR Description: unnamed protein product [Mus musculus]
  misc_feature (7)..(344): Homolog of NCBI NO: 31542399 NR Description: WD40 protein Ciao1 [Mus musculus]
  misc_feature (7)..(344): Homolog of NCBI NO: 4757988 NR Description: WD40 protein Ciao1 [Homo sapiens]
  misc_feature (13)..(345): Homolog of NCBI NO: 19922278 NR Description: CG12797-PA [Drosophila melanogaster]
  misc_feature (90)..(324): Homolog of NCBI NO: 22329107 NR Description: G-protein beta family; protein id: At4g32990.1
  misc_feature (7)..(345): Homolog of NCBI NO: 34394959 NR Description: putative WD40 protein Ciao1
  misc_feature (270)..(349): Homolog of NCBI NO: 7446121 NR Description: hypothetical protein At2g26060 [imported] -
  misc_feature (1)..(267): Homolog of NCBI NO: 7446121 NR Description: hypothetical protein At2g26060 [imported] -
  misc_feature (1)..(349): Homolog of NCBI NO: 18401018 NR Description: G-protein beta family
MEKNLELVEIQKLEGHTDRVWSVAWNPVSSHADGVSPILASCSGDNTVRIWEQSSLSRSWTCKTVLEETHTRTVRSCAWSPSGQLLATASFDGTTGIWKNYGSEFECISTLEGHENEVKSVSWNASGSCLATCSRDKSVWIWEVLEGNEYDCAAVLTGHTQDVKMVQWHPTMDVLFSCSYDNTIKVWWSEDDDGEYQCVQTLGESNNGHSSTVWSISFNAAGDKMVTCSDDLTLKIWGTDIAKMQSGEEYAPWIHLCTLSGYHDRTIYSAHWSRDDIIASGAGDNAIRLFVDSKHDSVDGPSYNLLLKKNKAHENDVNSVQWSPGEGNRLLASASDDGMVKIWQLATKP

SEQ ID NO: 42252 - protein, 185 aa, Arabidopsis thaliana
  peptide (1)..(185): Ceres Seq. ID no. 12422065
  misc_feature (1)..(180): Homolog of NCBI NO: 28279952 NR Description: Similar to WD40 protein Ciao1 [Danio rerio]
  misc_feature (1)..(180): Homolog of NCBI NO: 12832206 NR Description: unnamed protein product [Mus musculus]
  misc_feature (1)..(180): Homolog of NCBI NO: 31542399 NR Description: WD40 protein Ciao1 [Mus musculus]
  misc_feature (1)..(180): Homolog of NCBI NO: 4757988 NR Description: WD40 protein Ciao1 [Homo sapiens]
  misc_feature (1)..(181): Homolog of NCBI NO: 19922278 NR Description: CG12797-PA [Drosophila melanogaster]
  misc_feature (1)..(160): Homolog of NCBI NO: 22329107 NR Description: G-protein beta family; protein id: At4g32990.1
  misc_feature (1)..(181): Homolog of NCBI NO: 34394959 NR Description: putative WD40 protein Ciao1
  misc_feature (106)..(185): Homolog of NCBI NO: 7446121 NR Description: hypothetical protein At2g26060 [imported] -
  misc_feature (1)..(103): Homolog of NCBI NO: 7446121 NR Description: hypothetical protein At2g26060 [imported] -
  misc_feature (1)..(185): Homolog of NCBI NO: 18401018 NR Description: G-protein beta family
MVQWHPTMDVLFSCSYDNTIKVWWSEDDDGEYQCVQTLGESNNGHSSTVWSISFNAAGDKMVTCSDDLTLKIWGTDIAKMQSGEEYAPWIHLCTLSGYHDRTIYSAHWSRDDIIASGAGDNAIRLFVDSKHDSVDGPSYNLLLKKNKAHENDVNSVQWSPGEGNRLLASASDDGMVKIWQLATKP

SEQ ID NO: 42253 - DNA, 1048 bp, Arabidopsis thaliana
  misc_feature (1)..(1048): Ceres Seq. ID no. 12422952
  misc_feature: MA Experiment ID: 108434 Result: Down-regulated in Transcription
  misc_feature: MA Experiment 108434 PARAMETER Experiment Name: At_Root_Tips_cDNA_P Parameter: Tissue Value: Root Tips
  misc_feature: MA Experiment ID: 108668 Result: Up-regulated in Transcription
  misc_feature: MA Experiment 108668 PARAMETER Experiment Name: At_2mM_SA_cDNA_P Parameter: Plant Line Value: WS
  misc_feature: MA Experiment 108668 PARAMETER Experiment Name: At_2mM_SA_cDNA_P Parameter: Timepoint (hr) Value: 6
  misc_feature: MA Experiment 108668 PARAMETER Experiment Name: At_2mM_SA_cDNA_P Parameter: Treatment Value: 2mM SA vs. No Treatment
  misc_feature: MA Experiment ID: 20000090 Result: Up-regulated in Transcription
  misc_feature: MA Experiment ID: 20000182 Result: Up-regulated in Transcription
  misc_feature: MA Experiment 20000182 PARAMETER Experiment Name: At_2mM_SA_P Parameter: Age (day) Value: 14
  misc_feature: MA Experiment 20000182 PARAMETER Experiment Name: At_2mM_SA_P Parameter: Organism Value: A. thaliana
  misc_feature: MA Experiment 20000182 PARAMETER Experiment Name: At_2mM_SA_P Parameter: Plant Line Value: WS
  misc_feature: MA Experiment 20000182 PARAMETER Experiment Name: At_2mM_SA_P Parameter: Timepoint (hr) Value: 6
  misc_feature: MA Experiment 20000182 PARAMETER Experiment Name: At_2mM_SA_P Parameter: Tissue Value: Aerial
  misc_feature: MA Experiment 20000182 PARAMETER Experiment Name: At_2mM_SA_P Parameter: Treatment Value: 2mM SA vs. No Treatment
ggagtctctcttgtcttcgtttgtgtttgttttttttggactttgaccttccttggcttggacttgagaccaaaaaaaaaaaaaggagaagaagaccatcgttgttctccgatggctattaacagaattgctcatggttctctgtttctgacggtagtcttgttctttctgacggttaattacggcgaagctatatggttgacgattccgacgacgggtggaacgaagtgtgtctccgaggagatacagagcaacgtcgtcgttttggctgattactatgtcgtcgatgagcataatcctgaaaatacacctgctgtttcttctaaggtaacatctccgtatgggaacaatcttcatcaccaagaaaatgtaacacatggtcagtttgcattcacaactcaagaagctgggaactacttggcttgtttctggattgattccagtcatcacttagccaatcctataacccttggggttgattggaagatgggtattgcagctaaagactgggactctgttgctaaaaaggaaaagatcgagggtgttgagcttcagttgaggagacttgaagggttggtgctgtcgattcgtgagaacttaaactatataaaagacagggaagcggagatgcgagaagtgagtgaaacaaccaactcaagagtggcttggttcagtataatgtcactcggggtttgcgttgtggttgtgggttcacagatactgtatctgaagaggtatttccacaagaagaaacttatctagaaacttggcctgaaggatactcttactatatattagtaacatcacacatccctaccttgaaaagagggataagctcaagattgtagagttgaattggttaaaaaatcgaagaacgcgttttcatttatattttctgtgaaactttactactgtcgatagttagagatcattgagtttgtgcacagtcacttttgtgttttgattgatctcttttggagttaaaaaaaaaaatacaggtaatgtgacaatgtaccaaaagttctttctttcacaggcattttggggt

SEQ ID NO: 42254 - protein, 253 aa, Arabidopsis thaliana
  peptide (1)..(253): Ceres Seq. ID no. 12422953
  misc_feature (46)..(253): Pfam Name: emp24/gp25L/p24 family Pfam Description: emp24/gp25L/p24 family
  misc_feature (38)..(253): Homolog of NCBI NO: 18921314 NR Description: putative transmembrane protein [Oryza sativa]
  misc_feature (47)..(253): Homolog of NCBI NO: 21618241 NR Description: unknown [Arabidopsis thaliana]
  misc_feature (47)..(253): Homolog of NCBI NO: 18396016 NR Description: expressed protein
  misc_feature (72)..(253): Homolog of NCBI NO: 33146897 NR Description: putative transmembrane protein
  misc_feature (104)..(230): Homolog of NCBI NO: 40641597 NR Description: putative transmembrane protein-like protein
  misc_feature (63)..(253): Homolog of NCBI NO: 15228372 NR Description: putative membrane protein; protein id:
  misc_feature (47)..(253): Homolog of NCBI NO: 15223626 NR Description: integral membrane protein, putative
  misc_feature (49)..(253): Homolog of NCBI NO: 15217563 NR Description: unknown protein; protein id: At1g09580.1
  misc_feature (38)..(180): Homolog of NCBI NO: 25402945 NR Description: protein T26F17.12 [imported] - Arabidopsis
  misc_feature (38)..(253): Homolog of NCBI NO: 15219136 NR Description: transmembrane protein, putative
GVSLVFVCVCFFWTLTFLGLDLRPKKKKGEEDHRCSPMAINRIAHGSLFLTVVLFFLTVNYGEAIWLTIPTTGGTKCVSEEIQSNVVVLADYYVVDEHNPENTPAVSSKVTSPYGNNLHHQENVTHGQFAFTTQEAGNYLACFWIDSSHHLANPITLGVDWKMGIAAKDWDSVAKKEKIEGVELQLRRLEGLVLSIRENLNYIKDREAEMREVSETTNSRVAWFSIMSLGVCVVVVGSQILYLKRYFHKKKLI

SEQ ID NO: 42255 - protein, 216 aa, Arabidopsis thaliana
  peptide (1)..(216): Ceres Seq. ID no. 12422954
  misc_feature (9)..(216): Pfam Name: emp24/gp25L/p24 family Pfam Description: emp24/gp25L/p24 family
  misc_feature (1)..(216): Homolog of NCBI NO: 18921314 NR Description: putative transmembrane protein [Oryza sativa]
  misc_feature (10)..(216): Homolog of NCBI NO: 21618241 NR Description: unknown [Arabidopsis thaliana]
  misc_feature (10)..(216): Homolog of NCBI NO: 18396016 NR Description: expressed protein
  misc_feature (35)..(216): Homolog of NCBI NO: 33146897 NR Description: putative transmembrane protein
  misc_feature (67)..(193): Homolog of NCBI NO: 40641597 NR Description: putative transmembrane protein-like protein
  misc_feature (26)..(216): Homolog of NCBI NO: 15228372 NR Description: putative membrane protein; protein id:
  misc_feature (10)..(216): Homolog of NCBI NO: 15223626 NR Description: integral membrane protein, putative
  misc_feature (12)..(216): Homolog of NCBI NO: 15217563 NR Description: unknown protein; protein id: At1g09580.1
  misc_feature (1)..(143): Homolog of NCBI NO: 25402945 NR Description: protein T26F17.12 [imported] - Arabidopsis
  misc_feature (1)..(216): Homolog of NCBI NO: 15219136 NR Description: transmembrane protein, putative
MAINRIAHGSLFLTVVLFFLTVNYGEAIWLTIPTTGGTKCVSEEIQSNVVVLADYYVVDEHNPENTPAVSSKVTSPYGNNLHHQENVTHGQFAFTTQEAGNYLACFWIDSSHHLANPITLGVDWKMGIAAKDWDSVAKKEKIEGVELQLRRLEGLVLSIRENLNYIKDREAEMREVSETTNSRVAWFSIMSLGVCVVVVGSQILYLKRYFHKKKLI

SEQ ID NO: 42256 - DNA, 1390 bp, Arabidopsis thaliana
  misc_feature (1)..(1390): Ceres Seq. ID no. 12325882
  misc_feature: MA Experiment ID: 108462 Result: Down-regulated in Transcription
  misc_feature: MA Experiment 108462 PARAMETER Experiment Name: At_Germinating_Seeds_cDNA_P Parameter: Age (day) Value: 2 vs. 0
  misc_feature: MA Experiment 108462 PARAMETER Experiment Name: At_Germinating_Seeds_cDNA_P Parameter: Tissue Value: Germinating Seeds
  misc_feature: MA Experiment ID: 108464 Result: Down-regulated in Transcription
  misc_feature: MA Experiment 108464 PARAMETER Experiment Name: At_Germinating_Seeds_cDNA_P Parameter: Age (day) Value: 4 vs. 0
  misc_feature: MA Experiment 108464 PARAMETER Experiment Name: At_Germinating_Seeds_cDNA_P Parameter: Tissue Value: Germinating Seeds
  misc_feature: MA Experiment ID: 20001451 Result: Down-regulated in Transcription
  misc_feature: MA Experiment 20001451 PARAMETER Experiment Name: At_Far-red-induction_P Parameter: Age (day) Value: 7
  misc_feature: MA Experiment 20001451 PARAMETER Experiment Name: At_Far-red-induction_P Parameter: Light Value: Far-red vs. White
  misc_feature: MA Experiment 20001451 PARAMETER Experiment Name: At_Far-red-induction_P Parameter: Organism Value: A. thaliana
  misc_feature: MA Experiment 20001451 PARAMETER Experiment Name: At_Far-red-induction_P Parameter: Plant Line Value: Columbia
  misc_feature: MA Experiment 20001451 PARAMETER Experiment Name: At_Far-red-induction_P Parameter: Timepoint (hr) Value: 24
  misc_feature: MA Experiment 20001451 PARAMETER Experiment Name: At_Far-red-induction_P Parameter: Tissue Value: Whole Plant
aataagaacaataaccaaaaactcccaaattaattttgcttaagcagcagcagaagaagaagcatggcggaacaagaattacagagaatcaatgagaagaagccatggcaagttctcgagttctacagtggaatcggtggaatgagatactctttaatggcgtcaggcatcgtctcagaagtagtagaagcttttgagatcaatgattctgctaatgatgtttatcaacataatttcaaacatcgtccctatcaggggaatattcagagtctcactgctgctgatttagataagtataatgcagatgcttggcttctttctcctccttgtcaaccttatactagacaaggccttcagaaacactctggtgatgctcgggcttcttcgtttctcaggattcttgagcttataccgcatacaacaaagcctccacaaatgttatttgtagagaatgttgttggatttgagacttcggatacacatatggaaatgattggtacattaacaaaattagattatgtcacacaagagtttatattgagtccgctgcagtttggtgtgccgtattcaagaccacgttatttctgcctggccaaaagaaaacctctgccatttaagtcccaacacagtaataacaaactactctggtctccagacccgttatatgggcgtgatgatcaggttgagtttggaaaatgtcaagcagaagaaggattggataaattacttgagttttgcgaaccagtagagaagtttctcgagttagctgcacatgttgatggcgagccaagtagtgttgatgactctgaaaatgggtccaaagattgttgtggacaagaaggcgattctgtcccagactctgtacatcagtatctagtaccagttagtttgatagagagatggggaaacgcaatggacattgtttaccctgattcaaagagatgttgttgtttcacaaagagttattatcgatacgtgaagggcacaggttccctattggcaactgtccagccaaaaatcaagggtaaggaatcttgtttgaaggagcaacggcttagatacttcacccctagagaggtagctaactttcactcattccctgaagattttgagttccccaagcacataagccttcgacaaagatacgcaatgcttggaaacagtttaagtgtagcagtggtggctcctctgcttcggtatctattcgattcttgactacacaatttgatgcactaagtgacgcgaccaattaccggaatcagttattctcctgaacaagcttctactacttttttgtttactgataaagttcaaactgatgaacttacgttttgttatcgatccttaactttatgggccagtattttaaatgggccttattcggcccgtt

SEQ ID NO: 42257 - protein, 383 aa, Arabidopsis thaliana
  peptide (1)..(383): Ceres Seq. ID no. 12325883
  misc_feature (15)..(382): Pfam Name: C-5 cytosine-specific DNA methylase Pfam Description: C-5 cytosine-specific DNA methylase
  misc_feature (269)..(380): Homolog of NCBI NO: 26341152 NR Description: unnamed protein product [Mus musculus]
  misc_feature (13)..(197): Homolog of NCBI NO: 26341152 NR Description: unnamed protein product [Mus musculus]
  misc_feature (267)..(382): Homolog of NCBI NO: 13096616 NR Description: Chain A, Structure Of Human Dnmt2, An Enigmatic
  misc_feature (13)..(186): Homolog of NCBI NO: 13096616 NR Description: Chain A, Structure Of Human Dnmt2, An Enigmatic
  misc_feature (225)..(381): Homolog of NCBI NO: 34912588 NR Description: putative DNA methyltransferase
  misc_feature (14)..(245): Homolog of NCBI NO: 34912588 NR Description: putative DNA methyltransferase
  misc_feature (253)..(381): Homolog of NCBI NO: 13936240 NR Description: DNA methyltransferase ZMET4 [Zea mays]
  misc_feature (14)..(232): Homolog of NCBI NO: 13936240 NR Description: DNA methyltransferase ZMET4 [Zea mays]
  misc_feature (1)..(383): Homolog of NCBI NO: 18420929 NR Description: DNA methyltransferase PMT1 - like protein
  misc_feature (1)..(383): Homolog of NCBI NO: 21553420 NR Description: DNA methyltransferase PMT1-like protein
MAEQELQRINEKKPWQVLEFYSGIGGMRYSLMASGIVSEVVEAFEINDSANDVYQHNFKHRPYQGNIQSLTAADLDKYNADAWLLSPPCQPYTRQGLQKHSGDARASSFLRILELIPHTTKPPQMLFVENVVGFETSDTHMEMIGTLTKLDYVTQEFILSPLQFGVPYSRPRYFCLAKRKPLPFKSQHSNNKLLWSPDPLYGRDDQVEFGKCQAEEGLDKLLEFCEPVEKFLELAAHVDGEPSSVDDSENGSKDCCGQEGDSVPDSVHQYLVPVSLIERWGNAMDIVYPDSKRCCCFTKSYYRYVKGTGSLLATVQPKIKGKESCLKEQRLRYFTPREVANFHSFPEDFEFPKHISLRQRYAMLGNSLSVAVVAPLLRYLFDS

SEQ ID NO: 42258 - protein, 357 aa, Arabidopsis thaliana
  peptide (1)..(357): Ceres Seq. ID no. 12325884
  misc_feature (1)..(356): Pfam Name: C-5 cytosine-specific DNA methylase Pfam Description: C-5 cytosine-specific DNA methylase
  misc_feature (243)..(354): Homolog of NCBI NO: 26341152 NR Description: unnamed protein product [Mus musculus]
  misc_feature (1)..(171): Homolog of NCBI NO: 26341152 NR Description: unnamed protein product [Mus musculus]
  misc_feature (241)..(356): Homolog of NCBI NO: 13096616 NR Description: Chain A, Structure Of Human Dnmt2, An Enigmatic
  misc_feature (1)..(160): Homolog of NCBI NO: 13096616 NR Description: Chain A, Structure Of Human Dnmt2, An Enigmatic
  misc_feature (199)..(355): Homolog of NCBI NO: 34912588 NR Description: putative DNA methyltransferase
  misc_feature (1)..(219): Homolog of NCBI NO: 34912588 NR Description: putative DNA methyltransferase
  misc_feature (227)..(355): Homolog of NCBI NO: 13936240 NR Description: DNA methyltransferase ZMET4 [Zea mays]
  misc_feature (1)..(206): Homolog of NCBI NO: 13936240 NR Description: DNA methyltransferase ZMET4 [Zea mays]
  misc_feature (1)..(357): Homolog of NCBI NO: 18420929 NR Description: DNA methyltransferase PMT1 - like protein
  misc_feature (1)..(357): Homolog of NCBI NO: 21553420 NR Description: DNA methyltransferase PMT1-like protein
MRYSLMASGIVSEVVEAFEINDSANDVYQHNFKHRPYQGNIQSLTAADLDKYNADAWLLSPPCQPYTRQGLQKHSGDARASSFLRILELIPHTTKPPQMLFVENVVGFETSDTHMEMIGTLTKLDYVTQEFILSPLQFGVPYSRPRYFCLAKRKPLPFKSQHSNNKLLWSPDPLYGRDDQVEFGKCQAEEGLDKLLEFCEPVEKFLELAAHVDGEPSSVDDSENGSKDCCGQEGDSVPDSVHQYLVPVSLIERWGNAMDIVYPDSKRCCCFTKSYYRYVKGTGSLLATVQPKIKGKESCLKEQRLRYFTPREVANFHSFPEDFEFPKHISLRQRYAMLGNSLSVAVVAPLLRYLFDS

SEQ ID NO: 42259 - protein, 352 aa, Arabidopsis thaliana
  peptide (1)..(352): Ceres Seq. ID no. 12325885
  misc_feature (1)..(351): Pfam Name: C-5 cytosine-specific DNA methylase Pfam Description: C-5 cytosine-specific DNA methylase
  misc_feature (238)..(349): Homolog of NCBI NO: 26341152 NR Description: unnamed protein product [Mus musculus]
  misc_feature (1)..(166): Homolog of NCBI NO: 26341152 NR Description: unnamed protein product [Mus musculus]
  misc_feature (236)..(351): Homolog of NCBI NO: 13096616 NR Description: Chain A, Structure Of Human Dnmt2, An Enigmatic
  misc_feature (1)..(155): Homolog of NCBI NO: 13096616 NR Description: Chain A, Structure Of Human Dnmt2, An Enigmatic
  misc_feature (194)..(350): Homolog of NCBI NO: 34912588 NR Description: putative DNA methyltransferase
  misc_feature (1)..(214): Homolog of NCBI NO: 34912588 NR Description: putative DNA methyltransferase
  misc_feature (222)..(350): Homolog of NCBI NO: 13936240 NR Description: DNA methyltransferase ZMET4 [Zea mays]
  misc_feature (1)..(201): Homolog of NCBI NO: 13936240 NR Description: DNA methyltransferase ZMET4 [Zea mays]
  misc_feature (1)..(352): Homolog of NCBI NO: 18420929 NR Description: DNA methyltransferase PMT1 - like protein
  misc_feature (1)..(352): Homolog of NCBI NO: 21553420 NR Description: DNA methyltransferase PMT1-like protein
MASGIVSEVVEAFEINDSANDVYQHNFKHRPYQGNIQSLTAADLDKYNADAWLLSPPCQPYTRQGLQKHSGDARASSFLRILELIPHTTKPPQMLFVENVVGFETSDTHMEMIGTLTKLDYVTQEFILSPLQFGVPYSRPRYFCLAKRKPLPFKSQHSNNKLLWSPDPLYGRDDQVEFGKCQAEEGLDKLLEFCEPVEKFLELAAHVDGEPSSVDDSENGSKDCCGQEGDSVPDSVHQYLVPVSLIERWGNAMDIVYPDSKRCCCFTKSYYRYVKGTGSLLATVQPKIKGKESCLKEQRLRYFTPREVANFHSFPEDFEFPKHISLRQRYAMLGNSLSVAVVAPLLRYLFDS

SEQ ID NO: 42260 - DNA, 1135 bp, Arabidopsis thaliana
  misc_feature (1)..(1135): Ceres Seq. ID no. 13488073
  misc_feature: MA Experiment ID: 20000180 Result: Up-regulated in Transcription
  misc_feature: MA Experiment 20000180 PARAMETER Experiment Name: At_Germinating_Seeds_P Parameter: Age (hr) Value: 24 vs. 0
  misc_feature: MA Experiment 20000180 PARAMETER Experiment Name: At_Germinating_Seeds_P Parameter: Tissue Value: Germinating Seeds
  misc_feature: MA Experiment ID: 20000184 Result: Up-regulated in Transcription
  misc_feature: MA Experiment 20000184 PARAMETER Experiment Name: At_Shoots__P Parameter: Age (day) Value: 7
  misc_feature: MA Experiment 20000184 PARAMETER Experiment Name: At_Shoots__P Parameter: Tissue Value: Shoots vs. Whole Plant
  misc_feature: MA Experiment ID: 20000185 Result: Down-regulated in Transcription
  misc_feature: MA Experiment 20000185 PARAMETER Experiment Name: At_Roots__P Parameter: Age (day) Value: 7 vs. 21
  misc_feature: MA Experiment 20000185 PARAMETER Experiment Name: At_Roots__P Parameter: Organism Value: A. thaliana
  misc_feature: MA Experiment 20000185 PARAMETER Experiment Name: At_Roots__P Parameter: Tissue Value: Roots vs. Whole Plant
  misc_feature: MA Experiment ID: 20000264 Result: Up-regulated in Transcription
  misc_feature: MA Experiment 20000264 PARAMETER Experiment Name: At_Open_Flower_P Parameter: Age (day) Value: 21
  misc_feature: MA Experiment 20000264 PARAMETER Experiment Name: At_Open_Flower_P Parameter: Plant Line Value: WS
  misc_feature: MA Experiment 20000264 PARAMETER Experiment Name: At_Open_Flower_P Parameter: Tissue Value: Open Flower vs. Whole Plant
  misc_feature: MA Experiment ID: 20000267 Result: Down-regulated in Transcription
  misc_feature: MA Experiment 20000267 PARAMETER Experiment Name: At_Drought_P Parameter: Age (day) Value: 7
  misc_feature: MA Experiment 20000267 PARAMETER Experiment Name: At_Drought_P Parameter: Organism Value: A. thaliana
  misc_feature: MA Experiment 20000267 PARAMETER Experiment Name: At_Drought_P Parameter: Plant Line Value: WS
  misc_feature: MA Experiment 20000267 PARAMETER Experiment Name: At_Drought_P Parameter: Timepoint (hr) Value: 6
  misc_feature: MA Experiment 20000267 PARAMETER Experiment Name: At_Drought_P Parameter: Tissue Value: Whole Plant
  misc_feature: MA Experiment 20000267 PARAMETER Experiment Name: At_Drought_P Parameter: Treatment Value: Drought vs. No Drought
  misc_feature: MA Experiment ID: 20000286 Result: Up-regulated in Transcription
  misc_feature: MA Experiment 20000286 PARAMETER Experiment Name: At_Open_Flower_P Parameter: Age (day) Value: 21
  misc_feature: MA Experiment 20000286 PARAMETER Experiment Name: At_Open_Flower_P Parameter: Plant Line Value: WS
  misc_feature: MA Experiment 20000286 PARAMETER Experiment Name: At_Open_Flower_P Parameter: Tissue Value: Half Open vs. Whole Plant
  misc_feature: MA Experiment ID: 20000436 Result: Down-regulated in Transcription
  misc_feature: MA Experiment 20000436 PARAMETER Experiment Name: At_Drought_P Parameter: Age (day) Value: 7
  misc_feature: MA Experiment 20000436 PARAMETER Experiment Name: At_Drought_P Parameter: Organism Value: A. thaliana
  misc_feature: MA Experiment 20000436 PARAMETER Experiment Name: At_Drought_P Parameter: Plant Line Value: WS
  misc_feature: MA Experiment 20000436 PARAMETER Experiment Name: At_Drought_P Parameter: Timepoint (hr) Value: 12
  misc_feature: MA Experiment 20000436 PARAMETER Experiment Name: At_Drought_P Parameter: Tissue Value: Whole Plant
  misc_feature: MA Experiment 20000436 PARAMETER Experiment Name: At_Drought_P Parameter: Treatment Value: Drought vs. No Drought
  misc_feature: MA Experiment ID: 20000437 Result: Down-regulated in Transcription
  misc_feature: MA Experiment 20000437 PARAMETER Experiment Name: At_Drought_P Parameter: Age (day) Value: 8
  misc_feature: MA Experiment 20000437 PARAMETER Experiment Name: At_Drought_P Parameter: Organism Value: A. thaliana
  misc_feature: MA Experiment 20000437 PARAMETER Experiment Name: At_Drought_P Parameter: Plant Line Value: WS
  misc_feature: MA Experiment 20000437 PARAMETER Experiment Name: At_Drought_P Parameter: Timepoint (hr) Value: 24
  misc_feature: MA Experiment 20000437 PARAMETER Experiment Name: At_Drought_P Parameter: Tissue Value: Whole Plant
  misc_feature: MA Experiment 20000437 PARAMETER Experiment Name: At_Drought_P Parameter: Treatment Value: Drought vs. No Drought
  misc_feature: MA Experiment ID: 20000438 Result: Up-regulated in Transcription
  misc_feature: MA Experiment 20000438 PARAMETER Experiment Name: At_Shoots__P Parameter: Age (day) Value: 14
  misc_feature: MA Experiment 20000438 PARAMETER Experiment Name: At_Shoots__P Parameter: Tissue Value: Shoots vs. Whole Plant
  misc_feature: MA Experiment ID: 20000439 Result: Down-regulated in Transcription
  misc_feature: MA Experiment 20000439 PARAMETER Experiment Name: At_Roots__P Parameter: Age (day) Value: 14 vs. 21
  misc_feature: MA Experiment 20000439 PARAMETER Experiment Name: At_Roots__P Parameter: Organism Value: A. thaliana
  misc_feature: MA Experiment 20000439 PARAMETER Experiment Name: At_Roots__P Parameter: Tissue Value: Roots vs. Whole Plant
  misc_feature: MA Experiment ID: 20000443 Result: Up-regulated in Transcription
  misc_feature: MA Experiment 20000443 PARAMETER Experiment Name: At_1uM_BR-BRZ__P Parameter: Tissue Value: Shoot Apices
  misc_feature: MA Experiment 20000443 PARAMETER Experiment Name: At_1uM_BR-BRZ__P Parameter: Treatment Value: 1uM BRZ vs. No Treatment
  misc_feature: MA Experiment ID: 20000455 Result: Up-regulated in Transcription
  misc_feature: MA Experiment 20000455 PARAMETER Experiment Name: At_100uM_ABA_P Parameter: Age (day) Value: 16
  misc_feature: MA Experiment 20000455 PARAMETER Experiment Name: At_100uM_ABA_P Parameter: Organism Value: A. thaliana
  misc_feature: MA Experiment 20000455 PARAMETER Experiment Name: At_100uM_ABA_P Parameter: Plant Line Value: WS
  misc_feature: MA Experiment 20000455 PARAMETER Experiment Name: At_100uM_ABA_P Parameter: Timepoint (hr) Value: 48
  misc_feature: MA Experiment 20000455 PARAMETER Experiment Name: At_100uM_ABA_P Parameter: Tissue Value: Aerial
  misc_feature: MA Experiment 20000455 PARAMETER Experiment Name: At_100uM_ABA_P Parameter: Treatment Value: 100uM ABA vs. No Treatment
  misc_feature: MA Experiment ID: 20000495 Result: Down-regulated in Transcription
  misc_feature: MA Experiment 20000495 PARAMETER Experiment Name: At_Guard_Cells_P Parameter: Harvest Date Value: 8/2/2002
  misc_feature: MA Experiment 20000495 PARAMETER Experiment Name: At_Guard_Cells_P Parameter: Organism Value: A. thaliana
  misc_feature: MA Experiment 20000495 PARAMETER Experiment Name: At_Guard_Cells_P Parameter: Tissue Value: Guard Cells vs. Leaves
  misc_feature: MA Experiment ID: 20000527 Result: Down-regulated in Transcription
  misc_feature: MA Experiment 20000527 PARAMETER Experiment Name: At_10percent_PEG_P Parameter: Age (day) Value: 20
  misc_feature: MA Experiment 20000527 PARAMETER Experiment Name: At_10percent_PEG_P Parameter: Organism Value: A. thaliana
  misc_feature: MA Experiment 20000527 PARAMETER Experiment Name: At_10percent_PEG_P Parameter: Plant Line Value: WS
  misc_feature: MA Experiment 20000527 PARAMETER Experiment Name: At_10percent_PEG_P Parameter: Timepoint (day) Value: 20
  misc_feature: MA Experiment 20000527 PARAMETER Experiment Name: At_10percent_PEG_P Parameter: Tissue Value: Whole Plant
  misc_feature: MA Experiment 20000527 PARAMETER Experiment Name: At_10percent_PEG_P Parameter: Treatment Value: 10percent PEG vs. No Treatment
  misc_feature: MA Experiment ID: 20000573 Result: Down-regulated in Transcription
  misc_feature: MA Experiment 20000573 PARAMETER Experiment Name: At_100uM_ABA_Mutants__P Parameter: Organism Value: A. thaliana
  misc_feature: MA Experiment 20000573 PARAMETER Experiment Name: At_100uM_ABA_Mutants__P Parameter: Plant Line Value: CS22 vs. Ler wt
  misc_feature: MA Experiment 20000573 PARAMETER Experiment Name: At_100uM_ABA_Mutants__P Parameter: Timepoint (hr) Value: N/A
  misc_feature: MA Experiment 20000573 PARAMETER Experiment Name: At_100uM_ABA_Mutants__P Parameter: Tissue Value: Whole Plant
  misc_feature: MA Experiment 20000573 PARAMETER Experiment Name: At_100uM_ABA_Mutants__P Parameter: Treatment Value: None
  misc_feature: MA Experiment ID: 20000794 Result: Up-regulated in Transcription
  misc_feature: MA Experiment 20000794 PARAMETER Experiment Name: At_Petals_P Parameter: Age (day) Value: 23-25 days
  misc_feature: MA Experiment 20000794 PARAMETER Experiment Name: At_Petals_P Parameter: Plant Line Value: WS
  misc_feature: MA Experiment 20000794 PARAMETER Experiment Name: At_Petals_P Parameter: Tissue Value: Petals vs. Whole plant
  misc_feature: MA Experiment ID: 20001248 Result: Down-regulated in Transcription
  misc_feature: MA Experiment 20001248 PARAMETER Experiment Name: At_Far-red-induction_P Parameter: Age (day) Value: 7
  misc_feature: MA Experiment 20001248 PARAMETER Experiment Name: At_Far-red-induction_P Parameter: Light Value: Far-red vs. White
  misc_feature: MA Experiment 20001248 PARAMETER Experiment Name: At_Far-red-induction_P Parameter: Organism Value: A. thaliana
  misc_feature: MA Experiment 20001248 PARAMETER Experiment Name: At_Far-red-induction_P Parameter: Plant Line Value: Columbia
  misc_feature: MA Experiment 20001248 PARAMETER Experiment Name: At_Far-red-induction_P Parameter: Timepoint (hr) Value: 4
  misc_feature: MA Experiment 20001248 PARAMETER Experiment Name: At_Far-red-induction_P Parameter: Tissue Value: Whole Plant
  misc_feature: MA Experiment ID: 20001450 Result: Down-regulated in Transcription
  misc_feature: MA Experiment 20001450 PARAMETER Experiment Name: At_Far-red-induction_P Parameter: Age (day) Value: 7
  misc_feature: MA Experiment 20001450 PARAMETER Experiment Name: At_Far-red-induction_P Parameter: Light Value: Far-red vs. White
  misc_feature: MA Experiment 20001450 PARAMETER Experiment Name: At_Far-red-induction_P Parameter: Organism Value: A. thaliana
  misc_feature: MA Experiment 20001450 PARAMETER Experiment Name: At_Far-red-induction_P Parameter: Plant Line Value: Columbia
  misc_feature: MA Experiment 20001450 PARAMETER Experiment Name: At_Far-red-induction_P Parameter: Timepoint (hr) Value: 8
  misc_feature: MA Experiment 20001450 PARAMETER Experiment Name: At_Far-red-induction_P Parameter: Tissue Value: Whole Plant
  misc_feature: MA Experiment ID: 20001451 Result: Down-regulated in Transcription
  misc_feature: MA Experiment 20001451 PARAMETER Experiment Name: At_Far-red-induction_P Parameter: Age (day) Value: 7
  misc_feature: MA Experiment 20001451 PARAMETER Experiment Name: At_Far-red-induction_P Parameter: Light Value: Far-red vs. White
  misc_feature: MA Experiment 20001451 PARAMETER Experiment Name: At_Far-red-induction_P Parameter: Organism Value: A. thaliana
  misc_feature: MA Experiment 20001451 PARAMETER Experiment Name: At_Far-red-induction_P Parameter: Plant Line Value: Columbia
  misc_feature: MA Experiment 20001451 PARAMETER Experiment Name: At_Far-red-induction_P Parameter: Timepoint (hr) Value: 24
  misc_feature: MA Experiment 20001451 PARAMETER Experiment Name: At_Far-red-induction_P Parameter: Tissue Value: Whole Plant
  misc_feature: MA Experiment ID: 20001554 Result: Down-regulated in Transcription
  misc_feature: MA Experiment 20001554 PARAMETER Experiment Name: At_Drought_Soil_Dry_P Parameter: Age (day) Value: 21
  misc_feature: MA Experiment 20001554 PARAMETER Experiment Name: At_Drought_Soil_Dry_P Parameter: Organism Value: A. thaliana
  misc_feature: MA Experiment 20001554 PARAMETER Experiment Name: At_Drought_Soil_Dry_P Parameter: Plant Line Value: WS
  misc_feature: MA Experiment 20001554 PARAMETER Experiment Name: At_Drought_Soil_Dry_P Parameter: Post Timepoint (hr) Value: None
  misc_feature: MA Experiment 20001554 PARAMETER Experiment Name: At_Drought_Soil_Dry_P Parameter: Post-Treatment Value: None
  misc_feature: MA Experiment 20001554 PARAMETER Experiment Name: At_Drought_Soil_Dry_P Parameter: Timepoint (day) Value: 7
  misc_feature: MA Experiment 20001554 PARAMETER Experiment Name: At_Drought_Soil_Dry_P Parameter: Treatment Value: Drought vs. No Drought
  misc_feature: MA Experiment ID: 20001555 Result: Down-regulated in Transcription
  misc_feature: MA Experiment 20001555 PARAMETER Experiment Name: At_Drought_Soil_Dry_P Parameter: Age (day) Value: 24
  misc_feature: MA Experiment 20001555 PARAMETER Experiment Name: At_Drought_Soil_Dry_P Parameter: Organism Value: A. thaliana
  misc_feature: MA Experiment 20001555 PARAMETER Experiment Name: At_Drought_Soil_Dry_P Parameter: Plant Line Value: WS
  misc_feature: MA Experiment 20001555 PARAMETER Experiment Name: At_Drought_Soil_Dry_P Parameter: Post Timepoint (hr) Value: None
  misc_feature: MA Experiment 20001555 PARAMETER Experiment Name: At_Drought_Soil_Dry_P Parameter: Post-Treatment Value: None
  misc_feature: MA Experiment 20001555 PARAMETER Experiment Name: At_Drought_Soil_Dry_P Parameter: Timepoint (day) Value: 10
  misc_feature: MA Experiment 20001555 PARAMETER Experiment Name: At_Drought_Soil_Dry_P Parameter: Treatment Value: Drought vs. No Drought
  misc_feature: MA Experiment ID: 20001556 Result: Down-regulated in Transcription
  misc_feature: MA Experiment 20001556 PARAMETER Experiment Name: At_Drought_Soil_Dry_P Parameter: Age (day) Value: 26
  misc_feature: MA Experiment 20001556 PARAMETER Experiment Name: At_Drought_Soil_Dry_P Parameter: Organism Value: A. thaliana
  misc_feature: MA Experiment 20001556 PARAMETER Experiment Name: At_Drought_Soil_Dry_P Parameter: Plant Line Value: WS
  misc_feature: MA Experiment 20001556 PARAMETER Experiment Name: At_Drought_Soil_Dry_P Parameter: Post Timepoint (hr) Value: None
  misc_feature: MA Experiment 20001556 PARAMETER Experiment Name: At_Drought_Soil_Dry_P Parameter: Post-Treatment Value: None
  misc_feature: MA Experiment 20001556 PARAMETER Experiment Name: At_Drought_Soil_Dry_P Parameter: Timepoint (day) Value: 12
  misc_feature: MA Experiment 20001556 PARAMETER Experiment Name: At_Drought_Soil_Dry_P Parameter: Treatment Value: Drought vs. No Drought
  misc_feature: MA Experiment ID: 20001559 Result: Down-regulated in Transcription
  misc_feature: MA Experiment 20001559 PARAMETER Experiment Name: At_Drought_Soil_Dry_P Parameter: Age (day) Value: 28
  misc_feature: MA Experiment 20001559 PARAMETER Experiment Name: At_Drought_Soil_Dry_P Parameter: Organism Value: A. thaliana
  misc_feature: MA Experiment 20001559 PARAMETER Experiment Name: At_Drought_Soil_Dry_P Parameter: Plant Line Value: WS
  misc_feature: MA Experiment 20001559 PARAMETER Experiment Name: At_Drought_Soil_Dry_P Parameter: Post Timepoint (hr) Value: 29
  misc_feature: MA Experiment 20001559 PARAMETER Experiment Name: At_Drought_Soil_Dry_P Parameter: Post-Treatment Value: Re-Water vs. No Drought
  misc_feature: MA Experiment 20001559 PARAMETER Experiment Name: At_Drought_Soil_Dry_P Parameter: Timepoint (day) Value: 14
  misc_feature: MA Experiment 20001559 PARAMETER Experiment Name: At_Drought_Soil_Dry_P Parameter: Treatment Value: Drought vs. No Drought
  misc_feature: MA Experiment ID: 20001905 Result: Down-regulated in Transcription
  misc_feature: MA Experiment 20001905 PARAMETER Experiment Name: At_Drought_Reproduction_P Parameter: Age (day) Value: 40
  misc_feature: MA Experiment 20001905 PARAMETER Experiment Name: At_Drought_Reproduction_P Parameter: Organism Value: A. thaliana
  misc_feature: MA Experiment 20001905 PARAMETER Experiment Name: At_Drought_Reproduction_P Parameter: Plant Line Value: WS
  misc_feature: MA Experiment 20001905 PARAMETER Experiment Name: At_Drought_Reproduction_P Parameter: Timepoint (day) Value: 10
  misc_feature: MA Experiment 20001905 PARAMETER Experiment Name: At_Drought_Reproduction_P Parameter: Tissue Value: Rosettes
  misc_feature: MA Experiment 20001905 PARAMETER Experiment Name: At_Drought_Reproduction_P Parameter: Treatment Value: Drought vs. No Drought
  misc_feature: MA Experiment ID: 20001906 Result: Down-regulated in Transcription
  misc_feature: MA Experiment 20001906 PARAMETER Experiment Name: At_Drought_Reproduction_P Parameter: Age (day) Value: 35
  misc_feature: MA Experiment 20001906 PARAMETER Experiment Name: At_Drought_Reproduction_P Parameter: Organism Value: A. thaliana
  misc_feature: MA Experiment 20001906 PARAMETER Experiment Name: At_Drought_Reproduction_P Parameter: Plant Line Value: WS
  misc_feature: MA Experiment 20001906 PARAMETER Experiment Name: At_Drought_Reproduction_P Parameter: Timepoint (day) Value: 5
  misc_feature: MA Experiment 20001906 PARAMETER Experiment Name: At_Drought_Reproduction_P Parameter: Tissue Value: Siliques
  misc_feature: MA Experiment 20001906 PARAMETER Experiment Name: At_Drought_Reproduction_P Parameter: Treatment Value: Drought vs. No Drought
  misc_feature: MA Experiment ID: 20001908 Result: Down-regulated in Transcription
  misc_feature: MA Experiment 20001908 PARAMETER Experiment Name: At_Drought_Reproduction_P Parameter: Age (day) Value: 40
  misc_feature: MA Experiment 20001908 PARAMETER Experiment Name: At_Drought_Reproduction_P Parameter: Organism Value: A. thaliana
  misc_feature: MA Experiment 20001908 PARAMETER Experiment Name: At_Drought_Reproduction_P Parameter: Plant Line Value: WS
  misc_feature: MA Experiment 20001908 PARAMETER Experiment Name: At_Drought_Reproduction_P Parameter: Timepoint (day) Value: 10
  misc_feature: MA Experiment 20001908 PARAMETER Experiment Name: At_Drought_Reproduction_P Parameter: Tissue Value: Siliques
  misc_feature: MA Experiment 20001908 PARAMETER Experiment Name: At_Drought_Reproduction_P Parameter: Treatment Value: Drought vs. No Drought
  misc_feature: MA Experiment ID: 20001911 Result: Down-regulated in Transcription
  misc_feature: MA Experiment 20001911 PARAMETER Experiment Name: At_Drought_Reproduction_P Parameter: Age (day) Value: 40
  misc_feature: MA Experiment 20001911 PARAMETER Experiment Name: At_Drought_Reproduction_P Parameter: Organism Value: A. thaliana
  misc_feature: MA Experiment 20001911 PARAMETER Experiment Name: At_Drought_Reproduction_P Parameter: Plant Line Value: WS
  misc_feature: MA Experiment 20001911 PARAMETER Experiment Name: At_Drought_Reproduction_P Parameter: Timepoint (day) Value: 10
  misc_feature: MA Experiment 20001911 PARAMETER Experiment Name: At_Drought_Reproduction_P Parameter: Tissue Value: Flowers
  misc_feature: MA Experiment 20001911 PARAMETER Experiment Name: At_Drought_Reproduction_P Parameter: Treatment Value: Drought vs. No Drought
aaaaaactcatcatcataagcaacaatggtggtgtcactcttctcttccagaaatgttttctatacgttaagcttatgcttatttgcagcattataccagccggttatgagtagaccggctaagtttgaagatgactttaggatcgcatggtccgatactcatatcactcaaattgacggaggcagagccattcagctcaaattggaccctagctcaggatgtggatttgcttcgaagaagcaatacttgttcggccgtgtgagcatgaaaatcaaactgatccccggtgattctgccgggactgtcactgccttctacatgaattcagataccgattcggtacgagacgagcttgattttgagttcttaggaaatcgaagtggacaaccttacacagtgcaaaccaatgtgtttgctcatggtaaaggcgatagagagcaaagagttaacctttggttcgacccttctcgtgatttccacgaatatgccatctcatggaaccatctccgtattgtcttctacgtagacaatgtgcccatcagggtttacaagaacaatgaggcaaggaaagtaccatacccaagattccaaccaatgggtgtatattccacgttatgggaagccgatgattgggcgacacgtggaggaatagagaaaatcaattggtcgagagcgccattttatgcttattacaaagattttgatatagaaggatgtccggttccaggacccgcagattgtcccgctaattcgaagaattggtgggaaggcagtgcgtaccaccagttgagtccggtggaagctcgaagttatagatgggtccgagtgaaccatatggtctacgattattgcactgacaaatctcgttttcctgttccacctccagaatgctcggctggaatctgatccaaacattattgtcttaaaagcaaaacaagtgcgaagtggttccataagcaacgttgcaatgtatgtgaagtgattaatgagtcttgtggtatgtggtgaattgctcataatcgatctgattgtggtcaaatgttcatatatatatgtatatctttgaattttactttgttttcatgatgtcttatgttttgttgatctattgaagagaaccatgtttgtttgttg

SEQ ID NO: 42261 - protein, 293 aa, Arabidopsis thaliana
  peptide (1)..(293): Ceres Seq. ID no. 13488074
  misc_feature (34)..(216): Pfam Name: Glycosyl hydrolases family 16 Pfam Description: Glycosyl hydrolases family 16
  misc_feature (7)..(290): Homolog of NCBI NO: 3043422 NR Description: endoxyloglucan transferase [Cicer arietinum]
  misc_feature (15)..(289): Homolog of NCBI NO: 950299 NR Description: xyloglucan endotransglycosylase precursor
  misc_feature (27)..(293): Homolog of NCBI NO: 5070246 NR Description: xyloglucan endo-transglycosylase-like protein
  misc_feature (27)..(291): Homolog of NCBI NO: 7447407 NR Description: xyloglucan endo-1,4-beta-D-glucanase (EC 3.2.1.-)
  misc_feature (14)..(291): Homolog of NCBI NO: 21537188 NR Description: xyloglucan endo-transglycosylase-like protein
  misc_feature (14)..(291): Homolog of NCBI NO: 18424986 NR Description: xyloglucan endotransglycosylase, putative
  misc_feature (9)..(289): Homolog of NCBI NO: 30841326 NR Description: xyloglucan endotransglycosylase [Gossypium
  misc_feature (15)..(289): Homolog of NCBI NO: 7447418 NR Description: probable endo-xyloglucan transferase - upland
  misc_feature (1)..(293): Homolog of NCBI NO: 21553421 NR Description: endo-xyloglucan transferase-like protein
  misc_feature (1)..(293): Homolog of NCBI NO: 15235714 NR Description: xyloglucan endotransglycosylase, putative
MVVSLFSSRNVFYTLSLCLFAALYQPVMSRPAKFEDDFRIAWSDTHITQIDGGRAIQLKLDPSSGCGFASKKQYLFGRVSMKIKLIPGDSAGTVTAFYMNSDTDSVRDELDFEFLGNRSGQPYTVQTNVFAHGKGDREQRVNLWFDPSRDFHEYAISWNHLRIVFYVDNVPIRVYKNNEARKVPYPRFQPMGVYSTLWEADDWATRGGIEKINWSRAPFYAYYKDFDIEGCPVPGPADCPANSKNWWEGSAYHQLSPVEARSYRWVRVNHMVYDYCTDKSRFPVPPPECSAGI

SEQ ID NO: 42262 - protein, 266 aa, Arabidopsis thaliana
  peptide (1)..(266): Ceres Seq. ID no. 13488075
  misc_feature (7)..(189): Pfam Name: Glycosyl hydrolases family 16 Pfam Description: Glycosyl hydrolases family 16
  misc_feature (1)..(263): Homolog of NCBI NO: 3043422 NR Description: endoxyloglucan transferase [Cicer arietinum]
  misc_feature (1)..(262): Homolog of NCBI NO: 950299 NR Description: xyloglucan endotransglycosylase precursor
  misc_feature (1)..(266): Homolog of NCBI NO: 5070246 NR Description: xyloglucan endo-transglycosylase-like protein
  misc_feature (1)..(264): Homolog of NCBI NO: 7447407 NR Description: xyloglucan endo-1,4-beta-D-glucanase (EC 3.2.1.-)
  misc_feature (1)..(264): Homolog of NCBI NO: 21537188 NR Description: xyloglucan endo-transglycosylase-like protein
  misc_feature (1)..(264): Homolog of NCBI NO: 18424986 NR Description: xyloglucan endotransglycosylase, putative
  misc_feature (1)..(262): Homolog of NCBI NO: 30841326 NR Description: xyloglucan endotransglycosylase [Gossypium
  misc_feature (1)..(262): Homolog of NCBI NO: 7447418 NR Description: probable endo-xyloglucan transferase - upland
  misc_feature (1)..(266): Homolog of NCBI NO: 21553421 NR Description: endo-xyloglucan transferase-like protein
  misc_feature (1)..(266): Homolog of NCBI NO: 15235714 NR Description: xyloglucan endotransglycosylase, putative
MSRPAKFEDDFRIAWSDTHITQIDGGRAIQLKLDPSSGCGFASKKQYLFGRVSMKIKLIPGDSAGTVTAFYMNSDTDSVRDELDFEFLGNRSGQPYTVQTNVFAHGKGDREQRVNLWFDPSRDFHEYAISWNHLRIVFYVDNVPIRVYKNNEARKVPYPRFQPMGVYSTLWEADDWATRGGIEKINWSRAPFYAYYKDFDIEGCPVPGPADCPANSKNWWEGSAYHQLSPVEARSYRWVRVNHMVYDYCTDKSRFPVPPPECSAGI

SEQ ID NO: 42263 - protein, 213 aa, Arabidopsis thaliana
  peptide (1)..(213): Ceres Seq. ID no. 13488076
  misc_feature (1)..(136): Pfam Name: Glycosyl hydrolases family 16 Pfam Description: Glycosyl hydrolases family 16
  misc_feature (1)..(210): Homolog of NCBI NO: 3043422 NR Description: endoxyloglucan transferase [Cicer arietinum]
  misc_feature (1)..(209): Homolog of NCBI NO: 950299 NR Description: xyloglucan endotransglycosylase precursor
  misc_feature (1)..(213): Homolog of NCBI NO: 5070246 NR Description: xyloglucan endo-transglycosylase-like protein
  misc_feature (1)..(211): Homolog of NCBI NO: 7447407 NR Description: xyloglucan endo-1,4-beta-D-glucanase (EC 3.2.1.-)
  misc_feature (1)..(211): Homolog of NCBI NO: 21537188 NR Description: xyloglucan endo-transglycosylase-like protein
  misc_feature (1)..(211): Homolog of NCBI NO: 18424986 NR Description: xyloglucan endotransglycosylase, putative
  misc_feature (1)..(209): Homolog of NCBI NO: 30841326 NR Description: xyloglucan endotransglycosylase [Gossypium
  misc_feature (1)..(209): Homolog of NCBI NO: 7447418 NR Description: probable endo-xyloglucan transferase - upland
  misc_feature (1)..(213): Homolog of NCBI NO: 21553421 NR Description: endo-xyloglucan transferase-like protein
  misc_feature (1)..(213): Homolog of NCBI NO: 15235714 NR Description: xyloglucan endotransglycosylase, putative
MKIKLIPGDSAGTVTAFYMNSDTDSVRDELDFEFLGNRSGQPYTVQTNVFAHGKGDREQRVNLWFDPSRDFHEYAISWNHLRIVFYVDNVPIRVYKNNEARKVPYPRFQPMGVYSTLWEADDWATRGGIEKINWSRAPFYAYYKDFDIEGCPVPGPADCPANSKNWWEGSAYHQLSPVEARSYRWVRVNHMVYDYCTDKSRFPVPPPECSAGI

SEQ ID NO: 42264 - DNA, 1501 bp, Arabidopsis thaliana
  misc_feature (1)..(1501): Ceres Seq. ID no. 12579981
  misc_feature: MA Experiment ID: 108577 Result: Up-regulated in Transcription
  misc_feature: MA Experiment 108577 PARAMETER Experiment Name: At_42deg_Heat_cDNA_P Parameter: Temperature (deg C) Value: 42 vs. 22
  misc_feature: MA Experiment 108577 PARAMETER Experiment Name: At_42deg_Heat_cDNA_P Parameter: Timepoint (hr) Value: 6
  misc_feature: MA Experiment 108577 PARAMETER Experiment Name: At_42deg_Heat_cDNA_P Parameter: Tissue Value: Aerial
  misc_feature: MA Experiment ID: 20000144 Result: Up-regulated in Transcription
  misc_feature: MA Experiment 20000144 PARAMETER Experiment Name: At_42deg_Heat_cDNA_P Parameter: Temperature (deg C) Value: 42 vs. 22
  misc_feature: MA Experiment 20000144 PARAMETER Experiment Name: At_42deg_Heat_cDNA_P Parameter: Timepoint (hr) Value: 1
  misc_feature: MA Experiment 20000144 PARAMETER Experiment Name: At_42deg_Heat_cDNA_P Parameter: Tissue Value: Aerial
acttgagtttcgtcttccattcctgttttttttcagagaccggcaaaataaaaaaaaagaagatcgtacaactaaaaatacctcaaagaaggaagatacaaaagtagtaacctttgttggtgattgatactatatctgttgtgggttttagacaaagaccacgtctttgcagttgtagattggaattttccggatctttctgtaaatcgctttttctccgagcaacttttgtttggggttaagctcaaagaatccgttcttttcagtctttactccatctagggtaccacgattggatcggtttttatctgatgatttagtaacagagattttgaagaaaaagaaaaatgggagatactagtccaagaacatcagtctcaacagatggagacactgatcataataacctaatgttcgatgaagggcatttgggtatcggtgcttctgattctagtgaccgttcaaagagtaaaatggatcaaaagacgcttcgtaggctcgctcaaaaccgtgaggctgcaaggaaaagcagattgaggaagaaagcatatgttcagcagctagagaacagtcgattgaagctaacacaacttgagcaggagctacaaagagcacggcaacagggtgtctttatctcaagctctggagaccaagcccattctaccgctggagatggggcaatggcatttgatgtagaatacagacgatggcaggaagataaaaacagacagatgaaggagctgagttctgctatagattctcacgcgactgattctgagcttcggataattgtagatggagtaatagctcactatgaggagctttacaggataaaaggcaacgcagctaagagtgatgtcttccatttattatcagggatgtggaaaaccccagctgagagatgtttcttgtggctcggcggtttccgttcatcagaacttctcaagcgagtcagttggagcccttgacagaacaacaatcgctagacataaataacttgcaacagtcttctcagcaagcagaagatgctttgtctcaagggatggacaacttacagcaatcactcgctgatactttatcgagtgggactctcggttcaagttcatcagggaatgtagctagctacatgggtcagatggccatggcgatggggaagttaggtacccttgaaggatttatccgccaggctgataacttaaggctacaaacatatcaacagatggtgagactattaacaacccgacaatcggctcgtgctctccttgcagtacacaattatacattgcggttacgtgctcttagctctctatggcttgccagaccaagagagtgaaccatgactctattatacttcaacgaaggtccagaaaatttgagattcttagcataagatttgacgactttagacacgtagctcgtatacaagattatgattatactgttttgtgttgtaatgtttgtgtgtaatgaatgtatcttgaaaaaatcataaaagtcccgt

SEQ ID NO: 42265 - protein, 206 aa, Arabidopsis thaliana
  peptide (1)..(206): Ceres Seq. ID no. 12579982
  misc_feature (42)..(105): Pfam Name: bZIP transcription factor Pfam Description: bZIP transcription factor
  misc_feature (1)..(200): Homolog of NCBI NO: 422029 NR Description: transcription factor OBF3.2 - maize
  misc_feature (1)..(200): Homolog of NCBI NO: 34909110 NR Description: putative transcription factor HBP-1b
  misc_feature (1)..(200): Homolog of NCBI NO: 17025924 NR Description: bZIP transcription factor [Oryza sativa]
  misc_feature (1)..(200): Homolog of NCBI NO: 15148924 NR Description: TGA-type basic leucine zipper protein TGA2.1
  misc_feature (15)..(200): Homolog of NCBI NO: 903688 NR Description: leucine zipper
  misc_feature (15)..(200): Homolog of NCBI NO: 15795146 NR Description: leucine zipper transcription factor HBP-1b
  misc_feature (1)..(200): Homolog of NCBI NO: 15240216 NR Description: bZIP transcription factor, HBP-1b homolog
  misc_feature (1)..(200): Homolog of NCBI NO: 30682117 NR Description: bZIP transcription factor, TGA6 [Arabidopsis
  misc_feature (7)..(203): Homolog of NCBI NO: 1076423 NR Description: transcription factor OBF5 - Arabidopsis thaliana
  misc_feature (1)..(203): Homolog of NCBI NO: 15240217 NR Description: bZIP transcription factor, OBF5
MGDTSPRTSVSTDGDTDHNNLMFDEGHLGIGASDSSDRSKSKMDQKTLRRLAQNREAARKSRLRKKAYVQQLENSRLKLTQLEQELQRARQQGVFISSSGDQAHSTAGDGAMAFDVEYRRWQEDKNRQMKELSSAIDSHATDSELRIIVDGVIAHYEELYRIKGNAAKSDVFHLLSGMWKTPAERCFLWLGGFRSSELLKRVSWSP

SEQ ID NO: 42266 - protein, 185 aa, Arabidopsis thaliana
  peptide (1)..(185): Ceres Seq. ID no. 12579983
  misc_feature (21)..(84): Pfam Name: bZIP transcription factor Pfam Description: bZIP transcription factor
  misc_feature (1)..(179): Homolog of NCBI NO: 422029 NR Description: transcription factor OBF3.2 - maize
  misc_feature (1)..(179): Homolog of NCBI NO: 34909110 NR Description: putative transcription factor HBP-1b
  misc_feature (1)..(179): Homolog of NCBI NO: 17025924 NR Description: bZIP transcription factor [Oryza sativa]
  misc_feature (1)..(179): Homolog of NCBI NO: 15148924 NR Description: TGA-type basic leucine zipper protein TGA2.1
  misc_feature (1)..(179): Homolog of NCBI NO: 903688 NR Description: leucine zipper
  misc_feature (1)..(179): Homolog of NCBI NO: 15795146 NR Description: leucine zipper transcription factor HBP-1b
  misc_feature (1)..(179): Homolog of NCBI NO: 15240216 NR Description: bZIP transcription factor, HBP-1b homolog
  misc_feature (1)..(179): Homolog of NCBI NO: 30682117 NR Description: bZIP transcription factor, TGA6 [Arabidopsis
  misc_feature (1)..(182): Homolog of NCBI NO: 1076423 NR Description: transcription factor OBF5 - Arabidopsis thaliana
  misc_feature (1)..(182): Homolog of NCBI NO: 15240217 NR Description: bZIP transcription factor, OBF5
MFDEGHLGIGASDSSDRSKSKMDQKTLRRLAQNREAARKSRLRKKAYVQQLENSRLKLTQLEQELQRARQQGVFISSSGDQAHSTAGDGAMAFDVEYRRWQEDKNRQMKELSSAIDSHATDSELRIIVDGVIAHYEELYRIKGNAAKSDVFHLLSGMWKTPAERCFLWLGGFRSSELLKRVSWSP

SEQ ID NO: 42267 - protein, 164 aa, Arabidopsis thaliana
  peptide (1)..(164): Ceres Seq. ID no. 12579984
  misc_feature (1)..(63): Pfam Name: bZIP transcription factor Pfam Description: bZIP transcription factor
  misc_feature (1)..(158): Homolog of NCBI NO: 422029 NR Description: transcription factor OBF3.2 - maize
  misc_feature (1)..(158): Homolog of NCBI NO: 34909110 NR Description: putative transcription factor HBP-1b
  misc_feature (1)..(158): Homolog of NCBI NO: 17025924 NR Description: bZIP transcription factor [Oryza sativa]
  misc_feature (1)..(158): Homolog of NCBI NO: 15148924 NR Description: TGA-type basic leucine zipper protein TGA2.1
  misc_feature (1)..(158): Homolog of NCBI NO: 903688 NR Description: leucine zipper
  misc_feature (1)..(158): Homolog of NCBI NO: 15795146 NR Description: leucine zipper transcription factor HBP-1b
  misc_feature (1)..(158): Homolog of NCBI NO: 15240216 NR Description: bZIP transcription factor, HBP-1b homolog
  misc_feature (1)..(158): Homolog of NCBI NO: 30682117 NR Description: bZIP transcription factor, TGA6 [Arabidopsis
  misc_feature (1)..(161): Homolog of NCBI NO: 1076423 NR Description: transcription factor OBF5 - Arabidopsis thaliana
  misc_feature (1)..(161): Homolog of NCBI NO: 15240217 NR Description: bZIP transcription factor, OBF5
MDQKTLRRLAQNREAARKSRLRKKAYVQQLENSRLKLTQLEQELQRARQQGVFISSSGDQAHSTAGDGAMAFDVEYRRWQEDKNRQMKELSSAIDSHATDSELRIIVDGVIAHYEELYRIKGNAAKSDVFHLLSGMWKTPAERCFLWLGGFRSSELLKRVSWSP

SEQ ID NO: 42268 - DNA, 1224 bp, Arabidopsis thaliana
  misc_feature (1)..(1224): Ceres Seq. ID no. 12581246
  misc_feature: MA Experiment ID: 108434 Result: Up-regulated in Transcription
  misc_feature: MA Experiment 108434 PARAMETER Experiment Name: At_Root_Tips_cDNA_P Parameter: Tissue Value: Root Tips
  misc_feature: MA Experiment ID: 108461 Result: Up-regulated in Transcription
  misc_feature: MA Experiment 108461 PARAMETER Experiment Name: At_Germinating_Seeds_cDNA_P Parameter: Age (day) Value: 1 vs. 0
  misc_feature: MA Experiment 108461 PARAMETER Experiment Name: At_Germinating_Seeds_cDNA_P Parameter: Tissue Value: Germinating Seeds
  misc_feature: MA Experiment ID: 108463 Result: Up-regulated in Transcription
  misc_feature: MA Experiment 108463 PARAMETER Experiment Name: At_Germinating_Seeds_cDNA_P Parameter: Age (day) Value: 3 vs. 0
  misc_feature: MA Experiment 108463 PARAMETER Experiment Name: At_Germinating_Seeds_cDNA_P Parameter: Tissue Value: Germinating Seeds
  misc_feature: MA Experiment ID: 108464 Result: Up-regulated in Transcription
  misc_feature: MA Experiment 108464 PARAMETER Experiment Name: At_Germinating_Seeds_cDNA_P Parameter: Age (day) Value: 4 vs. 0
  misc_feature: MA Experiment 108464 PARAMETER Experiment Name: At_Germinating_Seeds_cDNA_P Parameter: Tissue Value: Germinating Seeds
  misc_feature: MA Experiment ID: 108489 Result: Down-regulated in Transcription
  misc_feature: MA Experiment ID: 20000070 Result: Down-regulated in Transcription
  misc_feature: MA Experiment 20000070 PARAMETER Experiment Name: At_100uM_ABA_Mutants_cDNA_P Parameter: Plant Line Value: CS24
  misc_feature: MA Experiment 20000070 PARAMETER Experiment Name: At_100uM_ABA_Mutants_cDNA_P Parameter: Timepoint (hr) Value: 6
  misc_feature: MA Experiment 20000070 PARAMETER Experiment Name: At_100uM_ABA_Mutants_cDNA_P Parameter: Tissue Value: Aerial
  misc_feature: MA Experiment 20000070 PARAMETER Experiment Name: At_100uM_ABA_Mutants_cDNA_P Parameter: Treatment Value: 100uM ABA vs. No Treatment
  misc_feature: MA Experiment ID: 20000072 Result: Down-regulated in Transcription
  misc_feature: MA Experiment 20000072 PARAMETER Experiment Name: At_100uM_ABA_Mutants_cDNA_P Parameter: Plant Line Value: CS8105
  misc_feature: MA Experiment 20000072 PARAMETER Experiment Name: At_100uM_ABA_Mutants_cDNA_P Parameter: Timepoint (hr) Value: 6
  misc_feature: MA Experiment 20000072 PARAMETER Experiment Name: At_100uM_ABA_Mutants_cDNA_P Parameter: Tissue Value: Aerial
  misc_feature: MA Experiment 20000072 PARAMETER Experiment Name: At_100uM_ABA_Mutants_cDNA_P Parameter: Treatment Value: 100uM ABA vs. No Treatment
  misc_feature: MA Experiment ID: 20000087 Result: Down-regulated in Transcription
  misc_feature: MA Experiment 20000087 PARAMETER Experiment Name: At_100uM_ABA_Mutants_cDNA_P Parameter: Plant Line Value: WS
  misc_feature: MA Experiment 20000087 PARAMETER Experiment Name: At_100uM_ABA_Mutants_cDNA_P Parameter: Timepoint (hr) Value: 6
  misc_feature: MA Experiment 20000087 PARAMETER Experiment Name: At_100uM_ABA_Mutants_cDNA_P Parameter: Tissue Value: Aerial
  misc_feature: MA Experiment 20000087 PARAMETER Experiment Name: At_100uM_ABA_Mutants_cDNA_P Parameter: Treatment Value: 100uM ABA vs. No Treatment
  misc_feature: MA Experiment ID: 20000088 Result: Down-regulated in Transcription
  misc_feature: MA Experiment 20000088 PARAMETER Experiment Name: At_100uM_ABA_Mutants_cDNA_P Parameter: Plant Line Value: Landsberg
  misc_feature: MA Experiment 20000088 PARAMETER Experiment Name: At_100uM_ABA_Mutants_cDNA_P Parameter: Timepoint (hr) Value: 6
  misc_feature: MA Experiment 20000088 PARAMETER Experiment Name: At_100uM_ABA_Mutants_cDNA_P Parameter: Tissue Value: Aerial
  misc_feature: MA Experiment 20000088 PARAMETER Experiment Name: At_100uM_ABA_Mutants_cDNA_P Parameter: Treatment Value: 100uM ABA vs. No Treatment
  misc_feature: MA Experiment ID: 20000090 Result: Down-regulated in Transcription
  misc_feature: MA Experiment ID: 20000111 Result: Down-regulated in Transcription
  misc_feature: MA Experiment 20000111 PARAMETER Experiment Name: At_42deg_Heat_cDNA_P Parameter: Temperature (deg C) Value: 42 vs. 22
  misc_feature: MA Experiment 20000111 PARAMETER Experiment Name: At_42deg_Heat_cDNA_P Parameter: Timepoint (hr) Value: 6
  misc_feature: MA Experiment 20000111 PARAMETER Experiment Name: At_42deg_Heat_cDNA_P Parameter: Tissue Value: Aerial
  misc_feature: MA Experiment ID: 20000113 Result: Down-regulated in Transcription
  misc_feature: MA Experiment 20000113 PARAMETER Experiment Name: At_42deg_Heat_cDNA_P Parameter: Temperature (deg C) Value: 42 vs. 22
  misc_feature: MA Experiment 20000113 PARAMETER Experiment Name: At_42deg_Heat_cDNA_P Parameter: Timepoint (hr) Value: 8
  misc_feature: MA Experiment 20000113 PARAMETER Experiment Name: At_42deg_Heat_cDNA_P Parameter: Tissue Value: Aerial
  misc_feature: MA Experiment ID: 20000185 Result: Up-regulated in Transcription
  misc_feature: MA Experiment 20000185 PARAMETER Experiment Name: At_Roots__P Parameter: Age (day) Value: 7 vs. 21
  misc_feature: MA Experiment 20000185 PARAMETER Experiment Name: At_Roots__P Parameter: Organism Value: A. thaliana
  misc_feature: MA Experiment 20000185 PARAMETER Experiment Name: At_Roots__P Parameter: Tissue Value: Roots vs. Whole Plant
  misc_feature: MA Experiment ID: 20000437 Result: Down-regulated in Transcription
  misc_feature: MA Experiment 20000437 PARAMETER Experiment Name: At_Drought_P Parameter: Age (day) Value: 8
  misc_feature: MA Experiment 20000437 PARAMETER Experiment Name: At_Drought_P Parameter: Organism Value: A. thaliana
  misc_feature: MA Experiment 20000437 PARAMETER Experiment Name: At_Drought_P Parameter: Plant Line Value: WS
  misc_feature: MA Experiment 20000437 PARAMETER Experiment Name: At_Drought_P Parameter: Timepoint (hr) Value: 24
  misc_feature: MA Experiment 20000437 PARAMETER Experiment Name: At_Drought_P Parameter: Tissue Value: Whole Plant
  misc_feature: MA Experiment 20000437 PARAMETER Experiment Name: At_Drought_P Parameter: Treatment Value: Drought vs. No Drought
  misc_feature: MA Experiment ID: 20000438 Result: Up-regulated in Transcription
  misc_feature: MA Experiment 20000438 PARAMETER Experiment Name: At_Shoots__P Parameter: Age (day) Value: 14
  misc_feature: MA Experiment 20000438 PARAMETER Experiment Name: At_Shoots__P Parameter: Tissue Value: Shoots vs. Whole Plant
  misc_feature: MA Experiment ID: 20000527 Result: Down-regulated in Transcription
  misc_feature: MA Experiment 20000527 PARAMETER Experiment Name: At_10percent_PEG_P Parameter: Age (day) Value: 20
  misc_feature: MA Experiment 20000527 PARAMETER Experiment Name: At_10percent_PEG_P Parameter: Organism Value: A. thaliana
  misc_feature: MA Experiment 20000527 PARAMETER Experiment Name: At_10percent_PEG_P Parameter: Plant Line Value: WS
  misc_feature: MA Experiment 20000527 PARAMETER Experiment Name: At_10percent_PEG_P Parameter: Timepoint (day) Value: 20
  misc_feature: MA Experiment 20000527 PARAMETER Experiment Name: At_10percent_PEG_P Parameter: Tissue Value: Whole Plant
  misc_feature: MA Experiment 20000527 PARAMETER Experiment Name: At_10percent_PEG_P Parameter: Treatment Value: 10percent PEG vs. No Treatment
  misc_feature: MA Experiment ID: 20000573 Result: Down-regulated in Transcription
  misc_feature: MA Experiment 20000573 PARAMETER Experiment Name: At_100uM_ABA_Mutants__P Parameter: Organism Value: A. thaliana
  misc_feature: MA Experiment 20000573 PARAMETER Experiment Name: At_100uM_ABA_Mutants__P Parameter: Plant Line Value: CS22 vs. Ler wt
  misc_feature: MA Experiment 20000573 PARAMETER Experiment Name: At_100uM_ABA_Mutants__P Parameter: Timepoint (hr) Value: N/A
  misc_feature: MA Experiment 20000573 PARAMETER Experiment Name: At_100uM_ABA_Mutants__P Parameter: Tissue Value: Whole Plant
  misc_feature: MA Experiment 20000573 PARAMETER Experiment Name: At_100uM_ABA_Mutants__P Parameter: Treatment Value: None
  misc_feature: MA Experiment ID: 20000574 Result: Down-regulated in Transcription
  misc_feature: MA Experiment 20000574 PARAMETER Experiment Name: At_100uM_ABA_Mutants__P Parameter: Organism Value: A. thaliana
  misc_feature: MA Experiment 20000574 PARAMETER Experiment Name: At_100uM_ABA_Mutants__P Parameter: Plant Line Value: CS23 vs. Ler wt
  misc_feature: MA Experiment 20000574 PARAMETER Experiment Name: At_100uM_ABA_Mutants__P Parameter: Timepoint (hr) Value: N/A
  misc_feature: MA Experiment 20000574 PARAMETER Experiment Name: At_100uM_ABA_Mutants__P Parameter: Tissue Value: Whole Plant
  misc_feature: MA Experiment 20000574 PARAMETER Experiment Name: At_100uM_ABA_Mutants__P Parameter: Treatment Value: None
  misc_feature: MA Experiment ID: 20000794 Result: Down-regulated in Transcription
  misc_feature: MA Experiment 20000794 PARAMETER Experiment Name: At_Petals_P Parameter: Age (day) Value: 23-25 days
  misc_feature: MA Experiment 20000794 PARAMETER Experiment Name: At_Petals_P Parameter: Plant Line Value: WS
  misc_feature: MA Experiment 20000794 PARAMETER Experiment Name: At_Petals_P Parameter: Tissue Value: Petals vs. Whole plant
  misc_feature: MA Experiment ID: 20001450 Result: Up-regulated in Transcription
  misc_feature: MA Experiment 20001450 PARAMETER Experiment Name: At_Far-red-induction_P Parameter: Age (day) Value: 7
  misc_feature: MA Experiment 20001450 PARAMETER Experiment Name: At_Far-red-induction_P Parameter: Light Value: Far-red vs. White
  misc_feature: MA Experiment 20001450 PARAMETER Experiment Name: At_Far-red-induction_P Parameter: Organism Value: A. thaliana
  misc_feature: MA Experiment 20001450 PARAMETER Experiment Name: At_Far-red-induction_P Parameter: Plant Line Value: Columbia
  misc_feature: MA Experiment 20001450 PARAMETER Experiment Name: At_Far-red-induction_P Parameter: Timepoint (hr) Value: 8
  misc_feature: MA Experiment 20001450 PARAMETER Experiment Name: At_Far-red-induction_P Parameter: Tissue Value: Whole Plant
  misc_feature: MA Experiment ID: 20001555 Result: Down-regulated in Transcription
  misc_feature: MA Experiment 20001555 PARAMETER Experiment Name: At_Drought_Soil_Dry_P Parameter: Age (day) Value: 24
  misc_feature: MA Experiment 20001555 PARAMETER Experiment Name: At_Drought_Soil_Dry_P Parameter: Organism Value: A. thaliana
  misc_feature: MA Experiment 20001555 PARAMETER Experiment Name: At_Drought_Soil_Dry_P Parameter: Plant Line Value: WS
  misc_feature: MA Experiment 20001555 PARAMETER Experiment Name: At_Drought_Soil_Dry_P Parameter: Post Timepoint (hr) Value: None
  misc_feature: MA Experiment 20001555 PARAMETER Experiment Name: At_Drought_Soil_Dry_P Parameter: Post-Treatment Value: None
  misc_feature: MA Experiment 20001555 PARAMETER Experiment Name: At_Drought_Soil_Dry_P Parameter: Timepoint (day) Value: 10
  misc_feature: MA Experiment 20001555 PARAMETER Experiment Name: At_Drought_Soil_Dry_P Parameter: Treatment Value: Drought vs. No Drought
  misc_feature: MA Experiment ID: 20001556 Result: Down-regulated in Transcription
  misc_feature: MA Experiment 20001556 PARAMETER Experiment Name: At_Drought_Soil_Dry_P Parameter: Age (day) Value: 26
  misc_feature: MA Experiment 20001556 PARAMETER Experiment Name: At_Drought_Soil_Dry_P Parameter: Organism Value: A. thaliana
  misc_feature: MA Experiment 20001556 PARAMETER Experiment Name: At_Drought_Soil_Dry_P Parameter: Plant Line Value: WS
  misc_feature: MA Experiment 20001556 PARAMETER Experiment Name: At_Drought_Soil_Dry_P Parameter: Post Timepoint (hr) Value: None
  misc_feature: MA Experiment 20001556 PARAMETER Experiment Name: At_Drought_Soil_Dry_P Parameter: Post-Treatment Value: None
  misc_feature: MA Experiment 20001556 PARAMETER Experiment Name: At_Drought_Soil_Dry_P Parameter: Timepoint (day) Value: 12
  misc_feature: MA Experiment 20001556 PARAMETER Experiment Name: At_Drought_Soil_Dry_P Parameter: Treatment Value: Drought vs. No Drought
  misc_feature: MA Experiment ID: 20001557 Result: Down-regulated in Transcription
  misc_feature: MA Experiment 20001557 PARAMETER Experiment Name: At_Drought_Soil_Dry_P Parameter: Age (day) Value: 27
  misc_feature: MA Experiment 20001557 PARAMETER Experiment Name: At_Drought_Soil_Dry_P Parameter: Organism Value: A. thaliana
  misc_feature: MA Experiment 20001557 PARAMETER Experiment Name: At_Drought_Soil_Dry_P Parameter: Plant Line Value: WS
  misc_feature: MA Experiment 20001557 PARAMETER Experiment Name: At_Drought_Soil_Dry_P Parameter: Post Timepoint (hr) Value: 3
  misc_feature: MA Experiment 20001557 PARAMETER Experiment Name: At_Drought_Soil_Dry_P Parameter: Post-Treatment Value: Re-Water vs. No Drought
  misc_feature: MA Experiment 20001557 PARAMETER Experiment Name: At_Drought_Soil_Dry_P Parameter: Timepoint (day) Value: 13
  misc_feature: MA Experiment 20001557 PARAMETER Experiment Name: At_Drought_Soil_Dry_P Parameter: Treatment Value: Drought vs. No Drought
  misc_feature: MA Experiment ID: 20001558 Result: Down-regulated in Transcription
  misc_feature: MA Experiment 20001558 PARAMETER Experiment Name: At_Drought_Soil_Dry_P Parameter: Age (day) Value: 27
  misc_feature: MA Experiment 20001558 PARAMETER Experiment Name: At_Drought_Soil_Dry_P Parameter: Organism Value: A. thaliana
  misc_feature: MA Experiment 20001558 PARAMETER Experiment Name: At_Drought_Soil_Dry_P Parameter: Plant Line Value: WS
  misc_feature: MA Experiment 20001558 PARAMETER Experiment Name: At_Drought_Soil_Dry_P Parameter: Post Timepoint (hr) Value: 6
  misc_feature: MA Experiment 20001558 PARAMETER Experiment Name: At_Drought_Soil_Dry_P Parameter: Post-Treatment Value: Re-Water vs. No Drought
  misc_feature: MA Experiment 20001558 PARAMETER Experiment Name: At_Drought_Soil_Dry_P Parameter: Timepoint (day) Value: 13
  misc_feature: MA Experiment 20001558 PARAMETER Experiment Name: At_Drought_Soil_Dry_P Parameter: Treatment Value: Drought vs. No Drought
  misc_feature: MA Experiment ID: 20001559 Result: Down-regulated in Transcription
  misc_feature: MA Experiment 20001559 PARAMETER Experiment Name: At_Drought_Soil_Dry_P Parameter: Age (day) Value: 28
  misc_feature: MA Experiment 20001559 PARAMETER Experiment Name: At_Drought_Soil_Dry_P Parameter: Organism Value: A. thaliana
  misc_feature: MA Experiment 20001559 PARAMETER Experiment Name: At_Drought_Soil_Dry_P Parameter: Plant Line Value: WS
  misc_feature: MA Experiment 20001559 PARAMETER Experiment Name: At_Drought_Soil_Dry_P Parameter: Post Timepoint (hr) Value: 29
  misc_feature: MA Experiment 20001559 PARAMETER Experiment Name: At_Drought_Soil_Dry_P Parameter: Post-Treatment Value: Re-Water vs. No Drought
  misc_feature: MA Experiment 20001559 PARAMETER Experiment Name: At_Drought_Soil_Dry_P Parameter: Timepoint (day) Value: 14
  misc_feature: MA Experiment 20001559 PARAMETER Experiment Name: At_Drought_Soil_Dry_P Parameter: Treatment Value: Drought vs. No Drought
  misc_feature: MA Experiment ID: 20001560 Result: Down-regulated in Transcription
  misc_feature: MA Experiment 20001560 PARAMETER Experiment Name: At_Drought_Soil_Dry_P Parameter: Age (day) Value: 28
  misc_feature: MA Experiment 20001560 PARAMETER Experiment Name: At_Drought_Soil_Dry_P Parameter: Organism Value: A. thaliana
  misc_feature: MA Experiment 20001560 PARAMETER Experiment Name: At_Drought_Soil_Dry_P Parameter: Plant Line Value: WS
  misc_feature: MA Experiment 20001560 PARAMETER Experiment Name: At_Drought_Soil_Dry_P Parameter: Post Timepoint (hr) Value: None
  misc_feature: MA Experiment 20001560 PARAMETER Experiment Name: At_Drought_Soil_Dry_P Parameter: Post-Treatment Value: None
  misc_feature: MA Experiment 20001560 PARAMETER Experiment Name: At_Drought_Soil_Dry_P Parameter: Timepoint (day) Value: 14
  misc_feature: MA Experiment 20001560 PARAMETER Experiment Name: At_Drought_Soil_Dry_P Parameter: Treatment Value: Drought vs. No Drought
  misc_feature: MA Experiment ID: 20001905 Result: Down-regulated in Transcription
  misc_feature: MA Experiment 20001905 PARAMETER Experiment Name: At_Drought_Reproduction_P Parameter: Age (day) Value: 40
  misc_feature: MA Experiment 20001905 PARAMETER Experiment Name: At_Drought_Reproduction_P Parameter: Organism Value: A. thaliana
  misc_feature: MA Experiment 20001905 PARAMETER Experiment Name: At_Drought_Reproduction_P Parameter: Plant Line Value: WS
  misc_feature: MA Experiment 20001905 PARAMETER Experiment Name: At_Drought_Reproduction_P Parameter: Timepoint (day) Value: 10
  misc_feature: MA Experiment 20001905 PARAMETER Experiment Name: At_Drought_Reproduction_P Parameter: Tissue Value: Rosettes
  misc_feature: MA Experiment 20001905 PARAMETER Experiment Name: At_Drought_Reproduction_P Parameter: Treatment Value: Drought vs. No Drought
actaataattcgtttaaacgcaaagtttcagaaaacagaccaacatggaagatcggtgcttgatcaagaacgatgtcactgaattgattggtaacacaccaatggtgtatctgaacaatgttgttgatggttgcgtggctcgtatcgctgcaaagcttgagatgatggagccttgttctagcgtcaaagacagaatcgcgtatagtatgatcaaagatgcagaagaaaaaggattgattactcccggaaagagtacattgatagagccaactgctggtaacaccgggattggtttagcttgcatgggagctgcaagaggctataaagtgatccttgtgatgccttcaactatgagcttagagagaagaatcattctgagggcactaggtgcagagcttcatctctcggaccagcgcataggccttaaaggaatgttggagaaaactgaagcgattttaagcaaaactcctggtggttacattccacaacaatttgaaaatcctgcaaaccccgagattcattaccgaaccacgggaccggaaatatggagagattcagccgggaaagtagatatattggtcgctggcgtagggactggtggaactgctactggagtagggaagttcctcaaggagcagaacaaagacatcaaggtttgtgtggtggaaccagtagaaagtccggtacttagcggaggtcaaccaggtccacatttgattcagggaattggctctggtatcgtcccattcaatttggacttaaccattgttgatgaaattattcaagtggcaggtgaagaggctattgaaacagccaagcttcttgccctcaaagaaggattactggtgggaatatcctctggagccgcagcagcggctgcgttaaaggttgcaaagcggccagaaaacgcggggaaactcattgtggtggtttttcctagtggaggagaacgttatttatcgactaaactgttcgattcgattagatatgaagcagagaatttgcctattgaatgaatgttggacgtgtgccggtttcgtgtgtaataagagacgttcgttccaagagtccaagatttcaatttgcttattactggtcaatgtgaaatgtataaaaagttgcatattcgattatgaataattttagttgactacttccattgcaattcttggtcgaaaacatgaattttaataaaacagaataatctacatgaacgtttcattg

SEQ ID NO: 42269 - protein, 323 aa, Arabidopsis thaliana; identical to SEQ ID NO: 41227
  peptide (1)..(323): Ceres Seq. ID no. 12581247
  misc_feature (11)..(300): Pfam Name: Pyridoxal-phosphate dependent enzyme Pfam Description: Pyridoxal-phosphate dependent enzyme
  misc_feature (1)..(323): Homolog of NCBI NO: 2493895 NR Description: Cysteine synthase (O-acetylserine sulfhydrylase)
  misc_feature (7)..(323): Homolog of NCBI NO: 38350579 NR Description: cysteine synthase [Nicotiana plumbaginifolia]
  misc_feature (2)..(323): Homolog of NCBI NO: 18397061 NR Description: putative cysteine synthase
  misc_feature (2)..(323): Homolog of NCBI NO: 12322845 NR Description: putative cysteine synthase; 39489-37437
  misc_feature (2)..(323): Homolog of NCBI NO: 21593263 NR Description: putative cysteine synthase [Arabidopsis thaliana]
  misc_feature (1)..(323): Homolog of NCBI NO: 15241112 NR Description: cysteine synthase - like
  misc_feature (1)..(323): Homolog of NCBI NO: 2245144 NR Description: O-acetylserine(thiol) lyase [Brassica juncea]
  misc_feature (1)..(323): Homolog of NCBI NO: 21553635 NR Description: cysteine synthase [Arabidopsis thaliana]
  misc_feature (1)..(323): Homolog of NCBI NO: 15241111 NR Description: cysteine synthase

SEQ ID NO: 42270 - protein, 304 aa, Arabidopsis thaliana; identical to SEQ ID NO: 41228
  peptide (1)..(304): Ceres Seq. ID no. 12581248
  misc_feature (1)..(281): Pfam Name: Pyridoxal-phosphate dependent enzyme Pfam Description: Pyridoxal-phosphate dependent enzyme
  misc_feature (1)..(304): Homolog of NCBI NO: 2493895 NR Description: Cysteine synthase (O-acetylserine sulfhydrylase)
  misc_feature (1)..(304): Homolog of NCBI NO: 38350579 NR Description: cysteine synthase [Nicotiana plumbaginifolia]
  misc_feature (1)..(304): Homolog of NCBI NO: 18397061 NR Description: putative cysteine synthase
  misc_feature (1)..(304): Homolog of NCBI NO: 12322845 NR Description: putative cysteine synthase; 39489-37437
  misc_feature (1)..(304): Homolog of NCBI NO: 21593263 NR Description: putative cysteine synthase [Arabidopsis thaliana]
  misc_feature (1)..(304): Homolog of NCBI NO: 15241112 NR Description: cysteine synthase - like
  misc_feature (1)..(304): Homolog of NCBI NO: 2245144 NR Description: O-acetylserine(thiol) lyase [Brassica juncea]
  misc_feature (1)..(304): Homolog of NCBI NO: 21553635 NR Description: cysteine synthase [Arabidopsis thaliana]
  misc_feature (1)..(304): Homolog of NCBI NO: 15241111 NR Description: cysteine synthase

SEQ ID NO: 42271 - protein, 284 aa, Arabidopsis thaliana
  peptide (1)..(284): Ceres Seq. ID no. 12581249
  misc_feature (1)..(261): Pfam Name: Pyridoxal-phosphate dependent enzyme Pfam Description: Pyridoxal-phosphate dependent enzyme
  misc_feature (1)..(284): Homolog of NCBI NO: 2493895 NR Description: Cysteine synthase (O-acetylserine sulfhydrylase)
  misc_feature (1)..(284): Homolog of NCBI NO: 38350579 NR Description: cysteine synthase [Nicotiana plumbaginifolia]
  misc_feature (1)..(284): Homolog of NCBI NO: 18397061 NR Description: putative cysteine synthase
  misc_feature (1)..(284): Homolog of NCBI NO: 12322845 NR Description: putative cysteine synthase; 39489-37437
  misc_feature (1)..(284): Homolog of NCBI NO: 21593263 NR Description: putative cysteine synthase [Arabidopsis thaliana]
  misc_feature (1)..(284): Homolog of NCBI NO: 15241112 NR Description: cysteine synthase - like
  misc_feature (1)..(284): Homolog of NCBI NO: 2245144 NR Description: O-acetylserine(thiol) lyase [Brassica juncea]
  misc_feature (1)..(284): Homolog of NCBI NO: 21553635 NR Description: cysteine synthase [Arabidopsis thaliana]
  misc_feature (1)..(284): Homolog of NCBI NO: 15241111 NR Description: cysteine synthase
MMEPCSSVKDRIAYSMIKDAEEKGLITPGKSTLIEPTAGNTGIGLACMGAARGYKVILVMPSTMSLERRIILRALGAELHLSDQRIGLKGMLEKTEAILSKTPGGYIPQQFENPANPEIHYRTTGPEIWRDSAGKVDILVAGVGTGGTATGVGKFLKEQNKDIKVCVVEPVESPVLSGGQPGPHLIQGIGSGIVPFNLDLTIVDEIIQVAGEEAIETAKLLALKEGLLVGISSGAAAAAALKVAKRPENAGKLIVVVFPSGGERYLSTKLFDSIRYEAENLPIE

SEQ ID NO: 42272 - DNA, 1318 bp, Arabidopsis thaliana
  misc_feature (1)..(1318): Ceres Seq. ID no. 12330261
  misc_feature: MA Experiment ID: 108576 Result: Up-regulated in Transcription
  misc_feature: MA Experiment 108576 PARAMETER Experiment Name: At_42deg_Heat_cDNA_P Parameter: Temperature (deg C) Value: 42 vs. 22
  misc_feature: MA Experiment 108576 PARAMETER Experiment Name: At_42deg_Heat_cDNA_P Parameter: Timepoint (hr) Value: 1
  misc_feature: MA Experiment 108576 PARAMETER Experiment Name: At_42deg_Heat_cDNA_P Parameter: Tissue Value: Aerial
  misc_feature: MA Experiment ID: 20000093 Result: Up-regulated in Transcription
  misc_feature: MA Experiment 20000093 PARAMETER Experiment Name: At_42deg_Heat_cDNA_P Parameter: Temperature (deg C) Value: 42 vs. 22
  misc_feature: MA Experiment 20000093 PARAMETER Experiment Name: At_42deg_Heat_cDNA_P Parameter: Timepoint (hr) Value: 0.5
  misc_feature: MA Experiment 20000093 PARAMETER Experiment Name: At_42deg_Heat_cDNA_P Parameter: Tissue Value: Aerial
  misc_feature: MA Experiment ID: 20000171 Result: Up-regulated in Transcription
  misc_feature: MA Experiment 20000171 PARAMETER Experiment Name: At_42deg_Heat_P Parameter: Age (day) Value: 14
  misc_feature: MA Experiment 20000171 PARAMETER Experiment Name: At_42deg_Heat_P Parameter: Organism Value: A. thaliana
  misc_feature: MA Experiment 20000171 PARAMETER Experiment Name: At_42deg_Heat_P Parameter: Plant Line Value: WS
  misc_feature: MA Experiment 20000171 PARAMETER Experiment Name: At_42deg_Heat_P Parameter: Temperature (deg C) Value: 42 vs. 22
  misc_feature: MA Experiment 20000171 PARAMETER Experiment Name: At_42deg_Heat_P Parameter: Timepoint (hr) Value: 1
  misc_feature: MA Experiment 20000171 PARAMETER Experiment Name: At_42deg_Heat_P Parameter: Tissue Value: Aerial
  misc_feature: MA Experiment ID: 20000173 Result: Up-regulated in Transcription
  misc_feature: MA Experiment 20000173 PARAMETER Experiment Name: At_42deg_Heat_P Parameter: Age (day) Value: 14
  misc_feature: MA Experiment 20000173 PARAMETER Experiment Name: At_42deg_Heat_P Parameter: Organism Value: A. thaliana
  misc_feature: MA Experiment 20000173 PARAMETER Experiment Name: At_42deg_Heat_P Parameter: Plant Line Value: WS
  misc_feature: MA Experiment 20000173 PARAMETER Experiment Name: At_42deg_Heat_P Parameter: Temperature (deg C) Value: 42 vs. 22
  misc_feature: MA Experiment 20000173 PARAMETER Experiment Name: At_42deg_Heat_P Parameter: Timepoint (hr) Value: 6
  misc_feature: MA Experiment 20000173 PARAMETER Experiment Name: At_42deg_Heat_P Parameter: Tissue Value: Aerial
aaaaataataagctttggtaaaaccctaaactttcgtttccaagatgcaatttctagcttctctcgtttccaattccagaaagtttggtcggagatgggatcgagctctctcgttgcatcatttctcttcgaatgcgacaccagcttcgatatcaaatccagcgttcgtcgagtttctcagggacaatgggttccagaaacctctagcaattgccatcgcaatgcgttaccctaacctcaaatccctagaacaacctcggtcagtgattcaaatgcttaaaagttacagtttttccgatacccagatccagaaatcgatccgggtccatcctcgaatgatgttctacaacgtggagaaaattctagaacccaaacttcgattctttaaagatattggatttactggctctggtcttggtaagttcgtctctcaaaactcatcagtcgttggtgtaagtctagtgaagaaattgattcctaccgttgagattctgaaatcgattgttgccccgaaacatgaagaccttcctgtcattcttagtagatgtggttggcttcttctcagtagagaccctaacttgtttctcttaccaaacatctcataccttgaaacctgtggaattgttgggtctcagcttgcttctttacttagaagacagccaagaatcttcaatctctctgaggaaaaactcagaggatatgtctctcgtgctttggatcttggttttactttgaactcgaggatgcttgtgcacgctattatctcgttaagttctttgagcgagaaaacgtttgatcgaaaggttaagttgtttatggctaatggattctctgaagatgagataacagatattatacgaagatctccaggtttgatccggtgctcagaagataagcttacactggggtttgagttttacttgaagagaatggggatagagagggaagctttggcgaaacgtccttgtgtgttgtcgtataatcttgagaagagggtgattcctaggcttaaagttttgcagatcttgagggaaaaagggttgttgttaaaagaggagaagaagaagaagaacatggttggcattgttgagatgactgaggaagcttttctagagaaatatgttgtgagatttggagatgagattgctgaggaactgctggttgcttacaagtgcgtgtgtttagtcgatgaaacgctacttgatcgtatcaagatctaattgtagatttcacaagtccaaacttgaaattttgtcattgtatccaaacttcgctcatccgtaactgtgttgaacattataatttggaagtaactctt

SEQ ID NO: 42273 - protein, 391 aa, Arabidopsis thaliana
  peptide (1)..(391): Ceres Seq. ID no. 12330262
  misc_feature (75)..(357): Pfam Name: mTERF Pfam Description: mTERF
  misc_feature (42)..(347): Homolog of NCBI NO: 15237856 NR Description: putative protein; protein id: At5g23930.1
  misc_feature (27)..(324): Homolog of NCBI NO: 15232683 NR Description: putative protein
  misc_feature (73)..(376): Homolog of NCBI NO: 18412304 NR Description: expressed protein
  misc_feature (31)..(361): Homolog of NCBI NO: 39545750 NR Description: OSJNBb0034I13.16 [Oryza sativa (japonica
  misc_feature (28)..(378): Homolog of NCBI NO: 34394750 NR Description: unknown protein [Oryza sativa (japonica
  misc_feature (61)..(369): Homolog of NCBI NO: 25511650 NR Description: T22I11.2 protein - Arabidopsis thaliana
  misc_feature (61)..(369): Homolog of NCBI NO: 15218140 NR Description: hypothetical protein; protein id: At1g21150.1
  misc_feature (1)..(380): Homolog of NCBI NO: 18415647 NR Description: expressed protein
  misc_feature (1)..(391): Homolog of NCBI NO: 15238313 NR Description: putative protein
  misc_feature (1)..(391): Homolog of NCBI NO: 21553423 NR Description: unknown [Arabidopsis thaliana]
MQFLASLVSNSRKFGRRWDRALSLHHFSSNATPASISNPAFVEFLRDNGFQKPLAIAIAMRYPNLKSLEQPRSVIQMLKSYSFSDTQIQKSIRVHPRMMFYNVEKILEPKLRFFKDIGFTGSGLGKFVSQNSSVVGVSLVKKLIPTVEILKSIVAPKHEDLPVILSRCGWLLLSRDPNLFLLPNISYLETCGIVGSQLASLLRRQPRIFNLSEEKLRGYVSRALDLGFTLNSRMLVHAIISLSSLSEKTFDRKVKLFMANGFSEDEITDIIRRSPGLIRCSEDKLTLGFEFYLKRMGIEREALAKRPCVLSYNLEKRVIPRLKVLQILREKGLLLKEEKKKKNMVGIVEMTEEAFLEKYVVRFGDEIAEELLVAYKCVCLVDETLLDRIKI

SEQ ID NO: 42274 - protein, 332 aa, Arabidopsis thaliana
  peptide (1)..(332): Ceres Seq. ID no. 12330263
  misc_feature (16)..(298): Pfam Name: mTERF Pfam Description: mTERF
  misc_feature (1)..(288): Homolog of NCBI NO: 15237856 NR Description: putative protein; protein id: At5g23930.1
  misc_feature (1)..(265): Homolog of NCBI NO: 15232683 NR Description: putative protein
  misc_feature (14)..(317): Homolog of NCBI NO: 18412304 NR Description: expressed protein
  misc_feature (1)..(302): Homolog of NCBI NO: 39545750 NR Description: OSJNBb0034I13.16 [Oryza sativa (japonica
  misc_feature (1)..(319): Homolog of NCBI NO: 34394750 NR Description: unknown protein [Oryza sativa (japonica
  misc_feature (2)..(310): Homolog of NCBI NO: 25511650 NR Description: T22I11.2 protein - Arabidopsis thaliana
  misc_feature (2)..(310): Homolog of NCBI NO: 15218140 NR Description: hypothetical protein; protein id: At1g21150.1
  misc_feature (1)..(321): Homolog of NCBI NO: 18415647 NR Description: expressed protein
  misc_feature (1)..(332): Homolog of NCBI NO: 15238313 NR Description: putative protein
  misc_feature (1)..(332): Homolog of NCBI NO: 21553423 NR Description: unknown [Arabidopsis thaliana]
MRYPNLKSLEQPRSVIQMLKSYSFSDTQIQKSIRVHPRMMFYNVEKILEPKLRFFKDIGFTGSGLGKFVSQNSSVVGVSLVKKLIPTVEILKSIVAPKHEDLPVILSRCGWLLLSRDPNLFLLPNISYLETCGIVGSQLASLLRRQPRIFNLSEEKLRGYVSRALDLGFTLNSRMLVHAIISLSSLSEKTFDRKVKLFMANGFSEDEITDIIRRSPGLIRCSEDKLTLGFEFYLKRMGIEREALAKRPCVLSYNLEKRVIPRLKVLQILREKGLLLKEEKKKKNMVGIVEMTEEAFLEKYVVRFGDEIAEELLVAYKCVCLVDETLLDRIKI

SEQ ID NO: 42275 - protein, 315 aa, Arabidopsis thaliana
  peptide (1)..(315): Ceres Seq. ID no. 12330264
  misc_feature (1)..(281): Pfam Name: mTERF Pfam Description: mTERF
  misc_feature (1)..(271): Homolog of NCBI NO: 15237856 NR Description: putative protein; protein id: At5g23930.1
  misc_feature (1)..(248): Homolog of NCBI NO: 15232683 NR Description: putative protein
  misc_feature (1)..(300): Homolog of NCBI NO: 18412304 NR Description: expressed protein
  misc_feature (1)..(285): Homolog of NCBI NO: 39545750 NR Description: OSJNBb0034I13.16 [Oryza sativa (japonica
  misc_feature (1)..(302): Homolog of NCBI NO: 34394750 NR Description: unknown protein [Oryza sativa (japonica
  misc_feature (1)..(293): Homolog of NCBI NO: 25511650 NR Description: T22I11.2 protein - Arabidopsis thaliana
  misc_feature (1)..(293): Homolog of NCBI NO: 15218140 NR Description: hypothetical protein; protein id: At1g21150.1
  misc_feature (1)..(304): Homolog of NCBI NO: 18415647 NR Description: expressed protein
  misc_feature (1)..(315): Homolog of NCBI NO: 15238313 NR Description: putative protein
  misc_feature (1)..(315): Homolog of NCBI NO: 21553423 NR Description: unknown [Arabidopsis thaliana]
MLKSYSFSDTQIQKSIRVHPRMMFYNVEKILEPKLRFFKDIGFTGSGLGKFVSQNSSVVGVSLVKKLIPTVEILKSIVAPKHEDLPVILSRCGWLLLSRDPNLFLLPNISYLETCGIVGSQLASLLRRQPRIFNLSEEKLRGYVSRALDLGFTLNSRMLVHAIISLSSLSEKTFDRKVKLFMANGFSEDEITDIIRRSPGLIRCSEDKLTLGFEFYLKRMGIEREALAKRPCVLSYNLEKRVIPRLKVLQILREKGLLLKEEKKKKNMVGIVEMTEEAFLEKYVVRFGDEIAEELLVAYKCVCLVDETLLDRIKI

SEQ ID NO: 42276 - DNA, 1415 bp, Arabidopsis thaliana
  misc_feature (1)..(1415): Ceres Seq. ID no. 12329339
  misc_feature: MA Experiment ID: 20000089 Result: Down-regulated in Transcription
  misc_feature: MA Experiment ID: 20000111 Result: Up-regulated in Transcription
  misc_feature: MA Experiment 20000111 PARAMETER Experiment Name: At_42deg_Heat_cDNA_P Parameter: Temperature (deg C) Value: 42 vs. 22
  misc_feature: MA Experiment 20000111 PARAMETER Experiment Name: At_42deg_Heat_cDNA_P Parameter: Timepoint (hr) Value: 6
  misc_feature: MA Experiment 20000111 PARAMETER Experiment Name: At_42deg_Heat_cDNA_P Parameter: Tissue Value: Aerial
  misc_feature: MA Experiment ID: 20000113 Result: Up-regulated in Transcription
  misc_feature: MA Experiment 20000113 PARAMETER Experiment Name: At_42deg_Heat_cDNA_P Parameter: Temperature (deg C) Value: 42 vs. 22
  misc_feature: MA Experiment 20000113 PARAMETER Experiment Name: At_42deg_Heat_cDNA_P Parameter: Timepoint (hr) Value: 8
  misc_feature: MA Experiment 20000113 PARAMETER Experiment Name: At_42deg_Heat_cDNA_P Parameter: Tissue Value: Aerial
  misc_feature: MA Experiment ID: 20000144 Result: Up-regulated in Transcription
  misc_feature: MA Experiment 20000144 PARAMETER Experiment Name: At_42deg_Heat_cDNA_P Parameter: Temperature (deg C) Value: 42 vs. 22
  misc_feature: MA Experiment 20000144 PARAMETER Experiment Name: At_42deg_Heat_cDNA_P Parameter: Timepoint (hr) Value: 1
  misc_feature: MA Experiment 20000144 PARAMETER Experiment Name: At_42deg_Heat_cDNA_P Parameter: Tissue Value: Aerial
  misc_feature: MA Experiment ID: 20000171 Result: Up-regulated in Transcription
  misc_feature: MA Experiment 20000171 PARAMETER Experiment Name: At_42deg_Heat_P Parameter: Age (day) Value: 14
  misc_feature: MA Experiment 20000171 PARAMETER Experiment Name: At_42deg_Heat_P Parameter: Organism Value: A. thaliana
  misc_feature: MA Experiment 20000171 PARAMETER Experiment Name: At_42deg_Heat_P Parameter: Plant Line Value: WS
  misc_feature: MA Experiment 20000171 PARAMETER Experiment Name: At_42deg_Heat_P Parameter: Temperature (deg C) Value: 42 vs. 22
  misc_feature: MA Experiment 20000171 PARAMETER Experiment Name: At_42deg_Heat_P Parameter: Timepoint (hr) Value: 1
  misc_feature: MA Experiment 20000171 PARAMETER Experiment Name: At_42deg_Heat_P Parameter: Tissue Value: Aerial
  misc_feature: MA Experiment ID: 20000173 Result: Up-regulated in Transcription
  misc_feature: MA Experiment 20000173 PARAMETER Experiment Name: At_42deg_Heat_P Parameter: Age (day) Value: 14
  misc_feature: MA Experiment 20000173 PARAMETER Experiment Name: At_42deg_Heat_P Parameter: Organism Value: A. thaliana
  misc_feature: MA Experiment 20000173 PARAMETER Experiment Name: At_42deg_Heat_P Parameter: Plant Line Value: WS
  misc_feature: MA Experiment 20000173 PARAMETER Experiment Name: At_42deg_Heat_P Parameter: Temperature (deg C) Value: 42 vs. 22
  misc_feature: MA Experiment 20000173 PARAMETER Experiment Name: At_42deg_Heat_P Parameter: Timepoint (hr) Value: 6
  misc_feature: MA Experiment 20000173 PARAMETER Experiment Name: At_42deg_Heat_P Parameter: Tissue Value: Aerial
  misc_feature: MA Experiment ID: 20000184 Result: Down-regulated in Transcription
  misc_feature: MA Experiment 20000184 PARAMETER Experiment Name: At_Shoots__P Parameter: Age (day) Value: 7
  misc_feature: MA Experiment 20000184 PARAMETER Experiment Name: At_Shoots__P Parameter: Tissue Value: Shoots vs. Whole Plant
  misc_feature: MA Experiment ID: 20000224 Result: Up-regulated in Transcription
  misc_feature: MA Experiment ID: 20001911 Result: Up-regulated in Transcription
  misc_feature: MA Experiment 20001911 PARAMETER Experiment Name: At_Drought_Reproduction_P Parameter: Age (day) Value: 40
  misc_feature: MA Experiment 20001911 PARAMETER Experiment Name: At_Drought_Reproduction_P Parameter: Organism Value: A. thaliana
  misc_feature: MA Experiment 20001911 PARAMETER Experiment Name: At_Drought_Reproduction_P Parameter: Plant Line Value: WS
  misc_feature: MA Experiment 20001911 PARAMETER Experiment Name: At_Drought_Reproduction_P Parameter: Timepoint (day) Value: 10
  misc_feature: MA Experiment 20001911 PARAMETER Experiment Name: At_Drought_Reproduction_P Parameter: Tissue Value: Flowers
  misc_feature: MA Experiment 20001911 PARAMETER Experiment Name: At_Drought_Reproduction_P Parameter: Treatment Value: Drought vs. No Drought
aaaggacctttgaagaagaagaatcgcgatttcgagctctatggtgtccgtaaaccctagacctaagggttttccagttttcgattcctcgaatatgagtttaccaagctccgatggatttggttcgattccggccacgggacggaccagtacggtgtcgttttctgaggatccgacgacgaagattcggaagccgtacacaatcaagaagtcgagagagaattggacagatcaagagcacgataaatttctagaagctcttcacttattcgatagggattggaagaaaatagaagcctttgttggatcaaaaacagtagttcagatacgaagccacgctcagaaatactttctcaaagttcagaagagtggtgctaacgaacatcttccacctcctcgacctaagaggaaagcgagtcatccttatcctataaaggctcctaaaaatgttgcttatacctctctcccgtcttcgagtacattaccgttgcttgagcctggttatttgtatagctctgattcgaagtcattgatgggaaaccaggctgtttgtgcatctacctcttcttcgtggaatcatgaatcgacaaatctgccaaaaccggtgattgaagaggaaccgggagtctcggccacggctcctctcccaaataatcgctgcagacaggaagatacagagagggtacgagcagtgacaaagccaaataacgaagaaagttgtgaaaagccacatagagtgatgccgaattttgctgaagtttacagcttcattggaagtgtcttcgatcccaacacatcaggccacctccagagattaaagcagatggatccaataaatatggaaacggttcttttactgatgcaaaacctgtctgtaaatctgacaagtcccgagtttgcagagcaaaggaggttgatatcatcatacagcgctaaagctttgaaatagagatagaataaaacaataatgtaccttatgtgagatcaagagacaatcatccaaggtctgtatgcattgcttggatttaggcctcgtgttctcactacaggagcagaaccaatcgcaaagactcttagatggctactgagttgtggtttttatgtctctgtaagtcgcggtggagcacacgtgtttgtcctgtcttgtgtatgtgtgtatagataatacaaggttttgcagagtaaggtcacagttagctgcaagtgagtttggatcaatcttaagattaaaaccctgagagtgagtgtccaaagagactgtgtaatattggtttggcggtcagcagaagagttttgaagtgcacatccagttagtgataacacggttgaagaaaaggtaaggttacaagtttagttttgaataattgtatactcaaaaaatatgaatgtataaagaataatcacttgagtcgcct

SEQ ID NO: 42277 - protein, 302 aa, Arabidopsis thaliana
  peptide (1)..(302): Ceres Seq. ID no. 12329340
  misc_feature (59)..(104): Pfam Name: Myb-like DNA-binding domain Pfam Description: Myb-like DNA-binding domain
  misc_feature (29)..(286): Homolog of NCBI NO: 18414039 NR Description: myb family transcription factor
  misc_feature (29)..(286): Homolog of NCBI NO: 14596213 NR Description: putative protein [Arabidopsis thaliana]
  misc_feature (31)..(296): Homolog of NCBI NO: 30680926 NR Description: myb family transcription factor [Arabidopsis
  misc_feature (17)..(288): Homolog of NCBI NO: 8953721 NR Description: contains similarity to MYB-related DNA-binding
  misc_feature (17)..(296): Homolog of NCBI NO: 30696221 NR Description: myb family transcription factor [Arabidopsis
  misc_feature (17)..(296): Homolog of NCBI NO: 30696225 NR Description: myb family transcription factor [Arabidopsis
  misc_feature (1)..(298): Homolog of NCBI NO: 15223419 NR Description: myb family transcription factor; protein id:
  misc_feature (1)..(298): Homolog of NCBI NO: 25517982 NR Description: F22L4.6 protein - Arabidopsis thaliana
  misc_feature (1)..(191): Homolog of NCBI NO: 7485225 NR Description: hypothetical protein A_IG002N01.20 - Arabidopsis
  misc_feature (19)..(302): Homolog of NCBI NO: 15234118 NR Description: myb family transcription factor; protein id:
MVSVNPRPKGFPVFDSSNMSLPSSDGFGSIPATGRTSTVSFSEDPTTKIRKPYTIKKSRENWTDQEHDKFLEALHLFDRDWKKIEAFVGSKTVVQIRSHAQKYFLKVQKSGANEHLPPPRPKRKASHPYPIKAPKNVAYTSLPSSSTLPLLEPGYLYSSDSKSLMGNQAVCASTSSSWNHESTNLPKPVIEEEPGVSATAPLPNNRCRQEDTERVRAVTKPNNEESCEKPHRVMPNFAEVYSFIGSVFDPNTSGHLQRLKQMDPINMETVLLLMQNLSVNLTSPEFAEQRRLISSYSAKALK

SEQ ID NO: 42278 - protein, 284 aa, Arabidopsis thaliana
  peptide (1)..(284): Ceres Seq. ID no. 12329341
  misc_feature (41)..(86): Pfam Name: Myb-like DNA-binding domain Pfam Description: Myb-like DNA-binding domain
  misc_feature (11)..(268): Homolog of NCBI NO: 18414039 NR Description: myb family transcription factor
  misc_feature (11)..(268): Homolog of NCBI NO: 14596213 NR Description: putative protein [Arabidopsis thaliana]
  misc_feature (13)..(278): Homolog of NCBI NO: 30680926 NR Description: myb family transcription factor [Arabidopsis
  misc_feature (1)..(270): Homolog of NCBI NO: 8953721 NR Description: contains similarity to MYB-related DNA-binding
  misc_feature (1)..(278): Homolog of NCBI NO: 30696221 NR Description: myb family transcription factor [Arabidopsis
  misc_feature (1)..(278): Homolog of NCBI NO: 30696225 NR Description: myb family transcription factor [Arabidopsis
  misc_feature (1)..(280): Homolog of NCBI NO: 15223419 NR Description: myb family transcription factor; protein id:
  misc_feature (1)..(280): Homolog of NCBI NO: 25517982 NR Description: F22L4.6 protein - Arabidopsis thaliana
  misc_feature (1)..(173): Homolog of NCBI NO: 7485225 NR Description: hypothetical protein A_IG002N01.20 - Arabidopsis
  misc_feature (1)..(284): Homolog of NCBI NO: 15234118 NR Description: myb family transcription factor; protein id:
MSLPSSDGFGSIPATGRTSTVSFSEDPTTKIRKPYTIKKSRENWTDQEHDKFLEALHLFDRDWKKIEAFVGSKTVVQIRSHAQKYFLKVQKSGANEHLPPPRPKRKASHPYPIKAPKNVAYTSLPSSSTLPLLEPGYLYSSDSKSLMGNQAVCASTSSSWNHESTNLPKPVIEEEPGVSATAPLPNNRCRQEDTERVRAVTKPNNEESCEKPHRVMPNFAEVYSFIGSVFDPNTSGHLQRLKQMDPINMETVLLLMQNLSVNLTSPEFAEQRRLISSYSAKALK

SEQ ID NO: 42279 - DNA, 1141 bp, Arabidopsis thaliana; identical to SEQ ID NO: 39501
  misc_feature (1)..(1141): Ceres Seq. ID no. 13593329
  misc_feature: MA Experiment ID: 20000171 Result: Down-regulated in Transcription
  misc_feature: MA Experiment 20000171 PARAMETER Experiment Name: At_42deg_Heat_P Parameter: Age (day) Value: 14
  misc_feature: MA Experiment 20000171 PARAMETER Experiment Name: At_42deg_Heat_P Parameter: Organism Value: A. thaliana
  misc_feature: MA Experiment 20000171 PARAMETER Experiment Name: At_42deg_Heat_P Parameter: Plant Line Value: WS
  misc_feature: MA Experiment 20000171 PARAMETER Experiment Name: At_42deg_Heat_P Parameter: Temperature (deg C) Value: 42 vs. 22
  misc_feature: MA Experiment 20000171 PARAMETER Experiment Name: At_42deg_Heat_P Parameter: Timepoint (hr) Value: 1
  misc_feature: MA Experiment 20000171 PARAMETER Experiment Name: At_42deg_Heat_P Parameter: Tissue Value: Aerial
  misc_feature: MA Experiment ID: 20000213 Result: Up-regulated in Transcription
  misc_feature: MA Experiment 20000213 PARAMETER Experiment Name: At_4deg_Cold_P Parameter: Timepoint (hr) Value: 2
  misc_feature: MA Experiment ID: 20000265 Result: Down-regulated in Transcription
  misc_feature: MA Experiment 20000265 PARAMETER Experiment Name: At_Open_Flower_P Parameter: Age (day) Value: 21
  misc_feature: MA Experiment 20000265 PARAMETER Experiment Name: At_Open_Flower_P Parameter: Plant Line Value: WS
  misc_feature: MA Experiment 20000265 PARAMETER Experiment Name: At_Open_Flower_P Parameter: Tissue Value: Closed Flower vs. Whole Plant
  misc_feature: MA Experiment ID: 20000286 Result: Down-regulated in Transcription
  misc_feature: MA Experiment 20000286 PARAMETER Experiment Name: At_Open_Flower_P Parameter: Age (day) Value: 21
  misc_feature: MA Experiment 20000286 PARAMETER Experiment Name: At_Open_Flower_P Parameter: Plant Line Value: WS
  misc_feature: MA Experiment 20000286 PARAMETER Experiment Name: At_Open_Flower_P Parameter: Tissue Value: Half Open vs. Whole Plant
  misc_feature: MA Experiment ID: 20000438 Result: Down-regulated in Transcription
  misc_feature: MA Experiment 20000438 PARAMETER Experiment Name: At_Shoots__P Parameter: Age (day) Value: 14
  misc_feature: MA Experiment 20000438 PARAMETER Experiment Name: At_Shoots__P Parameter: Tissue Value: Shoots vs. Whole Plant
  misc_feature: MA Experiment ID: 20000495 Result: Down-regulated in Transcription
  misc_feature: MA Experiment 20000495 PARAMETER Experiment Name: At_Guard_Cells_P Parameter: Harvest Date Value: 8/2/2002
  misc_feature: MA Experiment 20000495 PARAMETER Experiment Name: At_Guard_Cells_P Parameter: Organism Value: A. thaliana
  misc_feature: MA Experiment 20000495 PARAMETER Experiment Name: At_Guard_Cells_P Parameter: Tissue Value: Guard Cells vs. Leaves
  misc_feature: MA Experiment ID: 20000606 Result: Up-regulated in Transcription
  misc_feature: MA Experiment 20000606 PARAMETER Experiment Name: At_CS8548_Mutant_P Parameter: Age (day) Value: 14
  misc_feature: MA Experiment 20000606 PARAMETER Experiment Name: At_CS8548_Mutant_P Parameter: Plant Line Value: CS8548 vs. wt
  misc_feature: MA Experiment 20000606 PARAMETER Experiment Name: At_CS8548_Mutant_P Parameter: Tissue Value: Whole Plant
  misc_feature: MA Experiment ID: 20001247 Result: Up-regulated in Transcription
  misc_feature: MA Experiment 20001247 PARAMETER Experiment Name: At_Far-red-induction_P Parameter: Age (day) Value: 7
  misc_feature: MA Experiment 20001247 PARAMETER Experiment Name: At_Far-red-induction_P Parameter: Light Value: Far-red vs. White
  misc_feature: MA Experiment 20001247 PARAMETER Experiment Name: At_Far-red-induction_P Parameter: Organism Value: A. thaliana
  misc_feature: MA Experiment 20001247 PARAMETER Experiment Name: At_Far-red-induction_P Parameter: Plant Line Value: Columbia
  misc_feature: MA Experiment 20001247 PARAMETER Experiment Name: At_Far-red-induction_P Parameter: Timepoint (hr) Value: 1
  misc_feature: MA Experiment 20001247 PARAMETER Experiment Name: At_Far-red-induction_P Parameter: Tissue Value: Whole Plant

SEQ ID NO: 42280 - protein, 170 aa, Arabidopsis thaliana; identical to SEQ ID NO: 39502
  peptide (1)..(170): Ceres Seq. ID no. 15221211
  misc_feature (5)..(167): Homolog of NCBI NO: 18408342 NR Description: expressed protein [Arabidopsis thaliana]
  misc_feature (1)..(167): Homolog of NCBI NO: 15239459 NR Description: hypothetical protein [Arabidopsis thaliana]
  misc_feature (5)..(167): Homolog of NCBI NO: 6686408 NR Description: F1E22.7 [Arabidopsis thaliana]
  misc_feature (1)..(167): Homolog of NCBI NO: 10178216 NR Description: gb|AAF23842.1~gene_id:MLF18.15~similar to unknown
  misc_feature (7)..(163): Homolog of NCBI NO: 34903552 NR Description: P0001B06.28 [Oryza sativa (japonica
  misc_feature (17)..(170): Homolog of NCBI NO: 34914304 NR Description: B1151A10.19 [Oryza sativa (japonica
  misc_feature (8)..(161): Homolog of NCBI NO: 21536796 NR Description: unknown [Arabidopsis thaliana]
  misc_feature (8)..(161): Homolog of NCBI NO: 15239804 NR Description: expressed protein [Arabidopsis thaliana]
  misc_feature (1)..(167): Homolog of NCBI NO: 11762174 NR Description: At1g17620 [Arabidopsis thaliana]
  misc_feature (1)..(167): Homolog of NCBI NO: 18394509 NR Description: expressed protein [Arabidopsis thaliana]
  misc_feature (5)..(167): Homolog of NCBI NO: 18408342 NR Description: expressed protein [Arabidopsis thaliana]
  misc_feature (1)..(167): Homolog of NCBI NO: 15239459 NR Description: hypothetical protein [Arabidopsis thaliana]
  misc_feature (5)..(167): Homolog of NCBI NO: 6686408 NR Description: F1E22.7 [Arabidopsis thaliana]
  misc_feature (1)..(167): Homolog of NCBI NO: 10178216 NR Description: gb|AAF23842.1~gene_id:MLF18.15~similar to unknown
  misc_feature (7)..(163): Homolog of NCBI NO: 34903552 NR Description: P0001B06.28 [Oryza sativa (japonica
  misc_feature (17)..(170): Homolog of NCBI NO: 34914304 NR Description: B1151A10.19 [Oryza sativa (japonica
  misc_feature (8)..(161): Homolog of NCBI NO: 21536796 NR Description: unknown [Arabidopsis thaliana]
  misc_feature (8)..(161): Homolog of NCBI NO: 15239804 NR Description: expressed protein [Arabidopsis thaliana]
  misc_feature (1)..(167): Homolog of NCBI NO: 11762174 NR Description: At1g17620 [Arabidopsis thaliana]
  misc_feature (1)..(167): Homolog of NCBI NO: 18394509 NR Description: expressed protein [Arabidopsis thaliana]

SEQ ID NO: 42281 - DNA, 945 bp, Arabidopsis thaliana
  misc_feature (1)..(945): Ceres Seq. ID no. 13500238
  misc_feature: MA Experiment ID: 108434 Result: Up-regulated in Transcription
  misc_feature: MA Experiment 108434 PARAMETER Experiment Name: At_Root_Tips_cDNA_P Parameter: Tissue Value: Root Tips
  misc_feature: MA Experiment ID: 108488 Result: Up-regulated in Transcription
  misc_feature: MA Experiment ID: 108573 Result: Down-regulated in Transcription
  misc_feature: MA Experiment 108573 PARAMETER Experiment Name: At_Drought_cDNA_P Parameter: Timepoint (hr) Value: 6
  misc_feature: MA Experiment 108573 PARAMETER Experiment Name: At_Drought_cDNA_P Parameter: Tissue Value: Aerial
  misc_feature: MA Experiment 108573 PARAMETER Experiment Name: At_Drought_cDNA_P Parameter: Treatment Value: Drought vs. No Drought
  misc_feature: MA Experiment ID: 108595 Result: Down-regulated in Transcription
  misc_feature: MA Experiment 108595 PARAMETER Experiment Name: At_Ler-pi_Ovule_cDNA_P Parameter: Plant Line Value: null
  misc_feature: MA Experiment ID: 20000087 Result: Down-regulated in Transcription
  misc_feature: MA Experiment 20000087 PARAMETER Experiment Name: At_100uM_ABA_Mutants_cDNA_P Parameter: Plant Line Value: WS
  misc_feature: MA Experiment 20000087 PARAMETER Experiment Name: At_100uM_ABA_Mutants_cDNA_P Parameter: Timepoint (hr) Value: 6
  misc_feature: MA Experiment 20000087 PARAMETER Experiment Name: At_100uM_ABA_Mutants_cDNA_P Parameter: Tissue Value: Aerial
  misc_feature: MA Experiment 20000087 PARAMETER Experiment Name: At_100uM_ABA_Mutants_cDNA_P Parameter: Treatment Value: 100uM ABA vs. No Treatment
  misc_feature: MA Experiment ID: 20000117 Result: Down-regulated in Transcription
  misc_feature: MA Experiment 20000117 PARAMETER Experiment Name: At_100uM_ABA_Mutants_cDNA_P Parameter: Plant Line Value: Columbia
  misc_feature: MA Experiment 20000117 PARAMETER Experiment Name: At_100uM_ABA_Mutants_cDNA_P Parameter: Timepoint (hr) Value: 6
  misc_feature: MA Experiment 20000117 PARAMETER Experiment Name: At_100uM_ABA_Mutants_cDNA_P Parameter: Tissue Value: Aerial
  misc_feature: MA Experiment 20000117 PARAMETER Experiment Name: At_100uM_ABA_Mutants_cDNA_P Parameter: Treatment Value: 100uM ABA vs. No Treatment
  misc_feature: MA Experiment ID: 20000185 Result: Down-regulated in Transcription
  misc_feature: MA Experiment 20000185 PARAMETER Experiment Name: At_Roots__P Parameter: Age (day) Value: 7 vs. 21
  misc_feature: MA Experiment 20000185 PARAMETER Experiment Name: At_Roots__P Parameter: Organism Value: A. thaliana
  misc_feature: MA Experiment 20000185 PARAMETER Experiment Name: At_Roots__P Parameter: Tissue Value: Roots vs. Whole Plant
  misc_feature: MA Experiment ID: 20000437 Result: Down-regulated in Transcription
  misc_feature: MA Experiment 20000437 PARAMETER Experiment Name: At_Drought_P Parameter: Age (day) Value: 8
  misc_feature: MA Experiment 20000437 PARAMETER Experiment Name: At_Drought_P Parameter: Organism Value: A. thaliana
  misc_feature: MA Experiment 20000437 PARAMETER Experiment Name: At_Drought_P Parameter: Plant Line Value: WS
  misc_feature: MA Experiment 20000437 PARAMETER Experiment Name: At_Drought_P Parameter: Timepoint (hr) Value: 24
  misc_feature: MA Experiment 20000437 PARAMETER Experiment Name: At_Drought_P Parameter: Tissue Value: Whole Plant
  misc_feature: MA Experiment 20000437 PARAMETER Experiment Name: At_Drought_P Parameter: Treatment Value: Drought vs. No Drought
  misc_feature: MA Experiment ID: 20000438 Result: Up-regulated in Transcription
  misc_feature: MA Experiment 20000438 PARAMETER Experiment Name: At_Shoots__P Parameter: Age (day) Value: 14
  misc_feature: MA Experiment 20000438 PARAMETER Experiment Name: At_Shoots__P Parameter: Tissue Value: Shoots vs. Whole Plant
  misc_feature: MA Experiment ID: 20000439 Result: Down-regulated in Transcription
  misc_feature: MA Experiment 20000439 PARAMETER Experiment Name: At_Roots__P Parameter: Age (day) Value: 14 vs. 21
  misc_feature: MA Experiment 20000439 PARAMETER Experiment Name: At_Roots__P Parameter: Organism Value: A. thaliana
  misc_feature: MA Experiment 20000439 PARAMETER Experiment Name: At_Roots__P Parameter: Tissue Value: Roots vs. Whole Plant
  misc_feature: MA Experiment ID: 20000794 Result: Down-regulated in Transcription
  misc_feature: MA Experiment 20000794 PARAMETER Experiment Name: At_Petals_P Parameter: Age (day) Value: 23-25 days
  misc_feature: MA Experiment 20000794 PARAMETER Experiment Name: At_Petals_P Parameter: Plant Line Value: WS
  misc_feature: MA Experiment 20000794 PARAMETER Experiment Name: At_Petals_P Parameter: Tissue Value: Petals vs. Whole plant
  misc_feature: MA Experiment ID: 20001757 Result: Up-regulated in Transcription
  misc_feature: MA Experiment 20001757 PARAMETER Experiment Name: At_50mM_NH4NO3_L-to-H_P Parameter: Timepoint (hr) Value: 6
  misc_feature: MA Experiment 20001757 PARAMETER Experiment Name: At_50mM_NH4NO3_L-to-H_P Parameter: Tissue Value: Leaf
  misc_feature: MA Experiment 20001757 PARAMETER Experiment Name: At_50mM_NH4NO3_L-to-H_P Parameter: Treatment Value: 50mM NH4NO3 vs 100mM Mannitol
  misc_feature: MA Experiment ID: 20001905 Result: Down-regulated in Transcription
  misc_feature: MA Experiment 20001905 PARAMETER Experiment Name: At_Drought_Reproduction_P Parameter: Age (day) Value: 40
  misc_feature: MA Experiment 20001905 PARAMETER Experiment Name: At_Drought_Reproduction_P Parameter: Organism Value: A. thaliana
  misc_feature: MA Experiment 20001905 PARAMETER Experiment Name: At_Drought_Reproduction_P Parameter: Plant Line Value: WS
  misc_feature: MA Experiment 20001905 PARAMETER Experiment Name: At_Drought_Reproduction_P Parameter: Timepoint (day) Value: 10
  misc_feature: MA Experiment 20001905 PARAMETER Experiment Name: At_Drought_Reproduction_P Parameter: Tissue Value: Rosettes
  misc_feature: MA Experiment 20001905 PARAMETER Experiment Name: At_Drought_Reproduction_P Parameter: Treatment Value: Drought vs. No Drought
  misc_feature: MA Experiment ID: 20001906 Result: Down-regulated in Transcription
  misc_feature: MA Experiment 20001906 PARAMETER Experiment Name: At_Drought_Reproduction_P Parameter: Age (day) Value: 35
  misc_feature: MA Experiment 20001906 PARAMETER Experiment Name: At_Drought_Reproduction_P Parameter: Organism Value: A. thaliana
  misc_feature: MA Experiment 20001906 PARAMETER Experiment Name: At_Drought_Reproduction_P Parameter: Plant Line Value: WS
  misc_feature: MA Experiment 20001906 PARAMETER Experiment Name: At_Drought_Reproduction_P Parameter: Timepoint (day) Value: 5
  misc_feature: MA Experiment 20001906 PARAMETER Experiment Name: At_Drought_Reproduction_P Parameter: Tissue Value: Siliques
  misc_feature: MA Experiment 20001906 PARAMETER Experiment Name: At_Drought_Reproduction_P Parameter: Treatment Value: Drought vs. No Drought
  misc_feature: MA Experiment ID: 20001911 Result: Down-regulated in Transcription
  misc_feature: MA Experiment 20001911 PARAMETER Experiment Name: At_Drought_Reproduction_P Parameter: Age (day) Value: 40
  misc_feature: MA Experiment 20001911 PARAMETER Experiment Name: At_Drought_Reproduction_P Parameter: Organism Value: A. thaliana
  misc_feature: MA Experiment 20001911 PARAMETER Experiment Name: At_Drought_Reproduction_P Parameter: Plant Line Value: WS
  misc_feature: MA Experiment 20001911 PARAMETER Experiment Name: At_Drought_Reproduction_P Parameter: Timepoint (day) Value: 10
  misc_feature: MA Experiment 20001911 PARAMETER Experiment Name: At_Drought_Reproduction_P Parameter: Tissue Value: Flowers
  misc_feature: MA Experiment 20001911 PARAMETER Experiment Name: At_Drought_Reproduction_P Parameter: Treatment Value: Drought vs. No Drought
ctcagagtttcttctcctctgtgaatctccgacaatggcgatagcaatggcggttgtttctttcccatctctactcaacaagtcaaccttatcctcttcactctttactcccactttcctcccggcgaaatcctcttcacttctcatcaaatcatcacccaaaaccagattcgttgtttcatcatccatggaagctggaatcggagtaatggggtcaaaactcggaatgatgagtttcttcgaagaagacggcacagtagttccagtaacagtcgtcggattccgcgaaggtaacatcgtaactcaaatcaaaaccctagccaccgacggttacgacgcggttcaaatcggttaccgtcgtgtacgcgacaaaaagctaactaaaccggaaaccggtcatctccaaaaagccggtacaatcccaatgagacatctccaagagttcagattaacaaacatcgaaggattcgaaccgaaccagaagcttgtgttcgatgagatattcaaagaaggtgatctcgttgatgtagctggaaccacaattggtaaagggtttcaaggaggaatcaaaaggcatcatttcaagagaggtcaaatgactcatggttccaagagtcatcgagctttgggttcgattggtgctggtactactccgggaagagtttataaagggaagaagatgcctggaagaatgggagggacgaggacaaagattaggaagcttaagattgttaaagttgataaggagcttaatgttgtcatgatcaaaggtgctttgcctggtaagcctgggaatcttcttcgtattactcccgctaaaatcgtcggagttaacattcccaagaactagtagagaagagactctgttttgttttgtaatgttgacttgtgtttatccattccttgaaaatttgtatcgaattgctaaatcacagtttctctgtc

SEQ ID NO: 42282 - protein, 282 aa, Arabidopsis thaliana
  peptide (1)..(282): Ceres Seq. ID no. 13500239
  misc_feature (73)..(270): Pfam Name: Ribosomal protein L3 Pfam Description: Ribosomal protein L3
  misc_feature (67)..(281): Homolog of NCBI NO: 33241161 NR Description: Ribosomal protein L3
  misc_feature (67)..(276): Homolog of NCBI NO: 23124126 NR Description: hypothetical protein [Nostoc punctiforme]
  misc_feature (67)..(276): Homolog of NCBI NO: 17231707 NR Description: 50S ribosomal protein L3 [Nostoc sp. PCC 7120]
  misc_feature (67)..(276): Homolog of NCBI NO: 3122742 NR Description: 50S ribosomal protein L3
  misc_feature (67)..(276): Homolog of NCBI NO: 37519654 NR Description: 50S ribosomal protein L3 [Gloeobacter violaceus]
  misc_feature (67)..(276): Homolog of NCBI NO: 16329941 NR Description: 50S ribosomal protein L3 [Synechocystis sp. PCC
  misc_feature (67)..(276): Homolog of NCBI NO: 22297625 NR Description: 50S ribosomal protein L3 [Thermosynechococcus
  misc_feature (59)..(282): Homolog of NCBI NO: 7440606 NR Description: ribosomal protein L3 precursor, chloroplast -
  misc_feature (12)..(282): Homolog of NCBI NO: 15224205 NR Description: ribosomal protein L3p family [Arabidopsis
  misc_feature (12)..(282): Homolog of NCBI NO: 21553426 NR Description: 50S ribosomal protein L3 [Arabidopsis thaliana]
SEFLLLCESPTMAIAMAVVSFPSLLNKSTLSSSLFTPTFLPAKSSSLLIKSSPKTRFVVSSSMEAGIGVMGSKLGMMSFFEEDGTVVPVTVVGFREGNIVTQIKTLATDGYDAVQIGYRRVRDKKLTKPETGHLQKAGTIPMRHLQEFRLTNIEGFEPNQKLVFDEIFKEGDLVDVAGTTIGKGFQGGIKRHHFKRGQMTHGSKSHRALGSIGAGTTPGRVYKGKKMPGRMGGTRTKIRKLKIVKVDKELNVVMIKGALPGKPGNLLRITPAKIVGVNIPKN

SEQ ID NO: 42283 - protein, 271 aa, Arabidopsis thaliana
  peptide (1)..(271): Ceres Seq. ID no. 13500240
  misc_feature (62)..(259): Pfam Name: Ribosomal protein L3 Pfam Description: Ribosomal protein L3
  misc_feature (56)..(270): Homolog of NCBI NO: 33241161 NR Description: Ribosomal protein L3
  misc_feature (56)..(265): Homolog of NCBI NO: 23124126 NR Description: hypothetical protein [Nostoc punctiforme]
  misc_feature (56)..(265): Homolog of NCBI NO: 17231707 NR Description: 50S ribosomal protein L3 [Nostoc sp. PCC 7120]
  misc_feature (56)..(265): Homolog of NCBI NO: 3122742 NR Description: 50S ribosomal protein L3
  misc_feature (56)..(265): Homolog of NCBI NO: 37519654 NR Description: 50S ribosomal protein L3 [Gloeobacter violaceus]
  misc_feature (56)..(265): Homolog of NCBI NO: 16329941 NR Description: 50S ribosomal protein L3 [Synechocystis sp. PCC
  misc_feature (56)..(265): Homolog of NCBI NO: 22297625 NR Description: 50S ribosomal protein L3 [Thermosynechococcus
  misc_feature (48)..(271): Homolog of NCBI NO: 7440606 NR Description: ribosomal protein L3 precursor, chloroplast -
  misc_feature (1)..(271): Homolog of NCBI NO: 15224205 NR Description: ribosomal protein L3p family [Arabidopsis
  misc_feature (1)..(271): Homolog of NCBI NO: 21553426 NR Description: 50S ribosomal protein L3 [Arabidopsis thaliana]
MAIAMAVVSFPSLLNKSTLSSSLFTPTFLPAKSSSLLIKSSPKTRFVVSSSMEAGIGVMGSKLGMMSFFEEDGTVVPVTVVGFREGNIVTQIKTLATDGYDAVQIGYRRVRDKKLTKPETGHLQKAGTIPMRHLQEFRLTNIEGFEPNQKLVFDEIFKEGDLVDVAGTTIGKGFQGGIKRHHFKRGQMTHGSKSHRALGSIGAGTTPGRVYKGKKMPGRMGGTRTKIRKLKIVKVDKELNVVMIKGALPGKPGNLLRITPAKIVGVNIPKN

SEQ ID NO: 42284 - protein, 267 aa, Arabidopsis thaliana
  peptide (1)..(267): Ceres Seq. ID no. 13500241
  misc_feature (58)..(255): Pfam Name: Ribosomal protein L3 Pfam Description: Ribosomal protein L3
  misc_feature (52)..(266): Homolog of NCBI NO: 33241161 NR Description: Ribosomal protein L3
  misc_feature (52)..(261): Homolog of NCBI NO: 23124126 NR Description: hypothetical protein [Nostoc punctiforme]
  misc_feature (52)..(261): Homolog of NCBI NO: 17231707 NR Description: 50S ribosomal protein L3 [Nostoc sp. PCC 7120]
  misc_feature (52)..(261): Homolog of NCBI NO: 3122742 NR Description: 50S ribosomal protein L3
  misc_feature (52)..(261): Homolog of NCBI NO: 37519654 NR Description: 50S ribosomal protein L3 [Gloeobacter violaceus]
  misc_feature (52)..(261): Homolog of NCBI NO: 16329941 NR Description: 50S ribosomal protein L3 [Synechocystis sp. PCC
  misc_feature (52)..(261): Homolog of NCBI NO: 22297625 NR Description: 50S ribosomal protein L3 [Thermosynechococcus
  misc_feature (44)..(267): Homolog of NCBI NO: 7440606 NR Description: ribosomal protein L3 precursor, chloroplast -
  misc_feature (1)..(267): Homolog of NCBI NO: 15224205 NR Description: ribosomal protein L3p family [Arabidopsis
  misc_feature (1)..(267): Homolog of NCBI NO: 21553426 NR Description: 50S ribosomal protein L3 [Arabidopsis thaliana]
MAVVSFPSLLNKSTLSSSLFTPTFLPAKSSSLLIKSSPKTRFVVSSSMEAGIGVMGSKLGMMSFFEEDGTVVPVTVVGFREGNIVTQIKTLATDGYDAVQIGYRRVRDKKLTKPETGHLQKAGTIPMRHLQEFRLTNIEGFEPNQKLVFDEIFKEGDLVDVAGTTIGKGFQGGIKRHHFKRGQMTHGSKSHRALGSIGAGTTPGRVYKGKKMPGRMGGTRTKIRKLKIVKVDKELNVVMIKGALPGKPGNLLRITPAKIVGVNIPKN

SEQ ID NO: 42285 - DNA, 672 bp, Arabidopsis thaliana; identical to SEQ ID NO: 37926
  misc_feature (1)..(672): Ceres Seq. ID no. 12326318
  misc_feature: MA Experiment ID: 20000173 Result: Down-regulated in Transcription
  misc_feature: MA Experiment 20000173 PARAMETER Experiment Name: At_42deg_Heat_P Parameter: Age (day) Value: 14
  misc_feature: MA Experiment 20000173 PARAMETER Experiment Name: At_42deg_Heat_P Parameter: Organism Value: A. thaliana
  misc_feature: MA Experiment 20000173 PARAMETER Experiment Name: At_42deg_Heat_P Parameter: Plant Line Value: WS
  misc_feature: MA Experiment 20000173 PARAMETER Experiment Name: At_42deg_Heat_P Parameter: Temperature (deg C) Value: 42 vs. 22
  misc_feature: MA Experiment 20000173 PARAMETER Experiment Name: At_42deg_Heat_P Parameter: Timepoint (hr) Value: 6
  misc_feature: MA Experiment 20000173 PARAMETER Experiment Name: At_42deg_Heat_P Parameter: Tissue Value: Aerial
  misc_feature: MA Experiment ID: 20000180 Result: Up-regulated in Transcription
  misc_feature: MA Experiment 20000180 PARAMETER Experiment Name: At_Germinating_Seeds_P Parameter: Age (hr) Value: 24 vs. 0
  misc_feature: MA Experiment 20000180 PARAMETER Experiment Name: At_Germinating_Seeds_P Parameter: Tissue Value: Germinating Seeds
  misc_feature: MA Experiment ID: 20000182 Result: Down-regulated in Transcription
  misc_feature: MA Experiment 20000182 PARAMETER Experiment Name: At_2mM_SA_P Parameter: Age (day) Value: 14
  misc_feature: MA Experiment 20000182 PARAMETER Experiment Name: At_2mM_SA_P Parameter: Organism Value: A. thaliana
  misc_feature: MA Experiment 20000182 PARAMETER Experiment Name: At_2mM_SA_P Parameter: Plant Line Value: WS
  misc_feature: MA Experiment 20000182 PARAMETER Experiment Name: At_2mM_SA_P Parameter: Timepoint (hr) Value: 6
  misc_feature: MA Experiment 20000182 PARAMETER Experiment Name: At_2mM_SA_P Parameter: Tissue Value: Aerial
  misc_feature: MA Experiment 20000182 PARAMETER Experiment Name: At_2mM_SA_P Parameter: Treatment Value: 2mM SA vs. No Treatment
  misc_feature: MA Experiment ID: 20000185 Result: Down-regulated in Transcription
  misc_feature: MA Experiment 20000185 PARAMETER Experiment Name: At_Roots__P Parameter: Age (day) Value: 7 vs. 21
  misc_feature: MA Experiment 20000185 PARAMETER Experiment Name: At_Roots__P Parameter: Organism Value: A. thaliana
  misc_feature: MA Experiment 20000185 PARAMETER Experiment Name: At_Roots__P Parameter: Tissue Value: Roots vs. Whole Plant
  misc_feature: MA Experiment ID: 20000227 Result: Down-regulated in Transcription
  misc_feature: MA Experiment 20000227 PARAMETER Experiment Name: At_Root-Tips-vs-Tops_P Parameter: Tissue Value: Root Tips vs. Root Tops
  misc_feature: MA Experiment ID: 20000234 Result: Up-regulated in Transcription
  misc_feature: MA Experiment 20000234 PARAMETER Experiment Name: At_Siliques_P Parameter: Age (day) Value: 21
  misc_feature: MA Experiment 20000234 PARAMETER Experiment Name: At_Siliques_P Parameter: Organism Value: A. thaliana
  misc_feature: MA Experiment 20000234 PARAMETER Experiment Name: At_Siliques_P Parameter: Plant Line Value: WS
  misc_feature: MA Experiment 20000234 PARAMETER Experiment Name: At_Siliques_P Parameter: Tissue Value: Less Than 5mm Siliques vs. Whole Plant
  misc_feature: MA Experiment ID: 20000235 Result: Up-regulated in Transcription
  misc_feature: MA Experiment 20000235 PARAMETER Experiment Name: At_Siliques_P Parameter: Age (day) Value: 21
  misc_feature: MA Experiment 20000235 PARAMETER Experiment Name: At_Siliques_P Parameter: Organism Value: A. thaliana
  misc_feature: MA Experiment 20000235 PARAMETER Experiment Name: At_Siliques_P Parameter: Plant Line Value: WS
  misc_feature: MA Experiment 20000235 PARAMETER Experiment Name: At_Siliques_P Parameter: Tissue Value: 5-10mm Siliques vs. Whole Plant
  misc_feature: MA Experiment ID: 20000265 Result: Up-regulated in Transcription
  misc_feature: MA Experiment 20000265 PARAMETER Experiment Name: At_Open_Flower_P Parameter: Age (day) Value: 21
  misc_feature: MA Experiment 20000265 PARAMETER Experiment Name: At_Open_Flower_P Parameter: Plant Line Value: WS
  misc_feature: MA Experiment 20000265 PARAMETER Experiment Name: At_Open_Flower_P Parameter: Tissue Value: Closed Flower vs. Whole Plant
  misc_feature: MA Experiment ID: 20000436 Result: Down-regulated in Transcription
  misc_feature: MA Experiment 20000436 PARAMETER Experiment Name: At_Drought_P Parameter: Age (day) Value: 7
  misc_feature: MA Experiment 20000436 PARAMETER Experiment Name: At_Drought_P Parameter: Organism Value: A. thaliana
  misc_feature: MA Experiment 20000436 PARAMETER Experiment Name: At_Drought_P Parameter: Plant Line Value: WS
  misc_feature: MA Experiment 20000436 PARAMETER Experiment Name: At_Drought_P Parameter: Timepoint (hr) Value: 12
  misc_feature: MA Experiment 20000436 PARAMETER Experiment Name: At_Drought_P Parameter: Tissue Value: Whole Plant
  misc_feature: MA Experiment 20000436 PARAMETER Experiment Name: At_Drought_P Parameter: Treatment Value: Drought vs. No Drought
  misc_feature: MA Experiment ID: 20000439 Result: Down-regulated in Transcription
  misc_feature: MA Experiment 20000439 PARAMETER Experiment Name: At_Roots__P Parameter: Age (day) Value: 14 vs. 21
  misc_feature: MA Experiment 20000439 PARAMETER Experiment Name: At_Roots__P Parameter: Organism Value: A. thaliana
  misc_feature: MA Experiment 20000439 PARAMETER Experiment Name: At_Roots__P Parameter: Tissue Value: Roots vs. Whole Plant
  misc_feature: MA Experiment ID: 20000451 Result: Down-regulated in Transcription
  misc_feature: MA Experiment 20000451 PARAMETER Experiment Name: At_CS6879_Shoots-Roots_P Parameter: Age (day) Value: 14
  misc_feature: MA Experiment 20000451 PARAMETER Experiment Name: At_CS6879_Shoots-Roots_P Parameter: Organism Value: A. thaliana
  misc_feature: MA Experiment 20000451 PARAMETER Experiment Name: At_CS6879_Shoots-Roots_P Parameter: Plant Line Value: CS6879 vs. WS
  misc_feature: MA Experiment 20000451 PARAMETER Experiment Name: At_CS6879_Shoots-Roots_P Parameter: Tissue Value: Roots
  misc_feature: MA Experiment ID: 20000573 Result: Up-regulated in Transcription
  misc_feature: MA Experiment 20000573 PARAMETER Experiment Name: At_100uM_ABA_Mutants__P Parameter: Organism Value: A. thaliana
  misc_feature: MA Experiment 20000573 PARAMETER Experiment Name: At_100uM_ABA_Mutants__P Parameter: Plant Line Value: CS22 vs. Ler wt
  misc_feature: MA Experiment 20000573 PARAMETER Experiment Name: At_100uM_ABA_Mutants__P Parameter: Timepoint (hr) Value: N/A
  misc_feature: MA Experiment 20000573 PARAMETER Experiment Name: At_100uM_ABA_Mutants__P Parameter: Tissue Value: Whole Plant
  misc_feature: MA Experiment 20000573 PARAMETER Experiment Name: At_100uM_ABA_Mutants__P Parameter: Treatment Value: None
  misc_feature: MA Experiment ID: 20000574 Result: Up-regulated in Transcription
  misc_feature: MA Experiment 20000574 PARAMETER Experiment Name: At_100uM_ABA_Mutants__P Parameter: Organism Value: A. thaliana
  misc_feature: MA Experiment 20000574 PARAMETER Experiment Name: At_100uM_ABA_Mutants__P Parameter: Plant Line Value: CS23 vs. Ler wt
  misc_feature: MA Experiment 20000574 PARAMETER Experiment Name: At_100uM_ABA_Mutants__P Parameter: Timepoint (hr) Value: N/A
  misc_feature: MA Experiment 20000574 PARAMETER Experiment Name: At_100uM_ABA_Mutants__P Parameter: Tissue Value: Whole Plant
  misc_feature: MA Experiment 20000574 PARAMETER Experiment Name: At_100uM_ABA_Mutants__P Parameter: Treatment Value: None
  misc_feature: MA Experiment ID: 20001451 Result: Up-regulated in Transcription
  misc_feature: MA Experiment 20001451 PARAMETER Experiment Name: At_Far-red-induction_P Parameter: Age (day) Value: 7
  misc_feature: MA Experiment 20001451 PARAMETER Experiment Name: At_Far-red-induction_P Parameter: Light Value: Far-red vs. White
  misc_feature: MA Experiment 20001451 PARAMETER Experiment Name: At_Far-red-induction_P Parameter: Organism Value: A. thaliana
  misc_feature: MA Experiment 20001451 PARAMETER Experiment Name: At_Far-red-induction_P Parameter: Plant Line Value: Columbia
  misc_feature: MA Experiment 20001451 PARAMETER Experiment Name: At_Far-red-induction_P Parameter: Timepoint (hr) Value: 24
  misc_feature: MA Experiment 20001451 PARAMETER Experiment Name: At_Far-red-induction_P Parameter: Tissue Value: Whole Plant
  misc_feature: MA Experiment ID: 20001757 Result: Up-regulated in Transcription
  misc_feature: MA Experiment 20001757 PARAMETER Experiment Name: At_50mM_NH4NO3_L-to-H_P Parameter: Timepoint (hr) Value: 6
  misc_feature: MA Experiment 20001757 PARAMETER Experiment Name: At_50mM_NH4NO3_L-to-H_P Parameter: Tissue Value: Leaf
  misc_feature: MA Experiment 20001757 PARAMETER Experiment Name: At_50mM_NH4NO3_L-to-H_P Parameter: Treatment Value: 50mM NH4NO3 vs 100mM Mannitol
  misc_feature: MA Experiment ID: 20001906 Result: Down-regulated in Transcription
  misc_feature: MA Experiment 20001906 PARAMETER Experiment Name: At_Drought_Reproduction_P Parameter: Age (day) Value: 35
  misc_feature: MA Experiment 20001906 PARAMETER Experiment Name: At_Drought_Reproduction_P Parameter: Organism Value: A. thaliana
  misc_feature: MA Experiment 20001906 PARAMETER Experiment Name: At_Drought_Reproduction_P Parameter: Plant Line Value: WS
  misc_feature: MA Experiment 20001906 PARAMETER Experiment Name: At_Drought_Reproduction_P Parameter: Timepoint (day) Value: 5
  misc_feature: MA Experiment 20001906 PARAMETER Experiment Name: At_Drought_Reproduction_P Parameter: Tissue Value: Siliques
  misc_feature: MA Experiment 20001906 PARAMETER Experiment Name: At_Drought_Reproduction_P Parameter: Treatment Value: Drought vs. No Drought

SEQ ID NO: 42286 - protein, 187 aa, Arabidopsis thaliana; identical to SEQ ID NO: 37927
  peptide (1)..(187): Ceres Seq. ID no. 12326319
  misc_feature (57)..(181): Homolog of NCBI NO: 23040173 NR Description: hypothetical protein [Trichodesmium erythraeum
  misc_feature (57)..(181): Homolog of NCBI NO: 20141074 NR Description: Cytochrome C6 precursor (Soluble cytochrome f)
  misc_feature (67)..(181): Homolog of NCBI NO: 22652035 NR Description: putative cytochrome c6-2 [Synechococcus sp. PCC
  misc_feature (86)..(181): Homolog of NCBI NO: 117923 NR Description: Cytochrome C6 (Soluble cytochrome f) (Cytochrome
  misc_feature (67)..(181): Homolog of NCBI NO: 37521549 NR Description: cytochrome c6 [Gloeobacter violaceus]
  misc_feature (56)..(145): Homolog of NCBI NO: 33862735 NR Description: Cytochrome c, class IC:Cytochrome c, class I
  misc_feature (118)..(187): Homolog of NCBI NO: 34393286 NR Description: cytochrome C6, chloroplast precursor-like protein
  misc_feature (58)..(187): Homolog of NCBI NO: 34899810 NR Description: putative c6 type cytochrome
  misc_feature (79)..(187): Homolog of NCBI NO: 10177496 NR Description: gene_id:K21C13.23~unknown protein [Arabidopsis
  misc_feature (13)..(187): Homolog of NCBI NO: 18422509 NR Description: expressed protein
  misc_feature (57)..(181): Homolog of NCBI NO: 23040173 NR Description: hypothetical protein [Trichodesmium erythraeum
  misc_feature (57)..(181): Homolog of NCBI NO: 20141074 NR Description: Cytochrome C6 precursor (Soluble cytochrome f)
  misc_feature (67)..(181): Homolog of NCBI NO: 22652035 NR Description: putative cytochrome c6-2 [Synechococcus sp. PCC
  misc_feature (86)..(181): Homolog of NCBI NO: 117923 NR Description: Cytochrome C6 (Soluble cytochrome f) (Cytochrome
  misc_feature (67)..(181): Homolog of NCBI NO: 37521549 NR Description: cytochrome c6 [Gloeobacter violaceus]
  misc_feature (56)..(145): Homolog of NCBI NO: 33862735 NR Description: Cytochrome c, class IC:Cytochrome c, class I
  misc_feature (118)..(187): Homolog of NCBI NO: 34393286 NR Description: cytochrome C6, chloroplast precursor-like protein
  misc_feature (58)..(187): Homolog of NCBI NO: 34899810 NR Description: putative c6 type cytochrome
  misc_feature (79)..(187): Homolog of NCBI NO: 10177496 NR Description: gene_id:K21C13.23~unknown protein [Arabidopsis
  misc_feature (13)..(187): Homolog of NCBI NO: 18422509 NR Description: expressed protein

SEQ ID NO: 42287 - protein, 175 aa, Arabidopsis thaliana; identical to SEQ ID NO: 37928
  peptide (1)..(175): Ceres Seq. ID no. 12326320
  misc_feature (45)..(169): Homolog of NCBI NO: 23040173 NR Description: hypothetical protein [Trichodesmium erythraeum
  misc_feature (45)..(169): Homolog of NCBI NO: 20141074 NR Description: Cytochrome C6 precursor (Soluble cytochrome f)
  misc_feature (55)..(169): Homolog of NCBI NO: 22652035 NR Description: putative cytochrome c6-2 [Synechococcus sp. PCC
  misc_feature (74)..(169): Homolog of NCBI NO: 117923 NR Description: Cytochrome C6 (Soluble cytochrome f) (Cytochrome
  misc_feature (55)..(169): Homolog of NCBI NO: 37521549 NR Description: cytochrome c6 [Gloeobacter violaceus]
  misc_feature (44)..(133): Homolog of NCBI NO: 33862735 NR Description: Cytochrome c, class IC:Cytochrome c, class I
  misc_feature (106)..(175): Homolog of NCBI NO: 34393286 NR Description: cytochrome C6, chloroplast precursor-like protein
  misc_feature (46)..(175): Homolog of NCBI NO: 34899810 NR Description: putative c6 type cytochrome
  misc_feature (67)..(175): Homolog of NCBI NO: 10177496 NR Description: gene_id:K21C13.23~unknown protein [Arabidopsis
  misc_feature (1)..(175): Homolog of NCBI NO: 18422509 NR Description: expressed protein
  misc_feature (45)..(169): Homolog of NCBI NO: 23040173 NR Description: hypothetical protein [Trichodesmium erythraeum
  misc_feature (45)..(169): Homolog of NCBI NO: 20141074 NR Description: Cytochrome C6 precursor (Soluble cytochrome f)
  misc_feature (55)..(169): Homolog of NCBI NO: 22652035 NR Description: putative cytochrome c6-2 [Synechococcus sp. PCC
  misc_feature (74)..(169): Homolog of NCBI NO: 117923 NR Description: Cytochrome C6 (Soluble cytochrome f) (Cytochrome
  misc_feature (55)..(169): Homolog of NCBI NO: 37521549 NR Description: cytochrome c6 [Gloeobacter violaceus]
  misc_feature (44)..(133): Homolog of NCBI NO: 33862735 NR Description: Cytochrome c, class IC:Cytochrome c, class I
  misc_feature (106)..(175): Homolog of NCBI NO: 34393286 NR Description: cytochrome C6, chloroplast precursor-like protein
  misc_feature (46)..(175): Homolog of NCBI NO: 34899810 NR Description: putative c6 type cytochrome
  misc_feature (67)..(175): Homolog of NCBI NO: 10177496 NR Description: gene_id:K21C13.23~unknown protein [Arabidopsis
  misc_feature (1)..(175): Homolog of NCBI NO: 18422509 NR Description: expressed protein

SEQ ID NO: 42288 - DNA, 2671 bp, Arabidopsis thaliana
  misc_feature (1)..(2671): Ceres Seq. ID no. 13489440
  misc_feature: MA Experiment ID: 108435 Result: Up-regulated in Transcription
  misc_feature: MA Experiment 108435 PARAMETER Experiment Name: At_stm_Mutants_cDNA_P Parameter: Plant Line Value: wt Landsburg vs stm
  misc_feature: MA Experiment 108435 PARAMETER Experiment Name: At_stm_Mutants_cDNA_P Parameter: Tissue Value: Shoot Apical Meristem Region
  misc_feature: MA Experiment ID: 108461 Result: Down-regulated in Transcription
  misc_feature: MA Experiment 108461 PARAMETER Experiment Name: At_Germinating_Seeds_cDNA_P Parameter: Age (day) Value: 1 vs. 0
  misc_feature: MA Experiment 108461 PARAMETER Experiment Name: At_Germinating_Seeds_cDNA_P Parameter: Tissue Value: Germinating Seeds
  misc_feature: MA Experiment ID: 108569 Result: Up-regulated in Transcription
  misc_feature: MA Experiment 108569 PARAMETER Experiment Name: At_0.001%_MeJA__cDNA_P Parameter: Timepoint (hr) Value: 6
  misc_feature: MA Experiment 108569 PARAMETER Experiment Name: At_0.001%_MeJA__cDNA_P Parameter: Tissue Value: Aerial
  misc_feature: MA Experiment 108569 PARAMETER Experiment Name: At_0.001%_MeJA__cDNA_P Parameter: Treatment Value: 0.001% MeJA vs. No Treatment
  misc_feature: MA Experiment ID: 108573 Result: Up-regulated in Transcription
  misc_feature: MA Experiment 108573 PARAMETER Experiment Name: At_Drought_cDNA_P Parameter: Timepoint (hr) Value: 6
  misc_feature: MA Experiment 108573 PARAMETER Experiment Name: At_Drought_cDNA_P Parameter: Tissue Value: Aerial
  misc_feature: MA Experiment 108573 PARAMETER Experiment Name: At_Drought_cDNA_P Parameter: Treatment Value: Drought vs. No Drought
  misc_feature: MA Experiment ID: 108576 Result: Up-regulated in Transcription
  misc_feature: MA Experiment 108576 PARAMETER Experiment Name: At_42deg_Heat_cDNA_P Parameter: Temperature (deg C) Value: 42 vs. 22
  misc_feature: MA Experiment 108576 PARAMETER Experiment Name: At_42deg_Heat_cDNA_P Parameter: Timepoint (hr) Value: 1
  misc_feature: MA Experiment 108576 PARAMETER Experiment Name: At_42deg_Heat_cDNA_P Parameter: Tissue Value: Aerial
  misc_feature: MA Experiment ID: 108577 Result: Up-regulated in Transcription
  misc_feature: MA Experiment 108577 PARAMETER Experiment Name: At_42deg_Heat_cDNA_P Parameter: Temperature (deg C) Value: 42 vs. 22
  misc_feature: MA Experiment 108577 PARAMETER Experiment Name: At_42deg_Heat_cDNA_P Parameter: Timepoint (hr) Value: 6
  misc_feature: MA Experiment 108577 PARAMETER Experiment Name: At_42deg_Heat_cDNA_P Parameter: Tissue Value: Aerial
  misc_feature: MA Experiment ID: 108585 Result: Up-regulated in Transcription
  misc_feature: MA Experiment 108585 PARAMETER Experiment Name: At_5mM_NaNP_cDNA_P Parameter: Timepoint (hr) Value: 6
  misc_feature: MA Experiment 108585 PARAMETER Experiment Name: At_5mM_NaNP_cDNA_P Parameter: Tissue Value: Aerial
  misc_feature: MA Experiment 108585 PARAMETER Experiment Name: At_5mM_NaNP_cDNA_P Parameter: Treatment Value: null
  misc_feature: MA Experiment ID: 20000087 Result: Down-regulated in Transcription
  misc_feature: MA Experiment 20000087 PARAMETER Experiment Name: At_100uM_ABA_Mutants_cDNA_P Parameter: Plant Line Value: WS
  misc_feature: MA Experiment 20000087 PARAMETER Experiment Name: At_100uM_ABA_Mutants_cDNA_P Parameter: Timepoint (hr) Value: 6
  misc_feature: MA Experiment 20000087 PARAMETER Experiment Name: At_100uM_ABA_Mutants_cDNA_P Parameter: Tissue Value: Aerial
  misc_feature: MA Experiment 20000087 PARAMETER Experiment Name: At_100uM_ABA_Mutants_cDNA_P Parameter: Treatment Value: 100uM ABA vs. No Treatment
  misc_feature: MA Experiment ID: 20000088 Result: Up-regulated in Transcription
  misc_feature: MA Experiment 20000088 PARAMETER Experiment Name: At_100uM_ABA_Mutants_cDNA_P Parameter: Plant Line Value: Landsberg
  misc_feature: MA Experiment 20000088 PARAMETER Experiment Name: At_100uM_ABA_Mutants_cDNA_P Parameter: Timepoint (hr) Value: 6
  misc_feature: MA Experiment 20000088 PARAMETER Experiment Name: At_100uM_ABA_Mutants_cDNA_P Parameter: Tissue Value: Aerial
  misc_feature: MA Experiment 20000088 PARAMETER Experiment Name: At_100uM_ABA_Mutants_cDNA_P Parameter: Treatment Value: 100uM ABA vs. No Treatment
  misc_feature: MA Experiment ID: 20000111 Result: Up-regulated in Transcription
  misc_feature: MA Experiment 20000111 PARAMETER Experiment Name: At_42deg_Heat_cDNA_P Parameter: Temperature (deg C) Value: 42 vs. 22
  misc_feature: MA Experiment 20000111 PARAMETER Experiment Name: At_42deg_Heat_cDNA_P Parameter: Timepoint (hr) Value: 6
  misc_feature: MA Experiment 20000111 PARAMETER Experiment Name: At_42deg_Heat_cDNA_P Parameter: Tissue Value: Aerial
  misc_feature: MA Experiment ID: 20000112 Result: Up-regulated in Transcription
  misc_feature: MA Experiment 20000112 PARAMETER Experiment Name: At_42deg_Heat_cDNA_P Parameter: Temperature (deg C) Value: 42 vs. 22
  misc_feature: MA Experiment 20000112 PARAMETER Experiment Name: At_42deg_Heat_cDNA_P Parameter: Timepoint (hr) Value: 2
  misc_feature: MA Experiment 20000112 PARAMETER Experiment Name: At_42deg_Heat_cDNA_P Parameter: Tissue Value: Aerial
  misc_feature: MA Experiment ID: 20000144 Result: Up-regulated in Transcription
  misc_feature: MA Experiment 20000144 PARAMETER Experiment Name: At_42deg_Heat_cDNA_P Parameter: Temperature (deg C) Value: 42 vs. 22
  misc_feature: MA Experiment 20000144 PARAMETER Experiment Name: At_42deg_Heat_cDNA_P Parameter: Timepoint (hr) Value: 1
  misc_feature: MA Experiment 20000144 PARAMETER Experiment Name: At_42deg_Heat_cDNA_P Parameter: Tissue Value: Aerial
  misc_feature: MA Experiment ID: 20000171 Result: Up-regulated in Transcription
  misc_feature: MA Experiment 20000171 PARAMETER Experiment Name: At_42deg_Heat_P Parameter: Age (day) Value: 14
  misc_feature: MA Experiment 20000171 PARAMETER Experiment Name: At_42deg_Heat_P Parameter: Organism Value: A. thaliana
  misc_feature: MA Experiment 20000171 PARAMETER Experiment Name: At_42deg_Heat_P Parameter: Plant Line Value: WS
  misc_feature: MA Experiment 20000171 PARAMETER Experiment Name: At_42deg_Heat_P Parameter: Temperature (deg C) Value: 42 vs. 22
  misc_feature: MA Experiment 20000171 PARAMETER Experiment Name: At_42deg_Heat_P Parameter: Timepoint (hr) Value: 1
  misc_feature: MA Experiment 20000171 PARAMETER Experiment Name: At_42deg_Heat_P Parameter: Tissue Value: Aerial
  misc_feature: MA Experiment ID: 20000173 Result: Up-regulated in Transcription
  misc_feature: MA Experiment 20000173 PARAMETER Experiment Name: At_42deg_Heat_P Parameter: Age (day) Value: 14
  misc_feature: MA Experiment 20000173 PARAMETER Experiment Name: At_42deg_Heat_P Parameter: Organism Value: A. thaliana
  misc_feature: MA Experiment 20000173 PARAMETER Experiment Name: At_42deg_Heat_P Parameter: Plant Line Value: WS
  misc_feature: MA Experiment 20000173 PARAMETER Experiment Name: At_42deg_Heat_P Parameter: Temperature (deg C) Value: 42 vs. 22
  misc_feature: MA Experiment 20000173 PARAMETER Experiment Name: At_42deg_Heat_P Parameter: Timepoint (hr) Value: 6
  misc_feature: MA Experiment 20000173 PARAMETER Experiment Name: At_42deg_Heat_P Parameter: Tissue Value: Aerial
  misc_feature: MA Experiment ID: 20000182 Result: Up-regulated in Transcription
  misc_feature: MA Experiment 20000182 PARAMETER Experiment Name: At_2mM_SA_P Parameter: Age (day) Value: 14
  misc_feature: MA Experiment 20000182 PARAMETER Experiment Name: At_2mM_SA_P Parameter: Organism Value: A. thaliana
  misc_feature: MA Experiment 20000182 PARAMETER Experiment Name: At_2mM_SA_P Parameter: Plant Line Value: WS
  misc_feature: MA Experiment 20000182 PARAMETER Experiment Name: At_2mM_SA_P Parameter: Timepoint (hr) Value: 6
  misc_feature: MA Experiment 20000182 PARAMETER Experiment Name: At_2mM_SA_P Parameter: Tissue Value: Aerial
  misc_feature: MA Experiment 20000182 PARAMETER Experiment Name: At_2mM_SA_P Parameter: Treatment Value: 2mM SA vs. No Treatment
  misc_feature: MA Experiment ID: 20000224 Result: Down-regulated in Transcription
  misc_feature: MA Experiment ID: 20001911 Result: Up-regulated in Transcription
  misc_feature: MA Experiment 20001911 PARAMETER Experiment Name: At_Drought_Reproduction_P Parameter: Age (day) Value: 40
  misc_feature: MA Experiment 20001911 PARAMETER Experiment Name: At_Drought_Reproduction_P Parameter: Organism Value: A. thaliana
  misc_feature: MA Experiment 20001911 PARAMETER Experiment Name: At_Drought_Reproduction_P Parameter: Plant Line Value: WS
  misc_feature: MA Experiment 20001911 PARAMETER Experiment Name: At_Drought_Reproduction_P Parameter: Timepoint (day) Value: 10
  misc_feature: MA Experiment 20001911 PARAMETER Experiment Name: At_Drought_Reproduction_P Parameter: Tissue Value: Flowers
  misc_feature: MA Experiment 20001911 PARAMETER Experiment Name: At_Drought_Reproduction_P Parameter: Treatment Value: Drought vs. No Drought
attcatcatcatcatcatcatcaccaatcgatctctctagaaacaaatttcccaacttccttcttagagctctcttgtcagtttaagctatcattatgtcaaacgaaccggaatcctccgactcgaaaactaagaaggatttcagtactgcgattctagagaggaagaagtctccaaaccgacttgttgtcgatgaagctattaacgatgacaactctgttgtctctctccatcctactaccatggaaaaactccagcttttccgaggcgatacaattctcatcaagggtaagaagaggaaggacactgtatgcattgccctcgctgatgaaacatgtgaggaacccaagatcagaatgaataaggttgtaaggtctaacttgagggttaggctgggagatgttatttctgttcaccaatgcccagatgtcaagtatggaaagcgtgttcacatcttgcctgttgatgatacagttgaaggcgttactggaaacctctttgatgcttacctgaaaccttactttctggaggcgtaccgtccagtgaggaagggagatcttttcctagtgagaggaggaatgaggagtgtggagttcaaagtgatcgagactgatcctgctgagtactgtgtggtggctccagatacagagattttctgtgagggtgaaccagttaagagggaggacgaagaaaggcttgatgaggttggttatgacgatgttggtggtgtcaggaaacagatggctcagattagggaattggttgaacttcccttgaggcatccacaactctttaaatcaattggtgtgaagccaccaaagggaattctgctttacggacctcctggatccgggaagactcttattgctcgtgctgtggctaatgaaaccggagcattcttcttctgtatcaatggaccggaaatcatgtcgaaactagctggtgagagtgagagcaacctcaggaaagcatttgaggaggctgagaagaatgccccgtctatcatattcattgatgagattgactctattgcaccaaaaagagagaagacgaatggtgaggttgagaggaggattgtctctcagctccttacgcttatggatggactaaaatcacgtgcccatgttattgttatgggagcaacaaatcgtcccaacagtattgatccggctttgagaaggtttggaagattcgacagggaaattgatatcggtgttcctgatgaaattggacgtcttgaagttcttaggatccacacgaagaacatgaagctagctgaagatgttgatctagaaagaatctccaaggacacgcatggatatgttggagctgatcttgcagctctatgcactgaagctgcccttcaatgtatcagagagaagatggatgtgattgacttggaagatgactcaattgacgccgaaatcctcaattccatggctgtgtctaatgaacacttccacactgctcttggaaacagcaacccatccgcccttcgtgaaactgttgtggaggttccaaatgtctcctgggaggatattggaggtctcgagaatgttaagagagagcttcaggagactgttcaataccctgtggagcatccagagaaattcgagaagtttggtatgtctccatcaaagggagttcttttctacggtcctcctggatgtggtaaaaccctgttagccaaagctatagcaaacgagtgccaagcaaacttcatcagtgtcaagggacccgagcttctcacaatgtggtttggagaaagtgaagccaacgtccgagaaatctttgacaaggctcgtcaatctgctccttgtgttctgtttttcgatgagctagactccattgctactcagagagggaacagcgcgggtgatgccggcggtgcagctgacagagtgttgaatcagcttttgacagaaatggatggaatgaatgcaaagaagacggtattcattattggagcaactaacagaccggatatcatagattcagctcttcttcgacctggaagactcgaccagcttatctacattcctctacctgatgaagattcccgtctcaatatctttaaggcctgcttgagaaaatctcccgtcgctaaagatgtagatgttactgcactcgcaaagtacactcagggattcagtggtgctgatatcaccgagatctgccagagagcttgcaagtacgccatcagagaaaacatcgaaaaggatattgagaacgagcgtagaaggagccagaatccagaggccatggaggaagatatggtggatgatgaagtttcagagattagagctgctcatttcgaagagtcgatgaaatatgcaaggagaagtgtgagtgatgctgatattcgcaagtaccaagcttttgctcagacgctgcagcaatccagagggtttggatctgagttcaggtttgactcaaccgctggtgtcggacgcaccactggtgttgcagccgccgatccctttgccacttctgcagctgcagctgatgacgacgatctctacagttagattttgatttcttagtgatcgtttttcttctttctttaacttaaattaggttcttttggatgatgtcgagattgatacagtttaaaatcatctgggtttgccagcttataatcacttgagcaaattatttctatgtttattcc

SEQ ID NO: 42289 - protein, 810 aa, Arabidopsis thaliana
  peptide (1)..(810): Ceres Seq. ID no. 13489441
  misc_feature (392)..(771): Homolog of NCBI NO: 14521559 NR Description: TRANSITIONAL ENDOPLASMIC RETICULUM ATPASE
  misc_feature (161)..(404): Homolog of NCBI NO: 14590568 NR Description: cell division control protein (transitional
  misc_feature (399)..(771): Homolog of NCBI NO: 14590568 NR Description: cell division control protein (transitional
  misc_feature (30)..(719): Homolog of NCBI NO: 15669345 NR Description: cell division control protein 48 (cdc48), AAA
  misc_feature (434)..(766): Homolog of NCBI NO: 23481659 NR Description: putative cell division cycle ATPase [Plasmodium
  misc_feature (10)..(514): Homolog of NCBI NO: 23481659 NR Description: putative cell division cycle ATPase [Plasmodium
  misc_feature (431)..(766): Homolog of NCBI NO: 23612492 NR Description: cell division cycle ATPase, putative [Plasmodium
  misc_feature (8)..(461): Homolog of NCBI NO: 23612492 NR Description: cell division cycle ATPase, putative [Plasmodium
  misc_feature (198)..(810): Homolog of NCBI NO: 38455496 NR Description: cell division cycle protein 48 ['Chlorella'
  misc_feature (4)..(810): Homolog of NCBI NO: 32402982 NR Description: hypothetical protein [Neurospora crassa]
MSNEPESSDSKTKKDFSTAILERKKSPNRLVVDEAINDDNSVVSLHPTTMEKLQLFRGDTILIKGKKRKDTVCIALADETCEEPKIRMNKVVRSNLRVRLGDVISVHQCPDVKYGKRVHILPVDDTVEGVTGNLFDAYLKPYFLEAYRPVRKGDLFLVRGGMRSVEFKVIETDPAEYCVVAPDTEIFCEGEPVKREDEERLDEVGYDDVGGVRKQMAQIRELVELPLRHPQLFKSIGVKPPKGILLYGPPGSGKTLIARAVANETGAFFFCINGPEIMSKLAGESESNLRKAFEEAEKNAPSIIFIDEIDSIAPKREKTNGEVERRIVSQLLTLMDGLKSRAHVIVMGATNRPNSIDPALRRFGRFDREIDIGVPDEIGRLEVLRIHTKNMKLAEDVDLERISKDTHGYVGADLAALCTEAALQCIREKMDVIDLEDDSIDAEILNSMAVSNEHFHTALGNSNPSALRETVVEVPNVSWEDIGGLENVKRELQETVQYPVEHPEKFEKFGMSPSKGVLFYGPPGCGKTLLAKAIANECQANFISVKGPELLTMWFGESEANVREIFDKARQSAPCVLFFDELDSIATQRGNSAGDAGGAADRVLNQLLTEMDGMNAKKTVFIIGATNRPDIIDSALLRPGRLDQLIYIPLPDEDSRLNIFKACLRKSPVAKDVDVTALAKYTQGFSGADITEICQRACKYAIRENIEKDIENERRRSQNPEAMEEDMVDDEVSEIRAAHFEESMKYARRSVSDADIRKYQAFAQTLQQSRGFGSEFRFDSTAGVGRTTGVAAADPFATSAAAADDDDLYS

SEQ ID NO: 42290 - protein, 761 aa, Arabidopsis thaliana
  peptide (1)..(761): Ceres Seq. ID no. 13489442
  misc_feature (343)..(722): Homolog of NCBI NO: 14521559 NR Description: TRANSITIONAL ENDOPLASMIC RETICULUM ATPASE
  misc_feature (112)..(355): Homolog of NCBI NO: 14590568 NR Description: cell division control protein (transitional
  misc_feature (350)..(722): Homolog of NCBI NO: 14590568 NR Description: cell division control protein (transitional
  misc_feature (1)..(670): Homolog of NCBI NO: 15669345 NR Description: cell division control protein 48 (cdc48), AAA
  misc_feature (385)..(717): Homolog of NCBI NO: 23481659 NR Description: putative cell division cycle ATPase [Plasmodium
  misc_feature (1)..(465): Homolog of NCBI NO: 23481659 NR Description: putative cell division cycle ATPase [Plasmodium
  misc_feature (382)..(717): Homolog of NCBI NO: 23612492 NR Description: cell division cycle ATPase, putative [Plasmodium
  misc_feature (1)..(412): Homolog of NCBI NO: 23612492 NR Description: cell division cycle ATPase, putative [Plasmodium
  misc_feature (149)..(761): Homolog of NCBI NO: 38455496 NR Description: cell division cycle protein 48 ['Chlorella'
  misc_feature (1)..(761): Homolog of NCBI NO: 32402982 NR Description: hypothetical protein [Neurospora crassa]
MEKLQLFRGDTILIKGKKRKDTVCIALADETCEEPKIRMNKVVRSNLRVRLGDVISVHQCPDVKYGKRVHILPVDDTVEGVTGNLFDAYLKPYFLEAYRPVRKGDLFLVRGGMRSVEFKVIETDPAEYCVVAPDTEIFCEGEPVKREDEERLDEVGYDDVGGVRKQMAQIRELVELPLRHPQLFKSIGVKPPKGILLYGPPGSGKTLIARAVANETGAFFFCINGPEIMSKLAGESESNLRKAFEEAEKNAPSIIFIDEIDSIAPKREKTNGEVERRIVSQLLTLMDGLKSRAHVIVMGATNRPNSIDPALRRFGRFDREIDIGVPDEIGRLEVLRIHTKNMKLAEDVDLERISKDTHGYVGADLAALCTEAALQCIREKMDVIDLEDDSIDAEILNSMAVSNEHFHTALGNSNPSALRETVVEVPNVSWEDIGGLENVKRELQETVQYPVEHPEKFEKFGMSPSKGVLFYGPPGCGKTLLAKAIANECQANFISVKGPELLTMWFGESEANVREIFDKARQSAPCVLFFDELDSIATQRGNSAGDAGGAADRVLNQLLTEMDGMNAKKTVFIIGATNRPDIIDSALLRPGRLDQLIYIPLPDEDSRLNIFKACLRKSPVAKDVDVTALAKYTQGFSGADITEICQRACKYAIRENIEKDIENERRRSQNPEAMEEDMVDDEVSEIRAAHFEESMKYARRSVSDADIRKYQAFAQTLQQSRGFGSEFRFDSTAGVGRTTGVAAADPFATSAAAADDDDLYS

SEQ ID NO: 42291 - protein, 723 aa, Arabidopsis thaliana
  peptide (1)..(723): Ceres Seq. ID no. 13489443
  misc_feature (305)..(684): Homolog of NCBI NO: 14521559 NR Description: TRANSITIONAL ENDOPLASMIC RETICULUM ATPASE
  misc_feature (74)..(317): Homolog of NCBI NO: 14590568 NR Description: cell division control protein (transitional
  misc_feature (312)..(684): Homolog of NCBI NO: 14590568 NR Description: cell division control protein (transitional
  misc_feature (1)..(632): Homolog of NCBI NO: 15669345 NR Description: cell division control protein 48 (cdc48), AAA
  misc_feature (347)..(679): Homolog of NCBI NO: 23481659 NR Description: putative cell division cycle ATPase [Plasmodium
  misc_feature (1)..(427): Homolog of NCBI NO: 23481659 NR Description: putative cell division cycle ATPase [Plasmodium
  misc_feature (344)..(679): Homolog of NCBI NO: 23612492 NR Description: cell division cycle ATPase, putative [Plasmodium
  misc_feature (1)..(374): Homolog of NCBI NO: 23612492 NR Description: cell division cycle ATPase, putative [Plasmodium
  misc_feature (111)..(723): Homolog of NCBI NO: 38455496 NR Description: cell division cycle protein 48 ['Chlorella'
  misc_feature (1)..(723): Homolog of NCBI NO: 32402982 NR Description: hypothetical protein [Neurospora crassa]
MNKVVRSNLRVRLGDVISVHQCPDVKYGKRVHILPVDDTVEGVTGNLFDAYLKPYFLEAYRPVRKGDLFLVRGGMRSVEFKVIETDPAEYCVVAPDTEIFCEGEPVKREDEERLDEVGYDDVGGVRKQMAQIRELVELPLRHPQLFKSIGVKPPKGILLYGPPGSGKTLIARAVANETGAFFFCINGPEIMSKLAGESESNLRKAFEEAEKNAPSIIFIDEIDSIAPKREKTNGEVERRIVSQLLTLMDGLKSRAHVIVMGATNRPNSIDPALRRFGRFDREIDIGVPDEIGRLEVLRIHTKNMKLAEDVDLERISKDTHGYVGADLAALCTEAALQCIREKMDVIDLEDDSIDAEILNSMAVSNEHFHTALGNSNPSALRETVVEVPNVSWEDIGGLENVKRELQETVQYPVEHPEKFEKFGMSPSKGVLFYGPPGCGKTLLAKAIANECQANFISVKGPELLTMWFGESEANVREIFDKARQSAPCVLFFDELDSIATQRGNSAGDAGGAADRVLNQLLTEMDGMNAKKTVFIIGATNRPDIIDSALLRPGRLDQLIYIPLPDEDSRLNIFKACLRKSPVAKDVDVTALAKYTQGFSGADITEICQRACKYAIRENIEKDIENERRRSQNPEAMEEDMVDDEVSEIRAAHFEESMKYARRSVSDADIRKYQAFAQTLQQSRGFGSEFRFDSTAGVGRTTGVAAADPFATSAAAADDDDLYS

SEQ ID NO: 42292 - DNA, 726 bp, Arabidopsis thaliana
  misc_feature (1)..(726): Ceres Seq. ID no. 12396668
  misc_feature: MA Experiment ID: 108434 Result: Up-regulated in Transcription
  misc_feature: MA Experiment 108434 PARAMETER Experiment Name: At_Root_Tips_cDNA_P Parameter: Tissue Value: Root Tips
  misc_feature: MA Experiment ID: 108462 Result: Down-regulated in Transcription
  misc_feature: MA Experiment 108462 PARAMETER Experiment Name: At_Germinating_Seeds_cDNA_P Parameter: Age (day) Value: 2 vs. 0
  misc_feature: MA Experiment 108462 PARAMETER Experiment Name: At_Germinating_Seeds_cDNA_P Parameter: Tissue Value: Germinating Seeds
  misc_feature: MA Experiment ID: 108463 Result: Down-regulated in Transcription
  misc_feature: MA Experiment 108463 PARAMETER Experiment Name: At_Germinating_Seeds_cDNA_P Parameter: Age (day) Value: 3 vs. 0
  misc_feature: MA Experiment 108463 PARAMETER Experiment Name: At_Germinating_Seeds_cDNA_P Parameter: Tissue Value: Germinating Seeds
  misc_feature: MA Experiment ID: 108464 Result: Down-regulated in Transcription
  misc_feature: MA Experiment 108464 PARAMETER Experiment Name: At_Germinating_Seeds_cDNA_P Parameter: Age (day) Value: 4 vs. 0
  misc_feature: MA Experiment 108464 PARAMETER Experiment Name: At_Germinating_Seeds_cDNA_P Parameter: Tissue Value: Germinating Seeds
tttcttttttaatccctttgttctctgtggtattcaacaaatttgtctcgaatttatagagctcgaagcttcaaggaagttataatggctagtgaagatgaatcgattgaacaaaaagctgccgctcgtaaagaggcacttaaagctctaagggcagctcaggaactgtctgagaccaaggaagacggagaggatgaagctgtcgaagaagatggtccagccatgaagtttagaaactatgttccccaagctaaggagcttcaggatggtaaactagcgccaccagagctacccaaattcgaagatccgatcgttgcacttccacctgctgtagagaagaaagaggacccatttgttaacatcgctccaaagaagccaaactgggacctccgaagagatgtgcagaagaagcttgataagctcgaaaggcggactcaaaaggcaatgcataaactcatggaggagcaagagaaagaacgtgagatggctgaagctgatggtaacaccatagaaagttgaaacccaacgacgtcatcaaagaaagccaccactgaacagtatattctactcgattttgtttaactgttaaagcattcgaagtgagtagaccatgtaaaatcctacggccattggcatagacatagtaggtttatcttcttgtgtgaatcaaagaaagtcgcaatttatttccgagtagaattaagtgcggtccggttgtttttctct

SEQ ID NO: 42293 - protein, 144 aa, Arabidopsis thaliana
  peptide (1)..(144): Ceres Seq. ID no. 12396669
  misc_feature (1)..(131): Homolog of NCBI NO: 39581407 NR Description: Hypothetical protein CBG22501 [Caenorhabditis
  misc_feature (16)..(136): Homolog of NCBI NO: 21430888 NR Description: SD23244p [Drosophila melanogaster]
  misc_feature (8)..(136): Homolog of NCBI NO: 24651238 NR Description: CG15525-PA [Drosophila melanogaster]
  misc_feature (15)..(141): Homolog of NCBI NO: 20874062 NR Description: similar to hypothetical protein MGC23918
  misc_feature (8)..(141): Homolog of NCBI NO: 33469009 NR Description: RIKEN cDNA 2700094L05 [Mus musculus]
  misc_feature (8)..(141): Homolog of NCBI NO: 34866382 NR Description: similar to hypothetical protein MGC23918 [Rattus
  misc_feature (8)..(133): Homolog of NCBI NO: 21389497 NR Description: hypothetical protein MGC23918 [Homo sapiens]
  misc_feature (8)..(133): Homolog of NCBI NO: 21756313 NR Description: unnamed protein product [Homo sapiens]
  misc_feature (8)..(133): Homolog of NCBI NO: 20072383 NR Description: Similar to RIKEN cDNA 2700094L05 gene [Mus
  misc_feature (1)..(144): Homolog of NCBI NO: 18397111 NR Description: expressed protein
MASEDESIEQKAAARKEALKALRAAQELSETKEDGEDEAVEEDGPAMKFRNYVPQAKELQDGKLAPPELPKFEDPIVALPPAVEKKEDPFVNIAPKKPNWDLRRDVQKKLDKLERRTQKAMHKLMEEQEKEREMAEADGNTIES

SEQ ID NO: 42294 - protein, 98 aa, Arabidopsis thaliana; identical to SEQ ID NO: 39091
  peptide (1)..(98): Ceres Seq. ID no. 12396670
  misc_feature (1)..(85): Homolog of NCBI NO: 39581407 NR Description: Hypothetical protein CBG22501 [Caenorhabditis
  misc_feature (1)..(90): Homolog of NCBI NO: 21430888 NR Description: SD23244p [Drosophila melanogaster]
  misc_feature (1)..(90): Homolog of NCBI NO: 24651238 NR Description: CG15525-PA [Drosophila melanogaster]
  misc_feature (1)..(95): Homolog of NCBI NO: 20874062 NR Description: similar to hypothetical protein MGC23918
  misc_feature (1)..(95): Homolog of NCBI NO: 33469009 NR Description: RIKEN cDNA 2700094L05 [Mus musculus]
  misc_feature (1)..(95): Homolog of NCBI NO: 34866382 NR Description: similar to hypothetical protein MGC23918 [Rattus
  misc_feature (1)..(87): Homolog of NCBI NO: 21756313 NR Description: unnamed protein product [Homo sapiens]
  misc_feature (1)..(87): Homolog of NCBI NO: 21389497 NR Description: hypothetical protein MGC23918 [Homo sapiens]
  misc_feature (1)..(87): Homolog of NCBI NO: 20072383 NR Description: Similar to RIKEN cDNA 2700094L05 gene [Mus
  misc_feature (1)..(98): Homolog of NCBI NO: 18397111 NR Description: expressed protein

SEQ ID NO: 42295 - DNA, 920 bp, Arabidopsis thaliana
  misc_feature (1)..(920): Ceres Seq. ID no. 12676789
  misc_feature: MA Experiment ID: 108573 Result: Up-regulated in Transcription
  misc_feature: MA Experiment 108573 PARAMETER Experiment Name: At_Drought_cDNA_P Parameter: Timepoint (hr) Value: 6
  misc_feature: MA Experiment 108573 PARAMETER Experiment Name: At_Drought_cDNA_P Parameter: Tissue Value: Aerial
  misc_feature: MA Experiment 108573 PARAMETER Experiment Name: At_Drought_cDNA_P Parameter: Treatment Value: Drought vs. No Drought
  misc_feature: MA Experiment ID: 20000286 Result: Down-regulated in Transcription
  misc_feature: MA Experiment 20000286 PARAMETER Experiment Name: At_Open_Flower_P Parameter: Age (day) Value: 21
  misc_feature: MA Experiment 20000286 PARAMETER Experiment Name: At_Open_Flower_P Parameter: Plant Line Value: WS
  misc_feature: MA Experiment 20000286 PARAMETER Experiment Name: At_Open_Flower_P Parameter: Tissue Value: Half Open vs. Whole Plant
gatacagagagagcgatgatgattcgaacggcgttagtgttcgttgtcttcttcgtcggaacagtcgtacaagcgcagctgatacctccggcgaggcgtgatggatttttgtatccaccgggtcggaaaatcgaccgggatacgatacttatcgaggcgtatattgacccggtttgtccggattgtagagacgcttgggagccgctaaagctagcgattgatcactatggatctcgcgttgctcttgttcttcacctcattcctttacccttccatgacaatgcatttgtagcatctcgggctttacacatcgttgataccttaaacgccaatgccacgttcaatttgctggaagggatcttcaagcatcagacattgttctacaactcgcaaacacaactcatgtcaagacctgcagttgtggaagaattaatcaagcttggaacagttacgttaggaaactcatatcattctcctttgaaatctggcttcagcaactcaaaatctgatcttgccactagagtttccttcaagtatagcgtctcaagaggagtctccgcgacaccaaccttctacgtgaatggattcgagctgcctggtgctggttctcccaaagattatgaaggatggagagacaccattgatcctctggttaaaccacaagaagtagacatacgagacaccttcctttcattcctcacgcaaccatcttactagtttgtactttctatgatgtgccaaactcccacctacttagttgaaaagtccagaagcataactctcatacatgttcatattgttacatcttcaactgtcttcatttgcagcttaatgtataataaaccaaaaattcttcaaatgcttctcatgttttgtataaacgataaaaattaaagtattaaaagttttatactgatgac

SEQ ID NO: 42296 - protein, 238 aa, Arabidopsis thaliana
  peptide (1)..(238): Ceres Seq. ID no. 12676790
  misc_feature (25)..(218): Homolog of NCBI NO: 38346025 NR Description: OSJNBb0071D01.2 [Oryza sativa (japonica
  misc_feature (7)..(203): Homolog of NCBI NO: 8778813 NR Description: T4O12.23 [Arabidopsis thaliana]
  misc_feature (7)..(233): Homolog of NCBI NO: 15222928 NR Description: unknown protein; protein id: At1g76020.1
  misc_feature (7)..(217): Homolog of NCBI NO: 25518088 NR Description: T20H2.2 protein - Arabidopsis thaliana
  misc_feature (6)..(238): Homolog of NCBI NO: 22329686 NR Description: unknown protein
DTERAMMIRTALVFVVFFVGTVVQAQLIPPARRDGFLYPPGRKIDRDTILIEAYIDPVCPDCRDAWEPLKLAIDHYGSRVALVLHLIPLPFHDNAFVASRALHIVDTLNANATFNLLEGIFKHQTLFYNSQTQLMSRPAVVEELIKLGTVTLGNSYHSPLKSGFSNSKSDLATRVSFKYSVSRGVSATPTFYVNGFELPGAGSPKDYEGWRDTIDPLVKPQEVDIRDTFLSFLTQPSY

SEQ ID NO: 42297 - protein, 233 aa, Arabidopsis thaliana
  peptide (1)..(233): Ceres Seq. ID no. 12676791
  misc_feature (20)..(213): Homolog of NCBI NO: 38346025 NR Description: OSJNBb0071D01.2 [Oryza sativa (japonica
  misc_feature (2)..(198): Homolog of NCBI NO: 8778813 NR Description: T4O12.23 [Arabidopsis thaliana]
  misc_feature (2)..(228): Homolog of NCBI NO: 15222928 NR Description: unknown protein; protein id: At1g76020.1
  misc_feature (2)..(212): Homolog of NCBI NO: 25518088 NR Description: T20H2.2 protein - Arabidopsis thaliana
  misc_feature (1)..(233): Homolog of NCBI NO: 22329686 NR Description: unknown protein
MMIRTALVFVVFFVGTVVQAQLIPPARRDGFLYPPGRKIDRDTILIEAYIDPVCPDCRDAWEPLKLAIDHYGSRVALVLHLIPLPFHDNAFVASRALHIVDTLNANATFNLLEGIFKHQTLFYNSQTQLMSRPAVVEELIKLGTVTLGNSYHSPLKSGFSNSKSDLATRVSFKYSVSRGVSATPTFYVNGFELPGAGSPKDYEGWRDTIDPLVKPQEVDIRDTFLSFLTQPSY

SEQ ID NO: 42298 - protein, 232 aa, Arabidopsis thaliana
  peptide (1)..(232): Ceres Seq. ID no. 12676792
  misc_feature (19)..(212): Homolog of NCBI NO: 38346025 NR Description: OSJNBb0071D01.2 [Oryza sativa (japonica
  misc_feature (1)..(197): Homolog of NCBI NO: 8778813 NR Description: T4O12.23 [Arabidopsis thaliana]
  misc_feature (1)..(227): Homolog of NCBI NO: 15222928 NR Description: unknown protein; protein id: At1g76020.1
  misc_feature (1)..(211): Homolog of NCBI NO: 25518088 NR Description: T20H2.2 protein - Arabidopsis thaliana
  misc_feature (1)..(232): Homolog of NCBI NO: 22329686 NR Description: unknown protein
MIRTALVFVVFFVGTVVQAQLIPPARRDGFLYPPGRKIDRDTILIEAYIDPVCPDCRDAWEPLKLAIDHYGSRVALVLHLIPLPFHDNAFVASRALHIVDTLNANATFNLLEGIFKHQTLFYNSQTQLMSRPAVVEELIKLGTVTLGNSYHSPLKSGFSNSKSDLATRVSFKYSVSRGVSATPTFYVNGFELPGAGSPKDYEGWRDTIDPLVKPQEVDIRDTFLSFLTQPSY

SEQ ID NO: 42299 - DNA, 1551 bp, Arabidopsis thaliana
  misc_feature (1)..(1551): Ceres Seq. ID no. 13497658
  misc_feature: MA Experiment ID: 20000306 Result: Up-regulated in Transcription
  misc_feature: MA Experiment 20000306 PARAMETER Experiment Name: At_Germinating_Seeds_Sub_P Parameter: Age (hr) Value: 6 vs. 0
  misc_feature: MA Experiment 20000306 PARAMETER Experiment Name: At_Germinating_Seeds_Sub_P Parameter: Organism Value: A. thaliana
  misc_feature: MA Experiment 20000306 PARAMETER Experiment Name: At_Germinating_Seeds_Sub_P Parameter: Plant Line Value: WS
  misc_feature: MA Experiment 20000306 PARAMETER Experiment Name: At_Germinating_Seeds_Sub_P Parameter: Tissue Value: Germinating Seeds
  misc_feature: MA Experiment ID: 20000307 Result: Up-regulated in Transcription
  misc_feature: MA Experiment 20000307 PARAMETER Experiment Name: At_Germinating_Seeds_Sub_P Parameter: Age (hr) Value: 24 vs. 0
  misc_feature: MA Experiment 20000307 PARAMETER Experiment Name: At_Germinating_Seeds_Sub_P Parameter: Organism Value: A. thaliana
  misc_feature: MA Experiment 20000307 PARAMETER Experiment Name: At_Germinating_Seeds_Sub_P Parameter: Plant Line Value: WS
  misc_feature: MA Experiment 20000307 PARAMETER Experiment Name: At_Germinating_Seeds_Sub_P Parameter: Tissue Value: Germinating Seeds
  misc_feature: MA Experiment ID: 20000314 Result: Down-regulated in Transcription
  misc_feature: MA Experiment 20000314 PARAMETER Experiment Name: At_14day_Shoots-Roots_Sub_P Parameter: Age (day) Value: 14
  misc_feature: MA Experiment 20000314 PARAMETER Experiment Name: At_14day_Shoots-Roots_Sub_P Parameter: Organism Value: A. thaliana
  misc_feature: MA Experiment 20000314 PARAMETER Experiment Name: At_14day_Shoots-Roots_Sub_P Parameter: Plant Line Value: WS
  misc_feature: MA Experiment 20000314 PARAMETER Experiment Name: At_14day_Shoots-Roots_Sub_P Parameter: Tissue Value: Roots vs. Whole Plant
  misc_feature: MA Experiment ID: 20000315 Result: Down-regulated in Transcription
  misc_feature: MA Experiment 20000315 PARAMETER Experiment Name: At_14day_Shoots-Roots_Sub_P Parameter: Age (day) Value: 14
  misc_feature: MA Experiment 20000315 PARAMETER Experiment Name: At_14day_Shoots-Roots_Sub_P Parameter: Organism Value: A. thaliana
  misc_feature: MA Experiment 20000315 PARAMETER Experiment Name: At_14day_Shoots-Roots_Sub_P Parameter: Plant Line Value: WS
  misc_feature: MA Experiment 20000315 PARAMETER Experiment Name: At_14day_Shoots-Roots_Sub_P Parameter: Tissue Value: Shoots vs. Whole Plant
  misc_feature: MA Experiment ID: 20000327 Result: Up-regulated in Transcription
  misc_feature: MA Experiment 20000327 PARAMETER Experiment Name: At_42deg_Heat_Sub_P Parameter: Age (day) Value: 14
  misc_feature: MA Experiment 20000327 PARAMETER Experiment Name: At_42deg_Heat_Sub_P Parameter: Organism Value: A. thaliana
  misc_feature: MA Experiment 20000327 PARAMETER Experiment Name: At_42deg_Heat_Sub_P Parameter: Plant Line Value: WS
  misc_feature: MA Experiment 20000327 PARAMETER Experiment Name: At_42deg_Heat_Sub_P Parameter: Temperature (deg C) Value: 42 vs. 22
  misc_feature: MA Experiment 20000327 PARAMETER Experiment Name: At_42deg_Heat_Sub_P Parameter: Timepoint (hr) Value: 1
  misc_feature: MA Experiment 20000327 PARAMETER Experiment Name: At_42deg_Heat_Sub_P Parameter: Tissue Value: Aerial
  misc_feature: MA Experiment ID: 20000355 Result: Down-regulated in Transcription
  misc_feature: MA Experiment 20000355 PARAMETER Experiment Name: At_Siliques_Sub_P Parameter: Age (day) Value: 21
  misc_feature: MA Experiment 20000355 PARAMETER Experiment Name: At_Siliques_Sub_P Parameter: Organism Value: A. thaliana
  misc_feature: MA Experiment 20000355 PARAMETER Experiment Name: At_Siliques_Sub_P Parameter: Plant Line Value: WS
  misc_feature: MA Experiment 20000355 PARAMETER Experiment Name: At_Siliques_Sub_P Parameter: Tissue Value: Less Than 5mm Siliques vs. Whole Plant
  misc_feature: MA Experiment ID: 20000440 Result: Down-regulated in Transcription
  misc_feature: MA Experiment 20000440 PARAMETER Experiment Name: At_Closed-Flower__Sub_P Parameter: Tissue Value: Closed Flower vs. Whole Plant
cttttggatcgcttccgttcaatgtaaccggcgaaacagagcaatctgaaattatcttagggctatagttatggatattttcatggatttcttcaataaaccttctgttacagagacattcgtcgacgttttgctatgtgcagttccgatttgggtcactgttatgatcgggcttctgatcggttggtcttggcgtcctagatggactagcttggtttatttaggtttccgttctaagcttcggtttctatgtactgttcctcctggatttggtgctcgtcgtatttggcttgctttcaccgctctctctgctttttccgtttgttcaacctccaataaatcctcggttaataacggttcctctaaaccggtcgaagaagaagcattttcacgagctagtgataaagttacagrgaaagagaaagatgttgtgacagagaaggatttagagcatttgttgcatctgcttgaagctggaaatgctagttttgagtggcaatctatgatggataagtctactccgaatatgagctatcaagcttggcgtcatgagcctgagataggtcctgttgtttatcgtagtcgaactgtttttgaggatgtaacaccagacattgttagggatttcttctgggacgatgagtttcgacctaaatgggatactatgcttgcttacttcaaaactttagaggaagatcctaagacaggaactaccattgttcattggattaaaaagttcccattcttctgtagtgaccgggaatacatcattggtaggagaatatgggaatctggaagaaaatattatgctgtgactaagggagtaccctataaagatttaccaaagcgtgataagccgaggcgagtcgagctttatttctcaagctggattgtcaaagcagttgaatccaggaaaggtgatgggcaaatgacagcttgtgaagtctctcttgtccattacgaagacatgggaatcccaaaagatgtagcaaagttaggagtccgtcatggcatgtggggagctgtaaagaagctaaactctggtttgagggcataccaaagcgctagaaaaccagggacgtcgctctcacggagtcgcagatggcaagtatcaccacaaagctgaacatgtatttggtggwaacatctggrgcagaggamgaagagagwggamgagcagtagagaatgcgaggaaacaaaatgatcagttcggtgtagactggaaatggatcgttgtaggaggagtagctttggcttgtgggcttcattctagtgctataggtaaggcgttaatggttggagctggacagagacttgctcgtaggtgagatcttttgcctgagagtttcattatcttatctgtttccctggagaattcttagaccaacacagaaacactatattactgatatggattgtgttttcttgtaactgcactgaaatgagcatagtggtttcgaaagcaaaccatgcagagtagttttgaagcaagggcaaacatttggtcgaatatttcttgtaatacggtttaagattctggagacggtttt

SEQ ID NO: 42300 - protein, 351 aa, Arabidopsis thaliana
  peptide (1)..(351): Ceres Seq. ID no. 15223014
  misc_feature (169)..(248): Pfam Name: START domain Pfam Description: START domain
  misc_feature (20)..(67): Homolog of NCBI NO: 18423599 NR Description: membrane related protein-like [Arabidopsis
  misc_feature (94)..(342): Homolog of NCBI NO: 18423599 NR Description: membrane related protein-like [Arabidopsis
  misc_feature (1)..(52): Homolog of NCBI NO: 38344869 NR Description: OSJNBa0020P07.12 [Oryza sativa (japonica
  misc_feature (105)..(341): Homolog of NCBI NO: 38344869 NR Description: OSJNBa0020P07.12 [Oryza sativa (japonica
  misc_feature (10)..(38): Homolog of NCBI NO: 34393225 NR Description: putative membrane related protein CP5
  misc_feature (120)..(342): Homolog of NCBI NO: 34393225 NR Description: putative membrane related protein CP5
  misc_feature (5)..(341): Homolog of NCBI NO: 7485064 NR Description: hypothetical protein - Arabidopsis thaliana
  misc_feature (5)..(341): Homolog of NCBI NO: 18414239 NR Description: expressed protein [Arabidopsis thaliana]
  misc_feature (1)..(342): Homolog of NCBI NO: 18403635 NR Description: expressed protein [Arabidopsis thaliana]
  misc_feature (1)..(342): Homolog of NCBI NO: 15810257 NR Description: unknown protein [Arabidopsis thaliana]
  misc_feature (115)..(115): Xaa is any aa, unknown or other
MDIFMDFFNKPSVTETFVDVLLCAVPIWVTVMIGLLIGWSWRPRWTSLVYLGFRSKLRFLCTVPPGFGARRIWLAFTALSAFSVCSTSNKSSVNNGSSKPVEEEAFSRASDKVTXKEKDVVTEKDLEHLLHLLEAGNASFEWQSMMDKSTPNMSYQAWRHEPEIGPVVYRSRTVFEDVTPDIVRDFFWDDEFRPKWDTMLAYFKTLEEDPKTGTTIVHWIKKFPFFCSDREYIIGRRIWESGRKYYAVTKGVPYKDLPKRDKPRRVELYFSSWIVKAVESRKGDGQMTACEVSLVHYEDMGIPKDVAKLGVRHGMWGAVKKLNSGLRAYQSARKPGTSLSRSRRWQVSPQS

SEQ ID NO: 42301 - protein, 347 aa, Arabidopsis thaliana
  peptide (1)..(347): Ceres Seq. ID no. 15223015
  misc_feature (165)..(244): Pfam Name: START domain Pfam Description: START domain
  misc_feature (16)..(63): Homolog of NCBI NO: 18423599 NR Description: membrane related protein-like [Arabidopsis
  misc_feature (90)..(338): Homolog of NCBI NO: 18423599 NR Description: membrane related protein-like [Arabidopsis
  misc_feature (1)..(48): Homolog of NCBI NO: 38344869 NR Description: OSJNBa0020P07.12 [Oryza sativa (japonica
  misc_feature (101)..(337): Homolog of NCBI NO: 38344869 NR Description: OSJNBa0020P07.12 [Oryza sativa (japonica
  misc_feature (6)..(34): Homolog of NCBI NO: 34393225 NR Description: putative membrane related protein CP5
  misc_feature (116)..(338): Homolog of NCBI NO: 34393225 NR Description: putative membrane related protein CP5
  misc_feature (1)..(337): Homolog of NCBI NO: 7485064 NR Description: hypothetical protein - Arabidopsis thaliana
  misc_feature (1)..(337): Homolog of NCBI NO: 18414239 NR Description: expressed protein [Arabidopsis thaliana]
  misc_feature (1)..(338): Homolog of NCBI NO: 18403635 NR Description: expressed protein [Arabidopsis thaliana]
  misc_feature (1)..(338): Homolog of NCBI NO: 15810257 NR Description: unknown protein [Arabidopsis thaliana]
  misc_feature (111)..(111): Xaa is any aa, unknown or other
MDFFNKPSVTETFVDVLLCAVPIWVTVMIGLLIGWSWRPRWTSLVYLGFRSKLRFLCTVPPGFGARRIWLAFTALSAFSVCSTSNKSSVNNGSSKPVEEEAFSRASDKVTXKEKDVVTEKDLEHLLHLLEAGNASFEWQSMMDKSTPNMSYQAWRHEPEIGPVVYRSRTVFEDVTPDIVRDFFWDDEFRPKWDTMLAYFKTLEEDPKTGTTIVHWIKKFPFFCSDREYIIGRRIWESGRKYYAVTKGVPYKDLPKRDKPRRVELYFSSWIVKAVESRKGDGQMTACEVSLVHYEDMGIPKDVAKLGVRHGMWGAVKKLNSGLRAYQSARKPGTSLSRSRRWQVSPQS

SEQ ID NO: 42302 - protein, 320 aa, Arabidopsis thaliana
  peptide (1)..(320): Ceres Seq. ID no. 15223016
  misc_feature (138)..(217): Pfam Name: START domain Pfam Description: START domain
  misc_feature (54)..(311): Homolog of NCBI NO: 10178166 NR Description: membrane related protein-like [Arabidopsis
  misc_feature (1)..(36): Homolog of NCBI NO: 18423599 NR Description: membrane related protein-like [Arabidopsis
  misc_feature (63)..(311): Homolog of NCBI NO: 18423599 NR Description: membrane related protein-like [Arabidopsis
  misc_feature (1)..(21): Homolog of NCBI NO: 38344869 NR Description: OSJNBa0020P07.12 [Oryza sativa (japonica
  misc_feature (74)..(310): Homolog of NCBI NO: 38344869 NR Description: OSJNBa0020P07.12 [Oryza sativa (japonica
  misc_feature (89)..(311): Homolog of NCBI NO: 34393225 NR Description: putative membrane related protein CP5
  misc_feature (1)..(310): Homolog of NCBI NO: 7485064 NR Description: hypothetical protein - Arabidopsis thaliana
  misc_feature (1)..(310): Homolog of NCBI NO: 18414239 NR Description: expressed protein [Arabidopsis thaliana]
  misc_feature (1)..(311): Homolog of NCBI NO: 18403635 NR Description: expressed protein [Arabidopsis thaliana]
  misc_feature (1)..(311): Homolog of NCBI NO: 15810257 NR Description: unknown protein [Arabidopsis thaliana]
  misc_feature (84)..(84): Xaa is any aa, unknown or other
MIGLLIGWSWRPRWTSLVYLGFRSKLRFLCTVPPGFGARRIWLAFTALSAFSVCSTSNKSSVNNGSSKPVEEEAFSRASDKVTXKEKDVVTEKDLEHLLHLLEAGNASFEWQSMMDKSTPNMSYQAWRHEPEIGPVVYRSRTVFEDVTPDIVRDFFWDDEFRPKWDTMLAYFKTLEEDPKTGTTIVHWIKKFPFFCSDREYIIGRRIWESGRKYYAVTKGVPYKDLPKRDKPRRVELYFSSWIVKAVESRKGDGQMTACEVSLVHYEDMGIPKDVAKLGVRHGMWGAVKKLNSGLRAYQSARKPGTSLSRSRRWQVSPQS

SEQ ID NO: 42303 - DNA, 1270 bp, Arabidopsis thaliana
  misc_feature (1)..(1270): Ceres Seq. ID no. 12326321
  misc_feature: MA Experiment ID: 108576 Result: Down-regulated in Transcription
  misc_feature: MA Experiment 108576 PARAMETER Experiment Name: At_42deg_Heat_cDNA_P Parameter: Temperature (deg C) Value: 42 vs. 22
  misc_feature: MA Experiment 108576 PARAMETER Experiment Name: At_42deg_Heat_cDNA_P Parameter: Timepoint (hr) Value: 1
  misc_feature: MA Experiment 108576 PARAMETER Experiment Name: At_42deg_Heat_cDNA_P Parameter: Tissue Value: Aerial
  misc_feature: MA Experiment ID: 108577 Result: Down-regulated in Transcription
  misc_feature: MA Experiment 108577 PARAMETER Experiment Name: At_42deg_Heat_cDNA_P Parameter: Temperature (deg C) Value: 42 vs. 22
  misc_feature: MA Experiment 108577 PARAMETER Experiment Name: At_42deg_Heat_cDNA_P Parameter: Timepoint (hr) Value: 6
  misc_feature: MA Experiment 108577 PARAMETER Experiment Name: At_42deg_Heat_cDNA_P Parameter: Tissue Value: Aerial
  misc_feature: MA Experiment ID: 108595 Result: Down-regulated in Transcription
  misc_feature: MA Experiment 108595 PARAMETER Experiment Name: At_Ler-pi_Ovule_cDNA_P Parameter: Plant Line Value: null
  misc_feature: MA Experiment ID: 20000111 Result: Down-regulated in Transcription
  misc_feature: MA Experiment 20000111 PARAMETER Experiment Name: At_42deg_Heat_cDNA_P Parameter: Temperature (deg C) Value: 42 vs. 22
  misc_feature: MA Experiment 20000111 PARAMETER Experiment Name: At_42deg_Heat_cDNA_P Parameter: Timepoint (hr) Value: 6
  misc_feature: MA Experiment 20000111 PARAMETER Experiment Name: At_42deg_Heat_cDNA_P Parameter: Tissue Value: Aerial
  misc_feature: MA Experiment ID: 20000112 Result: Down-regulated in Transcription
  misc_feature: MA Experiment 20000112 PARAMETER Experiment Name: At_42deg_Heat_cDNA_P Parameter: Temperature (deg C) Value: 42 vs. 22
  misc_feature: MA Experiment 20000112 PARAMETER Experiment Name: At_42deg_Heat_cDNA_P Parameter: Timepoint (hr) Value: 2
  misc_feature: MA Experiment 20000112 PARAMETER Experiment Name: At_42deg_Heat_cDNA_P Parameter: Tissue Value: Aerial
  misc_feature: MA Experiment ID: 20000113 Result: Down-regulated in Transcription
  misc_feature: MA Experiment 20000113 PARAMETER Experiment Name: At_42deg_Heat_cDNA_P Parameter: Temperature (deg C) Value: 42 vs. 22
  misc_feature: MA Experiment 20000113 PARAMETER Experiment Name: At_42deg_Heat_cDNA_P Parameter: Timepoint (hr) Value: 8
  misc_feature: MA Experiment 20000113 PARAMETER Experiment Name: At_42deg_Heat_cDNA_P Parameter: Tissue Value: Aerial
  misc_feature: MA Experiment ID: 20000117 Result: Down-regulated in Transcription
  misc_feature: MA Experiment 20000117 PARAMETER Experiment Name: At_100uM_ABA_Mutants_cDNA_P Parameter: Plant Line Value: Columbia
  misc_feature: MA Experiment 20000117 PARAMETER Experiment Name: At_100uM_ABA_Mutants_cDNA_P Parameter: Timepoint (hr) Value: 6
  misc_feature: MA Experiment 20000117 PARAMETER Experiment Name: At_100uM_ABA_Mutants_cDNA_P Parameter: Tissue Value: Aerial
  misc_feature: MA Experiment 20000117 PARAMETER Experiment Name: At_100uM_ABA_Mutants_cDNA_P Parameter: Treatment Value: 100uM ABA vs. No Treatment
  misc_feature: MA Experiment ID: 20000144 Result: Down-regulated in Transcription
  misc_feature: MA Experiment 20000144 PARAMETER Experiment Name: At_42deg_Heat_cDNA_P Parameter: Temperature (deg C) Value: 42 vs. 22
  misc_feature: MA Experiment 20000144 PARAMETER Experiment Name: At_42deg_Heat_cDNA_P Parameter: Timepoint (hr) Value: 1
  misc_feature: MA Experiment 20000144 PARAMETER Experiment Name: At_42deg_Heat_cDNA_P Parameter: Tissue Value: Aerial
  misc_feature: MA Experiment ID: 20000224 Result: Down-regulated in Transcription
ctactttagatttgatgtgttccttcaaggtcttgtttggttttatccaggtccaagtaattagcacaggatgagagaggcacagctaggcggtcacactctgaggtcccatggaatgactgttgcaaggactcacatgcatgattggatcattctcgtgttacttgttattctcgagtgtgtactccttataatccacccattttatcgctttgttggtaaagatatgatgactgatctaagttacccgttaaagagtaacaccgtaccaatttggtctgtcccggtatatgcgatgctgttacctttggtaatcttcatctttatctacttccgtcgaagagatgtttatgatcttcatcacgcggtgctaggtctcttatactctgttctggtgacagcagtacttaccgatgcaataaagaatgcagttggtcgaccacgtcctgacttcttctggcgttgttttccagatggcaaagctctttatgatagccttggagatgttatatgccatggtgataaaagcgtcataagggaaggtcacaaaagctttccaagtggacacacgtcatggtctttttcgggtctcggatttctttcgctttacttatcgggaaagattcaagcatttgacggtaaaggccacgttgcaaagctatgcatagtcatactccctttgctatttgcagctcttgtcggcatttcccgtgttgatgactattggcatcattggcaagacgtctttgcaggaggcttgctaggtcttgcgatctctacaatctgttatcttcaatttttcccgccaccatatcacaccgaaggttggggaccatatgcttacttccaagtgttggaggctgcgagagtgcaaggagcagcgaatggagcagtgcagcagccgccgccccaagttaacaacggtgaagaagaagacggtgggtttatgggtttacatttggtggataatccgactatgaggagagaagaggatgtagaaactggtagaggctgagatgaagaaactctgaagctggtttggttacttgttaggacactttctcttgttcttttgattctttgttggacaactttagtagatttctctaagataactaatagagtcgtttggttttggttttggtttaaatggatgaccggttttatggttccggtattggtggttaaagtttatgtttttcaaaaaagttcactggataaatgtagctttattttcaatattttaaggattgaaatcggatttgaactt

SEQ ID NO: 42304 - protein, 314 aa, Arabidopsis thaliana; identical to SEQ ID NO: 27353
  peptide (1)..(314): Ceres Seq. ID no. 12326322
  misc_feature (108)..(248): Pfam Name: PAP2 superfamily Pfam Description: PAP2 superfamily
  misc_feature (2)..(256): Homolog of NCBI NO: 34895654 NR Description: putative phosphatidic acid phosphatase alpha
  misc_feature (1)..(284): Homolog of NCBI NO: 10673973 NR Description: phosphatidic acid phosphatase beta [Vigna
  misc_feature (1)..(273): Homolog of NCBI NO: 21554001 NR Description: putative phosphatidic acid phosphatase
  misc_feature (1)..(273): Homolog of NCBI NO: 25353094 NR Description: probable phosphatidic acid phosphatase
  misc_feature (1)..(273): Homolog of NCBI NO: 18379166 NR Description: putative phosphatidic acid phosphatase
  misc_feature (1)..(273): Homolog of NCBI NO: 15724220 NR Description: At2g01180/F10A8.6 [Arabidopsis thaliana]
  misc_feature (1)..(271): Homolog of NCBI NO: 15218051 NR Description: putative phosphatidic acid phosphatase
  misc_feature (1)..(314): Homolog of NCBI NO: 9621903 NR Description: phosphatidic acid phosphatase alpha [Vigna
  misc_feature (1)..(314): Homolog of NCBI NO: 6957723 NR Description: putative phosphatidate phosphohydrolase
  misc_feature (1)..(314): Homolog of NCBI NO: 18396250 NR Description: putative phosphatidate phosphohydrolase

SEQ ID NO: 42305 - protein, 299 aa, Arabidopsis thaliana; identical to SEQ ID NO: 27354
  peptide (1)..(299): Ceres Seq. ID no. 12326323
  misc_feature (93)..(233): Pfam Name: PAP2 superfamily Pfam Description: PAP2 superfamily
  misc_feature (1)..(241): Homolog of NCBI NO: 34895654 NR Description: putative phosphatidic acid phosphatase alpha
  misc_feature (1)..(269): Homolog of NCBI NO: 10673973 NR Description: phosphatidic acid phosphatase beta [Vigna
  misc_feature (1)..(258): Homolog of NCBI NO: 21554001 NR Description: putative phosphatidic acid phosphatase
  misc_feature (1)..(258): Homolog of NCBI NO: 25353094 NR Description: probable phosphatidic acid phosphatase
  misc_feature (1)..(258): Homolog of NCBI NO: 18379166 NR Description: putative phosphatidic acid phosphatase
  misc_feature (1)..(258): Homolog of NCBI NO: 15724220 NR Description: At2g01180/F10A8.6 [Arabidopsis thaliana]
  misc_feature (1)..(256): Homolog of NCBI NO: 15218051 NR Description: putative phosphatidic acid phosphatase
  misc_feature (1)..(299): Homolog of NCBI NO: 9621903 NR Description: phosphatidic acid phosphatase alpha [Vigna
  misc_feature (1)..(299): Homolog of NCBI NO: 6957723 NR Description: putative phosphatidate phosphohydrolase
  misc_feature (1)..(299): Homolog of NCBI NO: 18396250 NR Description: putative phosphatidate phosphohydrolase

SEQ ID NO: 42306 - protein, 292 aa, Arabidopsis thaliana; identical to SEQ ID NO: 27355
  peptide (1)..(292): Ceres Seq. ID no. 12326324
  misc_feature (86)..(226): Pfam Name: PAP2 superfamily Pfam Description: PAP2 superfamily
  misc_feature (1)..(234): Homolog of NCBI NO: 34895654 NR Description: putative phosphatidic acid phosphatase alpha
  misc_feature (1)..(262): Homolog of NCBI NO: 10673973 NR Description: phosphatidic acid phosphatase beta [Vigna
  misc_feature (1)..(251): Homolog of NCBI NO: 21554001 NR Description: putative phosphatidic acid phosphatase
  misc_feature (1)..(251): Homolog of NCBI NO: 25353094 NR Description: probable phosphatidic acid phosphatase
  misc_feature (1)..(251): Homolog of NCBI NO: 18379166 NR Description: putative phosphatidic acid phosphatase
  misc_feature (1)..(251): Homolog of NCBI NO: 15724220 NR Description: At2g01180/F10A8.6 [Arabidopsis thaliana]
  misc_feature (1)..(249): Homolog of NCBI NO: 15218051 NR Description: putative phosphatidic acid phosphatase
  misc_feature (1)..(292): Homolog of NCBI NO: 9621903 NR Description: phosphatidic acid phosphatase alpha [Vigna
  misc_feature (1)..(292): Homolog of NCBI NO: 6957723 NR Description: putative phosphatidate phosphohydrolase
  misc_feature (1)..(292): Homolog of NCBI NO: 18396250 NR Description: putative phosphatidate phosphohydrolase

SEQ ID NO: 42307 - DNA, 890 bp, Arabidopsis thaliana
  misc_feature (1)..(890): Ceres Seq. ID no. 12326932
  misc_feature: MA Experiment ID: 108434 Result: Up-regulated in Transcription
  misc_feature: MA Experiment 108434 PARAMETER Experiment Name: At_Root_Tips_cDNA_P Parameter: Tissue Value: Root Tips
  misc_feature: MA Experiment ID: 108462 Result: Up-regulated in Transcription
  misc_feature: MA Experiment 108462 PARAMETER Experiment Name: At_Germinating_Seeds_cDNA_P Parameter: Age (day) Value: 2 vs. 0
  misc_feature: MA Experiment 108462 PARAMETER Experiment Name: At_Germinating_Seeds_cDNA_P Parameter: Tissue Value: Germinating Seeds
  misc_feature: MA Experiment ID: 108576 Result: Up-regulated in Transcription
  misc_feature: MA Experiment 108576 PARAMETER Experiment Name: At_42deg_Heat_cDNA_P Parameter: Temperature (deg C) Value: 42 vs. 22
  misc_feature: MA Experiment 108576 PARAMETER Experiment Name: At_42deg_Heat_cDNA_P Parameter: Timepoint (hr) Value: 1
  misc_feature: MA Experiment 108576 PARAMETER Experiment Name: At_42deg_Heat_cDNA_P Parameter: Tissue Value: Aerial
  misc_feature: MA Experiment ID: 108577 Result: Up-regulated in Transcription
  misc_feature: MA Experiment 108577 PARAMETER Experiment Name: At_42deg_Heat_cDNA_P Parameter: Temperature (deg C) Value: 42 vs. 22
  misc_feature: MA Experiment 108577 PARAMETER Experiment Name: At_42deg_Heat_cDNA_P Parameter: Timepoint (hr) Value: 6
  misc_feature: MA Experiment 108577 PARAMETER Experiment Name: At_42deg_Heat_cDNA_P Parameter: Tissue Value: Aerial
  misc_feature: MA Experiment ID: 20000069 Result: Down-regulated in Transcription
  misc_feature: MA Experiment 20000069 PARAMETER Experiment Name: At_100uM_ABA_Mutants_cDNA_P Parameter: Plant Line Value: CS23
  misc_feature: MA Experiment 20000069 PARAMETER Experiment Name: At_100uM_ABA_Mutants_cDNA_P Parameter: Timepoint (hr) Value: 6
  misc_feature: MA Experiment 20000069 PARAMETER Experiment Name: At_100uM_ABA_Mutants_cDNA_P Parameter: Tissue Value: Aerial
  misc_feature: MA Experiment 20000069 PARAMETER Experiment Name: At_100uM_ABA_Mutants_cDNA_P Parameter: Treatment Value: 100uM ABA vs. No Treatment
  misc_feature: MA Experiment ID: 20000070 Result: Down-regulated in Transcription
  misc_feature: MA Experiment 20000070 PARAMETER Experiment Name: At_100uM_ABA_Mutants_cDNA_P Parameter: Plant Line Value: CS24
  misc_feature: MA Experiment 20000070 PARAMETER Experiment Name: At_100uM_ABA_Mutants_cDNA_P Parameter: Timepoint (hr) Value: 6
  misc_feature: MA Experiment 20000070 PARAMETER Experiment Name: At_100uM_ABA_Mutants_cDNA_P Parameter: Tissue Value: Aerial
  misc_feature: MA Experiment 20000070 PARAMETER Experiment Name: At_100uM_ABA_Mutants_cDNA_P Parameter: Treatment Value: 100uM ABA vs. No Treatment
  misc_feature: MA Experiment ID: 20000071 Result: Down-regulated in Transcription
  misc_feature: MA Experiment 20000071 PARAMETER Experiment Name: At_100uM_ABA_Mutants_cDNA_P Parameter: Plant Line Value: CS8104
  misc_feature: MA Experiment 20000071 PARAMETER Experiment Name: At_100uM_ABA_Mutants_cDNA_P Parameter: Timepoint (hr) Value: 6
  misc_feature: MA Experiment 20000071 PARAMETER Experiment Name: At_100uM_ABA_Mutants_cDNA_P Parameter: Tissue Value: Aerial
  misc_feature: MA Experiment 20000071 PARAMETER Experiment Name: At_100uM_ABA_Mutants_cDNA_P Parameter: Treatment Value: 100uM ABA vs. No Treatment
  misc_feature: MA Experiment ID: 20000086 Result: Down-regulated in Transcription
  misc_feature: MA Experiment 20000086 PARAMETER Experiment Name: At_100uM_ABA_Mutants_cDNA_P Parameter: Plant Line Value: CS22
  misc_feature: MA Experiment 20000086 PARAMETER Experiment Name: At_100uM_ABA_Mutants_cDNA_P Parameter: Timepoint (hr) Value: 6
  misc_feature: MA Experiment 20000086 PARAMETER Experiment Name: At_100uM_ABA_Mutants_cDNA_P Parameter: Tissue Value: Aerial
  misc_feature: MA Experiment 20000086 PARAMETER Experiment Name: At_100uM_ABA_Mutants_cDNA_P Parameter: Treatment Value: 100uM ABA vs. No Treatment
  misc_feature: MA Experiment ID: 20000087 Result: Down-regulated in Transcription
  misc_feature: MA Experiment 20000087 PARAMETER Experiment Name: At_100uM_ABA_Mutants_cDNA_P Parameter: Plant Line Value: WS
  misc_feature: MA Experiment 20000087 PARAMETER Experiment Name: At_100uM_ABA_Mutants_cDNA_P Parameter: Timepoint (hr) Value: 6
  misc_feature: MA Experiment 20000087 PARAMETER Experiment Name: At_100uM_ABA_Mutants_cDNA_P Parameter: Tissue Value: Aerial
  misc_feature: MA Experiment 20000087 PARAMETER Experiment Name: At_100uM_ABA_Mutants_cDNA_P Parameter: Treatment Value: 100uM ABA vs. No Treatment
  misc_feature: MA Experiment ID: 20000111 Result: Up-regulated in Transcription
  misc_feature: MA Experiment 20000111 PARAMETER Experiment Name: At_42deg_Heat_cDNA_P Parameter: Temperature (deg C) Value: 42 vs. 22
  misc_feature: MA Experiment 20000111 PARAMETER Experiment Name: At_42deg_Heat_cDNA_P Parameter: Timepoint (hr) Value: 6
  misc_feature: MA Experiment 20000111 PARAMETER Experiment Name: At_42deg_Heat_cDNA_P Parameter: Tissue Value: Aerial
  misc_feature: MA Experiment ID: 20000112 Result: Up-regulated in Transcription
  misc_feature: MA Experiment 20000112 PARAMETER Experiment Name: At_42deg_Heat_cDNA_P Parameter: Temperature (deg C) Value: 42 vs. 22
  misc_feature: MA Experiment 20000112 PARAMETER Experiment Name: At_42deg_Heat_cDNA_P Parameter: Timepoint (hr) Value: 2
  misc_feature: MA Experiment 20000112 PARAMETER Experiment Name: At_42deg_Heat_cDNA_P Parameter: Tissue Value: Aerial
  misc_feature: MA Experiment ID: 20000113 Result: Up-regulated in Transcription
  misc_feature: MA Experiment 20000113 PARAMETER Experiment Name: At_42deg_Heat_cDNA_P Parameter: Temperature (deg C) Value: 42 vs. 22
  misc_feature: MA Experiment 20000113 PARAMETER Experiment Name: At_42deg_Heat_cDNA_P Parameter: Timepoint (hr) Value: 8
  misc_feature: MA Experiment 20000113 PARAMETER Experiment Name: At_42deg_Heat_cDNA_P Parameter: Tissue Value: Aerial
  misc_feature: MA Experiment ID: 20000117 Result: Down-regulated in Transcription
  misc_feature: MA Experiment 20000117 PARAMETER Experiment Name: At_100uM_ABA_Mutants_cDNA_P Parameter: Plant Line Value: Columbia
  misc_feature: MA Experiment 20000117 PARAMETER Experiment Name: At_100uM_ABA_Mutants_cDNA_P Parameter: Timepoint (hr) Value: 6
  misc_feature: MA Experiment 20000117 PARAMETER Experiment Name: At_100uM_ABA_Mutants_cDNA_P Parameter: Tissue Value: Aerial
  misc_feature: MA Experiment 20000117 PARAMETER Experiment Name: At_100uM_ABA_Mutants_cDNA_P Parameter: Treatment Value: 100uM ABA vs. No Treatment
  misc_feature: MA Experiment ID: 20000144 Result: Up-regulated in Transcription
  misc_feature: MA Experiment 20000144 PARAMETER Experiment Name: At_42deg_Heat_cDNA_P Parameter: Temperature (deg C) Value: 42 vs. 22
  misc_feature: MA Experiment 20000144 PARAMETER Experiment Name: At_42deg_Heat_cDNA_P Parameter: Timepoint (hr) Value: 1
  misc_feature: MA Experiment 20000144 PARAMETER Experiment Name: At_42deg_Heat_cDNA_P Parameter: Tissue Value: Aerial
  misc_feature: MA Experiment ID: 20000171 Result: Up-regulated in Transcription
  misc_feature: MA Experiment 20000171 PARAMETER Experiment Name: At_42deg_Heat_P Parameter: Age (day) Value: 14
  misc_feature: MA Experiment 20000171 PARAMETER Experiment Name: At_42deg_Heat_P Parameter: Organism Value: A. thaliana
  misc_feature: MA Experiment 20000171 PARAMETER Experiment Name: At_42deg_Heat_P Parameter: Plant Line Value: WS
  misc_feature: MA Experiment 20000171 PARAMETER Experiment Name: At_42deg_Heat_P Parameter: Temperature (deg C) Value: 42 vs. 22
  misc_feature: MA Experiment 20000171 PARAMETER Experiment Name: At_42deg_Heat_P Parameter: Timepoint (hr) Value: 1
  misc_feature: MA Experiment 20000171 PARAMETER Experiment Name: At_42deg_Heat_P Parameter: Tissue Value: Aerial
  misc_feature: MA Experiment ID: 20000173 Result: Up-regulated in Transcription
  misc_feature: MA Experiment 20000173 PARAMETER Experiment Name: At_42deg_Heat_P Parameter: Age (day) Value: 14
  misc_feature: MA Experiment 20000173 PARAMETER Experiment Name: At_42deg_Heat_P Parameter: Organism Value: A. thaliana
  misc_feature: MA Experiment 20000173 PARAMETER Experiment Name: At_42deg_Heat_P Parameter: Plant Line Value: WS
  misc_feature: MA Experiment 20000173 PARAMETER Experiment Name: At_42deg_Heat_P Parameter: Temperature (deg C) Value: 42 vs. 22
  misc_feature: MA Experiment 20000173 PARAMETER Experiment Name: At_42deg_Heat_P Parameter: Timepoint (hr) Value: 6
  misc_feature: MA Experiment 20000173 PARAMETER Experiment Name: At_42deg_Heat_P Parameter: Tissue Value: Aerial
  misc_feature: MA Experiment ID: 20000179 Result: Up-regulated in Transcription
  misc_feature: MA Experiment 20000179 PARAMETER Experiment Name: At_Germinating_Seeds_P Parameter: Age (hr) Value: 6 vs. 0
  misc_feature: MA Experiment 20000179 PARAMETER Experiment Name: At_Germinating_Seeds_P Parameter: Tissue Value: Germinating Seeds
  misc_feature: MA Experiment ID: 20000180 Result: Up-regulated in Transcription
  misc_feature: MA Experiment 20000180 PARAMETER Experiment Name: At_Germinating_Seeds_P Parameter: Age (hr) Value: 24 vs. 0
  misc_feature: MA Experiment 20000180 PARAMETER Experiment Name: At_Germinating_Seeds_P Parameter: Tissue Value: Germinating Seeds
  misc_feature: MA Experiment ID: 20000184 Result: Up-regulated in Transcription
  misc_feature: MA Experiment 20000184 PARAMETER Experiment Name: At_Shoots__P Parameter: Age (day) Value: 7
  misc_feature: MA Experiment 20000184 PARAMETER Experiment Name: At_Shoots__P Parameter: Tissue Value: Shoots vs. Whole Plant
  misc_feature: MA Experiment ID: 20000213 Result: Up-regulated in Transcription
  misc_feature: MA Experiment 20000213 PARAMETER Experiment Name: At_4deg_Cold_P Parameter: Timepoint (hr) Value: 2
  misc_feature: MA Experiment ID: 20000234 Result: Up-regulated in Transcription
  misc_feature: MA Experiment 20000234 PARAMETER Experiment Name: At_Siliques_P Parameter: Age (day) Value: 21
  misc_feature: MA Experiment 20000234 PARAMETER Experiment Name: At_Siliques_P Parameter: Organism Value: A. thaliana
  misc_feature: MA Experiment 20000234 PARAMETER Experiment Name: At_Siliques_P Parameter: Plant Line Value: WS
  misc_feature: MA Experiment 20000234 PARAMETER Experiment Name: At_Siliques_P Parameter: Tissue Value: Less Than 5mm Siliques vs. Whole Plant
  misc_feature: MA Experiment ID: 20000235 Result: Up-regulated in Transcription
  misc_feature: MA Experiment 20000235 PARAMETER Experiment Name: At_Siliques_P Parameter: Age (day) Value: 21
  misc_feature: MA Experiment 20000235 PARAMETER Experiment Name: At_Siliques_P Parameter: Organism Value: A. thaliana
  misc_feature: MA Experiment 20000235 PARAMETER Experiment Name: At_Siliques_P Parameter: Plant Line Value: WS
  misc_feature: MA Experiment 20000235 PARAMETER Experiment Name: At_Siliques_P Parameter: Tissue Value: 5-10mm Siliques vs. Whole Plant
  misc_feature: MA Experiment ID: 20000264 Result: Up-regulated in Transcription
  misc_feature: MA Experiment 20000264 PARAMETER Experiment Name: At_Open_Flower_P Parameter: Age (day) Value: 21
  misc_feature: MA Experiment 20000264 PARAMETER Experiment Name: At_Open_Flower_P Parameter: Plant Line Value: WS
  misc_feature: MA Experiment 20000264 PARAMETER Experiment Name: At_Open_Flower_P Parameter: Tissue Value: Open Flower vs. Whole Plant
  misc_feature: MA Experiment ID: 20000286 Result: Up-regulated in Transcription
  misc_feature: MA Experiment 20000286 PARAMETER Experiment Name: At_Open_Flower_P Parameter: Age (day) Value: 21
  misc_feature: MA Experiment 20000286 PARAMETER Experiment Name: At_Open_Flower_P Parameter: Plant Line Value: WS
  misc_feature: MA Experiment 20000286 PARAMETER Experiment Name: At_Open_Flower_P Parameter: Tissue Value: Half Open vs. Whole Plant
  misc_feature: MA Experiment ID: 20000437 Result: Down-regulated in Transcription
  misc_feature: MA Experiment 20000437 PARAMETER Experiment Name: At_Drought_P Parameter: Age (day) Value: 8
  misc_feature: MA Experiment 20000437 PARAMETER Experiment Name: At_Drought_P Parameter: Organism Value: A. thaliana
  misc_feature: MA Experiment 20000437 PARAMETER Experiment Name: At_Drought_P Parameter: Plant Line Value: WS
  misc_feature: MA Experiment 20000437 PARAMETER Experiment Name: At_Drought_P Parameter: Timepoint (hr) Value: 24
  misc_feature: MA Experiment 20000437 PARAMETER Experiment Name: At_Drought_P Parameter: Tissue Value: Whole Plant
  misc_feature: MA Experiment 20000437 PARAMETER Experiment Name: At_Drought_P Parameter: Treatment Value: Drought vs. No Drought
  misc_feature: MA Experiment ID: 20000438 Result: Up-regulated in Transcription
  misc_feature: MA Experiment 20000438 PARAMETER Experiment Name: At_Shoots__P Parameter: Age (day) Value: 14
  misc_feature: MA Experiment 20000438 PARAMETER Experiment Name: At_Shoots__P Parameter: Tissue Value: Shoots vs. Whole Plant
  misc_feature: MA Experiment ID: 20000441 Result: Up-regulated in Transcription
  misc_feature: MA Experiment 20000441 PARAMETER Experiment Name: At_1uM_BR-BRZ__P Parameter: Tissue Value: Shoot Apices
  misc_feature: MA Experiment 20000441 PARAMETER Experiment Name: At_1uM_BR-BRZ__P Parameter: Treatment Value: 1uM BR vs. No Treatment
  misc_feature: MA Experiment ID: 20000443 Result: Up-regulated in Transcription
  misc_feature: MA Experiment 20000443 PARAMETER Experiment Name: At_1uM_BR-BRZ__P Parameter: Tissue Value: Shoot Apices
  misc_feature: MA Experiment 20000443 PARAMETER Experiment Name: At_1uM_BR-BRZ__P Parameter: Treatment Value: 1uM BRZ vs. No Treatment
  misc_feature: MA Experiment ID: 20000573 Result: Down-regulated in Transcription
  misc_feature: MA Experiment 20000573 PARAMETER Experiment Name: At_100uM_ABA_Mutants__P Parameter: Organism Value: A. thaliana
  misc_feature: MA Experiment 20000573 PARAMETER Experiment Name: At_100uM_ABA_Mutants__P Parameter: Plant Line Value: CS22 vs. Ler wt
  misc_feature: MA Experiment 20000573 PARAMETER Experiment Name: At_100uM_ABA_Mutants__P Parameter: Timepoint (hr) Value: N/A
  misc_feature: MA Experiment 20000573 PARAMETER Experiment Name: At_100uM_ABA_Mutants__P Parameter: Tissue Value: Whole Plant
  misc_feature: MA Experiment 20000573 PARAMETER Experiment Name: At_100uM_ABA_Mutants__P Parameter: Treatment Value: None
  misc_feature: MA Experiment ID: 20000574 Result: Down-regulated in Transcription
  misc_feature: MA Experiment 20000574 PARAMETER Experiment Name: At_100uM_ABA_Mutants__P Parameter: Organism Value: A. thaliana
  misc_feature: MA Experiment 20000574 PARAMETER Experiment Name: At_100uM_ABA_Mutants__P Parameter: Plant Line Value: CS23 vs. Ler wt
  misc_feature: MA Experiment 20000574 PARAMETER Experiment Name: At_100uM_ABA_Mutants__P Parameter: Timepoint (hr) Value: N/A
  misc_feature: MA Experiment 20000574 PARAMETER Experiment Name: At_100uM_ABA_Mutants__P Parameter: Tissue Value: Whole Plant
  misc_feature: MA Experiment 20000574 PARAMETER Experiment Name: At_100uM_ABA_Mutants__P Parameter: Treatment Value: None
  misc_feature: MA Experiment ID: 20000709 Result: Up-regulated in Transcription
  misc_feature: MA Experiment 20000709 PARAMETER Experiment Name: At_15mM_NH4NO3_L-to-H_P Parameter: Age (hr) Value: 14
  misc_feature: MA Experiment 20000709 PARAMETER Experiment Name: At_15mM_NH4NO3_L-to-H_P Parameter: Organism Value: A. thaliana
  misc_feature: MA Experiment 20000709 PARAMETER Experiment Name: At_15mM_NH4NO3_L-to-H_P Parameter: Plant Line Value: WS
  misc_feature: MA Experiment 20000709 PARAMETER Experiment Name: At_15mM_NH4NO3_L-to-H_P Parameter: Timepoint (hr) Value: 4
  misc_feature: MA Experiment 20000709 PARAMETER Experiment Name: At_15mM_NH4NO3_L-to-H_P Parameter: Tissue Value: Aerial
  misc_feature: MA Experiment 20000709 PARAMETER Experiment Name: At_15mM_NH4NO3_L-to-H_P Parameter: Treatment Value: 15mM NH4NO3 vs. 30mM Mannitol
  misc_feature: MA Experiment ID: 20001248 Result: Down-regulated in Transcription
  misc_feature: MA Experiment 20001248 PARAMETER Experiment Name: At_Far-red-induction_P Parameter: Age (day) Value: 7
  misc_feature: MA Experiment 20001248 PARAMETER Experiment Name: At_Far-red-induction_P Parameter: Light Value: Far-red vs. White
  misc_feature: MA Experiment 20001248 PARAMETER Experiment Name: At_Far-red-induction_P Parameter: Organism Value: A. thaliana
  misc_feature: MA Experiment 20001248 PARAMETER Experiment Name: At_Far-red-induction_P Parameter: Plant Line Value: Columbia
  misc_feature: MA Experiment 20001248 PARAMETER Experiment Name: At_Far-red-induction_P Parameter: Timepoint (hr) Value: 4
  misc_feature: MA Experiment 20001248 PARAMETER Experiment Name: At_Far-red-induction_P Parameter: Tissue Value: Whole Plant
  misc_feature: MA Experiment ID: 20001450 Result: Down-regulated in Transcription
  misc_feature: MA Experiment 20001450 PARAMETER Experiment Name: At_Far-red-induction_P Parameter: Age (day) Value: 7
  misc_feature: MA Experiment 20001450 PARAMETER Experiment Name: At_Far-red-induction_P Parameter: Light Value: Far-red vs. White
  misc_feature: MA Experiment 20001450 PARAMETER Experiment Name: At_Far-red-induction_P Parameter: Organism Value: A. thaliana
  misc_feature: MA Experiment 20001450 PARAMETER Experiment Name: At_Far-red-induction_P Parameter: Plant Line Value: Columbia
  misc_feature: MA Experiment 20001450 PARAMETER Experiment Name: At_Far-red-induction_P Parameter: Timepoint (hr) Value: 8
  misc_feature: MA Experiment 20001450 PARAMETER Experiment Name: At_Far-red-induction_P Parameter: Tissue Value: Whole Plant
  misc_feature: MA Experiment ID: 20001451 Result: Down-regulated in Transcription
  misc_feature: MA Experiment 20001451 PARAMETER Experiment Name: At_Far-red-induction_P Parameter: Age (day) Value: 7
  misc_feature: MA Experiment 20001451 PARAMETER Experiment Name: At_Far-red-induction_P Parameter: Light Value: Far-red vs. White
  misc_feature: MA Experiment 20001451 PARAMETER Experiment Name: At_Far-red-induction_P Parameter: Organism Value: A. thaliana
  misc_feature: MA Experiment 20001451 PARAMETER Experiment Name: At_Far-red-induction_P Parameter: Plant Line Value: Columbia
  misc_feature: MA Experiment 20001451 PARAMETER Experiment Name: At_Far-red-induction_P Parameter: Timepoint (hr) Value: 24
  misc_feature: MA Experiment 20001451 PARAMETER Experiment Name: At_Far-red-induction_P Parameter: Tissue Value: Whole Plant
  misc_feature: MA Experiment ID: 20001555 Result: Up-regulated in Transcription
  misc_feature: MA Experiment 20001555 PARAMETER Experiment Name: At_Drought_Soil_Dry_P Parameter: Age (day) Value: 24
  misc_feature: MA Experiment 20001555 PARAMETER Experiment Name: At_Drought_Soil_Dry_P Parameter: Organism Value: A. thaliana
  misc_feature: MA Experiment 20001555 PARAMETER Experiment Name: At_Drought_Soil_Dry_P Parameter: Plant Line Value: WS
  misc_feature: MA Experiment 20001555 PARAMETER Experiment Name: At_Drought_Soil_Dry_P Parameter: Post Timepoint (hr) Value: None
  misc_feature: MA Experiment 20001555 PARAMETER Experiment Name: At_Drought_Soil_Dry_P Parameter: Post-Treatment Value: None
  misc_feature: MA Experiment 20001555 PARAMETER Experiment Name: At_Drought_Soil_Dry_P Parameter: Timepoint (day) Value: 10
  misc_feature: MA Experiment 20001555 PARAMETER Experiment Name: At_Drought_Soil_Dry_P Parameter: Treatment Value: Drought vs. No Drought
  misc_feature: MA Experiment ID: 20001556 Result: Up-regulated in Transcription
  misc_feature: MA Experiment 20001556 PARAMETER Experiment Name: At_Drought_Soil_Dry_P Parameter: Age (day) Value: 26
  misc_feature: MA Experiment 20001556 PARAMETER Experiment Name: At_Drought_Soil_Dry_P Parameter: Organism Value: A. thaliana
  misc_feature: MA Experiment 20001556 PARAMETER Experiment Name: At_Drought_Soil_Dry_P Parameter: Plant Line Value: WS
  misc_feature: MA Experiment 20001556 PARAMETER Experiment Name: At_Drought_Soil_Dry_P Parameter: Post Timepoint (hr) Value: None
  misc_feature: MA Experiment 20001556 PARAMETER Experiment Name: At_Drought_Soil_Dry_P Parameter: Post-Treatment Value: None
  misc_feature: MA Experiment 20001556 PARAMETER Experiment Name: At_Drought_Soil_Dry_P Parameter: Timepoint (day) Value: 12
  misc_feature: MA Experiment 20001556 PARAMETER Experiment Name: At_Drought_Soil_Dry_P Parameter: Treatment Value: Drought vs. No Drought
  misc_feature: MA Experiment ID: 20001559 Result: Up-regulated in Transcription
  misc_feature: MA Experiment 20001559 PARAMETER Experiment Name: At_Drought_Soil_Dry_P Parameter: Age (day) Value: 28
  misc_feature: MA Experiment 20001559 PARAMETER Experiment Name: At_Drought_Soil_Dry_P Parameter: Organism Value: A. thaliana
  misc_feature: MA Experiment 20001559 PARAMETER Experiment Name: At_Drought_Soil_Dry_P Parameter: Plant Line Value: WS
  misc_feature: MA Experiment 20001559 PARAMETER Experiment Name: At_Drought_Soil_Dry_P Parameter: Post Timepoint (hr) Value: 29
  misc_feature: MA Experiment 20001559 PARAMETER Experiment Name: At_Drought_Soil_Dry_P Parameter: Post-Treatment Value: Re-Water vs. No Drought
  misc_feature: MA Experiment 20001559 PARAMETER Experiment Name: At_Drought_Soil_Dry_P Parameter: Timepoint (day) Value: 14
  misc_feature: MA Experiment 20001559 PARAMETER Experiment Name: At_Drought_Soil_Dry_P Parameter: Treatment Value: Drought vs. No Drought
  misc_feature: MA Experiment ID: 20001560 Result: Up-regulated in Transcription
  misc_feature: MA Experiment 20001560 PARAMETER Experiment Name: At_Drought_Soil_Dry_P Parameter: Age (day) Value: 28
  misc_feature: MA Experiment 20001560 PARAMETER Experiment Name: At_Drought_Soil_Dry_P Parameter: Organism Value: A. thaliana
  misc_feature: MA Experiment 20001560 PARAMETER Experiment Name: At_Drought_Soil_Dry_P Parameter: Plant Line Value: WS
  misc_feature: MA Experiment 20001560 PARAMETER Experiment Name: At_Drought_Soil_Dry_P Parameter: Post Timepoint (hr) Value: None
  misc_feature: MA Experiment 20001560 PARAMETER Experiment Name: At_Drought_Soil_Dry_P Parameter: Post-Treatment Value: None
  misc_feature: MA Experiment 20001560 PARAMETER Experiment Name: At_Drought_Soil_Dry_P Parameter: Timepoint (day) Value: 14
  misc_feature: MA Experiment 20001560 PARAMETER Experiment Name: At_Drought_Soil_Dry_P Parameter: Treatment Value: Drought vs. No Drought
  misc_feature: MA Experiment ID: 20001768 Result: Up-regulated in Transcription
  misc_feature: MA Experiment 20001768 PARAMETER Experiment Name: At_Far-red-enriched-adult_P Parameter: Age (day) Value: 28
  misc_feature: MA Experiment 20001768 PARAMETER Experiment Name: At_Far-red-enriched-adult_P Parameter: Light Value: Far-red enriched vs. White
  misc_feature: MA Experiment 20001768 PARAMETER Experiment Name: At_Far-red-enriched-adult_P Parameter: Organism Value: A. thaliana
  misc_feature: MA Experiment 20001768 PARAMETER Experiment Name: At_Far-red-enriched-adult_P Parameter: Plant Line Value: Columbia
  misc_feature: MA Experiment 20001768 PARAMETER Experiment Name: At_Far-red-enriched-adult_P Parameter: Timepoint (hr) Value: 1
  misc_feature: MA Experiment 20001768 PARAMETER Experiment Name: At_Far-red-enriched-adult_P Parameter: Tissue Value: Aerial
caatggcggttacattttctgatctccacacagagcgaggtctcaaaaccctcgaggaacatctcgccggtaaaacgtacatctccggcgatcagctttcggttgatgatgtgaaggtttacgctgccgtattggagaatccaggtgatggttttcccaatgctagcaagtggtacgattctgttgcttctcacctagctaaaagttttcccgggaaagcagacggagtgagagttggtggtggtgttgctcctccatctgaagctcatccacatactgaggaacctgctgctgatggtgatggtgatgatgatgatgatattgatcttttcgctgatgagactgaagatgagaaaaaagctgctgaagagagagaagctgctaagaaagatactaagaagactaaagagagtggaaaatcttctgtgctactggaagtaaaaccatgggatgatgaaaccgacatgaagaagttagaagaagctgttcgtagtgttcagatgccaggtcttacatggggagcttcgaaattggtacctgttggttacgggataaagaaactcacaatcatgatgacaattgttgatgaccttgtgtctgtggacaacctcattgaagaccatctcacctcagagcctaacaacgagtacatccaaagtgtcgatattgtcgcttttaacaagatttagacacatgagaaagatgtcgagtttttcagttttggtgtcagtcttgttgtgtttcgctaaagtctcttcttcaagttccaaggccaactttggagttgaagcacattaacttcacttcacttggtcttaattaaaagctatttgtaagttcttgtctaagataaattgcctgggcttggtaacgtgtggaaagaattgcgg

SEQ ID NO: 42308 - protein, 228 aa, Arabidopsis thaliana
  peptide (1)..(228): Ceres Seq. ID no. 12326933
  misc_feature (139)..(228): Pfam Name: EF-1 guanine nucleotide exchange domain Pfam Description: EF-1 guanine nucleotide exchange domain
  misc_feature (1)..(228): Homolog of NCBI NO: 6015064 NR Description: ELONGATION FACTOR 1-BETA (EF-1-BETA)
  misc_feature (1)..(228): Homolog of NCBI NO: 6015063 NR Description: ELONGATION FACTOR 1-BETA (EF-1-BETA)
  misc_feature (1)..(228): Homolog of NCBI NO: 38232568 NR Description: translational elongation factor 1 subunit Bbeta
  misc_feature (1)..(228): Homolog of NCBI NO: 232033 NR Description: ELONGATION FACTOR 1-BETA' (EF-1-BETA')
  misc_feature (1)..(228): Homolog of NCBI NO: 34899162 NR Description: putative translation elongation factor eEF-1
  misc_feature (1)..(228): Homolog of NCBI NO: 232031 NR Description: ELONGATION FACTOR 1-BETA' (EF-1-BETA')
  misc_feature (1)..(228): Homolog of NCBI NO: 38175744 NR Description: putative translation elongation factor eEF-1
  misc_feature (1)..(228): Homolog of NCBI NO: 30687350 NR Description: elongation factor 1B alpha-subunit [Arabidopsis
  misc_feature (19)..(228): Homolog of NCBI NO: 27754711 NR Description: putative elongation factor 1B alpha-subunit
  misc_feature (1)..(228): Homolog of NCBI NO: 15239877 NR Description: elongation factor 1B alpha-subunit
MAVTFSDLHTERGLKTLEEHLAGKTYISGDQLSVDDVKVYAAVLENPGDGFPNASKWYDSVASHLAKSFPGKADGVRVGGGVAPPSEAHPHTEEPAADGDGDDDDDIDLFADETEDEKKAAEEREAAKKDTKKTKESGKSSVLLEVKPWDDETDMKKLEEAVRSVQMPGLTWGASKLVPVGYGIKKLTIMMTIVDDLVSVDNLIEDHLTSEPNNEYIQSVDIVAFNKI

SEQ ID NO: 42309 - DNA, 1503 bp, Arabidopsis thaliana
  misc_feature (1)..(1503): Ceres Seq. ID no. 12422979
  misc_feature: MA Experiment ID: 108585 Result: Down-regulated in Transcription
  misc_feature: MA Experiment 108585 PARAMETER Experiment Name: At_5mM_NaNP_cDNA_P Parameter: Timepoint (hr) Value: 6
  misc_feature: MA Experiment 108585 PARAMETER Experiment Name: At_5mM_NaNP_cDNA_P Parameter: Tissue Value: Aerial
  misc_feature: MA Experiment 108585 PARAMETER Experiment Name: At_5mM_NaNP_cDNA_P Parameter: Treatment Value: null
  misc_feature: MA Experiment ID: 20000227 Result: Up-regulated in Transcription
  misc_feature: MA Experiment 20000227 PARAMETER Experiment Name: At_Root-Tips-vs-Tops_P Parameter: Tissue Value: Root Tips vs. Root Tops
  misc_feature: MA Experiment ID: 20000234 Result: Up-regulated in Transcription
  misc_feature: MA Experiment 20000234 PARAMETER Experiment Name: At_Siliques_P Parameter: Age (day) Value: 21
  misc_feature: MA Experiment 20000234 PARAMETER Experiment Name: At_Siliques_P Parameter: Organism Value: A. thaliana
  misc_feature: MA Experiment 20000234 PARAMETER Experiment Name: At_Siliques_P Parameter: Plant Line Value: WS
  misc_feature: MA Experiment 20000234 PARAMETER Experiment Name: At_Siliques_P Parameter: Tissue Value: Less Than 5mm Siliques vs. Whole Plant
  misc_feature: MA Experiment ID: 20000437 Result: Down-regulated in Transcription
  misc_feature: MA Experiment 20000437 PARAMETER Experiment Name: At_Drought_P Parameter: Age (day) Value: 8
  misc_feature: MA Experiment 20000437 PARAMETER Experiment Name: At_Drought_P Parameter: Organism Value: A. thaliana
  misc_feature: MA Experiment 20000437 PARAMETER Experiment Name: At_Drought_P Parameter: Plant Line Value: WS
  misc_feature: MA Experiment 20000437 PARAMETER Experiment Name: At_Drought_P Parameter: Timepoint (hr) Value: 24
  misc_feature: MA Experiment 20000437 PARAMETER Experiment Name: At_Drought_P Parameter: Tissue Value: Whole Plant
  misc_feature: MA Experiment 20000437 PARAMETER Experiment Name: At_Drought_P Parameter: Treatment Value: Drought vs. No Drought
attttgctctgcaaatttgtctgaaaaaatctttgtgcgaagcaggaaaaatgtcgtcgacccatcagttagtttcttcgatgatctcttcttcctcatccactttcttagccccttcaaattttaatctcagaactcgaaatgcttgcttacccatggcaaaacgggtcaatacttgcaaacttcaggctggatacctattcccggagattgcaagaagaaggtctgcacacttgttgaaatatccagatgcacaagttataagtcttggaataggcgacacaactgagccaattcctgaagtgatcacttctgctatggcaaagaaagctcatgagttgtcaacaatagagggatatagtggttatggtgctgaacaaagtgcaaagccactgagagctgctattgcgaaaacattctacggtggccttggcataggggatgatgacgtttttgtttctgatggagctaaatgtgatatctcacgtctccaggttatgtttggttccaatgttacaattgctgttcaggatccttcatatccggcttatgtggactccagtgttattatgggtcagactgggcaatttaacactgatgtgcaaaagtatggaaacatcgagtacatgagatgcactccagagaatggcttctttcccgacttgtccaccgttggcaggacagatataattttcttctgttccccaaataaccctacgggtgctgctgccacgagagagcaactaacgcagttagttgagtttgcaaagaagaacggttctataatagtgtatgattccgcctatgcaatgtacatgtctgatgataacccacgatccatcttcgaaatccctggagcagaggaggtcgctatggagacagcttcgttcagcaaatatgctggtttcactggagttcgacttggttggactgtcatcccgaaaaagctactctattcagacggtttccctgttgccaaagacttcaatcggattatctgcacttgtttcaatggtgcatctaatatctctcaagctggtgctcttgcttgccttacacccgaaggacttgaggcaatgcataaggtgattggattctataaagaaaacacaaacataatcattgacacattcacatctctcgggtatgatgtatatggaggaaagaatgcgccttacgtatgggttcacttcccgaaccaaagctcatgggatgtgtttgctgagattctggagaagactcatgtggttacaactccaggaagtgagtttggaccagggggtgaagggttcgttcgtgtcagtgcctttggtcacagagagaacatcttagaggcatgtcgaagattcaagcagctttacaaatgaagaaccttgtttgtaatcgttcctcatcatcatcaccctctttaatgacatgatttgagttaaaataatgtcgtttccattgttttctggaatttgtagaagacacttttgacaccagtgtttcaagcaatttggc

SEQ ID NO: 42310 - protein, 454 aa, Arabidopsis thaliana
  peptide (1)..(454): Ceres Seq. ID no. 12422980
  misc_feature (141)..(453): Pfam Name: Aminotransferase class I and II Pfam Description: Aminotransferase class I and II
  misc_feature (57)..(454): Homolog of NCBI NO: 23124300 NR Description: hypothetical protein [Nostoc punctiforme]
  misc_feature (57)..(452): Homolog of NCBI NO: 24213476 NR Description: aminotransferase [Leptospira interrogans serovar
  misc_feature (52)..(454): Homolog of NCBI NO: 25315768 NR Description: probable aspartate aminotransferase
  misc_feature (25)..(454): Homolog of NCBI NO: 18397344 NR Description: putative aspartate aminotransferase
  misc_feature (57)..(450): Homolog of NCBI NO: 24414269 NR Description: Putative transaminase [Oryza sativa (japonica
  misc_feature (57)..(450): Homolog of NCBI NO: 37703722 NR Description: putative aminotransferase ALD1
  misc_feature (54)..(454): Homolog of NCBI NO: 37703720 NR Description: putative aminotransferase AGD2
  misc_feature (52)..(454): Homolog of NCBI NO: 7447845 NR Description: probable transaminase (EC 2.6.1.-) T16L1.170
  misc_feature (17)..(63): Homolog of NCBI NO: 18418270 NR Description: putative protein
  misc_feature (52)..(454): Homolog of NCBI NO: 18418270 NR Description: putative protein
FALQICLKKSLCEAGKMSSTHQLVSSMISSSSSTFLAPSNFNLRTRNACLPMAKRVNTCKLQAGYLFPEIARRRSAHLLKYPDAQVISLGIGDTTEPIPEVITSAMAKKAHELSTIEGYSGYGAEQSAKPLRAAIAKTFYGGLGIGDDDVFVSDGAKCDISRLQVMFGSNVTIAVQDPSYPAYVDSSVIMGQTGQFNTDVQKYGNIEYMRCTPENGFFPDLSTVGRTDIIFFCSPNNPTGAAATREQLTQLVEFAKKNGSIIVYDSAYAMYMSDDNPRSIFEIPGAEEVAMETASFSKYAGFTGVRLGWTVIPKKLLYSDGFPVAKDFNRIICTCFNGASNISQAGALACLTPEGLEAMHKVIGFYKENTNIIIDTFTSLGYDVYGGKNAPYVWVHFPNQSSWDVFAEILEKTHVVTTPGSEFGPGGEGFVRVSAFGHRENILEACRRFKQLYK

SEQ ID NO: 42311 - protein, 438 aa, Arabidopsis thaliana
  peptide (1)..(438): Ceres Seq. ID no. 12422981
  misc_feature (125)..(437): Pfam Name: Aminotransferase class I and II Pfam Description: Aminotransferase class I and II
  misc_feature (41)..(438): Homolog of NCBI NO: 23124300 NR Description: hypothetical protein [Nostoc punctiforme]
  misc_feature (41)..(436): Homolog of NCBI NO: 24213476 NR Description: aminotransferase [Leptospira interrogans serovar
  misc_feature (36)..(438): Homolog of NCBI NO: 25315768 NR Description: probable aspartate aminotransferase
  misc_feature (9)..(438): Homolog of NCBI NO: 18397344 NR Description: putative aspartate aminotransferase
  misc_feature (41)..(434): Homolog of NCBI NO: 24414269 NR Description: Putative transaminase [Oryza sativa (japonica
  misc_feature (41)..(434): Homolog of NCBI NO: 37703722 NR Description: putative aminotransferase ALD1
  misc_feature (38)..(438): Homolog of NCBI NO: 37703720 NR Description: putative aminotransferase AGD2
  misc_feature (36)..(438): Homolog of NCBI NO: 7447845 NR Description: probable transaminase (EC 2.6.1.-) T16L1.170
  misc_feature (1)..(47): Homolog of NCBI NO: 18418270 NR Description: putative protein
  misc_feature (36)..(438): Homolog of NCBI NO: 18418270 NR Description: putative protein
MSSTHQLVSSMISSSSSTFLAPSNFNLRTRNACLPMAKRVNTCKLQAGYLFPEIARRRSAHLLKYPDAQVISLGIGDTTEPIPEVITSAMAKKAHELSTIEGYSGYGAEQSAKPLRAAIAKTFYGGLGIGDDDVFVSDGAKCDISRLQVMFGSNVTIAVQDPSYPAYVDSSVIMGQTGQFNTDVQKYGNIEYMRCTPENGFFPDLSTVGRTDIIFFCSPNNPTGAAATREQLTQLVEFAKKNGSIIVYDSAYAMYMSDDNPRSIFEIPGAEEVAMETASFSKYAGFTGVRLGWTVIPKKLLYSDGFPVAKDFNRIICTCFNGASNISQAGALACLTPEGLEAMHKVIGFYKENTNIIIDTFTSLGYDVYGGKNAPYVWVHFPNQSSWDVFAEILEKTHVVTTPGSEFGPGGEGFVRVSAFGHRENILEACRRFKQLYK

SEQ ID NO: 42312 - protein, 428 aa, Arabidopsis thaliana
  peptide (1)..(428): Ceres Seq. ID no. 12422982
  misc_feature (115)..(427): Pfam Name: Aminotransferase class I and II Pfam Description: Aminotransferase class I and II
  misc_feature (31)..(428): Homolog of NCBI NO: 23124300 NR Description: hypothetical protein [Nostoc punctiforme]
  misc_feature (31)..(426): Homolog of NCBI NO: 24213476 NR Description: aminotransferase [Leptospira interrogans serovar
  misc_feature (26)..(428): Homolog of NCBI NO: 25315768 NR Description: probable aspartate aminotransferase
  misc_feature (1)..(428): Homolog of NCBI NO: 18397344 NR Description: putative aspartate aminotransferase
  misc_feature (31)..(424): Homolog of NCBI NO: 24414269 NR Description: Putative transaminase [Oryza sativa (japonica
  misc_feature (31)..(424): Homolog of NCBI NO: 37703722 NR Description: putative aminotransferase ALD1
  misc_feature (28)..(428): Homolog of NCBI NO: 37703720 NR Description: putative aminotransferase AGD2
  misc_feature (26)..(428): Homolog of NCBI NO: 7447845 NR Description: probable transaminase (EC 2.6.1.-) T16L1.170
  misc_feature (1)..(37): Homolog of NCBI NO: 18418270 NR Description: putative protein
  misc_feature (26)..(428): Homolog of NCBI NO: 18418270 NR Description: putative protein
MISSSSSTFLAPSNFNLRTRNACLPMAKRVNTCKLQAGYLFPEIARRRSAHLLKYPDAQVISLGIGDTTEPIPEVITSAMAKKAHELSTIEGYSGYGAEQSAKPLRAAIAKTFYGGLGIGDDDVFVSDGAKCDISRLQVMFGSNVTIAVQDPSYPAYVDSSVIMGQTGQFNTDVQKYGNIEYMRCTPENGFFPDLSTVGRTDIIFFCSPNNPTGAAATREQLTQLVEFAKKNGSIIVYDSAYAMYMSDDNPRSIFEIPGAEEVAMETASFSKYAGFTGVRLGWTVIPKKLLYSDGFPVAKDFNRIICTCFNGASNISQAGALACLTPEGLEAMHKVIGFYKENTNIIIDTFTSLGYDVYGGKNAPYVWVHFPNQSSWDVFAEILEKTHVVTTPGSEFGPGGEGFVRVSAFGHRENILEACRRFKQLYK

SEQ ID NO: 42313 - DNA, 690 bp, Arabidopsis thaliana
  misc_feature (1)..(690): Ceres Seq. ID no. 12326325
  misc_feature: MA Experiment ID: 108434 Result: Up-regulated in Transcription
  misc_feature: MA Experiment 108434 PARAMETER Experiment Name: At_Root_Tips_cDNA_P Parameter: Tissue Value: Root Tips
  misc_feature: MA Experiment ID: 108461 Result: Up-regulated in Transcription
  misc_feature: MA Experiment 108461 PARAMETER Experiment Name: At_Germinating_Seeds_cDNA_P Parameter: Age (day) Value: 1 vs. 0
  misc_feature: MA Experiment 108461 PARAMETER Experiment Name: At_Germinating_Seeds_cDNA_P Parameter: Tissue Value: Germinating Seeds
  misc_feature: MA Experiment ID: 108573 Result: Down-regulated in Transcription
  misc_feature: MA Experiment 108573 PARAMETER Experiment Name: At_Drought_cDNA_P Parameter: Timepoint (hr) Value: 6
  misc_feature: MA Experiment 108573 PARAMETER Experiment Name: At_Drought_cDNA_P Parameter: Tissue Value: Aerial
  misc_feature: MA Experiment 108573 PARAMETER Experiment Name: At_Drought_cDNA_P Parameter: Treatment Value: Drought vs. No Drought
  misc_feature: MA Experiment ID: 108585 Result: Down-regulated in Transcription
  misc_feature: MA Experiment 108585 PARAMETER Experiment Name: At_5mM_NaNP_cDNA_P Parameter: Timepoint (hr) Value: 6
  misc_feature: MA Experiment 108585 PARAMETER Experiment Name: At_5mM_NaNP_cDNA_P Parameter: Tissue Value: Aerial
  misc_feature: MA Experiment 108585 PARAMETER Experiment Name: At_5mM_NaNP_cDNA_P Parameter: Treatment Value: null
  misc_feature: MA Experiment ID: 20000179 Result: Up-regulated in Transcription
  misc_feature: MA Experiment 20000179 PARAMETER Experiment Name: At_Germinating_Seeds_P Parameter: Age (hr) Value: 6 vs. 0
  misc_feature: MA Experiment 20000179 PARAMETER Experiment Name: At_Germinating_Seeds_P Parameter: Tissue Value: Germinating Seeds
  misc_feature: MA Experiment ID: 20000180 Result: Up-regulated in Transcription
  misc_feature: MA Experiment 20000180 PARAMETER Experiment Name: At_Germinating_Seeds_P Parameter: Age (hr) Value: 24 vs. 0
  misc_feature: MA Experiment 20000180 PARAMETER Experiment Name: At_Germinating_Seeds_P Parameter: Tissue Value: Germinating Seeds
  misc_feature: MA Experiment ID: 20000234 Result: Up-regulated in Transcription
  misc_feature: MA Experiment 20000234 PARAMETER Experiment Name: At_Siliques_P Parameter: Age (day) Value: 21
  misc_feature: MA Experiment 20000234 PARAMETER Experiment Name: At_Siliques_P Parameter: Organism Value: A. thaliana
  misc_feature: MA Experiment 20000234 PARAMETER Experiment Name: At_Siliques_P Parameter: Plant Line Value: WS
  misc_feature: MA Experiment 20000234 PARAMETER Experiment Name: At_Siliques_P Parameter: Tissue Value: Less Than 5mm Siliques vs. Whole Plant
  misc_feature: MA Experiment ID: 20000794 Result: Down-regulated in Transcription
  misc_feature: MA Experiment 20000794 PARAMETER Experiment Name: At_Petals_P Parameter: Age (day) Value: 23-25 days
  misc_feature: MA Experiment 20000794 PARAMETER Experiment Name: At_Petals_P Parameter: Plant Line Value: WS
  misc_feature: MA Experiment 20000794 PARAMETER Experiment Name: At_Petals_P Parameter: Tissue Value: Petals vs. Whole plant
  misc_feature: MA Experiment ID: 20001560 Result: Up-regulated in Transcription
  misc_feature: MA Experiment 20001560 PARAMETER Experiment Name: At_Drought_Soil_Dry_P Parameter: Age (day) Value: 28
  misc_feature: MA Experiment 20001560 PARAMETER Experiment Name: At_Drought_Soil_Dry_P Parameter: Organism Value: A. thaliana
  misc_feature: MA Experiment 20001560 PARAMETER Experiment Name: At_Drought_Soil_Dry_P Parameter: Plant Line Value: WS
  misc_feature: MA Experiment 20001560 PARAMETER Experiment Name: At_Drought_Soil_Dry_P Parameter: Post Timepoint (hr) Value: None
  misc_feature: MA Experiment 20001560 PARAMETER Experiment Name: At_Drought_Soil_Dry_P Parameter: Post-Treatment Value: None
  misc_feature: MA Experiment 20001560 PARAMETER Experiment Name: At_Drought_Soil_Dry_P Parameter: Timepoint (day) Value: 14
  misc_feature: MA Experiment 20001560 PARAMETER Experiment Name: At_Drought_Soil_Dry_P Parameter: Treatment Value: Drought vs. No Drought
agtgagaactgagaagcgattatggcgagcaagatgagtctccgttactctctctttttgatcttcttctctctcatttcactccaaggttttgccaagaagaccggagatgtgtcggaattgcagatcggtgtcaagtttaagccaaaaacatgtgaagttcaggctcacaaaggtgatacgatcaaggtgcactatagggggaaacttactgatggaactgtattcgattcgagttttgaaaggggtgatccgtttgagtttaaattaggaagtggtcaggttatcaaaggttgggatcaaggtttgctaggagcgtgtgtaggtgagaagaggaagttaaagatacctgctaaacttggatatggagaacaaggctctccacctactatccccggtggtgcaacactgatctttgacacagagcttattgcggtaaatgaaaaaccagctggtggtgaagaatacggaggggatgaagatgatgagggatatggaaatgacgagctatgatccggtctccgttctttaacgattttgcttcaagagttctctggataatacaaagaaaccatctatgggagggttttttctagtcttttggcttttaggcgtaaagactgcagatgattgttatggtgatatttaacattttcttttcataattggctcaacttcaattagttagcc

SEQ ID NO: 42314 - protein, 163 aa, Arabidopsis thaliana
  peptide (1)..(163): Ceres Seq. ID no. 12326326
  misc_feature (43)..(137): Pfam Name: FKBP-type peptidyl-prolyl cis-trans isomerase Pfam Description: FKBP-type peptidyl-prolyl cis-trans isomerase
  misc_feature (7)..(142): Homolog of NCBI NO: 6679805 NR Description: FK506 binding protein 2; FK506 binding protein 2
  misc_feature (12)..(142): Homolog of NCBI NO: 27694894 NR Description: Similar to FK506 binding protein 2 (13 kDa)
  misc_feature (3)..(154): Homolog of NCBI NO: 38174807 NR Description: putative immunophilin [Hordeum vulgare subsp.
  misc_feature (9)..(146): Homolog of NCBI NO: 34906954 NR Description: rapamycin-binding protein-like
  misc_feature (12)..(144): Homolog of NCBI NO: 21593622 NR Description: immunophilin (FKBP15-1) [Arabidopsis thaliana]
  misc_feature (9)..(153): Homolog of NCBI NO: 23396588 NR Description: FK506-binding protein 2 precursor
  misc_feature (12)..(144): Homolog of NCBI NO: 2129622 NR Description: probable peptidylprolyl isomerase (EC 5.2.1.8)
  misc_feature (1)..(144): Homolog of NCBI NO: 18404471 NR Description: immunophilin (FKBP15-1)
  misc_feature (1)..(163): Homolog of NCBI NO: 2129623 NR Description: probable peptidylprolyl isomerase (EC 5.2.1.8)
  misc_feature (1)..(163): Homolog of NCBI NO: 15239019 NR Description: FKBP-type peptidyl-prolyl cis-trans isomerase,
MASKMSLRYSLFLIFFSLISLQGFAKKTGDVSELQIGVKFKPKTCEVQAHKGDTIKVHYRGKLTDGTVFDSSFERGDPFEFKLGSGQVIKGWDQGLLGACVGEKRKLKIPAKLGYGEQGSPPTIPGGATLIFDTELIAVNEKPAGGEEYGGDEDDEGYGNDEL

SEQ ID NO: 42315 - protein, 159 aa, Arabidopsis thaliana
  peptide (1)..(159): Ceres Seq. ID no. 12326327
  misc_feature (39)..(133): Pfam Name: FKBP-type peptidyl-prolyl cis-trans isomerase Pfam Description: FKBP-type peptidyl-prolyl cis-trans isomerase
  misc_feature (3)..(138): Homolog of NCBI NO: 6679805 NR Description: FK506 binding protein 2; FK506 binding protein 2
  misc_feature (8)..(138): Homolog of NCBI NO: 27694894 NR Description: Similar to FK506 binding protein 2 (13 kDa)
  misc_feature (1)..(150): Homolog of NCBI NO: 38174807 NR Description: putative immunophilin [Hordeum vulgare subsp.
  misc_feature (5)..(142): Homolog of NCBI NO: 34906954 NR Description: rapamycin-binding protein-like
  misc_feature (8)..(140): Homolog of NCBI NO: 21593622 NR Description: immunophilin (FKBP15-1) [Arabidopsis thaliana]
  misc_feature (5)..(149): Homolog of NCBI NO: 23396588 NR Description: FK506-binding protein 2 precursor
  misc_feature (8)..(140): Homolog of NCBI NO: 2129622 NR Description: probable peptidylprolyl isomerase (EC 5.2.1.8)
  misc_feature (1)..(140): Homolog of NCBI NO: 18404471 NR Description: immunophilin (FKBP15-1)
  misc_feature (1)..(159): Homolog of NCBI NO: 2129623 NR Description: probable peptidylprolyl isomerase (EC 5.2.1.8)
  misc_feature (1)..(159): Homolog of NCBI NO: 15239019 NR Description: FKBP-type peptidyl-prolyl cis-trans isomerase,
MSLRYSLFLIFFSLISLQGFAKKTGDVSELQIGVKFKPKTCEVQAHKGDTIKVHYRGKLTDGTVFDSSFERGDPFEFKLGSGQVIKGWDQGLLGACVGEKRKLKIPAKLGYGEQGSPPTIPGGATLIFDTELIAVNEKPAGGEEYGGDEDDEGYGNDEL

SEQ ID NO: 42316 - DNA, 750 bp, Arabidopsis thaliana
  misc_feature (1)..(750): Ceres Seq. ID no. 12326332
  misc_feature: MA Experiment ID: 108434 Result: Up-regulated in Transcription
  misc_feature: MA Experiment 108434 PARAMETER Experiment Name: At_Root_Tips_cDNA_P Parameter: Tissue Value: Root Tips
  misc_feature: MA Experiment ID: 108462 Result: Down-regulated in Transcription
  misc_feature: MA Experiment 108462 PARAMETER Experiment Name: At_Germinating_Seeds_cDNA_P Parameter: Age (day) Value: 2 vs. 0
  misc_feature: MA Experiment 108462 PARAMETER Experiment Name: At_Germinating_Seeds_cDNA_P Parameter: Tissue Value: Germinating Seeds
  misc_feature: MA Experiment ID: 108463 Result: Down-regulated in Transcription
  misc_feature: MA Experiment 108463 PARAMETER Experiment Name: At_Germinating_Seeds_cDNA_P Parameter: Age (day) Value: 3 vs. 0
  misc_feature: MA Experiment 108463 PARAMETER Experiment Name: At_Germinating_Seeds_cDNA_P Parameter: Tissue Value: Germinating Seeds
  misc_feature: MA Experiment ID: 108464 Result: Down-regulated in Transcription
  misc_feature: MA Experiment 108464 PARAMETER Experiment Name: At_Germinating_Seeds_cDNA_P Parameter: Age (day) Value: 4 vs. 0
  misc_feature: MA Experiment 108464 PARAMETER Experiment Name: At_Germinating_Seeds_cDNA_P Parameter: Tissue Value: Germinating Seeds
  misc_feature: MA Experiment ID: 108488 Result: Up-regulated in Transcription
  misc_feature: MA Experiment ID: 108573 Result: Down-regulated in Transcription
  misc_feature: MA Experiment 108573 PARAMETER Experiment Name: At_Drought_cDNA_P Parameter: Timepoint (hr) Value: 6
  misc_feature: MA Experiment 108573 PARAMETER Experiment Name: At_Drought_cDNA_P Parameter: Tissue Value: Aerial
  misc_feature: MA Experiment 108573 PARAMETER Experiment Name: At_Drought_cDNA_P Parameter: Treatment Value: Drought vs. No Drought
  misc_feature: MA Experiment ID: 108595 Result: Down-regulated in Transcription
  misc_feature: MA Experiment 108595 PARAMETER Experiment Name: At_Ler-pi_Ovule_cDNA_P Parameter: Plant Line Value: null
  misc_feature: MA Experiment ID: 20000234 Result: Up-regulated in Transcription
  misc_feature: MA Experiment 20000234 PARAMETER Experiment Name: At_Siliques_P Parameter: Age (day) Value: 21
  misc_feature: MA Experiment 20000234 PARAMETER Experiment Name: At_Siliques_P Parameter: Organism Value: A. thaliana
  misc_feature: MA Experiment 20000234 PARAMETER Experiment Name: At_Siliques_P Parameter: Plant Line Value: WS
  misc_feature: MA Experiment 20000234 PARAMETER Experiment Name: At_Siliques_P Parameter: Tissue Value: Less Than 5mm Siliques vs. Whole Plant
  misc_feature: MA Experiment ID: 20000437 Result: Down-regulated in Transcription
  misc_feature: MA Experiment 20000437 PARAMETER Experiment Name: At_Drought_P Parameter: Age (day) Value: 8
  misc_feature: MA Experiment 20000437 PARAMETER Experiment Name: At_Drought_P Parameter: Organism Value: A. thaliana
  misc_feature: MA Experiment 20000437 PARAMETER Experiment Name: At_Drought_P Parameter: Plant Line Value: WS
  misc_feature: MA Experiment 20000437 PARAMETER Experiment Name: At_Drought_P Parameter: Timepoint (hr) Value: 24
  misc_feature: MA Experiment 20000437 PARAMETER Experiment Name: At_Drought_P Parameter: Tissue Value: Whole Plant
  misc_feature: MA Experiment 20000437 PARAMETER Experiment Name: At_Drought_P Parameter: Treatment Value: Drought vs. No Drought
  misc_feature: MA Experiment ID: 20000438 Result: Up-regulated in Transcription
  misc_feature: MA Experiment 20000438 PARAMETER Experiment Name: At_Shoots__P Parameter: Age (day) Value: 14
  misc_feature: MA Experiment 20000438 PARAMETER Experiment Name: At_Shoots__P Parameter: Tissue Value: Shoots vs. Whole Plant
  misc_feature: MA Experiment ID: 20000496 Result: Up-regulated in Transcription
  misc_feature: MA Experiment 20000496 PARAMETER Experiment Name: At_Guard_Cells_P Parameter: Harvest Date Value: 7/19/2002
  misc_feature: MA Experiment 20000496 PARAMETER Experiment Name: At_Guard_Cells_P Parameter: Organism Value: Canola
  misc_feature: MA Experiment 20000496 PARAMETER Experiment Name: At_Guard_Cells_P Parameter: Tissue Value: Guard Cells vs. Leaves
  misc_feature: MA Experiment ID: 20000794 Result: Down-regulated in Transcription
  misc_feature: MA Experiment 20000794 PARAMETER Experiment Name: At_Petals_P Parameter: Age (day) Value: 23-25 days
  misc_feature: MA Experiment 20000794 PARAMETER Experiment Name: At_Petals_P Parameter: Plant Line Value: WS
  misc_feature: MA Experiment 20000794 PARAMETER Experiment Name: At_Petals_P Parameter: Tissue Value: Petals vs. Whole plant
  misc_feature: MA Experiment ID: 20001558 Result: Up-regulated in Transcription
  misc_feature: MA Experiment 20001558 PARAMETER Experiment Name: At_Drought_Soil_Dry_P Parameter: Age (day) Value: 27
  misc_feature: MA Experiment 20001558 PARAMETER Experiment Name: At_Drought_Soil_Dry_P Parameter: Organism Value: A. thaliana
  misc_feature: MA Experiment 20001558 PARAMETER Experiment Name: At_Drought_Soil_Dry_P Parameter: Plant Line Value: WS
  misc_feature: MA Experiment 20001558 PARAMETER Experiment Name: At_Drought_Soil_Dry_P Parameter: Post Timepoint (hr) Value: 6
  misc_feature: MA Experiment 20001558 PARAMETER Experiment Name: At_Drought_Soil_Dry_P Parameter: Post-Treatment Value: Re-Water vs. No Drought
  misc_feature: MA Experiment 20001558 PARAMETER Experiment Name: At_Drought_Soil_Dry_P Parameter: Timepoint (day) Value: 13
  misc_feature: MA Experiment 20001558 PARAMETER Experiment Name: At_Drought_Soil_Dry_P Parameter: Treatment Value: Drought vs. No Drought
  misc_feature: MA Experiment ID: 20001757 Result: Up-regulated in Transcription
  misc_feature: MA Experiment 20001757 PARAMETER Experiment Name: At_50mM_NH4NO3_L-to-H_P Parameter: Timepoint (hr) Value: 6
  misc_feature: MA Experiment 20001757 PARAMETER Experiment Name: At_50mM_NH4NO3_L-to-H_P Parameter: Tissue Value: Leaf
  misc_feature: MA Experiment 20001757 PARAMETER Experiment Name: At_50mM_NH4NO3_L-to-H_P Parameter: Treatment Value: 50mM NH4NO3 vs 100mM Mannitol
aaaacttattgttgattcttctctattcgtcgtcgacctattttcctcagccatggccgtcgggaaaaacaagagaatctctaagggtaggaagggaggaaagaagaaggctgttgatcctttctccaagaaagattggtatgatgttaaggctccttcaatcttcactcacaggaatgttggaaagacacttgtttccagaactcagggtaccaaaattgcctcagaaggcttgaaacacagagtttttgaggtttctcttgctgatcttcaaggtgatgaggataacgcttacaggaagatccgtctcagagctgaagatgtccagggcagcttcctcatgtgaccttaaggatcttgttgctaagttcattcctgaagctattggcagggagattgagaaggcaactcagggcatctaccctcttcagaatgttttcatccgtaaagtcaagatcctcaaggcccctaaattcgaccttggcaagctcatggatgttcacggagattactcagcagaagatgttggtgttaaggtagacaggccggctgatgagatggctgttgaggaacctactgaaatcatcggagcttaagaaatcgagagatgtctttttcttctaaactttagctttttgatgctctgtcgtttcacacactcttttgttcccggtttaattttgctgtattgatgacttttctcagtgtaaacttgcgagtttttgataatttatggaacaccttttctct

SEQ ID NO: 42317 - protein, 114 aa, Arabidopsis thaliana
  peptide (1)..(114): Ceres Seq. ID no. 12326333
  misc_feature (28)..(110): Pfam Name: Ribosomal S3Ae family Pfam Description: Ribosomal S3Ae family
  misc_feature (18)..(110): Homolog of NCBI NO: 1856971 NR Description: This gene is specifically expressed at the S during the cell cycle in the synchronous culture of periwinkle
  misc_feature (18)..(110): Homolog of NCBI NO: 7441116 NR Description: ribosomal protein S3a, cytosolic - rice
  misc_feature (18)..(110): Homolog of NCBI NO: 1350986 NR Description: 40S RIBOSOMAL PROTEIN S3A (CYC07 PROTEIN)
  misc_feature (18)..(110): Homolog of NCBI NO: 1350984 NR Description: 40S RIBOSOMAL PROTEIN S3A
  misc_feature (18)..(110): Homolog of NCBI NO: 24817254 NR Description: ribosomal protein S3a [Cicer arietinum]
  misc_feature (18)..(110): Homolog of NCBI NO: 6714564 NR Description: cyc07 [Daucus carota]
  misc_feature (18)..(110): Homolog of NCBI NO: 1350983 NR Description: 40S RIBOSOMAL PROTEIN S3A (CYC07 PROTEIN)
  misc_feature (18)..(110): Homolog of NCBI NO: 1350981 NR Description: 40S RIBOSOMAL PROTEIN S3A (S PHASE SPECIFIC
  misc_feature (18)..(110): Homolog of NCBI NO: 15236171 NR Description: Putative S-phase-specific ribosomal protein
  misc_feature (18)..(110): Homolog of NCBI NO: 15229364 NR Description: putative 40S ribosomal protein S3A (S phase
KLIVDSSLFVVDLFSSAMAVGKNKRISKGRKGGKKKAVDPFSKKDWYDVKAPSIFTHRNVGKTLVSRTQGTKIASEGLKHRVFEVSLADLQGDEDNAYRKIRLRAEDVQGSFLM

SEQ ID NO: 42318 - protein, 105 aa, Arabidopsis thaliana
  peptide (1)..(105): Ceres Seq. ID no. 12326334
  misc_feature (15)..(65): Pfam Name: Ribosomal S3Ae family Pfam Description: Ribosomal S3Ae family
  misc_feature (8)..(82): Homolog of NCBI NO: 1856971 NR Description: This gene is specifically expressed at the S during the cell cycle in the synchronous culture of periwinkle
  misc_feature (2)..(92): Homolog of NCBI NO: 7441116 NR Description: ribosomal protein S3a, cytosolic - rice
  misc_feature (8)..(96): Homolog of NCBI NO: 1350986 NR Description: 40S RIBOSOMAL PROTEIN S3A (CYC07 PROTEIN)
  misc_feature (8)..(105): Homolog of NCBI NO: 1350984 NR Description: 40S RIBOSOMAL PROTEIN S3A
  misc_feature (8)..(105): Homolog of NCBI NO: 24817254 NR Description: ribosomal protein S3a [Cicer arietinum]
  misc_feature (8)..(105): Homolog of NCBI NO: 6714564 NR Description: cyc07 [Daucus carota]
  misc_feature (8)..(105): Homolog of NCBI NO: 1350983 NR Description: 40S RIBOSOMAL PROTEIN S3A (CYC07 PROTEIN)
  misc_feature (12)..(105): Homolog of NCBI NO: 1350981 NR Description: 40S RIBOSOMAL PROTEIN S3A (S PHASE SPECIFIC
  misc_feature (8)..(105): Homolog of NCBI NO: 15236171 NR Description: Putative S-phase-specific ribosomal protein
  misc_feature (15)..(105): Homolog of NCBI NO: 15229364 NR Description: putative 40S ribosomal protein S3A (S phase
MRITLTGRSVSELKMSRAASSCDLKDLVAKFIPEAIGREIEKATQGIYPLQNVFIRKVKILKAPKFDLGKLMDVHGDYSAEDVGVKVDRPADEMAVEEPTEIIGA

SEQ ID NO: 42319 - protein, 97 aa, Arabidopsis thaliana
  peptide (1)..(97): Ceres Seq. ID no. 12326335
  misc_feature (11)..(93): Pfam Name: Ribosomal S3Ae family Pfam Description: Ribosomal S3Ae family
  misc_feature (1)..(93): Homolog of NCBI NO: 1856971 NR Description: This gene is specifically expressed at the S during the cell cycle in the synchronous culture of periwinkle
  misc_feature (1)..(93): Homolog of NCBI NO: 7441116 NR Description: ribosomal protein S3a, cytosolic - rice
  misc_feature (1)..(93): Homolog of NCBI NO: 1350986 NR Description: 40S RIBOSOMAL PROTEIN S3A (CYC07 PROTEIN)
  misc_feature (1)..(93): Homolog of NCBI NO: 1350984 NR Description: 40S RIBOSOMAL PROTEIN S3A
  misc_feature (1)..(93): Homolog of NCBI NO: 24817254 NR Description: ribosomal protein S3a [Cicer arietinum]
  misc_feature (1)..(93): Homolog of NCBI NO: 6714564 NR Description: cyc07 [Daucus carota]
  misc_feature (1)..(93): Homolog of NCBI NO: 1350983 NR Description: 40S RIBOSOMAL PROTEIN S3A (CYC07 PROTEIN)
  misc_feature (1)..(93): Homolog of NCBI NO: 1350981 NR Description: 40S RIBOSOMAL PROTEIN S3A (S PHASE SPECIFIC
  misc_feature (1)..(93): Homolog of NCBI NO: 15236171 NR Description: Putative S-phase-specific ribosomal protein
  misc_feature (1)..(93): Homolog of NCBI NO: 15229364 NR Description: putative 40S ribosomal protein S3A (S phase
MAVGKNKRISKGRKGGKKKAVDPFSKKDWYDVKAPSIFTHRNVGKTLVSRTQGTKIASEGLKHRVFEVSLADLQGDEDNAYRKIRLRAEDVQGSFLM

SEQ ID NO: 42320 - DNA, 1153 bp, Arabidopsis thaliana
  misc_feature (1)..(1153): Ceres Seq. ID no. 13500234
  misc_feature: MA Experiment ID: 20000184 Result: Down-regulated in Transcription
  misc_feature: MA Experiment 20000184 PARAMETER Experiment Name: At_Shoots__P Parameter: Age (day) Value: 7
  misc_feature: MA Experiment 20000184 PARAMETER Experiment Name: At_Shoots__P Parameter: Tissue Value: Shoots vs. Whole Plant
  misc_feature: MA Experiment ID: 20000235 Result: Up-regulated in Transcription
  misc_feature: MA Experiment 20000235 PARAMETER Experiment Name: At_Siliques_P Parameter: Age (day) Value: 21
  misc_feature: MA Experiment 20000235 PARAMETER Experiment Name: At_Siliques_P Parameter: Organism Value: A. thaliana
  misc_feature: MA Experiment 20000235 PARAMETER Experiment Name: At_Siliques_P Parameter: Plant Line Value: WS
  misc_feature: MA Experiment 20000235 PARAMETER Experiment Name: At_Siliques_P Parameter: Tissue Value: 5-10mm Siliques vs. Whole Plant
  misc_feature: MA Experiment ID: 20000437 Result: Up-regulated in Transcription
  misc_feature: MA Experiment 20000437 PARAMETER Experiment Name: At_Drought_P Parameter: Age (day) Value: 8
  misc_feature: MA Experiment 20000437 PARAMETER Experiment Name: At_Drought_P Parameter: Organism Value: A. thaliana
  misc_feature: MA Experiment 20000437 PARAMETER Experiment Name: At_Drought_P Parameter: Plant Line Value: WS
  misc_feature: MA Experiment 20000437 PARAMETER Experiment Name: At_Drought_P Parameter: Timepoint (hr) Value: 24
  misc_feature: MA Experiment 20000437 PARAMETER Experiment Name: At_Drought_P Parameter: Tissue Value: Whole Plant
  misc_feature: MA Experiment 20000437 PARAMETER Experiment Name: At_Drought_P Parameter: Treatment Value: Drought vs. No Drought
  misc_feature: MA Experiment ID: 20000438 Result: Down-regulated in Transcription
  misc_feature: MA Experiment 20000438 PARAMETER Experiment Name: At_Shoots__P Parameter: Age (day) Value: 14
  misc_feature: MA Experiment 20000438 PARAMETER Experiment Name: At_Shoots__P Parameter: Tissue Value: Shoots vs. Whole Plant
  misc_feature: MA Experiment ID: 20000453 Result: Up-regulated in Transcription
  misc_feature: MA Experiment 20000453 PARAMETER Experiment Name: At_100uM_ABA_P Parameter: Age (day) Value: 15
  misc_feature: MA Experiment 20000453 PARAMETER Experiment Name: At_100uM_ABA_P Parameter: Organism Value: A. thaliana
  misc_feature: MA Experiment 20000453 PARAMETER Experiment Name: At_100uM_ABA_P Parameter: Plant Line Value: WS
  misc_feature: MA Experiment 20000453 PARAMETER Experiment Name: At_100uM_ABA_P Parameter: Timepoint (hr) Value: 24
  misc_feature: MA Experiment 20000453 PARAMETER Experiment Name: At_100uM_ABA_P Parameter: Tissue Value: Aerial
  misc_feature: MA Experiment 20000453 PARAMETER Experiment Name: At_100uM_ABA_P Parameter: Treatment Value: 100uM ABA vs. No Treatment
  misc_feature: MA Experiment ID: 20000460 Result: Down-regulated in Transcription
  misc_feature: MA Experiment 20000460 PARAMETER Experiment Name: At_10percent_PEG_P Parameter: Age (day) Value: 12
  misc_feature: MA Experiment 20000460 PARAMETER Experiment Name: At_10percent_PEG_P Parameter: Organism Value: A. thaliana
  misc_feature: MA Experiment 20000460 PARAMETER Experiment Name: At_10percent_PEG_P Parameter: Plant Line Value: WS
  misc_feature: MA Experiment 20000460 PARAMETER Experiment Name: At_10percent_PEG_P Parameter: Timepoint (day) Value: 12
  misc_feature: MA Experiment 20000460 PARAMETER Experiment Name: At_10percent_PEG_P Parameter: Tissue Value: Whole Plant
  misc_feature: MA Experiment 20000460 PARAMETER Experiment Name: At_10percent_PEG_P Parameter: Treatment Value: 10percent PEG vs. No Treatment
  misc_feature: MA Experiment ID: 20000495 Result: Up-regulated in Transcription
  misc_feature: MA Experiment 20000495 PARAMETER Experiment Name: At_Guard_Cells_P Parameter: Harvest Date Value: 8/2/2002
  misc_feature: MA Experiment 20000495 PARAMETER Experiment Name: At_Guard_Cells_P Parameter: Organism Value: A. thaliana
  misc_feature: MA Experiment 20000495 PARAMETER Experiment Name: At_Guard_Cells_P Parameter: Tissue Value: Guard Cells vs. Leaves
  misc_feature: MA Experiment ID: 20000794 Result: Down-regulated in Transcription
  misc_feature: MA Experiment 20000794 PARAMETER Experiment Name: At_Petals_P Parameter: Age (day) Value: 23-25 days
  misc_feature: MA Experiment 20000794 PARAMETER Experiment Name: At_Petals_P Parameter: Plant Line Value: WS
  misc_feature: MA Experiment 20000794 PARAMETER Experiment Name: At_Petals_P Parameter: Tissue Value: Petals vs. Whole plant
  misc_feature: MA Experiment ID: 20001504 Result: Up-regulated in Transcription
  misc_feature: MA Experiment 20001504 PARAMETER Experiment Name: At_Far-red-enriched_P Parameter: Age (day) Value: 10
  misc_feature: MA Experiment 20001504 PARAMETER Experiment Name: At_Far-red-enriched_P Parameter: Light Value: Far-red enriched vs. White
  misc_feature: MA Experiment 20001504 PARAMETER Experiment Name: At_Far-red-enriched_P Parameter: Organism Value: A. thaliana
  misc_feature: MA Experiment 20001504 PARAMETER Experiment Name: At_Far-red-enriched_P Parameter: Plant Line Value: Columbia
  misc_feature: MA Experiment 20001504 PARAMETER Experiment Name: At_Far-red-enriched_P Parameter: Timepoint (day) Value: 6
  misc_feature: MA Experiment 20001504 PARAMETER Experiment Name: At_Far-red-enriched_P Parameter: Tissue Value: Whole Plant
  misc_feature: MA Experiment ID: 20001559 Result: Up-regulated in Transcription
  misc_feature: MA Experiment 20001559 PARAMETER Experiment Name: At_Drought_Soil_Dry_P Parameter: Age (day) Value: 28
  misc_feature: MA Experiment 20001559 PARAMETER Experiment Name: At_Drought_Soil_Dry_P Parameter: Organism Value: A. thaliana
  misc_feature: MA Experiment 20001559 PARAMETER Experiment Name: At_Drought_Soil_Dry_P Parameter: Plant Line Value: WS
  misc_feature: MA Experiment 20001559 PARAMETER Experiment Name: At_Drought_Soil_Dry_P Parameter: Post Timepoint (hr) Value: 29
  misc_feature: MA Experiment 20001559 PARAMETER Experiment Name: At_Drought_Soil_Dry_P Parameter: Post-Treatment Value: Re-Water vs. No Drought
  misc_feature: MA Experiment 20001559 PARAMETER Experiment Name: At_Drought_Soil_Dry_P Parameter: Timepoint (day) Value: 14
  misc_feature: MA Experiment 20001559 PARAMETER Experiment Name: At_Drought_Soil_Dry_P Parameter: Treatment Value: Drought vs. No Drought
  misc_feature: MA Experiment ID: 20001911 Result: Up-regulated in Transcription
  misc_feature: MA Experiment 20001911 PARAMETER Experiment Name: At_Drought_Reproduction_P Parameter: Age (day) Value: 40
  misc_feature: MA Experiment 20001911 PARAMETER Experiment Name: At_Drought_Reproduction_P Parameter: Organism Value: A. thaliana
  misc_feature: MA Experiment 20001911 PARAMETER Experiment Name: At_Drought_Reproduction_P Parameter: Plant Line Value: WS
  misc_feature: MA Experiment 20001911 PARAMETER Experiment Name: At_Drought_Reproduction_P Parameter: Timepoint (day) Value: 10
  misc_feature: MA Experiment 20001911 PARAMETER Experiment Name: At_Drought_Reproduction_P Parameter: Tissue Value: Flowers
  misc_feature: MA Experiment 20001911 PARAMETER Experiment Name: At_Drought_Reproduction_P Parameter: Treatment Value: Drought vs. No Drought
cccagagagacataagaaagaaagagagagagagatactttggtcatttcagggttgtcgtttctctctcttgttcttgagattttgaagagagagagatatgggaagaggtagggttcagctgaagaggatagagaacaagatcaataggcaagttactttctcaaagagaaggtctggtttgctcaagaaagctcatgagatctctgttctctgcgatgctgaggttgctctcatcgtcttctcttccaaaggcaaactcttcgaatattccaccgactcttgcatggagaggatacttgaacgctatgatcgctatttatattcagacaaacaacttgttggccgagacgtttcacaaagtgaaaattgggttctagaacatgctaagctcaaggcaagagttgaggtacttgagaagaacaaaaggaattttatgggggaagatcttgattcgttgagcttgaaggagctccaaagcttggagcatcagctcgatgcagctatcaagagcattaggtcaagaaagaaccaagctatgttcgaatccatatctgcgctccagaagaaggataaagccttgcaagatcacaacaattcgcttctcaaaaagattaaggagagggagaagaaaacgggtcagcaagaaggacaattagtccaatgctccaactcttcttcagttcttctgcctcaatactgcgtaacctcctccagagatggctttgtggagagagttgggggagagaacggtggtgcatcgtcgttgacggaaccaaactctctgcttccggcttggatgttacgtcctaccactacgaacgagtagaactatctcactctttataatataatgataatataattaatgtttaatattttcataacattcagcatttttttggtgacttatactcattattaataccgatatgttttagctagtcatattatatgtatgatggaactccgttgtcgagacgtatgtacgtaagctatcattagattcactgcgtcttaagaacaaagattcatatcttggtaatgatttctcatgaataattaatgtaacttttactttttaaactgtggtgaacgcaatatatcaatattctatcatttgtaaatgcgatcactatgttgtttatgactg

SEQ ID NO: 42321 - protein, 242 aa, Arabidopsis thaliana; identical to SEQ ID NO: 35943
  peptide (1)..(242): Ceres Seq. ID no. 13500235
  misc_feature (75)..(174): Pfam Name: K-box region Pfam Description: K-box region
  misc_feature (1)..(236): Homolog of NCBI NO: 14518447 NR Description: MADS box protein [Capsicum annuum]
  misc_feature (1)..(236): Homolog of NCBI NO: 27373049 NR Description: MADS11 [Nicotiana tabacum]
  misc_feature (1)..(236): Homolog of NCBI NO: 5070142 NR Description: MADS-box protein MADS1 [Nicotiana sylvestris]
  misc_feature (1)..(236): Homolog of NCBI NO: 1483232 NR Description: MADS5 protein [Betula pendula]
  misc_feature (1)..(239): Homolog of NCBI NO: 23304674 NR Description: MADS-box protein FUL-b [Brassica oleracea var.
  misc_feature (1)..(242): Homolog of NCBI NO: 3913000 NR Description: Agamous-like MADS box protein AGL8 homolog (MADS
  misc_feature (3)..(242): Homolog of NCBI NO: 23304672 NR Description: MADS-box protein FUL-a [Brassica oleracea var.
  misc_feature (1)..(242): Homolog of NCBI NO: 23304676 NR Description: MADS-box protein FUL-c [Brassica oleracea var.
  misc_feature (1)..(239): Homolog of NCBI NO: 23304678 NR Description: MADS-box protein FUL-d [Brassica oleracea var.
  misc_feature (1)..(242): Homolog of NCBI NO: 18424410 NR Description: MADS-box protein [Arabidopsis thaliana]

SEQ ID NO: 42322 - protein, 180 aa, Arabidopsis thaliana; identical to SEQ ID NO: 35944
  peptide (1)..(180): Ceres Seq. ID no. 13500236
  misc_feature (13)..(112): Pfam Name: K-box region Pfam Description: K-box region
  misc_feature (1)..(174): Homolog of NCBI NO: 14518447 NR Description: MADS box protein [Capsicum annuum]
  misc_feature (1)..(174): Homolog of NCBI NO: 27373049 NR Description: MADS11 [Nicotiana tabacum]
  misc_feature (1)..(174): Homolog of NCBI NO: 5070142 NR Description: MADS-box protein MADS1 [Nicotiana sylvestris]
  misc_feature (1)..(174): Homolog of NCBI NO: 1483232 NR Description: MADS5 protein [Betula pendula]
  misc_feature (1)..(177): Homolog of NCBI NO: 23304674 NR Description: MADS-box protein FUL-b [Brassica oleracea var.
  misc_feature (1)..(180): Homolog of NCBI NO: 3913000 NR Description: Agamous-like MADS box protein AGL8 homolog (MADS
  misc_feature (1)..(180): Homolog of NCBI NO: 23304672 NR Description: MADS-box protein FUL-a [Brassica oleracea var.
  misc_feature (1)..(180): Homolog of NCBI NO: 23304676 NR Description: MADS-box protein FUL-c [Brassica oleracea var.
  misc_feature (1)..(177): Homolog of NCBI NO: 23304678 NR Description: MADS-box protein FUL-d [Brassica oleracea var.
  misc_feature (1)..(180): Homolog of NCBI NO: 18424410 NR Description: MADS-box protein [Arabidopsis thaliana]

SEQ ID NO: 42323 - protein, 130 aa, Arabidopsis thaliana; identical to SEQ ID NO: 35945
  peptide (1)..(130): Ceres Seq. ID no. 13500237
  misc_feature (1)..(62): Pfam Name: K-box region Pfam Description: K-box region
  misc_feature (1)..(124): Homolog of NCBI NO: 14518447 NR Description: MADS box protein [Capsicum annuum]
  misc_feature (1)..(124): Homolog of NCBI NO: 27373049 NR Description: MADS11 [Nicotiana tabacum]
  misc_feature (1)..(124): Homolog of NCBI NO: 5070142 NR Description: MADS-box protein MADS1 [Nicotiana sylvestris]
  misc_feature (1)..(124): Homolog of NCBI NO: 1483232 NR Description: MADS5 protein [Betula pendula]
  misc_feature (1)..(127): Homolog of NCBI NO: 23304674 NR Description: MADS-box protein FUL-b [Brassica oleracea var.
  misc_feature (1)..(130): Homolog of NCBI NO: 3913000 NR Description: Agamous-like MADS box protein AGL8 homolog (MADS
  misc_feature (1)..(130): Homolog of NCBI NO: 23304672 NR Description: MADS-box protein FUL-a [Brassica oleracea var.
  misc_feature (1)..(130): Homolog of NCBI NO: 23304676 NR Description: MADS-box protein FUL-c [Brassica oleracea var.
  misc_feature (1)..(127): Homolog of NCBI NO: 23304678 NR Description: MADS-box protein FUL-d [Brassica oleracea var.
  misc_feature (1)..(130): Homolog of NCBI NO: 18424410 NR Description: MADS-box protein [Arabidopsis thaliana]

SEQ ID NO: 42324 - DNA, 536 bp, Arabidopsis thaliana
  misc_feature (1)..(536): Ceres Seq. ID no. 12326577
  misc_feature: MA Experiment ID: 108569 Result: Down-regulated in Transcription
  misc_feature: MA Experiment 108569 PARAMETER Experiment Name: At_0.001%_MeJA__cDNA_P Parameter: Timepoint (hr) Value: 6
  misc_feature: MA Experiment 108569 PARAMETER Experiment Name: At_0.001%_MeJA__cDNA_P Parameter: Tissue Value: Aerial
  misc_feature: MA Experiment 108569 PARAMETER Experiment Name: At_0.001%_MeJA__cDNA_P Parameter: Treatment Value: 0.001% MeJA vs. No Treatment
  misc_feature: MA Experiment ID: 20000173 Result: Up-regulated in Transcription
  misc_feature: MA Experiment 20000173 PARAMETER Experiment Name: At_42deg_Heat_P Parameter: Age (day) Value: 14
  misc_feature: MA Experiment 20000173 PARAMETER Experiment Name: At_42deg_Heat_P Parameter: Organism Value: A. thaliana
  misc_feature: MA Experiment 20000173 PARAMETER Experiment Name: At_42deg_Heat_P Parameter: Plant Line Value: WS
  misc_feature: MA Experiment 20000173 PARAMETER Experiment Name: At_42deg_Heat_P Parameter: Temperature (deg C) Value: 42 vs. 22
  misc_feature: MA Experiment 20000173 PARAMETER Experiment Name: At_42deg_Heat_P Parameter: Timepoint (hr) Value: 6
  misc_feature: MA Experiment 20000173 PARAMETER Experiment Name: At_42deg_Heat_P Parameter: Tissue Value: Aerial
  misc_feature: MA Experiment ID: 20000437 Result: Down-regulated in Transcription
  misc_feature: MA Experiment 20000437 PARAMETER Experiment Name: At_Drought_P Parameter: Age (day) Value: 8
  misc_feature: MA Experiment 20000437 PARAMETER Experiment Name: At_Drought_P Parameter: Organism Value: A. thaliana
  misc_feature: MA Experiment 20000437 PARAMETER Experiment Name: At_Drought_P Parameter: Plant Line Value: WS
  misc_feature: MA Experiment 20000437 PARAMETER Experiment Name: At_Drought_P Parameter: Timepoint (hr) Value: 24
  misc_feature: MA Experiment 20000437 PARAMETER Experiment Name: At_Drought_P Parameter: Tissue Value: Whole Plant
  misc_feature: MA Experiment 20000437 PARAMETER Experiment Name: At_Drought_P Parameter: Treatment Value: Drought vs. No Drought
  misc_feature: MA Experiment ID: 20000495 Result: Up-regulated in Transcription
  misc_feature: MA Experiment 20000495 PARAMETER Experiment Name: At_Guard_Cells_P Parameter: Harvest Date Value: 8/2/2002
  misc_feature: MA Experiment 20000495 PARAMETER Experiment Name: At_Guard_Cells_P Parameter: Organism Value: A. thaliana
  misc_feature: MA Experiment 20000495 PARAMETER Experiment Name: At_Guard_Cells_P Parameter: Tissue Value: Guard Cells vs. Leaves
  misc_feature: MA Experiment ID: 20000794 Result: Down-regulated in Transcription
  misc_feature: MA Experiment 20000794 PARAMETER Experiment Name: At_Petals_P Parameter: Age (day) Value: 23-25 days
  misc_feature: MA Experiment 20000794 PARAMETER Experiment Name: At_Petals_P Parameter: Plant Line Value: WS
  misc_feature: MA Experiment 20000794 PARAMETER Experiment Name: At_Petals_P Parameter: Tissue Value: Petals vs. Whole plant
  misc_feature: MA Experiment ID: 20001558 Result: Up-regulated in Transcription
  misc_feature: MA Experiment 20001558 PARAMETER Experiment Name: At_Drought_Soil_Dry_P Parameter: Age (day) Value: 27
  misc_feature: MA Experiment 20001558 PARAMETER Experiment Name: At_Drought_Soil_Dry_P Parameter: Organism Value: A. thaliana
  misc_feature: MA Experiment 20001558 PARAMETER Experiment Name: At_Drought_Soil_Dry_P Parameter: Plant Line Value: WS
  misc_feature: MA Experiment 20001558 PARAMETER Experiment Name: At_Drought_Soil_Dry_P Parameter: Post Timepoint (hr) Value: 6
  misc_feature: MA Experiment 20001558 PARAMETER Experiment Name: At_Drought_Soil_Dry_P Parameter: Post-Treatment Value: Re-Water vs. No Drought
  misc_feature: MA Experiment 20001558 PARAMETER Experiment Name: At_Drought_Soil_Dry_P Parameter: Timepoint (day) Value: 13
  misc_feature: MA Experiment 20001558 PARAMETER Experiment Name: At_Drought_Soil_Dry_P Parameter: Treatment Value: Drought vs. No Drought
  misc_feature: MA Experiment ID: 20001560 Result: Up-regulated in Transcription
  misc_feature: MA Experiment 20001560 PARAMETER Experiment Name: At_Drought_Soil_Dry_P Parameter: Age (day) Value: 28
  misc_feature: MA Experiment 20001560 PARAMETER Experiment Name: At_Drought_Soil_Dry_P Parameter: Organism Value: A. thaliana
  misc_feature: MA Experiment 20001560 PARAMETER Experiment Name: At_Drought_Soil_Dry_P Parameter: Plant Line Value: WS
  misc_feature: MA Experiment 20001560 PARAMETER Experiment Name: At_Drought_Soil_Dry_P Parameter: Post Timepoint (hr) Value: None
  misc_feature: MA Experiment 20001560 PARAMETER Experiment Name: At_Drought_Soil_Dry_P Parameter: Post-Treatment Value: None
  misc_feature: MA Experiment 20001560 PARAMETER Experiment Name: At_Drought_Soil_Dry_P Parameter: Timepoint (day) Value: 14
  misc_feature: MA Experiment 20001560 PARAMETER Experiment Name: At_Drought_Soil_Dry_P Parameter: Treatment Value: Drought vs. No Drought
  misc_feature: MA Experiment ID: 20001757 Result: Up-regulated in Transcription
  misc_feature: MA Experiment 20001757 PARAMETER Experiment Name: At_50mM_NH4NO3_L-to-H_P Parameter: Timepoint (hr) Value: 6
  misc_feature: MA Experiment 20001757 PARAMETER Experiment Name: At_50mM_NH4NO3_L-to-H_P Parameter: Tissue Value: Leaf
  misc_feature: MA Experiment 20001757 PARAMETER Experiment Name: At_50mM_NH4NO3_L-to-H_P Parameter: Treatment Value: 50mM NH4NO3 vs 100mM Mannitol
acttccttctcttgaagccggaaaccttaaggttttatatctgggaaaaaactcgcatccgcttcaatgactaagggaacgggaagtttcggaaagagaagaaacaagagtcacacactctgtgtcagatgtggccgtcgcagtttccacatccagaagagtcgttgctctgcttgtgcttatcccgccgctcgcaagaggacttacaactggagtgtgaaggcaatccgtagaaagactactggaactggaaggatgaggtatcttcgcaatgtgcctcgcaggttcaagaccggtttcagagagggtaccgaagccaagccaaggaacaagggagttgcttcatcagcttaaacttgtttttgagcatcaagggagagagaattctgagtttgttgttcacaagattactactcttaagtgtctgattatgactatctttttgtgtggtctttgcgtttttaaagttttggacatggatggatttcaatttgcaagtcttttaattctctttattctaatcattatggttcctc

SEQ ID NO: 42325 - protein, 95 aa, Arabidopsis thaliana
  peptide (1)..(95): Ceres Seq. ID no. 12326578
  misc_feature (2)..(55): Pfam Name: Ribosomal protein L37e Pfam Description: Ribosomal protein L37e
  misc_feature (1)..(95): Homolog of NCBI NO: 37779096 NR Description: ribosomal protein L37 [Pagrus major]
  misc_feature (1)..(87): Homolog of NCBI NO: 39583062 NR Description: Hypothetical protein CBG04239 [Caenorhabditis
  misc_feature (1)..(95): Homolog of NCBI NO: 19852052 NR Description: 60S ribosomal protein L37 [Aplysia californica]
  misc_feature (1)..(95): Homolog of NCBI NO: 4506641 NR Description: ribosomal protein L37; 60S ribosomal protein L37;
  misc_feature (1)..(95): Homolog of NCBI NO: 20139516 NR Description: 60S ribosomal protein L37
  misc_feature (1)..(87): Homolog of NCBI NO: 38047707 NR Description: similar to Drosophila melanogaster CG9091
  misc_feature (1)..(93): Homolog of NCBI NO: 24642107 NR Description: CG9091-PA [Drosophila melanogaster]
  misc_feature (1)..(95): Homolog of NCBI NO: 15218094 NR Description: putative 60s ribosomal protein L37
  misc_feature (1)..(95): Homolog of NCBI NO: 18401007 NR Description: putative ribosomal protein
  misc_feature (1)..(95): Homolog of NCBI NO: 15218208 NR Description: 60S ribosomal protein L37, putative
MTKGTGSFGKRRNKSHTLCVRCGRRSFHIQKSRCSACAYPAARKRTYNWSVKAIRRKTTGTGRMRYLRNVPRRFKTGFREGTEAKPRNKGVASSA

SEQ ID NO: 42326 - protein, 88 aa, Arabidopsis thaliana
  peptide (1)..(88): Ceres Seq. ID no. 12326579
MCLAGSRPVSERVPKPSQGTRELLHQLKLVFEHQGRENSEFVVHKITTLKCLIMTIFLCGLCVFKVLDMDGFQFASLLILFILIIMVP

SEQ ID NO: 42327 - DNA, 2116 bp, Arabidopsis thaliana
  misc_feature (1)..(2116): Ceres Seq. ID no. 12562750
  misc_feature: MA Experiment ID: 108434 Result: Down-regulated in Transcription
  misc_feature: MA Experiment 108434 PARAMETER Experiment Name: At_Root_Tips_cDNA_P Parameter: Tissue Value: Root Tips
  misc_feature: MA Experiment ID: 108569 Result: Down-regulated in Transcription
  misc_feature: MA Experiment 108569 PARAMETER Experiment Name: At_0.001%_MeJA__cDNA_P Parameter: Timepoint (hr) Value: 6
  misc_feature: MA Experiment 108569 PARAMETER Experiment Name: At_0.001%_MeJA__cDNA_P Parameter: Tissue Value: Aerial
  misc_feature: MA Experiment 108569 PARAMETER Experiment Name: At_0.001%_MeJA__cDNA_P Parameter: Treatment Value: 0.001% MeJA vs. No Treatment
  misc_feature: MA Experiment ID: 108595 Result: Up-regulated in Transcription
  misc_feature: MA Experiment 108595 PARAMETER Experiment Name: At_Ler-pi_Ovule_cDNA_P Parameter: Plant Line Value: null
  misc_feature: MA Experiment ID: 20000087 Result: Up-regulated in Transcription
  misc_feature: MA Experiment 20000087 PARAMETER Experiment Name: At_100uM_ABA_Mutants_cDNA_P Parameter: Plant Line Value: WS
  misc_feature: MA Experiment 20000087 PARAMETER Experiment Name: At_100uM_ABA_Mutants_cDNA_P Parameter: Timepoint (hr) Value: 6
  misc_feature: MA Experiment 20000087 PARAMETER Experiment Name: At_100uM_ABA_Mutants_cDNA_P Parameter: Tissue Value: Aerial
  misc_feature: MA Experiment 20000087 PARAMETER Experiment Name: At_100uM_ABA_Mutants_cDNA_P Parameter: Treatment Value: 100uM ABA vs. No Treatment
  misc_feature: MA Experiment ID: 20000111 Result: Up-regulated in Transcription
  misc_feature: MA Experiment 20000111 PARAMETER Experiment Name: At_42deg_Heat_cDNA_P Parameter: Temperature (deg C) Value: 42 vs. 22
  misc_feature: MA Experiment 20000111 PARAMETER Experiment Name: At_42deg_Heat_cDNA_P Parameter: Timepoint (hr) Value: 6
  misc_feature: MA Experiment 20000111 PARAMETER Experiment Name: At_42deg_Heat_cDNA_P Parameter: Tissue Value: Aerial
  misc_feature: MA Experiment ID: 20000171 Result: Down-regulated in Transcription
  misc_feature: MA Experiment 20000171 PARAMETER Experiment Name: At_42deg_Heat_P Parameter: Age (day) Value: 14
  misc_feature: MA Experiment 20000171 PARAMETER Experiment Name: At_42deg_Heat_P Parameter: Organism Value: A. thaliana
  misc_feature: MA Experiment 20000171 PARAMETER Experiment Name: At_42deg_Heat_P Parameter: Plant Line Value: WS
  misc_feature: MA Experiment 20000171 PARAMETER Experiment Name: At_42deg_Heat_P Parameter: Temperature (deg C) Value: 42 vs. 22
  misc_feature: MA Experiment 20000171 PARAMETER Experiment Name: At_42deg_Heat_P Parameter: Timepoint (hr) Value: 1
  misc_feature: MA Experiment 20000171 PARAMETER Experiment Name: At_42deg_Heat_P Parameter: Tissue Value: Aerial
  misc_feature: MA Experiment ID: 20000224 Result: Down-regulated in Transcription
  misc_feature: MA Experiment ID: 20001557 Result: Up-regulated in Transcription
  misc_feature: MA Experiment 20001557 PARAMETER Experiment Name: At_Drought_Soil_Dry_P Parameter: Age (day) Value: 27
  misc_feature: MA Experiment 20001557 PARAMETER Experiment Name: At_Drought_Soil_Dry_P Parameter: Organism Value: A. thaliana
  misc_feature: MA Experiment 20001557 PARAMETER Experiment Name: At_Drought_Soil_Dry_P Parameter: Plant Line Value: WS
  misc_feature: MA Experiment 20001557 PARAMETER Experiment Name: At_Drought_Soil_Dry_P Parameter: Post Timepoint (hr) Value: 3
  misc_feature: MA Experiment 20001557 PARAMETER Experiment Name: At_Drought_Soil_Dry_P Parameter: Post-Treatment Value: Re-Water vs. No Drought
  misc_feature: MA Experiment 20001557 PARAMETER Experiment Name: At_Drought_Soil_Dry_P Parameter: Timepoint (day) Value: 13
  misc_feature: MA Experiment 20001557 PARAMETER Experiment Name: At_Drought_Soil_Dry_P Parameter: Treatment Value: Drought vs. No Drought
ctcttttccgattcctctcaatctctctttcttcttctttttctctcgctccaaattccatgtctgtgtctctttcctcctccgccgtataattcgccggaaaaattatctccctttgattttcgaacacctccgcgaactatgcgcttcttttgcccttatcctccaactacttgtcggatctgcaattcttcttgtcaattcccaaccctaatcggagctaatcacacctctgctcgtttctcttctcgttagtctctgctccatctcctcctcagatttagggatatttgcttccaatttaacaaacaaaccaagagctattctttcgttctttattctctccgtcttgtaaagtagttttagcagtgagatacatacaaatggagacttccatggggaaacccagcttcttacggaatataatggttcgcgtgcttctctttggtgttcttatcatcgttgtgagatttgcttatgttgtcaccatcaccggtgaatcatgcaatcgcggcgacttctgcttcttctctctccctgagaatctcaactttgtcatctccggtgctgcctccggctcttctgctatcgacgccatcagatctacttcccctggggatgatctctacaccaccagggattggatcaaatccgttcagttttactcctccatcttccaggatctgatcgccgacggttatctatcgcctgaatcgaagacgctttgtgtagagacggcgattggacaagaggttcactcgctcagagagattggggtgaagaactccgtcgggatctctaagaaagcttctaggccgttggtggttagaggcgagggacatgctattccctttgaggataacgctttcgattttgtattctccggtggtgaccgccttgggaagtcgttgaagcagttggaattcgccgatgagattactcgaacactgaaacccgaagggtttgcggtggttcatgttggggctacagatacgtacagtttcaattcattccttgatttgtttaattcttgcagattggtgaagatgcgtgatatcgatggttttgatccttcgatgcctcatatcagagaatttgttattcagaaatactcagagattgatggtggtggtcatcaccaccgtggtggtggtgattctggtggaaagtgctggattccgggttacaaaagagatttgattcgggatgcagagccactgattcaagaggagcctcttaagccatggattacacttaagaggaacatcaagaatattaaatatgtgccttctatggttgatatacgtttcaagagtagatacgtttacgttgatgttggtgctagaagttatggatccagtattgggagttggttcaagaaagagtaccctaagcagaacaaaacttttgatgttttcgccattgaggctgacaaagcctttcacgaagagtataagataaagaagaaggtgaacctgttgccatacgcagcgtgggtgaggaacgagacgttatcgtttgagatcaatcacgatccgggaaaggaagtggaagccaaagcaaagggcagggggatgggcagaatccagccggttaaaaagtctgactcgagtgacttagctggagaggtgaatttgattcaagggtttgatttcgctgactggttgaagaagagtgtgagagagagggactttgttgtgatgaagatggatgttgaaggaaccgaattcgatctgatcccgaggctaatcaagacaggagcgatttgtctaatagatgagttgttccttgaatgccattacaacaggtggcagagatgttgtcctggtcaaaggagccaaaagtacaacaagacttataaccaatgcttagagctcttcaattcgctcagacaaagaggggtgcttgtccatcaatggtggtaatggttaggatgctgcataaaagtctccttcttctatgcatttggtgaaaaatgtactttcttcttctagaatatataaagcgggatattgtaggtttctattaaaaatacgttgtctgtgctgaaattcccttttactgtaagaaaaaagaagtttagctttaaatggaaatttgagtttcttttacgctt

SEQ ID NO: 42328 - protein, 513 aa, Arabidopsis thaliana
  peptide (1)..(513): Ceres Seq. ID no. 12562751
  misc_feature (396)..(513): Homolog of NCBI NO: 34906802 NR Description: contains ESTs
  misc_feature (492)..(513): Homolog of NCBI NO: 15231806 NR Description: putative protein
  misc_feature (422)..(471): Homolog of NCBI NO: 15231806 NR Description: putative protein
  misc_feature (271)..(357): Homolog of NCBI NO: 15231806 NR Description: putative protein
  misc_feature (81)..(228): Homolog of NCBI NO: 7486528 NR Description: hypothetical protein F6I7.10 - Arabidopsis
  misc_feature (81)..(228): Homolog of NCBI NO: 25403245 NR Description: protein F21J9.14 [imported] - Arabidopsis
  misc_feature (81)..(228): Homolog of NCBI NO: 15221752 NR Description: unknown protein; protein id: At1g24480.1
  misc_feature (81)..(228): Homolog of NCBI NO: 22328908 NR Description: Expressed protein
  misc_feature (60)..(513): Homolog of NCBI NO: 34898214 NR Description: P0034A04.18 [Oryza sativa (japonica
  misc_feature (1)..(513): Homolog of NCBI NO: 15241038 NR Description: putative protein
METSMGKPSFLRNIMVRVLLFGVLIIVVRFAYVVTITGESCNRGDFCFFSLPENLNFVISGAASGSSAIDAIRSTSPGDDLYTTRDWIKSVQFYSSIFQDLIADGYLSPESKTLCVETAIGQEVHSLREIGVKNSVGISKKASRPLVVRGEGHAIPFEDNAFDFVFSGGDRLGKSLKQLEFADEITRTLKPEGFAVVHVGATDTYSFNSFLDLFNSCRLVKMRDIDGFDPSMPHIREFVIQKYSEIDGGGHHHRGGGDSGGKCWIPGYKRDLIRDAEPLIQEEPLKPWITLKRNIKNIKYVPSMVDIRFKSRYVYVDVGARSYGSSIGSWFKKEYPKQNKTFDVFAIEADKAFHEEYKIKKKVNLLPYAAWVRNETLSFEINHDPGKEVEAKAKGRGMGRIQPVKKSDSSDLAGEVNLIQGFDFADWLKKSVRERDFVVMKMDVEGTEFDLIPRLIKTGAICLIDELFLECHYNRWQRCCPGQRSQKYNKTYNQCLELFNSLRQRGVLVHQWW

SEQ ID NO: 42329 - protein, 509 aa, Arabidopsis thaliana
  peptide (1)..(509): Ceres Seq. ID no. 12562752
  misc_feature (392)..(509): Homolog of NCBI NO: 34906802 NR Description: contains ESTs
  misc_feature (488)..(509): Homolog of NCBI NO: 15231806 NR Description: putative protein
  misc_feature (418)..(467): Homolog of NCBI NO: 15231806 NR Description: putative protein
  misc_feature (267)..(353): Homolog of NCBI NO: 15231806 NR Description: putative protein
  misc_feature (77)..(224): Homolog of NCBI NO: 7486528 NR Description: hypothetical protein F6I7.10 - Arabidopsis
  misc_feature (77)..(224): Homolog of NCBI NO: 25403245 NR Description: protein F21J9.14 [imported] - Arabidopsis
  misc_feature (77)..(224): Homolog of NCBI NO: 15221752 NR Description: unknown protein; protein id: At1g24480.1
  misc_feature (77)..(224): Homolog of NCBI NO: 22328908 NR Description: Expressed protein
  misc_feature (56)..(509): Homolog of NCBI NO: 34898214 NR Description: P0034A04.18 [Oryza sativa (japonica
  misc_feature (1)..(509): Homolog of NCBI NO: 15241038 NR Description: putative protein
MGKPSFLRNIMVRVLLFGVLIIVVRFAYVVTITGESCNRGDFCFFSLPENLNFVISGAASGSSAIDAIRSTSPGDDLYTTRDWIKSVQFYSSIFQDLIADGYLSPESKTLCVETAIGQEVHSLREIGVKNSVGISKKASRPLVVRGEGHAIPFEDNAFDFVFSGGDRLGKSLKQLEFADEITRTLKPEGFAVVHVGATDTYSFNSFLDLFNSCRLVKMRDIDGFDPSMPHIREFVIQKYSEIDGGGHHHRGGGDSGGKCWIPGYKRDLIRDAEPLIQEEPLKPWITLKRNIKNIKYVPSMVDIRFKSRYVYVDVGARSYGSSIGSWFKKEYPKQNKTFDVFAIEADKAFHEEYKIKKKVNLLPYAAWVRNETLSFEINHDPGKEVEAKAKGRGMGRIQPVKKSDSSDLAGEVNLIQGFDFADWLKKSVRERDFVVMKMDVEGTEFDLIPRLIKTGAICLIDELFLECHYNRWQRCCPGQRSQKYNKTYNQCLELFNSLRQRGVLVHQWW

SEQ ID NO: 42330 - protein, 499 aa, Arabidopsis thaliana
  peptide (1)..(499): Ceres Seq. ID no. 12562753
  misc_feature (382)..(499): Homolog of NCBI NO: 34906802 NR Description: contains ESTs
  misc_feature (478)..(499): Homolog of NCBI NO: 15231806 NR Description: putative protein
  misc_feature (408)..(457): Homolog of NCBI NO: 15231806 NR Description: putative protein
  misc_feature (257)..(343): Homolog of NCBI NO: 15231806 NR Description: putative protein
  misc_feature (67)..(214): Homolog of NCBI NO: 7486528 NR Description: hypothetical protein F6I7.10 - Arabidopsis
  misc_feature (67)..(214): Homolog of NCBI NO: 25403245 NR Description: protein F21J9.14 [imported] - Arabidopsis
  misc_feature (67)..(214): Homolog of NCBI NO: 15221752 NR Description: unknown protein; protein id: At1g24480.1
  misc_feature (67)..(214): Homolog of NCBI NO: 22328908 NR Description: Expressed protein
  misc_feature (46)..(499): Homolog of NCBI NO: 34898214 NR Description: P0034A04.18 [Oryza sativa (japonica
  misc_feature (1)..(499): Homolog of NCBI NO: 15241038 NR Description: putative protein
MVRVLLFGVLIIVVRFAYVVTITGESCNRGDFCFFSLPENLNFVISGAASGSSAIDAIRSTSPGDDLYTTRDWIKSVQFYSSIFQDLIADGYLSPESKTLCVETAIGQEVHSLREIGVKNSVGISKKASRPLVVRGEGHAIPFEDNAFDFVFSGGDRLGKSLKQLEFADEITRTLKPEGFAVVHVGATDTYSFNSFLDLFNSCRLVKMRDIDGFDPSMPHIREFVIQKYSEIDGGGHHHRGGGDSGGKCWIPGYKRDLIRDAEPLIQEEPLKPWITLKRNIKNIKYVPSMVDIRFKSRYVYVDVGARSYGSSIGSWFKKEYPKQNKTFDVFAIEADKAFHEEYKIKKKVNLLPYAAWVRNETLSFEINHDPGKEVEAKAKGRGMGRIQPVKKSDSSDLAGEVNLIQGFDFADWLKKSVRERDFVVMKMDVEGTEFDLIPRLIKTGAICLIDELFLECHYNRWQRCCPGQRSQKYNKTYNQCLELFNSLRQRGVLVHQWW

SEQ ID NO: 42331 - DNA, 633 bp, Arabidopsis thaliana
  misc_feature (1)..(633): Ceres Seq. ID no. 13575120
  misc_feature: MA Experiment ID: 20000171 Result: Up-regulated in Transcription
  misc_feature: MA Experiment 20000171 PARAMETER Experiment Name: At_42deg_Heat_P Parameter: Age (day) Value: 14
  misc_feature: MA Experiment 20000171 PARAMETER Experiment Name: At_42deg_Heat_P Parameter: Organism Value: A. thaliana
  misc_feature: MA Experiment 20000171 PARAMETER Experiment Name: At_42deg_Heat_P Parameter: Plant Line Value: WS
  misc_feature: MA Experiment 20000171 PARAMETER Experiment Name: At_42deg_Heat_P Parameter: Temperature (deg C) Value: 42 vs. 22
  misc_feature: MA Experiment 20000171 PARAMETER Experiment Name: At_42deg_Heat_P Parameter: Timepoint (hr) Value: 1
  misc_feature: MA Experiment 20000171 PARAMETER Experiment Name: At_42deg_Heat_P Parameter: Tissue Value: Aerial
  misc_feature: MA Experiment ID: 20000173 Result: Up-regulated in Transcription
  misc_feature: MA Experiment 20000173 PARAMETER Experiment Name: At_42deg_Heat_P Parameter: Age (day) Value: 14
  misc_feature: MA Experiment 20000173 PARAMETER Experiment Name: At_42deg_Heat_P Parameter: Organism Value: A. thaliana
  misc_feature: MA Experiment 20000173 PARAMETER Experiment Name: At_42deg_Heat_P Parameter: Plant Line Value: WS
  misc_feature: MA Experiment 20000173 PARAMETER Experiment Name: At_42deg_Heat_P Parameter: Temperature (deg C) Value: 42 vs. 22
  misc_feature: MA Experiment 20000173 PARAMETER Experiment Name: At_42deg_Heat_P Parameter: Timepoint (hr) Value: 6
  misc_feature: MA Experiment 20000173 PARAMETER Experiment Name: At_42deg_Heat_P Parameter: Tissue Value: Aerial
  misc_feature: MA Experiment ID: 20000182 Result: Up-regulated in Transcription
  misc_feature: MA Experiment 20000182 PARAMETER Experiment Name: At_2mM_SA_P Parameter: Age (day) Value: 14
  misc_feature: MA Experiment 20000182 PARAMETER Experiment Name: At_2mM_SA_P Parameter: Organism Value: A. thaliana
  misc_feature: MA Experiment 20000182 PARAMETER Experiment Name: At_2mM_SA_P Parameter: Plant Line Value: WS
  misc_feature: MA Experiment 20000182 PARAMETER Experiment Name: At_2mM_SA_P Parameter: Timepoint (hr) Value: 6
  misc_feature: MA Experiment 20000182 PARAMETER Experiment Name: At_2mM_SA_P Parameter: Tissue Value: Aerial
  misc_feature: MA Experiment 20000182 PARAMETER Experiment Name: At_2mM_SA_P Parameter: Treatment Value: 2mM SA vs. No Treatment
  misc_feature: MA Experiment ID: 20000437 Result: Up-regulated in Transcription
  misc_feature: MA Experiment 20000437 PARAMETER Experiment Name: At_Drought_P Parameter: Age (day) Value: 8
  misc_feature: MA Experiment 20000437 PARAMETER Experiment Name: At_Drought_P Parameter: Organism Value: A. thaliana
  misc_feature: MA Experiment 20000437 PARAMETER Experiment Name: At_Drought_P Parameter: Plant Line Value: WS
  misc_feature: MA Experiment 20000437 PARAMETER Experiment Name: At_Drought_P Parameter: Timepoint (hr) Value: 24
  misc_feature: MA Experiment 20000437 PARAMETER Experiment Name: At_Drought_P Parameter: Tissue Value: Whole Plant
  misc_feature: MA Experiment 20000437 PARAMETER Experiment Name: At_Drought_P Parameter: Treatment Value: Drought vs. No Drought
  misc_feature: MA Experiment ID: 20000443 Result: Up-regulated in Transcription
  misc_feature: MA Experiment 20000443 PARAMETER Experiment Name: At_1uM_BR-BRZ__P Parameter: Tissue Value: Shoot Apices
  misc_feature: MA Experiment 20000443 PARAMETER Experiment Name: At_1uM_BR-BRZ__P Parameter: Treatment Value: 1uM BRZ vs. No Treatment
  misc_feature: MA Experiment ID: 20000453 Result: Up-regulated in Transcription
  misc_feature: MA Experiment 20000453 PARAMETER Experiment Name: At_100uM_ABA_P Parameter: Age (day) Value: 15
  misc_feature: MA Experiment 20000453 PARAMETER Experiment Name: At_100uM_ABA_P Parameter: Organism Value: A. thaliana
  misc_feature: MA Experiment 20000453 PARAMETER Experiment Name: At_100uM_ABA_P Parameter: Plant Line Value: WS
  misc_feature: MA Experiment 20000453 PARAMETER Experiment Name: At_100uM_ABA_P Parameter: Timepoint (hr) Value: 24
  misc_feature: MA Experiment 20000453 PARAMETER Experiment Name: At_100uM_ABA_P Parameter: Tissue Value: Aerial
  misc_feature: MA Experiment 20000453 PARAMETER Experiment Name: At_100uM_ABA_P Parameter: Treatment Value: 100uM ABA vs. No Treatment
  misc_feature: MA Experiment ID: 20000456 Result: Up-regulated in Transcription
  misc_feature: MA Experiment 20000456 PARAMETER Experiment Name: At_100uM_BA_P Parameter: Age (day) Value: 14
  misc_feature: MA Experiment 20000456 PARAMETER Experiment Name: At_100uM_BA_P Parameter: Organism Value: A. thaliana
  misc_feature: MA Experiment 20000456 PARAMETER Experiment Name: At_100uM_BA_P Parameter: Plant Line Value: WS
  misc_feature: MA Experiment 20000456 PARAMETER Experiment Name: At_100uM_BA_P Parameter: Timepoint (hr) Value: 6
  misc_feature: MA Experiment 20000456 PARAMETER Experiment Name: At_100uM_BA_P Parameter: Tissue Value: Aerial
  misc_feature: MA Experiment 20000456 PARAMETER Experiment Name: At_100uM_BA_P Parameter: Treatment Value: 100uM BA vs. No Treatment
  misc_feature: MA Experiment ID: 20000709 Result: Up-regulated in Transcription
  misc_feature: MA Experiment 20000709 PARAMETER Experiment Name: At_15mM_NH4NO3_L-to-H_P Parameter: Age (hr) Value: 14
  misc_feature: MA Experiment 20000709 PARAMETER Experiment Name: At_15mM_NH4NO3_L-to-H_P Parameter: Organism Value: A. thaliana
  misc_feature: MA Experiment 20000709 PARAMETER Experiment Name: At_15mM_NH4NO3_L-to-H_P Parameter: Plant Line Value: WS
  misc_feature: MA Experiment 20000709 PARAMETER Experiment Name: At_15mM_NH4NO3_L-to-H_P Parameter: Timepoint (hr) Value: 4
  misc_feature: MA Experiment 20000709 PARAMETER Experiment Name: At_15mM_NH4NO3_L-to-H_P Parameter: Tissue Value: Aerial
  misc_feature: MA Experiment 20000709 PARAMETER Experiment Name: At_15mM_NH4NO3_L-to-H_P Parameter: Treatment Value: 15mM NH4NO3 vs. 30mM Mannitol
  misc_feature: MA Experiment ID: 20001555 Result: Up-regulated in Transcription
  misc_feature: MA Experiment 20001555 PARAMETER Experiment Name: At_Drought_Soil_Dry_P Parameter: Age (day) Value: 24
  misc_feature: MA Experiment 20001555 PARAMETER Experiment Name: At_Drought_Soil_Dry_P Parameter: Organism Value: A. thaliana
  misc_feature: MA Experiment 20001555 PARAMETER Experiment Name: At_Drought_Soil_Dry_P Parameter: Plant Line Value: WS
  misc_feature: MA Experiment 20001555 PARAMETER Experiment Name: At_Drought_Soil_Dry_P Parameter: Post Timepoint (hr) Value: None
  misc_feature: MA Experiment 20001555 PARAMETER Experiment Name: At_Drought_Soil_Dry_P Parameter: Post-Treatment Value: None
  misc_feature: MA Experiment 20001555 PARAMETER Experiment Name: At_Drought_Soil_Dry_P Parameter: Timepoint (day) Value: 10
  misc_feature: MA Experiment 20001555 PARAMETER Experiment Name: At_Drought_Soil_Dry_P Parameter: Treatment Value: Drought vs. No Drought
  misc_feature: MA Experiment ID: 20001556 Result: Up-regulated in Transcription
  misc_feature: MA Experiment 20001556 PARAMETER Experiment Name: At_Drought_Soil_Dry_P Parameter: Age (day) Value: 26
  misc_feature: MA Experiment 20001556 PARAMETER Experiment Name: At_Drought_Soil_Dry_P Parameter: Organism Value: A. thaliana
  misc_feature: MA Experiment 20001556 PARAMETER Experiment Name: At_Drought_Soil_Dry_P Parameter: Plant Line Value: WS
  misc_feature: MA Experiment 20001556 PARAMETER Experiment Name: At_Drought_Soil_Dry_P Parameter: Post Timepoint (hr) Value: None
  misc_feature: MA Experiment 20001556 PARAMETER Experiment Name: At_Drought_Soil_Dry_P Parameter: Post-Treatment Value: None
  misc_feature: MA Experiment 20001556 PARAMETER Experiment Name: At_Drought_Soil_Dry_P Parameter: Timepoint (day) Value: 12
  misc_feature: MA Experiment 20001556 PARAMETER Experiment Name: At_Drought_Soil_Dry_P Parameter: Treatment Value: Drought vs. No Drought
  misc_feature: MA Experiment ID: 20001557 Result: Up-regulated in Transcription
  misc_feature: MA Experiment 20001557 PARAMETER Experiment Name: At_Drought_Soil_Dry_P Parameter: Age (day) Value: 27
  misc_feature: MA Experiment 20001557 PARAMETER Experiment Name: At_Drought_Soil_Dry_P Parameter: Organism Value: A. thaliana
  misc_feature: MA Experiment 20001557 PARAMETER Experiment Name: At_Drought_Soil_Dry_P Parameter: Plant Line Value: WS
  misc_feature: MA Experiment 20001557 PARAMETER Experiment Name: At_Drought_Soil_Dry_P Parameter: Post Timepoint (hr) Value: 3
  misc_feature: MA Experiment 20001557 PARAMETER Experiment Name: At_Drought_Soil_Dry_P Parameter: Post-Treatment Value: Re-Water vs. No Drought
  misc_feature: MA Experiment 20001557 PARAMETER Experiment Name: At_Drought_Soil_Dry_P Parameter: Timepoint (day) Value: 13
  misc_feature: MA Experiment 20001557 PARAMETER Experiment Name: At_Drought_Soil_Dry_P Parameter: Treatment Value: Drought vs. No Drought
  misc_feature: MA Experiment ID: 20001558 Result: Up-regulated in Transcription
  misc_feature: MA Experiment 20001558 PARAMETER Experiment Name: At_Drought_Soil_Dry_P Parameter: Age (day) Value: 27
  misc_feature: MA Experiment 20001558 PARAMETER Experiment Name: At_Drought_Soil_Dry_P Parameter: Organism Value: A. thaliana
  misc_feature: MA Experiment 20001558 PARAMETER Experiment Name: At_Drought_Soil_Dry_P Parameter: Plant Line Value: WS
  misc_feature: MA Experiment 20001558 PARAMETER Experiment Name: At_Drought_Soil_Dry_P Parameter: Post Timepoint (hr) Value: 6
  misc_feature: MA Experiment 20001558 PARAMETER Experiment Name: At_Drought_Soil_Dry_P Parameter: Post-Treatment Value: Re-Water vs. No Drought
  misc_feature: MA Experiment 20001558 PARAMETER Experiment Name: At_Drought_Soil_Dry_P Parameter: Timepoint (day) Value: 13
  misc_feature: MA Experiment 20001558 PARAMETER Experiment Name: At_Drought_Soil_Dry_P Parameter: Treatment Value: Drought vs. No Drought
  misc_feature: MA Experiment ID: 20001560 Result: Up-regulated in Transcription
  misc_feature: MA Experiment 20001560 PARAMETER Experiment Name: At_Drought_Soil_Dry_P Parameter: Age (day) Value: 28
  misc_feature: MA Experiment 20001560 PARAMETER Experiment Name: At_Drought_Soil_Dry_P Parameter: Organism Value: A. thaliana
  misc_feature: MA Experiment 20001560 PARAMETER Experiment Name: At_Drought_Soil_Dry_P Parameter: Plant Line Value: WS
  misc_feature: MA Experiment 20001560 PARAMETER Experiment Name: At_Drought_Soil_Dry_P Parameter: Post Timepoint (hr) Value: None
  misc_feature: MA Experiment 20001560 PARAMETER Experiment Name: At_Drought_Soil_Dry_P Parameter: Post-Treatment Value: None
  misc_feature: MA Experiment 20001560 PARAMETER Experiment Name: At_Drought_Soil_Dry_P Parameter: Timepoint (day) Value: 14
  misc_feature: MA Experiment 20001560 PARAMETER Experiment Name: At_Drought_Soil_Dry_P Parameter: Treatment Value: Drought vs. No Drought
  misc_feature: MA Experiment ID: 20001773 Result: Up-regulated in Transcription
  misc_feature: MA Experiment 20001773 PARAMETER Experiment Name: At_Far-red-enriched-adult_P Parameter: Age (day) Value: 30
  misc_feature: MA Experiment 20001773 PARAMETER Experiment Name: At_Far-red-enriched-adult_P Parameter: Light Value: Far-red enriched vs. White
  misc_feature: MA Experiment 20001773 PARAMETER Experiment Name: At_Far-red-enriched-adult_P Parameter: Organism Value: A. thaliana
  misc_feature: MA Experiment 20001773 PARAMETER Experiment Name: At_Far-red-enriched-adult_P Parameter: Plant Line Value: Columbia
  misc_feature: MA Experiment 20001773 PARAMETER Experiment Name: At_Far-red-enriched-adult_P Parameter: Timepoint (hr) Value: 48
  misc_feature: MA Experiment 20001773 PARAMETER Experiment Name: At_Far-red-enriched-adult_P Parameter: Tissue Value: Aerial
  misc_feature: MA Experiment ID: 20001905 Result: Up-regulated in Transcription
  misc_feature: MA Experiment 20001905 PARAMETER Experiment Name: At_Drought_Reproduction_P Parameter: Age (day) Value: 40
  misc_feature: MA Experiment 20001905 PARAMETER Experiment Name: At_Drought_Reproduction_P Parameter: Organism Value: A. thaliana
  misc_feature: MA Experiment 20001905 PARAMETER Experiment Name: At_Drought_Reproduction_P Parameter: Plant Line Value: WS
  misc_feature: MA Experiment 20001905 PARAMETER Experiment Name: At_Drought_Reproduction_P Parameter: Timepoint (day) Value: 10
  misc_feature: MA Experiment 20001905 PARAMETER Experiment Name: At_Drought_Reproduction_P Parameter: Tissue Value: Rosettes
  misc_feature: MA Experiment 20001905 PARAMETER Experiment Name: At_Drought_Reproduction_P Parameter: Treatment Value: Drought vs. No Drought
  misc_feature: MA Experiment ID: 20001910 Result: Up-regulated in Transcription
  misc_feature: MA Experiment 20001910 PARAMETER Experiment Name: At_Drought_Reproduction_P Parameter: Age (day) Value: 37
  misc_feature: MA Experiment 20001910 PARAMETER Experiment Name: At_Drought_Reproduction_P Parameter: Organism Value: A. thaliana
  misc_feature: MA Experiment 20001910 PARAMETER Experiment Name: At_Drought_Reproduction_P Parameter: Plant Line Value: WS
  misc_feature: MA Experiment 20001910 PARAMETER Experiment Name: At_Drought_Reproduction_P Parameter: Timepoint (day) Value: 7
  misc_feature: MA Experiment 20001910 PARAMETER Experiment Name: At_Drought_Reproduction_P Parameter: Tissue Value: Flowers
  misc_feature: MA Experiment 20001910 PARAMETER Experiment Name: At_Drought_Reproduction_P Parameter: Treatment Value: Drought vs. No Drought
  misc_feature: MA Experiment ID: 20001911 Result: Up-regulated in Transcription
  misc_feature: MA Experiment 20001911 PARAMETER Experiment Name: At_Drought_Reproduction_P Parameter: Age (day) Value: 40
  misc_feature: MA Experiment 20001911 PARAMETER Experiment Name: At_Drought_Reproduction_P Parameter: Organism Value: A. thaliana
  misc_feature: MA Experiment 20001911 PARAMETER Experiment Name: At_Drought_Reproduction_P Parameter: Plant Line Value: WS
  misc_feature: MA Experiment 20001911 PARAMETER Experiment Name: At_Drought_Reproduction_P Parameter: Timepoint (day) Value: 10
  misc_feature: MA Experiment 20001911 PARAMETER Experiment Name: At_Drought_Reproduction_P Parameter: Tissue Value: Flowers
  misc_feature: MA Experiment 20001911 PARAMETER Experiment Name: At_Drought_Reproduction_P Parameter: Treatment Value: Drought vs. No Drought
aaaaaaatcaaaccgaagaaaaagccaagaatcaagaaagttaacacaacagctaagaatggatttggagtttggaaggtttccaatattttcaatcctcgaagacatgcttgaagcccctgaagaacaaaccgagaagactcgtaacaacccttcaagagcttacatgcgagacgcaaaggcaatggctgctacaccagctgacgttatcgagcacccggatgcgtacgttttcgccgtggacatgcctggaatcaaaggagatgagattcaggtccagatagagaacgagaacgtgcttgtggtgagtggcaaaagacagagggacaacaaggagaatgaaggtgtgaagtttgtgaggatggagaggaggatggggaagtttatgaggaagtttcagttacctgataatgcagatttggagaagatctctgcggcttgtaatgacggtgtgttgaaagtgactattccgaaacttcctcctcctgagccaaagaaaccaaagactatacaagttcaagtcgcttgagtttgtttgtgatcgtgtttttgtgttttaatgaatgtaatcgataagcaactacctcttggtgttcgttgtaaaatgaaataaaaatagttttctctgttcat

SEQ ID NO: 42332 - protein, 175 aa, Arabidopsis thaliana
  peptide (1)..(175): Ceres Seq. ID no. 13575121
  misc_feature (28)..(175): Homolog of NCBI NO: 5257560 NR Description: cytosolic class II low molecular weight heat
  misc_feature (18)..(175): Homolog of NCBI NO: 3336894 NR Description: Hsp20.2 protein [Lycopersicon peruvianum]
  misc_feature (20)..(175): Homolog of NCBI NO: 123550 NR Description: 17.1 KD CLASS II HEAT SHOCK PROTEIN
  misc_feature (20)..(175): Homolog of NCBI NO: 71498 NR Description: heat shock protein 17.7 - garden pea
  misc_feature (20)..(175): Homolog of NCBI NO: 1170365 NR Description: 17.9 KD CLASS II HEAT SHOCK PROTEIN
  misc_feature (18)..(175): Homolog of NCBI NO: 7441328 NR Description: heat shock protein 17.6 - tomato
  misc_feature (22)..(156): Homolog of NCBI NO: 26452718 NR Description: putative heat shock protein 17.6-II [Arabidopsis
  misc_feature (22)..(175): Homolog of NCBI NO: 15239846 NR Description: class II heat shock protein [Arabidopsis
  misc_feature (20)..(175): Homolog of NCBI NO: 2129610 NR Description: heat shock protein 17.7 - Arabidopsis thaliana
  misc_feature (20)..(175): Homolog of NCBI NO: 15239849 NR Description: heat shock protein 17.6A [Arabidopsis thaliana]
KKSNRRKSQESRKLTQQLRMDLEFGRFPIFSILEDMLEAPEEQTEKTRNNPSRAYMRDAKAMAATPADVIEHPDAYVFAVDMPGIKGDEIQVQIENENVLVVSGKRQRDNKENEGVKFVRMERRMGKFMRKFQLPDNADLEKISAACNDGVLKVTIPKLPPPEPKKPKTIQVQVA

SEQ ID NO: 42333 - protein, 156 aa, Arabidopsis thaliana
  peptide (1)..(156): Ceres Seq. ID no. 13575122
  misc_feature (9)..(156): Homolog of NCBI NO: 5257560 NR Description: cytosolic class II low molecular weight heat
  misc_feature (1)..(156): Homolog of NCBI NO: 3336894 NR Description: Hsp20.2 protein [Lycopersicon peruvianum]
  misc_feature (1)..(156): Homolog of NCBI NO: 123550 NR Description: 17.1 KD CLASS II HEAT SHOCK PROTEIN
  misc_feature (1)..(156): Homolog of NCBI NO: 71498 NR Description: heat shock protein 17.7 - garden pea
  misc_feature (1)..(156): Homolog of NCBI NO: 1170365 NR Description: 17.9 KD CLASS II HEAT SHOCK PROTEIN
  misc_feature (1)..(156): Homolog of NCBI NO: 7441328 NR Description: heat shock protein 17.6 - tomato
  misc_feature (3)..(137): Homolog of NCBI NO: 26452718 NR Description: putative heat shock protein 17.6-II [Arabidopsis
  misc_feature (3)..(156): Homolog of NCBI NO: 15239846 NR Description: class II heat shock protein [Arabidopsis
  misc_feature (1)..(156): Homolog of NCBI NO: 2129610 NR Description: heat shock protein 17.7 - Arabidopsis thaliana
  misc_feature (1)..(156): Homolog of NCBI NO: 15239849 NR Description: heat shock protein 17.6A [Arabidopsis thaliana]
MDLEFGRFPIFSILEDMLEAPEEQTEKTRNNPSRAYMRDAKAMAATPADVIEHPDAYVFAVDMPGIKGDEIQVQIENENVLVVSGKRQRDNKENEGVKFVRMERRMGKFMRKFQLPDNADLEKISAACNDGVLKVTIPKLPPPEPKKPKTIQVQVA

SEQ ID NO: 42334 - protein, 140 aa, Arabidopsis thaliana
  peptide (1)..(140): Ceres Seq. ID no. 13575123
  misc_feature (1)..(140): Homolog of NCBI NO: 5257560 NR Description: cytosolic class II low molecular weight heat
  misc_feature (1)..(140): Homolog of NCBI NO: 3336894 NR Description: Hsp20.2 protein [Lycopersicon peruvianum]
  misc_feature (1)..(140): Homolog of NCBI NO: 123550 NR Description: 17.1 KD CLASS II HEAT SHOCK PROTEIN
  misc_feature (1)..(140): Homolog of NCBI NO: 71498 NR Description: heat shock protein 17.7 - garden pea
  misc_feature (1)..(140): Homolog of NCBI NO: 1170365 NR Description: 17.9 KD CLASS II HEAT SHOCK PROTEIN
  misc_feature (1)..(140): Homolog of NCBI NO: 7441328 NR Description: heat shock protein 17.6 - tomato
  misc_feature (1)..(121): Homolog of NCBI NO: 26452718 NR Description: putative heat shock protein 17.6-II [Arabidopsis
  misc_feature (1)..(140): Homolog of NCBI NO: 15239846 NR Description: class II heat shock protein [Arabidopsis
  misc_feature (1)..(140): Homolog of NCBI NO: 2129610 NR Description: heat shock protein 17.7 - Arabidopsis thaliana
  misc_feature (1)..(140): Homolog of NCBI NO: 15239849 NR Description: heat shock protein 17.6A [Arabidopsis thaliana]
MLEAPEEQTEKTRNNPSRAYMRDAKAMAATPADVIEHPDAYVFAVDMPGIKGDEIQVQIENENVLVVSGKRQRDNKENEGVKFVRMERRMGKFMRKFQLPDNADLEKISAACNDGVLKVTIPKLPPPEPKKPKTIQVQVA

SEQ ID NO: 42335 - DNA, 1466 bp, Arabidopsis thaliana
  misc_feature (1)..(1466): Ceres Seq. ID no. 12336518
  misc_feature: MA Experiment ID: 108573 Result: Up-regulated in Transcription
  misc_feature: MA Experiment 108573 PARAMETER Experiment Name: At_Drought_cDNA_P Parameter: Timepoint (hr) Value: 6
  misc_feature: MA Experiment 108573 PARAMETER Experiment Name: At_Drought_cDNA_P Parameter: Tissue Value: Aerial
  misc_feature: MA Experiment 108573 PARAMETER Experiment Name: At_Drought_cDNA_P Parameter: Treatment Value: Drought vs. No Drought
  misc_feature: MA Experiment ID: 108579 Result: Down-regulated in Transcription
  misc_feature: MA Experiment 108579 PARAMETER Experiment Name: At_4deg_Cold_cDNA_P Parameter: Temperature (deg C) Value: 4 vs. 22
  misc_feature: MA Experiment 108579 PARAMETER Experiment Name: At_4deg_Cold_cDNA_P Parameter: Timepoint (hr) Value: 6
  misc_feature: MA Experiment 108579 PARAMETER Experiment Name: At_4deg_Cold_cDNA_P Parameter: Tissue Value: Aerial
  misc_feature: MA Experiment ID: 20000184 Result: Down-regulated in Transcription
  misc_feature: MA Experiment 20000184 PARAMETER Experiment Name: At_Shoots__P Parameter: Age (day) Value: 7
  misc_feature: MA Experiment 20000184 PARAMETER Experiment Name: At_Shoots__P Parameter: Tissue Value: Shoots vs. Whole Plant
  misc_feature: MA Experiment ID: 20000227 Result: Down-regulated in Transcription
  misc_feature: MA Experiment 20000227 PARAMETER Experiment Name: At_Root-Tips-vs-Tops_P Parameter: Tissue Value: Root Tips vs. Root Tops
  misc_feature: MA Experiment ID: 20000495 Result: Up-regulated in Transcription
  misc_feature: MA Experiment 20000495 PARAMETER Experiment Name: At_Guard_Cells_P Parameter: Harvest Date Value: 8/2/2002
  misc_feature: MA Experiment 20000495 PARAMETER Experiment Name: At_Guard_Cells_P Parameter: Organism Value: A. thaliana
  misc_feature: MA Experiment 20000495 PARAMETER Experiment Name: At_Guard_Cells_P Parameter: Tissue Value: Guard Cells vs. Leaves
  misc_feature: MA Experiment ID: 20001248 Result: Up-regulated in Transcription
  misc_feature: MA Experiment 20001248 PARAMETER Experiment Name: At_Far-red-induction_P Parameter: Age (day) Value: 7
  misc_feature: MA Experiment 20001248 PARAMETER Experiment Name: At_Far-red-induction_P Parameter: Light Value: Far-red vs. White
  misc_feature: MA Experiment 20001248 PARAMETER Experiment Name: At_Far-red-induction_P Parameter: Organism Value: A. thaliana
  misc_feature: MA Experiment 20001248 PARAMETER Experiment Name: At_Far-red-induction_P Parameter: Plant Line Value: Columbia
  misc_feature: MA Experiment 20001248 PARAMETER Experiment Name: At_Far-red-induction_P Parameter: Timepoint (hr) Value: 4
  misc_feature: MA Experiment 20001248 PARAMETER Experiment Name: At_Far-red-induction_P Parameter: Tissue Value: Whole Plant
  misc_feature: MA Experiment ID: 20001450 Result: Up-regulated in Transcription
  misc_feature: MA Experiment 20001450 PARAMETER Experiment Name: At_Far-red-induction_P Parameter: Age (day) Value: 7
  misc_feature: MA Experiment 20001450 PARAMETER Experiment Name: At_Far-red-induction_P Parameter: Light Value: Far-red vs. White
  misc_feature: MA Experiment 20001450 PARAMETER Experiment Name: At_Far-red-induction_P Parameter: Organism Value: A. thaliana
  misc_feature: MA Experiment 20001450 PARAMETER Experiment Name: At_Far-red-induction_P Parameter: Plant Line Value: Columbia
  misc_feature: MA Experiment 20001450 PARAMETER Experiment Name: At_Far-red-induction_P Parameter: Timepoint (hr) Value: 8
  misc_feature: MA Experiment 20001450 PARAMETER Experiment Name: At_Far-red-induction_P Parameter: Tissue Value: Whole Plant
tgtagttaggtcaatggaacagacaaaggatgattctgattttgaggatgattttgaaacgaagaagatggagactgatacatcagctcaagaggcaaggaatggtaaagacatacaagggattcagtgggaagggtttaagtatactacagacgagtttcgtgacactaggttgaaacattatgataactttgttaatatcttaaggcctagctctcgagaaaagcttgataaggaacatgggcaagtagttgagaaaggaaagaacttttatgacttccaattcaatacaaggcttgtcacttccactattgtgcattttcagttgggagtactgtctgagcagccagcagcataacgatatggcttcggaatttggtatgggcgacatctaagcatgatgtatatctaatgcaaaattattcactcatgcactggtcatctctactccagagagggaaagaagtagttaatgtcgccagatcagttacccccactcagaaactacctggattgttttctgagccactctctagggtgcaagttagcagcatggcagtcaaagaaaatctgatccttttaggagggttcgacggggagcttctctgcaagtgtgtaaatcagcctggggttgctttttgcacaagattatcaacggaagataatgccatcacacacagttgatatataccgagacccaagtggctcccttaggcttataaccgcaaataacgactgtaaaatccgggtattcgatgctcagagctttacacgtgtcagtgaatttacttttgattggtctgtcaataatacctcagttagcccggatgggaagctactcgctgtactcggggacagtacagaatgcttgatctctgattcccattctgaaaaagttatttcaagcctcagaggccacaaagactactcatttgcatctgcttggcacccgaatggtctaatcttagcaacgggaaaccaagacacgacatgccgtctctgggacattcgtaacccgtcagaatcattcgctgtcctgaaaggaaacatgggagccatcagaggactgaagttcacaccagaagggcggtttcttgcaatggctgagcctgcagactttgttcacatcttcgacacgcagtccgggtttctacagtcccaagagattgatctgtttggagaaatagccgggatctccttcagccccgactcagaggcactatatgttggggtcgcagaccgcacttatggaagcttgatggagtataagaggagtaaggataatcactatatggactccttttactgagaaaaggtaaatggaaagtaaaaagcatctaatatgttgtcacaagttgggttttaccctattagtgtgtatatgtagacagaattggtagtttctttggttatgtatgttgtatgtaacccataatatatcttgccaaactttaagtatgttttgt

SEQ ID NO: 42336 - protein, 214 aa, Arabidopsis thaliana
  peptide (1)..(214): Ceres Seq. ID no. 12336519
  misc_feature (77)..(114): Pfam Name: WD domain, G-beta repeat Pfam Description: WD domain, G-beta repeat
  misc_feature (3)..(212): Homolog of NCBI NO: 21536732 NR Description: WD-repeat protein-like [Arabidopsis thaliana]
  misc_feature (3)..(212): Homolog of NCBI NO: 30696707 NR Description: WD-40 repeat protein family [Arabidopsis
  misc_feature (3)..(212): Homolog of NCBI NO: 18423837 NR Description: WD-repeat protein-like
  misc_feature (13)..(186): Homolog of NCBI NO: 6598592 NR Description: F5J5.6 [Arabidopsis thaliana]
  misc_feature (13)..(214): Homolog of NCBI NO: 25405023 NR Description: protein F28K19.28 [imported] - Arabidopsis
  misc_feature (3)..(214): Homolog of NCBI NO: 13937195 NR Description: At1g78070/F28K19_28 [Arabidopsis thaliana]
  misc_feature (47)..(214): Homolog of NCBI NO: 6598592 NR Description: F5J5.6 [Arabidopsis thaliana]
  misc_feature (3)..(214): Homolog of NCBI NO: 12324715 NR Description: unknown protein; 4584-7806 [Arabidopsis thaliana]
  misc_feature (3)..(214): Homolog of NCBI NO: 21553502 NR Description: unknown [Arabidopsis thaliana]
  misc_feature (3)..(214): Homolog of NCBI NO: 18400003 NR Description: expressed protein
MPSHTVDIYRDPSGSLRLITANNDCKIRVFDAQSFTRVSEFTFDWSVNNTSVSPDGKLLAVLGDSTECLISDSHSEKVISSLRGHKDYSFASAWHPNGLILATGNQDTTCRLWDIRNPSESFAVLKGNMGAIRGLKFTPEGRFLAMAEPADFVHIFDTQSGFLQSQEIDLFGEIAGISFSPDSEALYVGVADRTYGSLMEYKRSKDNHYMDSFY

SEQ ID NO: 42337 - protein, 118 aa, Arabidopsis thaliana
  peptide (1)..(118): Ceres Seq. ID no. 12336520
  misc_feature (10)..(109): Homolog of NCBI NO: 9758639 NR Description: WD-repeat protein-like [Arabidopsis thaliana]
  misc_feature (10)..(109): Homolog of NCBI NO: 21536732 NR Description: WD-repeat protein-like [Arabidopsis thaliana]
  misc_feature (10)..(109): Homolog of NCBI NO: 30696707 NR Description: WD-40 repeat protein family [Arabidopsis
  misc_feature (10)..(109): Homolog of NCBI NO: 18423837 NR Description: WD-repeat protein-like
  misc_feature (11)..(108): Homolog of NCBI NO: 25405023 NR Description: protein F28K19.28 [imported] - Arabidopsis
  misc_feature (11)..(109): Homolog of NCBI NO: 13937195 NR Description: At1g78070/F28K19_28 [Arabidopsis thaliana]
  misc_feature (1)..(114): Homolog of NCBI NO: 6598592 NR Description: F5J5.6 [Arabidopsis thaliana]
  misc_feature (5)..(109): Homolog of NCBI NO: 12324715 NR Description: unknown protein; 4584-7806 [Arabidopsis thaliana]
  misc_feature (23)..(109): Homolog of NCBI NO: 21553502 NR Description: unknown [Arabidopsis thaliana]
  misc_feature (5)..(109): Homolog of NCBI NO: 18400003 NR Description: expressed protein
VVRSMEQTKDDSDFEDDFETKKMETDTSAQEARNGKDIQGIQWEGFKYTTDEFRDTRLKHYDNFVNILRPSSREKLDKEHGQVVEKGKNFYDFQFNTRLVTSTIVHFQLGVLSEQPAA

SEQ ID NO: 42338 - protein, 114 aa, Arabidopsis thaliana
  peptide (1)..(114): Ceres Seq. ID no. 12336521
  misc_feature (6)..(105): Homolog of NCBI NO: 9758639 NR Description: WD-repeat protein-like [Arabidopsis thaliana]
  misc_feature (6)..(105): Homolog of NCBI NO: 21536732 NR Description: WD-repeat protein-like [Arabidopsis thaliana]
  misc_feature (6)..(105): Homolog of NCBI NO: 30696707 NR Description: WD-40 repeat protein family [Arabidopsis
  misc_feature (6)..(105): Homolog of NCBI NO: 18423837 NR Description: WD-repeat protein-like
  misc_feature (7)..(104): Homolog of NCBI NO: 25405023 NR Description: protein F28K19.28 [imported] - Arabidopsis
  misc_feature (7)..(105): Homolog of NCBI NO: 13937195 NR Description: At1g78070/F28K19_28 [Arabidopsis thaliana]
  misc_feature (1)..(110): Homolog of NCBI NO: 6598592 NR Description: F5J5.6 [Arabidopsis thaliana]
  misc_feature (1)..(105): Homolog of NCBI NO: 12324715 NR Description: unknown protein; 4584-7806 [Arabidopsis thaliana]
  misc_feature (19)..(105): Homolog of NCBI NO: 21553502 NR Description: unknown [Arabidopsis thaliana]
  misc_feature (1)..(105): Homolog of NCBI NO: 18400003 NR Description: expressed protein
MEQTKDDSDFEDDFETKKMETDTSAQEARNGKDIQGIQWEGFKYTTDEFRDTRLKHYDNFVNILRPSSREKLDKEHGQVVEKGKNFYDFQFNTRLVTSTIVHFQLGVLSEQPAA

SEQ ID NO: 42339 - DNA, 1766 bp, Arabidopsis thaliana
  misc_feature (1)..(1766): Ceres Seq. ID no. 13592405
  misc_feature: MA Experiment ID: 20000306 Result: Up-regulated in Transcription
  misc_feature: MA Experiment 20000306 PARAMETER Experiment Name: At_Germinating_Seeds_Sub_P Parameter: Age (hr) Value: 6 vs. 0
  misc_feature: MA Experiment 20000306 PARAMETER Experiment Name: At_Germinating_Seeds_Sub_P Parameter: Organism Value: A. thaliana
  misc_feature: MA Experiment 20000306 PARAMETER Experiment Name: At_Germinating_Seeds_Sub_P Parameter: Plant Line Value: WS
  misc_feature: MA Experiment 20000306 PARAMETER Experiment Name: At_Germinating_Seeds_Sub_P Parameter: Tissue Value: Germinating Seeds
  misc_feature: MA Experiment ID: 20000328 Result: Up-regulated in Transcription
  misc_feature: MA Experiment 20000328 PARAMETER Experiment Name: At_42deg_Heat_Sub_P Parameter: Age (day) Value: 14
  misc_feature: MA Experiment 20000328 PARAMETER Experiment Name: At_42deg_Heat_Sub_P Parameter: Organism Value: A. thaliana
  misc_feature: MA Experiment 20000328 PARAMETER Experiment Name: At_42deg_Heat_Sub_P Parameter: Plant Line Value: WS
  misc_feature: MA Experiment 20000328 PARAMETER Experiment Name: At_42deg_Heat_Sub_P Parameter: Temperature (deg C) Value: 42 vs. 22
  misc_feature: MA Experiment 20000328 PARAMETER Experiment Name: At_42deg_Heat_Sub_P Parameter: Timepoint (hr) Value: 6
  misc_feature: MA Experiment 20000328 PARAMETER Experiment Name: At_42deg_Heat_Sub_P Parameter: Tissue Value: Aerial
  misc_feature: MA Experiment ID: 20000329 Result: Down-regulated in Transcription
  misc_feature: MA Experiment 20000329 PARAMETER Experiment Name: At_4deg_Cold_Sub_P Parameter: Age (day) Value: 14
  misc_feature: MA Experiment 20000329 PARAMETER Experiment Name: At_4deg_Cold_Sub_P Parameter: Organism Value: A. thaliana
  misc_feature: MA Experiment 20000329 PARAMETER Experiment Name: At_4deg_Cold_Sub_P Parameter: Plant Line Value: WS
  misc_feature: MA Experiment 20000329 PARAMETER Experiment Name: At_4deg_Cold_Sub_P Parameter: Temperature (deg C) Value: 4 vs. 22
  misc_feature: MA Experiment 20000329 PARAMETER Experiment Name: At_4deg_Cold_Sub_P Parameter: Timepoint (hr) Value: 6
  misc_feature: MA Experiment 20000329 PARAMETER Experiment Name: At_4deg_Cold_Sub_P Parameter: Tissue Value: Aerial
  misc_feature: MA Experiment ID: 20000352 Result: Up-regulated in Transcription
  misc_feature: MA Experiment 20000352 PARAMETER Experiment Name: At_Drought_Sub_P Parameter: Age (day) Value: 7
  misc_feature: MA Experiment 20000352 PARAMETER Experiment Name: At_Drought_Sub_P Parameter: Organism Value: A. thaliana
  misc_feature: MA Experiment 20000352 PARAMETER Experiment Name: At_Drought_Sub_P Parameter: Plant Line Value: WS
  misc_feature: MA Experiment 20000352 PARAMETER Experiment Name: At_Drought_Sub_P Parameter: Timepoint (hr) Value: 6
  misc_feature: MA Experiment 20000352 PARAMETER Experiment Name: At_Drought_Sub_P Parameter: Tissue Value: Whole Plant
  misc_feature: MA Experiment 20000352 PARAMETER Experiment Name: At_Drought_Sub_P Parameter: Treatment Value: Drought vs. No Drought
atttctttctaatttcttctcttcatgaattaagccaaaccaacaaaaaaaatcatttaattttcgcggagagatggagaaattctcgtacaactcttatccagattcaaccgactcgtcaccgakatctcgtgagatcgaattcgataacccgccgcctccatgggatgatcagaaccmgaaccagcagcaacatagctacaaggtgaagtttatgtgcagctatggcggcaagattcagccacggcctcacgataatcagctcacttacgtaaacggagaaacgaagattctttccgttgatcgcgggattagattccctgttttagcttccaaactctccaccgtatgcggcggcggtgatgkcggcggaggagaagttacgtttaagtatcagcttccgggagaagacttagacgctttgatctcggttacgaacgatgatgatctggagcatatgatgcacgagtacgatcgcttgcttcgtttgtcgtctaagccagcgaggatgcgtttgtttctcttcccggcttcttctggatttggttctcaaagttcgactcaatcgggatcgagatcgcttcgtcgaggcgttgaacactgttcctaggctatctggaatcggagaaatccgtaactgctcctccgaataatgcggattttttgtttggatcggagaaagttgcagctccgccgccgccaccaccggctgaggtgaaattaccggttcctgtggcgttagaaccgcctttgtttaacgatccgcgtgtgattcaaccggatcacgtcgtaaatccgatggaaattcaaagacaaatgcaggaatttcagaggatgcatattagggatcaagaacaacaacaacaacaacaacaggaagctgtatacagaaggaagagtaacgaagacggtttaatagaaaccggaggtggatacttctctccaccgtacatacaaaatcctgcgccaccaccgccacagcagacgattcctcaracgaatccgcaagctcmtccgatgacgactttctggcaaggaaaccacaatccaggagtcgtatttccaacaaccacacatgggattaggattaccagagcaaccagtttacatgatcccatctccatctccatctccggtgtaccacgcgccaccaccrccgcaaccgcaaggygtcatmagaccaatacttacaggacaagtaaaycaaggcggctactatcctcaggtacagagartggcttcagatacttacagagaaccacaccaatcaccgtacaacgtggctcagccacttcaggcacctataggaacaaaagcagcacaacaacaacaacctcctcctcctcagccttttacctctggtcctccaccaccgcaatacaccgcagtaccaccgccacgacaagtagtaggattaccagatacatcagcgtatactcaggtgacttacactggaggaatggggaaacaagtttattacacggaggctccaccgccgcagtaccatggagttggcttacctgtaactggtatgagtgaattgagaactggaccggacgggaagcttgttgctatgaacatggcacctaaagtttcatctcagagttcagattcggctgtttgattgatgaggtatttcatatggttgaatcagattattgttaatctattacaacaaatttcatcatcttttatatatatatatatatatagtgtaattaagatcactttggtgtctgataaataatgtttttttcttttccccc

SEQ ID NO: 42340 - protein, 246 aa, Arabidopsis thaliana
  peptide (1)..(246): Ceres Seq. ID no. 15221095
  misc_feature (1)..(33): Homolog of NCBI NO: 15242462 NR Description: octicosapeptide/Phox/Bem1p (PB1)
  misc_feature (1)..(95): Homolog of NCBI NO: 15237703 NR Description: octicosapeptide/Phox/Bem1p (PB1)
  misc_feature (1)..(33): Homolog of NCBI NO: 15242462 NR Description: octicosapeptide/Phox/Bem1p (PB1)
  misc_feature (1)..(95): Homolog of NCBI NO: 15237703 NR Description: octicosapeptide/Phox/Bem1p (PB1)
  misc_feature (66)..(66): Xaa is any aa, unknown or other
  misc_feature (72)..(72): Xaa is any aa, unknown or other
  misc_feature (120)..(120): Xaa is any aa, unknown or other
  misc_feature (125)..(125): Xaa is any aa, unknown or other
  misc_feature (127)..(127): Xaa is any aa, unknown or other
  misc_feature (136)..(136): Xaa is any aa, unknown or other
  misc_feature (146)..(146): Xaa is any aa, unknown or other
MEIQRQMQEFQRMHIRDQEQQQQQQQEAVYRRKSNEDGLIETGGGYFSPPYIQNPAPPPPQQTIPXTNPQAXPMTTFWQGNHNPGVVFPTTTHGIRITRATSLHDPISISISGVPRATTXATARXHXTNTYRTSKXRRLLSSGTEXGFRYLQRTTPITVQRGSATSGTYRNKSSTTTTTSSSSAFYLWSSTTAIHRSTTATTSSRITRYISVYSGDLHWRNGETSLLHGGSTAAVPWSWLTCNWYE

SEQ ID NO: 42341 - protein, 240 aa, Arabidopsis thaliana
  peptide (1)..(240): Ceres Seq. ID no. 15221096
  misc_feature (1)..(27): Homolog of NCBI NO: 15242462 NR Description: octicosapeptide/Phox/Bem1p (PB1)
  misc_feature (1)..(89): Homolog of NCBI NO: 15237703 NR Description: octicosapeptide/Phox/Bem1p (PB1)
  misc_feature (1)..(27): Homolog of NCBI NO: 15242462 NR Description: octicosapeptide/Phox/Bem1p (PB1)
  misc_feature (1)..(89): Homolog of NCBI NO: 15237703 NR Description: octicosapeptide/Phox/Bem1p (PB1)
  misc_feature (60)..(60): Xaa is any aa, unknown or other
  misc_feature (66)..(66): Xaa is any aa, unknown or other
  misc_feature (114)..(114): Xaa is any aa, unknown or other
  misc_feature (119)..(119): Xaa is any aa, unknown or other
  misc_feature (121)..(121): Xaa is any aa, unknown or other
  misc_feature (130)..(130): Xaa is any aa, unknown or other
  misc_feature (140)..(140): Xaa is any aa, unknown or other
MQEFQRMHIRDQEQQQQQQQEAVYRRKSNEDGLIETGGGYFSPPYIQNPAPPPPQQTIPXTNPQAXPMTTFWQGNHNPGVVFPTTTHGIRITRATSLHDPISISISGVPRATTXATARXHXTNTYRTSKXRRLLSSGTEXGFRYLQRTTPITVQRGSATSGTYRNKSSTTTTTSSSSAFYLWSSTTAIHRSTTATTSSRITRYISVYSGDLHWRNGETSLLHGGSTAAVPWSWLTCNWYE

SEQ ID NO: 42342 - protein, 234 aa, Arabidopsis thaliana
  peptide (1)..(234): Ceres Seq. ID no. 15221097
  misc_feature (1)..(21): Homolog of NCBI NO: 15242462 NR Description: octicosapeptide/Phox/Bem1p (PB1)
  misc_feature (1)..(83): Homolog of NCBI NO: 15237703 NR Description: octicosapeptide/Phox/Bem1p (PB1)
  misc_feature (1)..(21): Homolog of NCBI NO: 15242462 NR Description: octicosapeptide/Phox/Bem1p (PB1)
  misc_feature (1)..(83): Homolog of NCBI NO: 15237703 NR Description: octicosapeptide/Phox/Bem1p (PB1)
  misc_feature (54)..(54): Xaa is any aa, unknown or other
  misc_feature (60)..(60): Xaa is any aa, unknown or other
  misc_feature (108)..(108): Xaa is any aa, unknown or other
  misc_feature (113)..(113): Xaa is any aa, unknown or other
  misc_feature (115)..(115): Xaa is any aa, unknown or other
  misc_feature (124)..(124): Xaa is any aa, unknown or other
  misc_feature (134)..(134): Xaa is any aa, unknown or other
MHIRDQEQQQQQQQEAVYRRKSNEDGLIETGGGYFSPPYIQNPAPPPPQQTIPXTNPQAXPMTTFWQGNHNPGVVFPTTTHGIRITRATSLHDPISISISGVPRATTXATARXHXTNTYRTSKXRRLLSSGTEXGFRYLQRTTPITVQRGSATSGTYRNKSSTTTTTSSSSAFYLWSSTTAIHRSTTATTSSRITRYISVYSGDLHWRNGETSLLHGGSTAAVPWSWLTCNWYE

SEQ ID NO: 42343 - DNA, 961 bp, Arabidopsis thaliana
  misc_feature (1)..(961): Ceres Seq. ID no. 13497655
  misc_feature: MA Experiment ID: 20000227 Result: Down-regulated in Transcription
  misc_feature: MA Experiment 20000227 PARAMETER Experiment Name: At_Root-Tips-vs-Tops_P Parameter: Tissue Value: Root Tips vs. Root Tops
  misc_feature: MA Experiment ID: 20000264 Result: Up-regulated in Transcription
  misc_feature: MA Experiment 20000264 PARAMETER Experiment Name: At_Open_Flower_P Parameter: Age (day) Value: 21
  misc_feature: MA Experiment 20000264 PARAMETER Experiment Name: At_Open_Flower_P Parameter: Plant Line Value: WS
  misc_feature: MA Experiment 20000264 PARAMETER Experiment Name: At_Open_Flower_P Parameter: Tissue Value: Open Flower vs. Whole Plant
  misc_feature: MA Experiment ID: 20001451 Result: Up-regulated in Transcription
  misc_feature: MA Experiment 20001451 PARAMETER Experiment Name: At_Far-red-induction_P Parameter: Age (day) Value: 7
  misc_feature: MA Experiment 20001451 PARAMETER Experiment Name: At_Far-red-induction_P Parameter: Light Value: Far-red vs. White
  misc_feature: MA Experiment 20001451 PARAMETER Experiment Name: At_Far-red-induction_P Parameter: Organism Value: A. thaliana
  misc_feature: MA Experiment 20001451 PARAMETER Experiment Name: At_Far-red-induction_P Parameter: Plant Line Value: Columbia
  misc_feature: MA Experiment 20001451 PARAMETER Experiment Name: At_Far-red-induction_P Parameter: Timepoint (hr) Value: 24
  misc_feature: MA Experiment 20001451 PARAMETER Experiment Name: At_Far-red-induction_P Parameter: Tissue Value: Whole Plant
  misc_feature: MA Experiment ID: 20001905 Result: Up-regulated in Transcription
  misc_feature: MA Experiment 20001905 PARAMETER Experiment Name: At_Drought_Reproduction_P Parameter: Age (day) Value: 40
  misc_feature: MA Experiment 20001905 PARAMETER Experiment Name: At_Drought_Reproduction_P Parameter: Organism Value: A. thaliana
  misc_feature: MA Experiment 20001905 PARAMETER Experiment Name: At_Drought_Reproduction_P Parameter: Plant Line Value: WS
  misc_feature: MA Experiment 20001905 PARAMETER Experiment Name: At_Drought_Reproduction_P Parameter: Timepoint (day) Value: 10
  misc_feature: MA Experiment 20001905 PARAMETER Experiment Name: At_Drought_Reproduction_P Parameter: Tissue Value: Rosettes
  misc_feature: MA Experiment 20001905 PARAMETER Experiment Name: At_Drought_Reproduction_P Parameter: Treatment Value: Drought vs. No Drought
  misc_feature: MA Experiment ID: 20001910 Result: Up-regulated in Transcription
  misc_feature: MA Experiment 20001910 PARAMETER Experiment Name: At_Drought_Reproduction_P Parameter: Age (day) Value: 37
  misc_feature: MA Experiment 20001910 PARAMETER Experiment Name: At_Drought_Reproduction_P Parameter: Organism Value: A. thaliana
  misc_feature: MA Experiment 20001910 PARAMETER Experiment Name: At_Drought_Reproduction_P Parameter: Plant Line Value: WS
  misc_feature: MA Experiment 20001910 PARAMETER Experiment Name: At_Drought_Reproduction_P Parameter: Timepoint (day) Value: 7
  misc_feature: MA Experiment 20001910 PARAMETER Experiment Name: At_Drought_Reproduction_P Parameter: Tissue Value: Flowers
  misc_feature: MA Experiment 20001910 PARAMETER Experiment Name: At_Drought_Reproduction_P Parameter: Treatment Value: Drought vs. No Drought
gattttcctcttctcttcttcttcctcctcctcctctcggattcttccttaaagtttccacctttcgccaccgagaaaacattccggcaaaccctcgtcggaatacttaatctctttgataatctttctctctggtgacgttttgtgaatggtggaaactaatctgattggtgataatcataggctcaccctttcaactaaaagggcgagctttctcatcatccctctctctcaagactctgttttctcattcggttcttgcaaagaaggctggtacttccgttgcattggccttgacccgtgaaccaatcaatcatcatctccgatcatattttcaataataatttctgtgttttgattttttgagaattttgaaaaaaagatgttgctttacaagaaaaagaatcagattgttaaaggaaacagaatcttgatcagcgtaacgtttcttggtagtgctggtccgatccggttcgttgctaatgaaggtgatcttgttgcatctgtgattgatactgctttgaaatgttatgctcgtgaaggtcgtcttcctattcttggatctgatttcaacgattttgttttttattgtccaatggttggacctggagctttgagtccatgggaagcaattgggtcggtgggagtgaggaactttatgttgtgtaagaagaaaccagaggagaagaaggttgaggaagataagggaagatcgaattttccgattaatggagctagaaaaggagctggtggaagttttaaggcttggattaataaatctttaagacttaaagtgactacccattagagagactacttatatgttgtcttctctgtttctttgaatgctcatgtttggtttgtgtctttgttcttttgatcttcttattttatgaacttttgatttgttttttttgtttcttatgatggtttcaggaaataaaagtttcaagttcatttg

SEQ ID NO: 42344 - protein, 141 aa, Arabidopsis thaliana
  peptide (1)..(141): Ceres Seq. ID no. 13497656
  misc_feature (12)..(105): Homolog of NCBI NO: 9757983 NR Description: gb|AAC00605.1~gene_id:K12B20.21~similar to
  misc_feature (12)..(105): Homolog of NCBI NO: 21553538 NR Description: unknown [Arabidopsis thaliana]
  misc_feature (12)..(105): Homolog of NCBI NO: 15240321 NR Description: expressed protein [Arabidopsis thaliana]
  misc_feature (1)..(141): Homolog of NCBI NO: 13359433 NR Description: putative senescence-associated protein [Pisum
  misc_feature (1)..(121): Homolog of NCBI NO: 16226338 NR Description: At1g70780/F5A18_4 [Arabidopsis thaliana]
  misc_feature (1)..(141): Homolog of NCBI NO: 18409673 NR Description: expressed protein [Arabidopsis thaliana]
  misc_feature (1)..(141): Homolog of NCBI NO: 25372856 NR Description: T26J12.8 protein - Arabidopsis thaliana
  misc_feature (1)..(141): Homolog of NCBI NO: 15220659 NR Description: expressed protein [Arabidopsis thaliana]
MLLYKKKNQIVKGNRILISVTFLGSAGPIRFVANEGDLVASVIDTALKCYAREGRLPILGSDFNDFVFYCPMVGPGALSPWEAIGSVGVRNFMLCKKKPEEKKVEEDKGRSNFPINGARKGAGGSFKAWINKSLRLKVTTH

SEQ ID NO: 42345 - protein, 70 aa, Arabidopsis thaliana
  peptide (1)..(70): Ceres Seq. ID no. 13497657
  misc_feature (1)..(34): Homolog of NCBI NO: 9757983 NR Description: gb|AAC00605.1~gene_id:K12B20.21~similar to
  misc_feature (1)..(34): Homolog of NCBI NO: 21553538 NR Description: unknown [Arabidopsis thaliana]
  misc_feature (1)..(34): Homolog of NCBI NO: 15240321 NR Description: expressed protein [Arabidopsis thaliana]
  misc_feature (1)..(70): Homolog of NCBI NO: 13359433 NR Description: putative senescence-associated protein [Pisum
  misc_feature (1)..(50): Homolog of NCBI NO: 16226338 NR Description: At1g70780/F5A18_4 [Arabidopsis thaliana]
  misc_feature (1)..(70): Homolog of NCBI NO: 18409673 NR Description: expressed protein [Arabidopsis thaliana]
  misc_feature (1)..(70): Homolog of NCBI NO: 25372856 NR Description: T26J12.8 protein - Arabidopsis thaliana
  misc_feature (1)..(70): Homolog of NCBI NO: 15220659 NR Description: expressed protein [Arabidopsis thaliana]
MVGPGALSPWEAIGSVGVRNFMLCKKKPEEKKVEEDKGRSNFPINGARKGAGGSFKAWINKSLRLKVTTH

SEQ ID NO: 42346 - DNA, 708 bp, Arabidopsis thaliana
  misc_feature (1)..(708): Ceres Seq. ID no. 12423038
  misc_feature: MA Experiment ID: 108473 Result: Up-regulated in Transcription
  misc_feature: MA Experiment 108473 PARAMETER Experiment Name: At_Drought_Flowers_cDNA_P Parameter: Timepoint (hr) Value: 7 d
  misc_feature: MA Experiment 108473 PARAMETER Experiment Name: At_Drought_Flowers_cDNA_P Parameter: Tissue Value: Flower
  misc_feature: MA Experiment 108473 PARAMETER Experiment Name: At_Drought_Flowers_cDNA_P Parameter: Treatment Value: Drought vs. No Drought
  misc_feature: MA Experiment ID: 108561 Result: Up-regulated in Transcription
  misc_feature: MA Experiment 108561 PARAMETER Experiment Name: At_100uM_ABA_cDNA_P Parameter: Timepoint (hr) Value: 6
  misc_feature: MA Experiment 108561 PARAMETER Experiment Name: At_100uM_ABA_cDNA_P Parameter: Tissue Value: Aerial
  misc_feature: MA Experiment 108561 PARAMETER Experiment Name: At_100uM_ABA_cDNA_P Parameter: Treatment Value: 100uM ABA vs. No Treatment
  misc_feature: MA Experiment ID: 108573 Result: Up-regulated in Transcription
  misc_feature: MA Experiment 108573 PARAMETER Experiment Name: At_Drought_cDNA_P Parameter: Timepoint (hr) Value: 6
  misc_feature: MA Experiment 108573 PARAMETER Experiment Name: At_Drought_cDNA_P Parameter: Tissue Value: Aerial
  misc_feature: MA Experiment 108573 PARAMETER Experiment Name: At_Drought_cDNA_P Parameter: Treatment Value: Drought vs. No Drought
  misc_feature: MA Experiment ID: 108595 Result: Up-regulated in Transcription
  misc_feature: MA Experiment 108595 PARAMETER Experiment Name: At_Ler-pi_Ovule_cDNA_P Parameter: Plant Line Value: null
  misc_feature: MA Experiment ID: 20000068 Result: Up-regulated in Transcription
  misc_feature: MA Experiment ID: 20000069 Result: Up-regulated in Transcription
  misc_feature: MA Experiment 20000069 PARAMETER Experiment Name: At_100uM_ABA_Mutants_cDNA_P Parameter: Plant Line Value: CS23
  misc_feature: MA Experiment 20000069 PARAMETER Experiment Name: At_100uM_ABA_Mutants_cDNA_P Parameter: Timepoint (hr) Value: 6
  misc_feature: MA Experiment 20000069 PARAMETER Experiment Name: At_100uM_ABA_Mutants_cDNA_P Parameter: Tissue Value: Aerial
  misc_feature: MA Experiment 20000069 PARAMETER Experiment Name: At_100uM_ABA_Mutants_cDNA_P Parameter: Treatment Value: 100uM ABA vs. No Treatment
  misc_feature: MA Experiment ID: 20000070 Result: Up-regulated in Transcription
  misc_feature: MA Experiment 20000070 PARAMETER Experiment Name: At_100uM_ABA_Mutants_cDNA_P Parameter: Plant Line Value: CS24
  misc_feature: MA Experiment 20000070 PARAMETER Experiment Name: At_100uM_ABA_Mutants_cDNA_P Parameter: Timepoint (hr) Value: 6
  misc_feature: MA Experiment 20000070 PARAMETER Experiment Name: At_100uM_ABA_Mutants_cDNA_P Parameter: Tissue Value: Aerial
  misc_feature: MA Experiment 20000070 PARAMETER Experiment Name: At_100uM_ABA_Mutants_cDNA_P Parameter: Treatment Value: 100uM ABA vs. No Treatment
  misc_feature: MA Experiment ID: 20000071 Result: Up-regulated in Transcription
  misc_feature: MA Experiment 20000071 PARAMETER Experiment Name: At_100uM_ABA_Mutants_cDNA_P Parameter: Plant Line Value: CS8104
  misc_feature: MA Experiment 20000071 PARAMETER Experiment Name: At_100uM_ABA_Mutants_cDNA_P Parameter: Timepoint (hr) Value: 6
  misc_feature: MA Experiment 20000071 PARAMETER Experiment Name: At_100uM_ABA_Mutants_cDNA_P Parameter: Tissue Value: Aerial
  misc_feature: MA Experiment 20000071 PARAMETER Experiment Name: At_100uM_ABA_Mutants_cDNA_P Parameter: Treatment Value: 100uM ABA vs. No Treatment
  misc_feature: MA Experiment ID: 20000072 Result: Up-regulated in Transcription
  misc_feature: MA Experiment 20000072 PARAMETER Experiment Name: At_100uM_ABA_Mutants_cDNA_P Parameter: Plant Line Value: CS8105
  misc_feature: MA Experiment 20000072 PARAMETER Experiment Name: At_100uM_ABA_Mutants_cDNA_P Parameter: Timepoint (hr) Value: 6
  misc_feature: MA Experiment 20000072 PARAMETER Experiment Name: At_100uM_ABA_Mutants_cDNA_P Parameter: Tissue Value: Aerial
  misc_feature: MA Experiment 20000072 PARAMETER Experiment Name: At_100uM_ABA_Mutants_cDNA_P Parameter: Treatment Value: 100uM ABA vs. No Treatment
  misc_feature: MA Experiment ID: 20000087 Result: Up-regulated in Transcription
  misc_feature: MA Experiment 20000087 PARAMETER Experiment Name: At_100uM_ABA_Mutants_cDNA_P Parameter: Plant Line Value: WS
  misc_feature: MA Experiment 20000087 PARAMETER Experiment Name: At_100uM_ABA_Mutants_cDNA_P Parameter: Timepoint (hr) Value: 6
  misc_feature: MA Experiment 20000087 PARAMETER Experiment Name: At_100uM_ABA_Mutants_cDNA_P Parameter: Tissue Value: Aerial
  misc_feature: MA Experiment 20000087 PARAMETER Experiment Name: At_100uM_ABA_Mutants_cDNA_P Parameter: Treatment Value: 100uM ABA vs. No Treatment
  misc_feature: MA Experiment ID: 20000169 Result: Up-regulated in Transcription
  misc_feature: MA Experiment 20000169 PARAMETER Experiment Name: At_100uM_ABA_P Parameter: Age (day) Value: 14
  misc_feature: MA Experiment 20000169 PARAMETER Experiment Name: At_100uM_ABA_P Parameter: Organism Value: A. thaliana
  misc_feature: MA Experiment 20000169 PARAMETER Experiment Name: At_100uM_ABA_P Parameter: Plant Line Value: WS
  misc_feature: MA Experiment 20000169 PARAMETER Experiment Name: At_100uM_ABA_P Parameter: Timepoint (hr) Value: 6
  misc_feature: MA Experiment 20000169 PARAMETER Experiment Name: At_100uM_ABA_P Parameter: Tissue Value: Aerial
  misc_feature: MA Experiment 20000169 PARAMETER Experiment Name: At_100uM_ABA_P Parameter: Treatment Value: 100uM ABA vs. No Treatment
  misc_feature: MA Experiment ID: 20000265 Result: Up-regulated in Transcription
  misc_feature: MA Experiment 20000265 PARAMETER Experiment Name: At_Open_Flower_P Parameter: Age (day) Value: 21
  misc_feature: MA Experiment 20000265 PARAMETER Experiment Name: At_Open_Flower_P Parameter: Plant Line Value: WS
  misc_feature: MA Experiment 20000265 PARAMETER Experiment Name: At_Open_Flower_P Parameter: Tissue Value: Closed Flower vs. Whole Plant
  misc_feature: MA Experiment ID: 20000267 Result: Up-regulated in Transcription
  misc_feature: MA Experiment 20000267 PARAMETER Experiment Name: At_Drought_P Parameter: Age (day) Value: 7
  misc_feature: MA Experiment 20000267 PARAMETER Experiment Name: At_Drought_P Parameter: Organism Value: A. thaliana
  misc_feature: MA Experiment 20000267 PARAMETER Experiment Name: At_Drought_P Parameter: Plant Line Value: WS
  misc_feature: MA Experiment 20000267 PARAMETER Experiment Name: At_Drought_P Parameter: Timepoint (hr) Value: 6
  misc_feature: MA Experiment 20000267 PARAMETER Experiment Name: At_Drought_P Parameter: Tissue Value: Whole Plant
  misc_feature: MA Experiment 20000267 PARAMETER Experiment Name: At_Drought_P Parameter: Treatment Value: Drought vs. No Drought
  misc_feature: MA Experiment ID: 20000436 Result: Up-regulated in Transcription
  misc_feature: MA Experiment 20000436 PARAMETER Experiment Name: At_Drought_P Parameter: Age (day) Value: 7
  misc_feature: MA Experiment 20000436 PARAMETER Experiment Name: At_Drought_P Parameter: Organism Value: A. thaliana
  misc_feature: MA Experiment 20000436 PARAMETER Experiment Name: At_Drought_P Parameter: Plant Line Value: WS
  misc_feature: MA Experiment 20000436 PARAMETER Experiment Name: At_Drought_P Parameter: Timepoint (hr) Value: 12
  misc_feature: MA Experiment 20000436 PARAMETER Experiment Name: At_Drought_P Parameter: Tissue Value: Whole Plant
  misc_feature: MA Experiment 20000436 PARAMETER Experiment Name: At_Drought_P Parameter: Treatment Value: Drought vs. No Drought
  misc_feature: MA Experiment ID: 20000437 Result: Up-regulated in Transcription
  misc_feature: MA Experiment 20000437 PARAMETER Experiment Name: At_Drought_P Parameter: Age (day) Value: 8
  misc_feature: MA Experiment 20000437 PARAMETER Experiment Name: At_Drought_P Parameter: Organism Value: A. thaliana
  misc_feature: MA Experiment 20000437 PARAMETER Experiment Name: At_Drought_P Parameter: Plant Line Value: WS
  misc_feature: MA Experiment 20000437 PARAMETER Experiment Name: At_Drought_P Parameter: Timepoint (hr) Value: 24
  misc_feature: MA Experiment 20000437 PARAMETER Experiment Name: At_Drought_P Parameter: Tissue Value: Whole Plant
  misc_feature: MA Experiment 20000437 PARAMETER Experiment Name: At_Drought_P Parameter: Treatment Value: Drought vs. No Drought
  misc_feature: MA Experiment ID: 20000527 Result: Up-regulated in Transcription
  misc_feature: MA Experiment 20000527 PARAMETER Experiment Name: At_10percent_PEG_P Parameter: Age (day) Value: 20
  misc_feature: MA Experiment 20000527 PARAMETER Experiment Name: At_10percent_PEG_P Parameter: Organism Value: A. thaliana
  misc_feature: MA Experiment 20000527 PARAMETER Experiment Name: At_10percent_PEG_P Parameter: Plant Line Value: WS
  misc_feature: MA Experiment 20000527 PARAMETER Experiment Name: At_10percent_PEG_P Parameter: Timepoint (day) Value: 20
  misc_feature: MA Experiment 20000527 PARAMETER Experiment Name: At_10percent_PEG_P Parameter: Tissue Value: Whole Plant
  misc_feature: MA Experiment 20000527 PARAMETER Experiment Name: At_10percent_PEG_P Parameter: Treatment Value: 10percent PEG vs. No Treatment
  misc_feature: MA Experiment ID: 20000794 Result: Up-regulated in Transcription
  misc_feature: MA Experiment 20000794 PARAMETER Experiment Name: At_Petals_P Parameter: Age (day) Value: 23-25 days
  misc_feature: MA Experiment 20000794 PARAMETER Experiment Name: At_Petals_P Parameter: Plant Line Value: WS
  misc_feature: MA Experiment 20000794 PARAMETER Experiment Name: At_Petals_P Parameter: Tissue Value: Petals vs. Whole plant
  misc_feature: MA Experiment ID: 20001554 Result: Up-regulated in Transcription
  misc_feature: MA Experiment 20001554 PARAMETER Experiment Name: At_Drought_Soil_Dry_P Parameter: Age (day) Value: 21
  misc_feature: MA Experiment 20001554 PARAMETER Experiment Name: At_Drought_Soil_Dry_P Parameter: Organism Value: A. thaliana
  misc_feature: MA Experiment 20001554 PARAMETER Experiment Name: At_Drought_Soil_Dry_P Parameter: Plant Line Value: WS
  misc_feature: MA Experiment 20001554 PARAMETER Experiment Name: At_Drought_Soil_Dry_P Parameter: Post Timepoint (hr) Value: None
  misc_feature: MA Experiment 20001554 PARAMETER Experiment Name: At_Drought_Soil_Dry_P Parameter: Post-Treatment Value: None
  misc_feature: MA Experiment 20001554 PARAMETER Experiment Name: At_Drought_Soil_Dry_P Parameter: Timepoint (day) Value: 7
  misc_feature: MA Experiment 20001554 PARAMETER Experiment Name: At_Drought_Soil_Dry_P Parameter: Treatment Value: Drought vs. No Drought
  misc_feature: MA Experiment ID: 20001555 Result: Up-regulated in Transcription
  misc_feature: MA Experiment 20001555 PARAMETER Experiment Name: At_Drought_Soil_Dry_P Parameter: Age (day) Value: 24
  misc_feature: MA Experiment 20001555 PARAMETER Experiment Name: At_Drought_Soil_Dry_P Parameter: Organism Value: A. thaliana
  misc_feature: MA Experiment 20001555 PARAMETER Experiment Name: At_Drought_Soil_Dry_P Parameter: Plant Line Value: WS
  misc_feature: MA Experiment 20001555 PARAMETER Experiment Name: At_Drought_Soil_Dry_P Parameter: Post Timepoint (hr) Value: None
  misc_feature: MA Experiment 20001555 PARAMETER Experiment Name: At_Drought_Soil_Dry_P Parameter: Post-Treatment Value: None
  misc_feature: MA Experiment 20001555 PARAMETER Experiment Name: At_Drought_Soil_Dry_P Parameter: Timepoint (day) Value: 10
  misc_feature: MA Experiment 20001555 PARAMETER Experiment Name: At_Drought_Soil_Dry_P Parameter: Treatment Value: Drought vs. No Drought
  misc_feature: MA Experiment ID: 20001556 Result: Up-regulated in Transcription
  misc_feature: MA Experiment 20001556 PARAMETER Experiment Name: At_Drought_Soil_Dry_P Parameter: Age (day) Value: 26
  misc_feature: MA Experiment 20001556 PARAMETER Experiment Name: At_Drought_Soil_Dry_P Parameter: Organism Value: A. thaliana
  misc_feature: MA Experiment 20001556 PARAMETER Experiment Name: At_Drought_Soil_Dry_P Parameter: Plant Line Value: WS
  misc_feature: MA Experiment 20001556 PARAMETER Experiment Name: At_Drought_Soil_Dry_P Parameter: Post Timepoint (hr) Value: None
  misc_feature: MA Experiment 20001556 PARAMETER Experiment Name: At_Drought_Soil_Dry_P Parameter: Post-Treatment Value: None
  misc_feature: MA Experiment 20001556 PARAMETER Experiment Name: At_Drought_Soil_Dry_P Parameter: Timepoint (day) Value: 12
  misc_feature: MA Experiment 20001556 PARAMETER Experiment Name: At_Drought_Soil_Dry_P Parameter: Treatment Value: Drought vs. No Drought
  misc_feature: MA Experiment ID: 20001904 Result: Up-regulated in Transcription
  misc_feature: MA Experiment 20001904 PARAMETER Experiment Name: At_Drought_Reproduction_P Parameter: Age (day) Value: 37
  misc_feature: MA Experiment 20001904 PARAMETER Experiment Name: At_Drought_Reproduction_P Parameter: Organism Value: A. thaliana
  misc_feature: MA Experiment 20001904 PARAMETER Experiment Name: At_Drought_Reproduction_P Parameter: Plant Line Value: WS
  misc_feature: MA Experiment 20001904 PARAMETER Experiment Name: At_Drought_Reproduction_P Parameter: Timepoint (day) Value: 7
  misc_feature: MA Experiment 20001904 PARAMETER Experiment Name: At_Drought_Reproduction_P Parameter: Tissue Value: Rosettes
  misc_feature: MA Experiment 20001904 PARAMETER Experiment Name: At_Drought_Reproduction_P Parameter: Treatment Value: Drought vs. No Drought
  misc_feature: MA Experiment ID: 20001905 Result: Up-regulated in Transcription
  misc_feature: MA Experiment 20001905 PARAMETER Experiment Name: At_Drought_Reproduction_P Parameter: Age (day) Value: 40
  misc_feature: MA Experiment 20001905 PARAMETER Experiment Name: At_Drought_Reproduction_P Parameter: Organism Value: A. thaliana
  misc_feature: MA Experiment 20001905 PARAMETER Experiment Name: At_Drought_Reproduction_P Parameter: Plant Line Value: WS
  misc_feature: MA Experiment 20001905 PARAMETER Experiment Name: At_Drought_Reproduction_P Parameter: Timepoint (day) Value: 10
  misc_feature: MA Experiment 20001905 PARAMETER Experiment Name: At_Drought_Reproduction_P Parameter: Tissue Value: Rosettes
  misc_feature: MA Experiment 20001905 PARAMETER Experiment Name: At_Drought_Reproduction_P Parameter: Treatment Value: Drought vs. No Drought
  misc_feature: MA Experiment ID: 20001906 Result: Up-regulated in Transcription
  misc_feature: MA Experiment 20001906 PARAMETER Experiment Name: At_Drought_Reproduction_P Parameter: Age (day) Value: 35
  misc_feature: MA Experiment 20001906 PARAMETER Experiment Name: At_Drought_Reproduction_P Parameter: Organism Value: A. thaliana
  misc_feature: MA Experiment 20001906 PARAMETER Experiment Name: At_Drought_Reproduction_P Parameter: Plant Line Value: WS
  misc_feature: MA Experiment 20001906 PARAMETER Experiment Name: At_Drought_Reproduction_P Parameter: Timepoint (day) Value: 5
  misc_feature: MA Experiment 20001906 PARAMETER Experiment Name: At_Drought_Reproduction_P Parameter: Tissue Value: Siliques
  misc_feature: MA Experiment 20001906 PARAMETER Experiment Name: At_Drought_Reproduction_P Parameter: Treatment Value: Drought vs. No Drought
  misc_feature: MA Experiment ID: 20001907 Result: Up-regulated in Transcription
  misc_feature: MA Experiment 20001907 PARAMETER Experiment Name: At_Drought_Reproduction_P Parameter: Age (day) Value: 37
  misc_feature: MA Experiment 20001907 PARAMETER Experiment Name: At_Drought_Reproduction_P Parameter: Organism Value: A. thaliana
  misc_feature: MA Experiment 20001907 PARAMETER Experiment Name: At_Drought_Reproduction_P Parameter: Plant Line Value: WS
  misc_feature: MA Experiment 20001907 PARAMETER Experiment Name: At_Drought_Reproduction_P Parameter: Timepoint (day) Value: 7
  misc_feature: MA Experiment 20001907 PARAMETER Experiment Name: At_Drought_Reproduction_P Parameter: Tissue Value: Siliques
  misc_feature: MA Experiment 20001907 PARAMETER Experiment Name: At_Drought_Reproduction_P Parameter: Treatment Value: Drought vs. No Drought
  misc_feature: MA Experiment ID: 20001908 Result: Up-regulated in Transcription
  misc_feature: MA Experiment 20001908 PARAMETER Experiment Name: At_Drought_Reproduction_P Parameter: Age (day) Value: 40
  misc_feature: MA Experiment 20001908 PARAMETER Experiment Name: At_Drought_Reproduction_P Parameter: Organism Value: A. thaliana
  misc_feature: MA Experiment 20001908 PARAMETER Experiment Name: At_Drought_Reproduction_P Parameter: Plant Line Value: WS
  misc_feature: MA Experiment 20001908 PARAMETER Experiment Name: At_Drought_Reproduction_P Parameter: Timepoint (day) Value: 10
  misc_feature: MA Experiment 20001908 PARAMETER Experiment Name: At_Drought_Reproduction_P Parameter: Tissue Value: Siliques
  misc_feature: MA Experiment 20001908 PARAMETER Experiment Name: At_Drought_Reproduction_P Parameter: Treatment Value: Drought vs. No Drought
  misc_feature: MA Experiment ID: 20001909 Result: Up-regulated in Transcription
  misc_feature: MA Experiment 20001909 PARAMETER Experiment Name: At_Drought_Reproduction_P Parameter: Age (day) Value: 35
  misc_feature: MA Experiment 20001909 PARAMETER Experiment Name: At_Drought_Reproduction_P Parameter: Organism Value: A. thaliana
  misc_feature: MA Experiment 20001909 PARAMETER Experiment Name: At_Drought_Reproduction_P Parameter: Plant Line Value: WS
  misc_feature: MA Experiment 20001909 PARAMETER Experiment Name: At_Drought_Reproduction_P Parameter: Timepoint (day) Value: 5
  misc_feature: MA Experiment 20001909 PARAMETER Experiment Name: At_Drought_Reproduction_P Parameter: Tissue Value: Flowers
  misc_feature: MA Experiment 20001909 PARAMETER Experiment Name: At_Drought_Reproduction_P Parameter: Treatment Value: Drought vs. No Drought
  misc_feature: MA Experiment ID: 20001910 Result: Up-regulated in Transcription
  misc_feature: MA Experiment 20001910 PARAMETER Experiment Name: At_Drought_Reproduction_P Parameter: Age (day) Value: 37
  misc_feature: MA Experiment 20001910 PARAMETER Experiment Name: At_Drought_Reproduction_P Parameter: Organism Value: A. thaliana
  misc_feature: MA Experiment 20001910 PARAMETER Experiment Name: At_Drought_Reproduction_P Parameter: Plant Line Value: WS
  misc_feature: MA Experiment 20001910 PARAMETER Experiment Name: At_Drought_Reproduction_P Parameter: Timepoint (day) Value: 7
  misc_feature: MA Experiment 20001910 PARAMETER Experiment Name: At_Drought_Reproduction_P Parameter: Tissue Value: Flowers
  misc_feature: MA Experiment 20001910 PARAMETER Experiment Name: At_Drought_Reproduction_P Parameter: Treatment Value: Drought vs. No Drought
  misc_feature: MA Experiment ID: 20001911 Result: Up-regulated in Transcription
  misc_feature: MA Experiment 20001911 PARAMETER Experiment Name: At_Drought_Reproduction_P Parameter: Age (day) Value: 40
  misc_feature: MA Experiment 20001911 PARAMETER Experiment Name: At_Drought_Reproduction_P Parameter: Organism Value: A. thaliana
  misc_feature: MA Experiment 20001911 PARAMETER Experiment Name: At_Drought_Reproduction_P Parameter: Plant Line Value: WS
  misc_feature: MA Experiment 20001911 PARAMETER Experiment Name: At_Drought_Reproduction_P Parameter: Timepoint (day) Value: 10
  misc_feature: MA Experiment 20001911 PARAMETER Experiment Name: At_Drought_Reproduction_P Parameter: Tissue Value: Flowers
  misc_feature: MA Experiment 20001911 PARAMETER Experiment Name: At_Drought_Reproduction_P Parameter: Treatment Value: Drought vs. No Drought
aatatcatcttattatctctcaagttcttgattttaattaaagatgggtaaagacgaccaccacgaacaagacaaaagattcttctcacatcataatcatcacggccatgggtatccgccaggagcttatcctcctccaccgcagggagcttatcctccaccgggaggttaccctccgcaaggttatcctccaccacctcacggctatccaccggccgcttacccacctccacccggtgcttatcctcccgccgggtatcccggaccatccggtcctcgtccagggtttggaggaggagttgggggattgatagcaggagcggcaacagcggcagcggctgcaatgggaggtcaccatgcgggtcatcacggaggctacggcaccacggccacggaaaatacaaaagagggtttttcggaggaggaaagtacaagcgaggaaagcatagtatgtttggtggagggaagtacaagcgtggcaagcacggtatgttcggaggcaaaagaagcaagcatggcatgttcggagggaaacgaggcaaaggcatgttcggacgaaagaagtggaaatgatccattagcatcctctctacatatattatcgtaacaatttaacattaagcttaatataaaaatgtggatgtataatttgttttatatgatgtatatatagctatatgtatctatgaagagtatttaatatggttg

SEQ ID NO: 42347 - protein, 187 aa, Arabidopsis thaliana
  peptide (1)..(187): Ceres Seq. ID no. 12423039
  misc_feature (25)..(84): Pfam Name: Collagen triple helix repeat (20 copies) Pfam Description: Collagen triple helix repeat (20 copies)
  misc_feature (2)..(115): Homolog of NCBI NO: 33668156 NR Description: GPRP [Oryza sativa (indica cultivar-group)]
  misc_feature (25)..(113): Homolog of NCBI NO: 13543234 NR Description: Unknown (protein for MGC:12025) [Mus musculus]
  misc_feature (23)..(116): Homolog of NCBI NO: 18422542 NR Description: expressed protein
  misc_feature (1)..(113): Homolog of NCBI NO: 18422542 NR Description: expressed protein
  misc_feature (17)..(113): Homolog of NCBI NO: 6478148 NR Description: putative glycine and proline-rich protein
  misc_feature (16)..(113): Homolog of NCBI NO: 33668156 NR Description: GPRP [Oryza sativa (indica cultivar-group)]
  misc_feature (2)..(113): Homolog of NCBI NO: 13543234 NR Description: Unknown (protein for MGC:12025) [Mus musculus]
  misc_feature (81)..(112): Homolog of NCBI NO: 15228076 NR Description: similar to glycine/proline-rich protein; protein
  misc_feature (1)..(124): Homolog of NCBI NO: 21553447 NR Description: putative glycine and proline-rich protein
  misc_feature (1)..(124): Homolog of NCBI NO: 18398103 NR Description: expressed protein
MGKDDHHEQDKRFFSHHNHHGHGYPPGAYPPPPQGAYPPPGGYPPQGYPPPPHGYPPAAYPPPPGAYPPAGYPGPSGPRPGFGGGVGGLIAGAATAAAAAMGGHHAGHHGGYGTTATENTKEGFSEEESTSEESIVCLVEGSTSVASTVCSEAKEASMACSEGNEAKACSDERSGNDPLASSLHILS

SEQ ID NO: 42348 - DNA, 888 bp, Arabidopsis thaliana; identical to SEQ ID NO: 29116
  misc_feature (1)..(888): Ceres Seq. ID no. 13646051
  misc_feature: MA Experiment ID: 108461 Result: Up-regulated in Transcription
  misc_feature: MA Experiment 108461 PARAMETER Experiment Name: At_Germinating_Seeds_cDNA_P Parameter: Age (day) Value: 1 vs. 0
  misc_feature: MA Experiment 108461 PARAMETER Experiment Name: At_Germinating_Seeds_cDNA_P Parameter: Tissue Value: Germinating Seeds
  misc_feature: MA Experiment ID: 108462 Result: Up-regulated in Transcription
  misc_feature: MA Experiment 108462 PARAMETER Experiment Name: At_Germinating_Seeds_cDNA_P Parameter: Age (day) Value: 2 vs. 0
  misc_feature: MA Experiment 108462 PARAMETER Experiment Name: At_Germinating_Seeds_cDNA_P Parameter: Tissue Value: Germinating Seeds
  misc_feature: MA Experiment ID: 108488 Result: Up-regulated in Transcription
  misc_feature: MA Experiment ID: 108595 Result: Down-regulated in Transcription
  misc_feature: MA Experiment 108595 PARAMETER Experiment Name: At_Ler-pi_Ovule_cDNA_P Parameter: Plant Line Value: null
  misc_feature: MA Experiment ID: 20000070 Result: Down-regulated in Transcription
  misc_feature: MA Experiment 20000070 PARAMETER Experiment Name: At_100uM_ABA_Mutants_cDNA_P Parameter: Plant Line Value: CS24
  misc_feature: MA Experiment 20000070 PARAMETER Experiment Name: At_100uM_ABA_Mutants_cDNA_P Parameter: Timepoint (hr) Value: 6
  misc_feature: MA Experiment 20000070 PARAMETER Experiment Name: At_100uM_ABA_Mutants_cDNA_P Parameter: Tissue Value: Aerial
  misc_feature: MA Experiment 20000070 PARAMETER Experiment Name: At_100uM_ABA_Mutants_cDNA_P Parameter: Treatment Value: 100uM ABA vs. No Treatment
  misc_feature: MA Experiment ID: 20000071 Result: Down-regulated in Transcription
  misc_feature: MA Experiment 20000071 PARAMETER Experiment Name: At_100uM_ABA_Mutants_cDNA_P Parameter: Plant Line Value: CS8104
  misc_feature: MA Experiment 20000071 PARAMETER Experiment Name: At_100uM_ABA_Mutants_cDNA_P Parameter: Timepoint (hr) Value: 6
  misc_feature: MA Experiment 20000071 PARAMETER Experiment Name: At_100uM_ABA_Mutants_cDNA_P Parameter: Tissue Value: Aerial
  misc_feature: MA Experiment 20000071 PARAMETER Experiment Name: At_100uM_ABA_Mutants_cDNA_P Parameter: Treatment Value: 100uM ABA vs. No Treatment
  misc_feature: MA Experiment ID: 20000072 Result: Down-regulated in Transcription
  misc_feature: MA Experiment 20000072 PARAMETER Experiment Name: At_100uM_ABA_Mutants_cDNA_P Parameter: Plant Line Value: CS8105
  misc_feature: MA Experiment 20000072 PARAMETER Experiment Name: At_100uM_ABA_Mutants_cDNA_P Parameter: Timepoint (hr) Value: 6
  misc_feature: MA Experiment 20000072 PARAMETER Experiment Name: At_100uM_ABA_Mutants_cDNA_P Parameter: Tissue Value: Aerial
  misc_feature: MA Experiment 20000072 PARAMETER Experiment Name: At_100uM_ABA_Mutants_cDNA_P Parameter: Treatment Value: 100uM ABA vs. No Treatment
  misc_feature: MA Experiment ID: 20000086 Result: Down-regulated in Transcription
  misc_feature: MA Experiment 20000086 PARAMETER Experiment Name: At_100uM_ABA_Mutants_cDNA_P Parameter: Plant Line Value: CS22
  misc_feature: MA Experiment 20000086 PARAMETER Experiment Name: At_100uM_ABA_Mutants_cDNA_P Parameter: Timepoint (hr) Value: 6
  misc_feature: MA Experiment 20000086 PARAMETER Experiment Name: At_100uM_ABA_Mutants_cDNA_P Parameter: Tissue Value: Aerial
  misc_feature: MA Experiment 20000086 PARAMETER Experiment Name: At_100uM_ABA_Mutants_cDNA_P Parameter: Treatment Value: 100uM ABA vs. No Treatment
  misc_feature: MA Experiment ID: 20000117 Result: Down-regulated in Transcription
  misc_feature: MA Experiment 20000117 PARAMETER Experiment Name: At_100uM_ABA_Mutants_cDNA_P Parameter: Plant Line Value: Columbia
  misc_feature: MA Experiment 20000117 PARAMETER Experiment Name: At_100uM_ABA_Mutants_cDNA_P Parameter: Timepoint (hr) Value: 6
  misc_feature: MA Experiment 20000117 PARAMETER Experiment Name: At_100uM_ABA_Mutants_cDNA_P Parameter: Tissue Value: Aerial
  misc_feature: MA Experiment 20000117 PARAMETER Experiment Name: At_100uM_ABA_Mutants_cDNA_P Parameter: Treatment Value: 100uM ABA vs. No Treatment
  misc_feature: MA Experiment ID: 20000180 Result: Up-regulated in Transcription
  misc_feature: MA Experiment 20000180 PARAMETER Experiment Name: At_Germinating_Seeds_P Parameter: Age (hr) Value: 24 vs. 0
  misc_feature: MA Experiment 20000180 PARAMETER Experiment Name: At_Germinating_Seeds_P Parameter: Tissue Value: Germinating Seeds
  misc_feature: MA Experiment ID: 20000185 Result: Down-regulated in Transcription
  misc_feature: MA Experiment 20000185 PARAMETER Experiment Name: At_Roots__P Parameter: Age (day) Value: 7 vs. 21
  misc_feature: MA Experiment 20000185 PARAMETER Experiment Name: At_Roots__P Parameter: Organism Value: A. thaliana
  misc_feature: MA Experiment 20000185 PARAMETER Experiment Name: At_Roots__P Parameter: Tissue Value: Roots vs. Whole Plant
  misc_feature: MA Experiment ID: 20000437 Result: Down-regulated in Transcription
  misc_feature: MA Experiment 20000437 PARAMETER Experiment Name: At_Drought_P Parameter: Age (day) Value: 8
  misc_feature: MA Experiment 20000437 PARAMETER Experiment Name: At_Drought_P Parameter: Organism Value: A. thaliana
  misc_feature: MA Experiment 20000437 PARAMETER Experiment Name: At_Drought_P Parameter: Plant Line Value: WS
  misc_feature: MA Experiment 20000437 PARAMETER Experiment Name: At_Drought_P Parameter: Timepoint (hr) Value: 24
  misc_feature: MA Experiment 20000437 PARAMETER Experiment Name: At_Drought_P Parameter: Tissue Value: Whole Plant
  misc_feature: MA Experiment 20000437 PARAMETER Experiment Name: At_Drought_P Parameter: Treatment Value: Drought vs. No Drought
  misc_feature: MA Experiment ID: 20000438 Result: Up-regulated in Transcription
  misc_feature: MA Experiment 20000438 PARAMETER Experiment Name: At_Shoots__P Parameter: Age (day) Value: 14
  misc_feature: MA Experiment 20000438 PARAMETER Experiment Name: At_Shoots__P Parameter: Tissue Value: Shoots vs. Whole Plant
  misc_feature: MA Experiment ID: 20000439 Result: Down-regulated in Transcription
  misc_feature: MA Experiment 20000439 PARAMETER Experiment Name: At_Roots__P Parameter: Age (day) Value: 14 vs. 21
  misc_feature: MA Experiment 20000439 PARAMETER Experiment Name: At_Roots__P Parameter: Organism Value: A. thaliana
  misc_feature: MA Experiment 20000439 PARAMETER Experiment Name: At_Roots__P Parameter: Tissue Value: Roots vs. Whole Plant
  misc_feature: MA Experiment ID: 20001248 Result: Down-regulated in Transcription
  misc_feature: MA Experiment 20001248 PARAMETER Experiment Name: At_Far-red-induction_P Parameter: Age (day) Value: 7
  misc_feature: MA Experiment 20001248 PARAMETER Experiment Name: At_Far-red-induction_P Parameter: Light Value: Far-red vs. White
  misc_feature: MA Experiment 20001248 PARAMETER Experiment Name: At_Far-red-induction_P Parameter: Organism Value: A. thaliana
  misc_feature: MA Experiment 20001248 PARAMETER Experiment Name: At_Far-red-induction_P Parameter: Plant Line Value: Columbia
  misc_feature: MA Experiment 20001248 PARAMETER Experiment Name: At_Far-red-induction_P Parameter: Timepoint (hr) Value: 4
  misc_feature: MA Experiment 20001248 PARAMETER Experiment Name: At_Far-red-induction_P Parameter: Tissue Value: Whole Plant
  misc_feature: MA Experiment ID: 20001450 Result: Down-regulated in Transcription
  misc_feature: MA Experiment 20001450 PARAMETER Experiment Name: At_Far-red-induction_P Parameter: Age (day) Value: 7
  misc_feature: MA Experiment 20001450 PARAMETER Experiment Name: At_Far-red-induction_P Parameter: Light Value: Far-red vs. White
  misc_feature: MA Experiment 20001450 PARAMETER Experiment Name: At_Far-red-induction_P Parameter: Organism Value: A. thaliana
  misc_feature: MA Experiment 20001450 PARAMETER Experiment Name: At_Far-red-induction_P Parameter: Plant Line Value: Columbia
  misc_feature: MA Experiment 20001450 PARAMETER Experiment Name: At_Far-red-induction_P Parameter: Timepoint (hr) Value: 8
  misc_feature: MA Experiment 20001450 PARAMETER Experiment Name: At_Far-red-induction_P Parameter: Tissue Value: Whole Plant
  misc_feature: MA Experiment ID: 20001757 Result: Up-regulated in Transcription
  misc_feature: MA Experiment 20001757 PARAMETER Experiment Name: At_50mM_NH4NO3_L-to-H_P Parameter: Timepoint (hr) Value: 6
  misc_feature: MA Experiment 20001757 PARAMETER Experiment Name: At_50mM_NH4NO3_L-to-H_P Parameter: Tissue Value: Leaf
  misc_feature: MA Experiment 20001757 PARAMETER Experiment Name: At_50mM_NH4NO3_L-to-H_P Parameter: Treatment Value: 50mM NH4NO3 vs 100mM Mannitol
  misc_feature: MA Experiment ID: 20001905 Result: Down-regulated in Transcription
  misc_feature: MA Experiment 20001905 PARAMETER Experiment Name: At_Drought_Reproduction_P Parameter: Age (day) Value: 40
  misc_feature: MA Experiment 20001905 PARAMETER Experiment Name: At_Drought_Reproduction_P Parameter: Organism Value: A. thaliana
  misc_feature: MA Experiment 20001905 PARAMETER Experiment Name: At_Drought_Reproduction_P Parameter: Plant Line Value: WS
  misc_feature: MA Experiment 20001905 PARAMETER Experiment Name: At_Drought_Reproduction_P Parameter: Timepoint (day) Value: 10
  misc_feature: MA Experiment 20001905 PARAMETER Experiment Name: At_Drought_Reproduction_P Parameter: Tissue Value: Rosettes
  misc_feature: MA Experiment 20001905 PARAMETER Experiment Name: At_Drought_Reproduction_P Parameter: Treatment Value: Drought vs. No Drought

SEQ ID NO: 42349 - protein, 214 aa, Arabidopsis thaliana; identical to SEQ ID NO: 29117
  peptide (1)..(214): Ceres Seq. ID no. 13646052
  misc_feature (146)..(214): Pfam Name: Ribosomal protein L7/L12 C-terminal domain Pfam Description: Ribosomal protein L7/L12 C-terminal domain
  misc_feature (146)..(214): Pfam Name: Ribosomal protein L7/L12 C-terminal domain Pfam Description: Ribosomal protein L7/L12 C-terminal domain
  misc_feature (24)..(213): Homolog of NCBI NO: 133085 NR Description: 50S RIBOSOMAL PROTEIN L12, CHLOROPLAST PRECURSOR
  misc_feature (24)..(214): Homolog of NCBI NO: 548746 NR Description: 50S RIBOSOMAL PROTEIN L12, CHLOROPLAST PRECURSOR
  misc_feature (24)..(214): Homolog of NCBI NO: 133088 NR Description: 50S RIBOSOMAL PROTEIN L12, CHLOROPLAST PRECURSOR
  misc_feature (24)..(214): Homolog of NCBI NO: 20020 NR Description: ribosomal protein L12-1a [Nicotiana tabacum]
  misc_feature (24)..(213): Homolog of NCBI NO: 541896 NR Description: ribosomal protein L12.B precursor, chloroplast -
  misc_feature (24)..(213): Homolog of NCBI NO: 133085 NR Description: 50S RIBOSOMAL PROTEIN L12, CHLOROPLAST PRECURSOR
  misc_feature (24)..(214): Homolog of NCBI NO: 133088 NR Description: 50S RIBOSOMAL PROTEIN L12, CHLOROPLAST PRECURSOR
  misc_feature (24)..(213): Homolog of NCBI NO: 541896 NR Description: ribosomal protein L12.B precursor, chloroplast -
  misc_feature (24)..(214): Homolog of NCBI NO: 15232274 NR Description: 50S ribosomal protein L12-1, chloroplast
  misc_feature (24)..(214): Homolog of NCBI NO: 541897 NR Description: ribosomal protein L12.C precursor, chloroplast -
  misc_feature (24)..(214): Homolog of NCBI NO: 15232276 NR Description: 50S ribosomal protein L12-3, chloroplast
  misc_feature (24)..(214): Homolog of NCBI NO: 21592776 NR Description: 50S ribosomal protein L12-C [Arabidopsis thaliana]
  misc_feature (24)..(213): Homolog of NCBI NO: 15232275 NR Description: 50S ribosomal protein L12-2, chloroplast
  misc_feature (24)..(214): Homolog of NCBI NO: 20020 NR Description: ribosomal protein L12-1a [Nicotiana tabacum]
  misc_feature (24)..(214): Homolog of NCBI NO: 548746 NR Description: 50S RIBOSOMAL PROTEIN L12, CHLOROPLAST PRECURSOR
  misc_feature (24)..(213): Homolog of NCBI NO: 15232275 NR Description: 50S ribosomal protein L12-2, chloroplast
  misc_feature (24)..(214): Homolog of NCBI NO: 21592776 NR Description: 50S ribosomal protein L12-C [Arabidopsis thaliana]
  misc_feature (24)..(214): Homolog of NCBI NO: 15232276 NR Description: 50S ribosomal protein L12-3, chloroplast
  misc_feature (24)..(214): Homolog of NCBI NO: 541897 NR Description: ribosomal protein L12.C precursor, chloroplast -
  misc_feature (24)..(214): Homolog of NCBI NO: 15232274 NR Description: 50S ribosomal protein L12-1, chloroplast

SEQ ID NO: 42350 - protein, 191 aa, Arabidopsis thaliana; identical to SEQ ID NO: 21067
  peptide (1)..(191): Ceres Seq. ID no. 13646053
  misc_feature (123)..(191): Pfam Name: Ribosomal protein L7/L12 C-terminal domain Pfam Description: Ribosomal protein L7/L12 C-terminal domain
  misc_feature (123)..(191): Pfam Name: Ribosomal protein L7/L12 C-terminal domain Pfam Description: Ribosomal protein L7/L12 C-terminal domain
  misc_feature (1)..(190): Homolog of NCBI NO: 133085 NR Description: 50S RIBOSOMAL PROTEIN L12, CHLOROPLAST PRECURSOR
  misc_feature (1)..(191): Homolog of NCBI NO: 548746 NR Description: 50S RIBOSOMAL PROTEIN L12, CHLOROPLAST PRECURSOR
  misc_feature (1)..(191): Homolog of NCBI NO: 133088 NR Description: 50S RIBOSOMAL PROTEIN L12, CHLOROPLAST PRECURSOR
  misc_feature (1)..(191): Homolog of NCBI NO: 20020 NR Description: ribosomal protein L12-1a [Nicotiana tabacum]
  misc_feature (1)..(190): Homolog of NCBI NO: 541896 NR Description: ribosomal protein L12.B precursor, chloroplast -
  misc_feature (1)..(190): Homolog of NCBI NO: 133085 NR Description: 50S RIBOSOMAL PROTEIN L12, CHLOROPLAST PRECURSOR
  misc_feature (1)..(191): Homolog of NCBI NO: 133088 NR Description: 50S RIBOSOMAL PROTEIN L12, CHLOROPLAST PRECURSOR
  misc_feature (1)..(190): Homolog of NCBI NO: 541896 NR Description: ribosomal protein L12.B precursor, chloroplast -
  misc_feature (1)..(191): Homolog of NCBI NO: 15232274 NR Description: 50S ribosomal protein L12-1, chloroplast
  misc_feature (1)..(191): Homolog of NCBI NO: 541897 NR Description: ribosomal protein L12.C precursor, chloroplast -
  misc_feature (1)..(191): Homolog of NCBI NO: 15232276 NR Description: 50S ribosomal protein L12-3, chloroplast
  misc_feature (1)..(191): Homolog of NCBI NO: 21592776 NR Description: 50S ribosomal protein L12-C [Arabidopsis thaliana]
  misc_feature (1)..(190): Homolog of NCBI NO: 15232275 NR Description: 50S ribosomal protein L12-2, chloroplast
  misc_feature (1)..(191): Homolog of NCBI NO: 20020 NR Description: ribosomal protein L12-1a [Nicotiana tabacum]
  misc_feature (1)..(191): Homolog of NCBI NO: 548746 NR Description: 50S RIBOSOMAL PROTEIN L12, CHLOROPLAST PRECURSOR
  misc_feature (1)..(190): Homolog of NCBI NO: 15232275 NR Description: 50S ribosomal protein L12-2, chloroplast
  misc_feature (1)..(191): Homolog of NCBI NO: 21592776 NR Description: 50S ribosomal protein L12-C [Arabidopsis thaliana]
  misc_feature (1)..(191): Homolog of NCBI NO: 15232276 NR Description: 50S ribosomal protein L12-3, chloroplast
  misc_feature (1)..(191): Homolog of NCBI NO: 541897 NR Description: ribosomal protein L12.C precursor, chloroplast -
  misc_feature (1)..(191): Homolog of NCBI NO: 15232274 NR Description: 50S ribosomal protein L12-1, chloroplast

SEQ ID NO: 42351 - DNA, 931 bp, Arabidopsis thaliana
  misc_feature (1)..(931): Ceres Seq. ID no. 12423127
  misc_feature: MA Experiment ID: 108434 Result: Down-regulated in Transcription
  misc_feature: MA Experiment 108434 PARAMETER Experiment Name: At_Root_Tips_cDNA_P Parameter: Tissue Value: Root Tips
  misc_feature: MA Experiment ID: 20000070 Result: Up-regulated in Transcription
  misc_feature: MA Experiment 20000070 PARAMETER Experiment Name: At_100uM_ABA_Mutants_cDNA_P Parameter: Plant Line Value: CS24
  misc_feature: MA Experiment 20000070 PARAMETER Experiment Name: At_100uM_ABA_Mutants_cDNA_P Parameter: Timepoint (hr) Value: 6
  misc_feature: MA Experiment 20000070 PARAMETER Experiment Name: At_100uM_ABA_Mutants_cDNA_P Parameter: Tissue Value: Aerial
  misc_feature: MA Experiment 20000070 PARAMETER Experiment Name: At_100uM_ABA_Mutants_cDNA_P Parameter: Treatment Value: 100uM ABA vs. No Treatment
  misc_feature: MA Experiment ID: 20000088 Result: Up-regulated in Transcription
  misc_feature: MA Experiment 20000088 PARAMETER Experiment Name: At_100uM_ABA_Mutants_cDNA_P Parameter: Plant Line Value: Landsberg
  misc_feature: MA Experiment 20000088 PARAMETER Experiment Name: At_100uM_ABA_Mutants_cDNA_P Parameter: Timepoint (hr) Value: 6
  misc_feature: MA Experiment 20000088 PARAMETER Experiment Name: At_100uM_ABA_Mutants_cDNA_P Parameter: Tissue Value: Aerial
  misc_feature: MA Experiment 20000088 PARAMETER Experiment Name: At_100uM_ABA_Mutants_cDNA_P Parameter: Treatment Value: 100uM ABA vs. No Treatment
  misc_feature: MA Experiment ID: 20000227 Result: Down-regulated in Transcription
  misc_feature: MA Experiment 20000227 PARAMETER Experiment Name: At_Root-Tips-vs-Tops_P Parameter: Tissue Value: Root Tips vs. Root Tops
  misc_feature: MA Experiment ID: 20000437 Result: Up-regulated in Transcription
  misc_feature: MA Experiment 20000437 PARAMETER Experiment Name: At_Drought_P Parameter: Age (day) Value: 8
  misc_feature: MA Experiment 20000437 PARAMETER Experiment Name: At_Drought_P Parameter: Organism Value: A. thaliana
  misc_feature: MA Experiment 20000437 PARAMETER Experiment Name: At_Drought_P Parameter: Plant Line Value: WS
  misc_feature: MA Experiment 20000437 PARAMETER Experiment Name: At_Drought_P Parameter: Timepoint (hr) Value: 24
  misc_feature: MA Experiment 20000437 PARAMETER Experiment Name: At_Drought_P Parameter: Tissue Value: Whole Plant
  misc_feature: MA Experiment 20000437 PARAMETER Experiment Name: At_Drought_P Parameter: Treatment Value: Drought vs. No Drought
  misc_feature: MA Experiment ID: 20000453 Result: Up-regulated in Transcription
  misc_feature: MA Experiment 20000453 PARAMETER Experiment Name: At_100uM_ABA_P Parameter: Age (day) Value: 15
  misc_feature: MA Experiment 20000453 PARAMETER Experiment Name: At_100uM_ABA_P Parameter: Organism Value: A. thaliana
  misc_feature: MA Experiment 20000453 PARAMETER Experiment Name: At_100uM_ABA_P Parameter: Plant Line Value: WS
  misc_feature: MA Experiment 20000453 PARAMETER Experiment Name: At_100uM_ABA_P Parameter: Timepoint (hr) Value: 24
  misc_feature: MA Experiment 20000453 PARAMETER Experiment Name: At_100uM_ABA_P Parameter: Tissue Value: Aerial
  misc_feature: MA Experiment 20000453 PARAMETER Experiment Name: At_100uM_ABA_P Parameter: Treatment Value: 100uM ABA vs. No Treatment
  misc_feature: MA Experiment ID: 20000794 Result: Up-regulated in Transcription
  misc_feature: MA Experiment 20000794 PARAMETER Experiment Name: At_Petals_P Parameter: Age (day) Value: 23-25 days
  misc_feature: MA Experiment 20000794 PARAMETER Experiment Name: At_Petals_P Parameter: Plant Line Value: WS
  misc_feature: MA Experiment 20000794 PARAMETER Experiment Name: At_Petals_P Parameter: Tissue Value: Petals vs. Whole plant
  misc_feature: MA Experiment ID: 20001558 Result: Down-regulated in Transcription
  misc_feature: MA Experiment 20001558 PARAMETER Experiment Name: At_Drought_Soil_Dry_P Parameter: Age (day) Value: 27
  misc_feature: MA Experiment 20001558 PARAMETER Experiment Name: At_Drought_Soil_Dry_P Parameter: Organism Value: A. thaliana
  misc_feature: MA Experiment 20001558 PARAMETER Experiment Name: At_Drought_Soil_Dry_P Parameter: Plant Line Value: WS
  misc_feature: MA Experiment 20001558 PARAMETER Experiment Name: At_Drought_Soil_Dry_P Parameter: Post Timepoint (hr) Value: 6
  misc_feature: MA Experiment 20001558 PARAMETER Experiment Name: At_Drought_Soil_Dry_P Parameter: Post-Treatment Value: Re-Water vs. No Drought
  misc_feature: MA Experiment 20001558 PARAMETER Experiment Name: At_Drought_Soil_Dry_P Parameter: Timepoint (day) Value: 13
  misc_feature: MA Experiment 20001558 PARAMETER Experiment Name: At_Drought_Soil_Dry_P Parameter: Treatment Value: Drought vs. No Drought
agaaaaatcatctctctgtttttccgaagaactaacacatgtcgggacctcagtgctgtgaaaacccgccaactcttaacccggtttccgggtcgggtcatgtcgagaagctgggtgggcttgatgcctacgtctccggctctgccgagtccaagctctgcgtcctcctcatttctgatatttttggttttgaagctccaaacttaagggcgcttgcggacaaggttgcagcttctggattctatgttgtagttcctgattactttggtggagatccttataatccctctaaccaggacagacccatccctgtctggatcaaagaccatggctgtgataagggctttgaaaacacgaaaccagtacttgaaaccataaagaacaaaggcataactgccattggagccgcagggatgtgttggggtgcaaaagtagtggtggaactgtctaaagaagagcttattcaagcagctgtgttgcttcatccttcttttgtcaatgttgatgatatcaaaggtgggaaggctccaattgctatattaggagctgaaattgatcaaatgtccccaccagcactcttgaagcaatttgaggagattctatcttccaaacccgaggtgaatagttacgtgaagatacacccgaaagtgtcacacggatggacagttagatacaacatcgatgaaccagaggcggttaaagcagcagaagaagctcacaaggagatgcttgattggtttgtgacctacatcaaatgatttgagaaagaaagaaaggtattgtctattacttcatatatgcaaagaataaaaattaaagagagacaaagcaaaactcttgattggtgtttcaatttctactttctatagtcttttgaagcattctctgagattctgtgataccttttgttaatcattgttttatgattttt

SEQ ID NO: 42352 - protein, 239 aa, Arabidopsis thaliana; identical to SEQ ID NO: 28662
  peptide (1)..(239): Ceres Seq. ID no. 12423128
  misc_feature (28)..(238): Pfam Name: Dienelactone hydrolase family Pfam Description: Dienelactone hydrolase family
  misc_feature (18)..(238): Homolog of NCBI NO: 31712014 NR Description: RIKEN cDNA 2310016A09 [Mus musculus]
  misc_feature (20)..(238): Homolog of NCBI NO: 38181938 NR Description: Unknown (protein for MGC:76315) [Silurana
  misc_feature (69)..(239): Homolog of NCBI NO: 40253308 NR Description: Endo-1,3;1,4-beta-D-glucanase precursor-like
  misc_feature (5)..(194): Homolog of NCBI NO: 8928122 NR Description: Endo-1,3;1,4-beta-D-glucanase precursor
  misc_feature (6)..(239): Homolog of NCBI NO: 40253306 NR Description: putative Endo-1,3;1,4-beta-D-glucanase precursor
  misc_feature (5)..(239): Homolog of NCBI NO: 40253303 NR Description: putative Endo-1,3;1,4-beta-D-glucanase precursor
  misc_feature (9)..(239): Homolog of NCBI NO: 9294513 NR Description: contains similarity to
  misc_feature (1)..(239): Homolog of NCBI NO: 24899687 NR Description: Unknown protein [Arabidopsis thaliana]
  misc_feature (1)..(239): Homolog of NCBI NO: 18403812 NR Description: expressed protein
  misc_feature (1)..(239): Homolog of NCBI NO: 18403820 NR Description: expressed protein

SEQ ID NO: 42353 - DNA, 871 bp, Arabidopsis thaliana; identical to SEQ ID NO: 28518
  misc_feature (1)..(871): Ceres Seq. ID no. 12348502
  misc_feature: MA Experiment ID: 108473 Result: Down-regulated in Transcription
  misc_feature: MA Experiment 108473 PARAMETER Experiment Name: At_Drought_Flowers_cDNA_P Parameter: Timepoint (hr) Value: 7 d
  misc_feature: MA Experiment 108473 PARAMETER Experiment Name: At_Drought_Flowers_cDNA_P Parameter: Tissue Value: Flower
  misc_feature: MA Experiment 108473 PARAMETER Experiment Name: At_Drought_Flowers_cDNA_P Parameter: Treatment Value: Drought vs. No Drought
  misc_feature: MA Experiment ID: 108474 Result: Down-regulated in Transcription
  misc_feature: MA Experiment 108474 PARAMETER Experiment Name: At_Drought_Flowers_cDNA_P Parameter: Timepoint (hr) Value: null
  misc_feature: MA Experiment 108474 PARAMETER Experiment Name: At_Drought_Flowers_cDNA_P Parameter: Treatment Value: Drought vs. No Drought
  misc_feature: MA Experiment ID: 108501 Result: Down-regulated in Transcription
  misc_feature: MA Experiment 108501 PARAMETER Experiment Name: At_ap2_floral_buds_cDNA_P Parameter: Plant Line Value: ap2 (Ler.)
  misc_feature: MA Experiment 108501 PARAMETER Experiment Name: At_ap2_floral_buds_cDNA_P Parameter: Tissue Value: Closed Flower
  misc_feature: MA Experiment ID: 20000265 Result: Up-regulated in Transcription
  misc_feature: MA Experiment 20000265 PARAMETER Experiment Name: At_Open_Flower_P Parameter: Age (day) Value: 21
  misc_feature: MA Experiment 20000265 PARAMETER Experiment Name: At_Open_Flower_P Parameter: Plant Line Value: WS
  misc_feature: MA Experiment 20000265 PARAMETER Experiment Name: At_Open_Flower_P Parameter: Tissue Value: Closed Flower vs. Whole Plant
  misc_feature: MA Experiment ID: 20000286 Result: Up-regulated in Transcription
  misc_feature: MA Experiment 20000286 PARAMETER Experiment Name: At_Open_Flower_P Parameter: Age (day) Value: 21
  misc_feature: MA Experiment 20000286 PARAMETER Experiment Name: At_Open_Flower_P Parameter: Plant Line Value: WS
  misc_feature: MA Experiment 20000286 PARAMETER Experiment Name: At_Open_Flower_P Parameter: Tissue Value: Half Open vs. Whole Plant
  misc_feature: MA Experiment ID: 20001910 Result: Down-regulated in Transcription
  misc_feature: MA Experiment 20001910 PARAMETER Experiment Name: At_Drought_Reproduction_P Parameter: Age (day) Value: 37
  misc_feature: MA Experiment 20001910 PARAMETER Experiment Name: At_Drought_Reproduction_P Parameter: Organism Value: A. thaliana
  misc_feature: MA Experiment 20001910 PARAMETER Experiment Name: At_Drought_Reproduction_P Parameter: Plant Line Value: WS
  misc_feature: MA Experiment 20001910 PARAMETER Experiment Name: At_Drought_Reproduction_P Parameter: Timepoint (day) Value: 7
  misc_feature: MA Experiment 20001910 PARAMETER Experiment Name: At_Drought_Reproduction_P Parameter: Tissue Value: Flowers
  misc_feature: MA Experiment 20001910 PARAMETER Experiment Name: At_Drought_Reproduction_P Parameter: Treatment Value: Drought vs. No Drought

SEQ ID NO: 42354 - protein, 249 aa, Arabidopsis thaliana; identical to SEQ ID NO: 28519
  peptide (1)..(249): Ceres Seq. ID no. 12348503
  misc_feature (127)..(230): Pfam Name: Domain of unknown function DUF220 Pfam Description: Domain of unknown function DUF220
  misc_feature (127)..(230): Pfam Name: Domain of unknown function DUF220 Pfam Description: Domain of unknown function DUF220
  misc_feature (93)..(248): Homolog of NCBI NO: 8778583 NR Description: F28C11.19 [Arabidopsis thaliana]
  misc_feature (97)..(240): Homolog of NCBI NO: 8778583 NR Description: F28C11.19 [Arabidopsis thaliana]
  misc_feature (95)..(240): Homolog of NCBI NO: 8778583 NR Description: F28C11.19 [Arabidopsis thaliana]
  misc_feature (91)..(247): Homolog of NCBI NO: 8778583 NR Description: F28C11.19 [Arabidopsis thaliana]
  misc_feature (31)..(104): Homolog of NCBI NO: 25373395 NR Description: hypothetical protein F5O8.22 - Arabidopsis
  misc_feature (93)..(248): Homolog of NCBI NO: 8778583 NR Description: F28C11.19 [Arabidopsis thaliana]
  misc_feature (95)..(240): Homolog of NCBI NO: 8778583 NR Description: F28C11.19 [Arabidopsis thaliana]
  misc_feature (31)..(104): Homolog of NCBI NO: 25373395 NR Description: hypothetical protein F5O8.22 - Arabidopsis
  misc_feature (95)..(248): Homolog of NCBI NO: 8778583 NR Description: F28C11.19 [Arabidopsis thaliana]
  misc_feature (1)..(104): Homolog of NCBI NO: 8778583 NR Description: F28C11.19 [Arabidopsis thaliana]
  misc_feature (31)..(249): Homolog of NCBI NO: 21536644 NR Description: OBP32pep protein, putative [Arabidopsis thaliana]
  misc_feature (31)..(249): Homolog of NCBI NO: 18395270 NR Description: OBP32pep protein, putative
  misc_feature (97)..(249): Homolog of NCBI NO: 25373395 NR Description: hypothetical protein F5O8.22 - Arabidopsis
  misc_feature (91)..(247): Homolog of NCBI NO: 8778583 NR Description: F28C11.19 [Arabidopsis thaliana]
  misc_feature (97)..(240): Homolog of NCBI NO: 8778583 NR Description: F28C11.19 [Arabidopsis thaliana]
  misc_feature (97)..(249): Homolog of NCBI NO: 25373395 NR Description: hypothetical protein F5O8.22 - Arabidopsis
  misc_feature (31)..(249): Homolog of NCBI NO: 18395270 NR Description: OBP32pep protein, putative
  misc_feature (31)..(249): Homolog of NCBI NO: 21536644 NR Description: OBP32pep protein, putative [Arabidopsis thaliana]
  misc_feature (1)..(104): Homolog of NCBI NO: 8778583 NR Description: F28C11.19 [Arabidopsis thaliana]
  misc_feature (95)..(248): Homolog of NCBI NO: 8778583 NR Description: F28C11.19 [Arabidopsis thaliana]

SEQ ID NO: 42355 - protein, 219 aa, Arabidopsis thaliana; identical to SEQ ID NO: 28520
  peptide (1)..(219): Ceres Seq. ID no. 12348504
  misc_feature (97)..(200): Pfam Name: Domain of unknown function DUF220 Pfam Description: Domain of unknown function DUF220
  misc_feature (97)..(200): Pfam Name: Domain of unknown function DUF220 Pfam Description: Domain of unknown function DUF220
  misc_feature (63)..(218): Homolog of NCBI NO: 8778583 NR Description: F28C11.19 [Arabidopsis thaliana]
  misc_feature (67)..(210): Homolog of NCBI NO: 8778583 NR Description: F28C11.19 [Arabidopsis thaliana]
  misc_feature (65)..(210): Homolog of NCBI NO: 8778583 NR Description: F28C11.19 [Arabidopsis thaliana]
  misc_feature (61)..(217): Homolog of NCBI NO: 8778583 NR Description: F28C11.19 [Arabidopsis thaliana]
  misc_feature (1)..(74): Homolog of NCBI NO: 25373395 NR Description: hypothetical protein F5O8.22 - Arabidopsis
  misc_feature (63)..(218): Homolog of NCBI NO: 8778583 NR Description: F28C11.19 [Arabidopsis thaliana]
  misc_feature (65)..(210): Homolog of NCBI NO: 8778583 NR Description: F28C11.19 [Arabidopsis thaliana]
  misc_feature (1)..(74): Homolog of NCBI NO: 25373395 NR Description: hypothetical protein F5O8.22 - Arabidopsis
  misc_feature (65)..(218): Homolog of NCBI NO: 8778583 NR Description: F28C11.19 [Arabidopsis thaliana]
  misc_feature (1)..(74): Homolog of NCBI NO: 8778583 NR Description: F28C11.19 [Arabidopsis thaliana]
  misc_feature (1)..(219): Homolog of NCBI NO: 21536644 NR Description: OBP32pep protein, putative [Arabidopsis thaliana]
  misc_feature (1)..(219): Homolog of NCBI NO: 18395270 NR Description: OBP32pep protein, putative
  misc_feature (67)..(219): Homolog of NCBI NO: 25373395 NR Description: hypothetical protein F5O8.22 - Arabidopsis
  misc_feature (61)..(217): Homolog of NCBI NO: 8778583 NR Description: F28C11.19 [Arabidopsis thaliana]
  misc_feature (67)..(210): Homolog of NCBI NO: 8778583 NR Description: F28C11.19 [Arabidopsis thaliana]
  misc_feature (67)..(219): Homolog of NCBI NO: 25373395 NR Description: hypothetical protein F5O8.22 - Arabidopsis
  misc_feature (1)..(219): Homolog of NCBI NO: 18395270 NR Description: OBP32pep protein, putative
  misc_feature (1)..(219): Homolog of NCBI NO: 21536644 NR Description: OBP32pep protein, putative [Arabidopsis thaliana]
  misc_feature (1)..(74): Homolog of NCBI NO: 8778583 NR Description: F28C11.19 [Arabidopsis thaliana]
  misc_feature (65)..(218): Homolog of NCBI NO: 8778583 NR Description: F28C11.19 [Arabidopsis thaliana]

SEQ ID NO: 42356 - DNA, 1977 bp, Arabidopsis thaliana
  misc_feature (1)..(1977): Ceres Seq. ID no. 12340433
  misc_feature: MA Experiment ID: 108433 Result: Up-regulated in Transcription
  misc_feature: MA Experiment 108433 PARAMETER Experiment Name: At_rhl_Mutant2_cDNA_P Parameter: Age (day) Value: 7
  misc_feature: MA Experiment 108433 PARAMETER Experiment Name: At_rhl_Mutant2_cDNA_P Parameter: Organism Value: A. thaliana
  misc_feature: MA Experiment 108433 PARAMETER Experiment Name: At_rhl_Mutant2_cDNA_P Parameter: Plant Line Value: rhl Mutant vs. wt landsburg
  misc_feature: MA Experiment 108433 PARAMETER Experiment Name: At_rhl_Mutant2_cDNA_P Parameter: Tissue Value: Roots
  misc_feature: MA Experiment ID: 108462 Result: Up-regulated in Transcription
  misc_feature: MA Experiment 108462 PARAMETER Experiment Name: At_Germinating_Seeds_cDNA_P Parameter: Age (day) Value: 2 vs. 0
  misc_feature: MA Experiment 108462 PARAMETER Experiment Name: At_Germinating_Seeds_cDNA_P Parameter: Tissue Value: Germinating Seeds
  misc_feature: MA Experiment ID: 108569 Result: Down-regulated in Transcription
  misc_feature: MA Experiment 108569 PARAMETER Experiment Name: At_0.001%_MeJA__cDNA_P Parameter: Timepoint (hr) Value: 6
  misc_feature: MA Experiment 108569 PARAMETER Experiment Name: At_0.001%_MeJA__cDNA_P Parameter: Tissue Value: Aerial
  misc_feature: MA Experiment 108569 PARAMETER Experiment Name: At_0.001%_MeJA__cDNA_P Parameter: Treatment Value: 0.001% MeJA vs. No Treatment
  misc_feature: MA Experiment ID: 20000070 Result: Down-regulated in Transcription
  misc_feature: MA Experiment 20000070 PARAMETER Experiment Name: At_100uM_ABA_Mutants_cDNA_P Parameter: Plant Line Value: CS24
  misc_feature: MA Experiment 20000070 PARAMETER Experiment Name: At_100uM_ABA_Mutants_cDNA_P Parameter: Timepoint (hr) Value: 6
  misc_feature: MA Experiment 20000070 PARAMETER Experiment Name: At_100uM_ABA_Mutants_cDNA_P Parameter: Tissue Value: Aerial
  misc_feature: MA Experiment 20000070 PARAMETER Experiment Name: At_100uM_ABA_Mutants_cDNA_P Parameter: Treatment Value: 100uM ABA vs. No Treatment
  misc_feature: MA Experiment ID: 20000071 Result: Down-regulated in Transcription
  misc_feature: MA Experiment 20000071 PARAMETER Experiment Name: At_100uM_ABA_Mutants_cDNA_P Parameter: Plant Line Value: CS8104
  misc_feature: MA Experiment 20000071 PARAMETER Experiment Name: At_100uM_ABA_Mutants_cDNA_P Parameter: Timepoint (hr) Value: 6
  misc_feature: MA Experiment 20000071 PARAMETER Experiment Name: At_100uM_ABA_Mutants_cDNA_P Parameter: Tissue Value: Aerial
  misc_feature: MA Experiment 20000071 PARAMETER Experiment Name: At_100uM_ABA_Mutants_cDNA_P Parameter: Treatment Value: 100uM ABA vs. No Treatment
  misc_feature: MA Experiment ID: 20000072 Result: Down-regulated in Transcription
  misc_feature: MA Experiment 20000072 PARAMETER Experiment Name: At_100uM_ABA_Mutants_cDNA_P Parameter: Plant Line Value: CS8105
  misc_feature: MA Experiment 20000072 PARAMETER Experiment Name: At_100uM_ABA_Mutants_cDNA_P Parameter: Timepoint (hr) Value: 6
  misc_feature: MA Experiment 20000072 PARAMETER Experiment Name: At_100uM_ABA_Mutants_cDNA_P Parameter: Tissue Value: Aerial
  misc_feature: MA Experiment 20000072 PARAMETER Experiment Name: At_100uM_ABA_Mutants_cDNA_P Parameter: Treatment Value: 100uM ABA vs. No Treatment
  misc_feature: MA Experiment ID: 20000111 Result: Up-regulated in Transcription
  misc_feature: MA Experiment 20000111 PARAMETER Experiment Name: At_42deg_Heat_cDNA_P Parameter: Temperature (deg C) Value: 42 vs. 22
  misc_feature: MA Experiment 20000111 PARAMETER Experiment Name: At_42deg_Heat_cDNA_P Parameter: Timepoint (hr) Value: 6
  misc_feature: MA Experiment 20000111 PARAMETER Experiment Name: At_42deg_Heat_cDNA_P Parameter: Tissue Value: Aerial
aaacaccatcaatacacaaacaaaacaaaaaggatgaaaatgcaaacactaaacttcacttcttctctcttgttcttgtcttttatcttcctctcatgtgctctgcttatctcatcacaacaatctccatcacagccacattctgagcctccgtcacagctaccttttgagcctccggtagagtcaccattcttccctccgtcacagccaccaatattcgtgccaccgtcacagccaccttctttgcctccgtcacagtctcagtcaccttctctcgcttgcaagtcaactccataccctaagctttgccgtacgatcctcaacgctgtcaaatcctcaccgtcagatccttaccgttacggcaaattcactataaagcaatgcctcaagcaagcaagccgtctatccaaagtcatcaccagttacgcgcggcgcgtggaaagcaaaccaggctcggccacggccgaggaaataggggcggtggcggactgcggcgagttatcggagctgagtgtgaactaccttgaaaccgtcacgacggagcttaagacggcgcaggtgatgacggcagctctcgtcgagcatgtgaacagtcttctcagtggtgtagtgacgaatcagcagacgtgtcttgacggactcgtggaggctaagagtggtttcgccgccgcgattggttcgccgatggggaatctcactcgcctttacagtatctcgttaggacttgtgagccacgcacttaaccgtaacctgaagaggtttaaagcctccaaagggaagattcttggtggtgggaactcaacctatcgcgaaccgctcgagactttgattaagggtttacgtaaaacatgcgacaacgacaaagattgccggaaaactagccggaacttaggggagctaggtgagaccagcggcggttccatcctcgtgagtaaagcagtgatcgtcggtccgttcaaatccgacaacttcacaaccatcaccgatgctattgcagccgcacctaataacactagaccagaggatggttactttgttatctacgcaagagaaggtgtctatgaagaatatattgttgttcccatcaacaaaaagaacttaatgcttatgggagatgggatcaataagacgattattacagggaaccataatgttgttgatggttggactacgtataattgctcgagcttcgctgtggttggagagcggttcatggcggttgatgttacattcagaaacacagccggacctgaaaaacatcaggcagtggctttgaggaacaatgcggaaggatcaagtttttatcggtgtagttttgaaggctatcaagatactctctacgtccattctcttagacaattctatcgcgaatgcgatatatatggtaccgtcgattttatattcggaaatgcagccgcaatttttcaaaactgcaacatatatgctcgaaaaccgatggccaagcaaaagaacgcaataacagcgcatggaagactcgatccaaaccagaataccggaatctctatcatcaattgtacaataaaagccgccccagatcttgcagctgagcctaaatctgccatgacattcttagggagaccgtggaagccatactcaaggacggttttcatgcaatcatacattagtgacattgttcaaccagtcggatggctcgaatggaacggtacaattggactagacacaatctactacggtgagtatagtaactttggaccaggtgctaacacgaaccagagagtgcagtggttagggtacaatttattgaacttggcagaagccatgaacttcacggtctacaacttcaccatgggagatacatggttgcctcaaaccgatattcctttctatggtggtttgcttagcaaagaatgaaattgatgaacaacatattatatgtaaacatatttaattatacgtacttcctcatttaaaaaataaatcaagaaattttcattt

SEQ ID NO: 42357 - protein, 630 aa, Arabidopsis thaliana
  peptide (1)..(630): Ceres Seq. ID no. 12340434
  misc_feature (313)..(612): Pfam Name: Pectinesterase Pfam Description: Pectinesterase
  misc_feature (310)..(626): Homolog of NCBI NO: 34393863 NR Description: putative pectinesterase [Oryza sativa (japonica
  misc_feature (151)..(626): Homolog of NCBI NO: 34894528 NR Description: putative pectinesterase [Oryza sativa (japonica
  misc_feature (89)..(628): Homolog of NCBI NO: 31321894 NR Description: papillar cell-specific pectin methylesterase-like
  misc_feature (68)..(628): Homolog of NCBI NO: 18407388 NR Description: pectinesterase family
  misc_feature (82)..(628): Homolog of NCBI NO: 18379010 NR Description: pectinesterase family; protein id: At1g02810.1
  misc_feature (87)..(628): Homolog of NCBI NO: 19424045 NR Description: unknown protein [Arabidopsis thaliana]
  misc_feature (87)..(628): Homolog of NCBI NO: 18411914 NR Description: hypothetical protein
  misc_feature (368)..(630): Homolog of NCBI NO: 21618192 NR Description: putative pectinesterase [Arabidopsis thaliana]
  misc_feature (368)..(630): Homolog of NCBI NO: 18398974 NR Description: putative pectinesterase [Arabidopsis thaliana]
  misc_feature (14)..(630): Homolog of NCBI NO: 15238378 NR Description: pectinesterase; protein id: At5g04970.1
KHHQYTNKTKRMKMQTLNFTSSLLFLSFIFLSCALLISSQQSPSQPHSEPPSQLPFEPPVESPFFPPSQPPIFVPPSQPPSLPPSQSQSPSLACKSTPYPKLCRTILNAVKSSPSDPYRYGKFTIKQCLKQASRLSKVITSYARRVESKPGSATAEEIGAVADCGELSELSVNYLETVTTELKTAQVMTAALVEHVNSLLSGVVTNQQTCLDGLVEAKSGFAAAIGSPMGNLTRLYSISLGLVSHALNRNLKRFKASKGKILGGGNSTYREPLETLIKGLRKTCDNDKDCRKTSRNLGELGETSGGSILVSKAVIVGPFKSDNFTTITDAIAAAPNNTRPEDGYFVIYAREGVYEEYIVVPINKKNLMLMGDGINKTIITGNHNVVDGWTTYNCSSFAVVGERFMAVDVTFRNTAGPEKHQAVALRNNAEGSSFYRCSFEGYQDTLYVHSLRQFYRECDIYGTVDFIFGNAAAIFQNCNIYARKPMAKQKNAITAHGRLDPNQNTGISIINCTIKAAPDLAAEPKSAMTFLGRPWKPYSRTVFMQSYISDIVQPVGWLEWNGTIGLDTIYYGEYSNFGPGANTNQRVQWLGYNLLNLAEAMNFTVYNFTMGDTWLPQTDIPFYGGLLSKE

SEQ ID NO: 42358 - protein, 619 aa, Arabidopsis thaliana
  peptide (1)..(619): Ceres Seq. ID no. 12340435
  misc_feature (302)..(601): Pfam Name: Pectinesterase Pfam Description: Pectinesterase
  misc_feature (299)..(615): Homolog of NCBI NO: 34393863 NR Description: putative pectinesterase [Oryza sativa (japonica
  misc_feature (140)..(615): Homolog of NCBI NO: 34894528 NR Description: putative pectinesterase [Oryza sativa (japonica
  misc_feature (78)..(617): Homolog of NCBI NO: 31321894 NR Description: papillar cell-specific pectin methylesterase-like
  misc_feature (57)..(617): Homolog of NCBI NO: 18407388 NR Description: pectinesterase family
  misc_feature (71)..(617): Homolog of NCBI NO: 18379010 NR Description: pectinesterase family; protein id: At1g02810.1
  misc_feature (76)..(617): Homolog of NCBI NO: 19424045 NR Description: unknown protein [Arabidopsis thaliana]
  misc_feature (76)..(617): Homolog of NCBI NO: 18411914 NR Description: hypothetical protein
  misc_feature (357)..(619): Homolog of NCBI NO: 21618192 NR Description: putative pectinesterase [Arabidopsis thaliana]
  misc_feature (357)..(619): Homolog of NCBI NO: 18398974 NR Description: putative pectinesterase [Arabidopsis thaliana]
  misc_feature (3)..(619): Homolog of NCBI NO: 15238378 NR Description: pectinesterase; protein id: At5g04970.1
MKMQTLNFTSSLLFLSFIFLSCALLISSQQSPSQPHSEPPSQLPFEPPVESPFFPPSQPPIFVPPSQPPSLPPSQSQSPSLACKSTPYPKLCRTILNAVKSSPSDPYRYGKFTIKQCLKQASRLSKVITSYARRVESKPGSATAEEIGAVADCGELSELSVNYLETVTTELKTAQVMTAALVEHVNSLLSGVVTNQQTCLDGLVEAKSGFAAAIGSPMGNLTRLYSISLGLVSHALNRNLKRFKASKGKILGGGNSTYREPLETLIKGLRKTCDNDKDCRKTSRNLGELGETSGGSILVSKAVIVGPFKSDNFTTITDAIAAAPNNTRPEDGYFVIYAREGVYEEYIVVPINKKNLMLMGDGINKTIITGNHNVVDGWTTYNCSSFAVVGERFMAVDVTFRNTAGPEKHQAVALRNNAEGSSFYRCSFEGYQDTLYVHSLRQFYRECDIYGTVDFIFGNAAAIFQNCNIYARKPMAKQKNAITAHGRLDPNQNTGISIINCTIKAAPDLAAEPKSAMTFLGRPWKPYSRTVFMQSYISDIVQPVGWLEWNGTIGLDTIYYGEYSNFGPGANTNQRVQWLGYNLLNLAEAMNFTVYNFTMGDTWLPQTDIPFYGGLLSKE

SEQ ID NO: 42359 - protein, 617 aa, Arabidopsis thaliana
  peptide (1)..(617): Ceres Seq. ID no. 12340436
  misc_feature (300)..(599): Pfam Name: Pectinesterase Pfam Description: Pectinesterase
  misc_feature (297)..(613): Homolog of NCBI NO: 34393863 NR Description: putative pectinesterase [Oryza sativa (japonica
  misc_feature (138)..(613): Homolog of NCBI NO: 34894528 NR Description: putative pectinesterase [Oryza sativa (japonica
  misc_feature (76)..(615): Homolog of NCBI NO: 31321894 NR Description: papillar cell-specific pectin methylesterase-like
  misc_feature (55)..(615): Homolog of NCBI NO: 18407388 NR Description: pectinesterase family
  misc_feature (69)..(615): Homolog of NCBI NO: 18379010 NR Description: pectinesterase family; protein id: At1g02810.1
  misc_feature (74)..(615): Homolog of NCBI NO: 19424045 NR Description: unknown protein [Arabidopsis thaliana]
  misc_feature (74)..(615): Homolog of NCBI NO: 18411914 NR Description: hypothetical protein
  misc_feature (355)..(617): Homolog of NCBI NO: 21618192 NR Description: putative pectinesterase [Arabidopsis thaliana]
  misc_feature (355)..(617): Homolog of NCBI NO: 18398974 NR Description: putative pectinesterase [Arabidopsis thaliana]
  misc_feature (1)..(617): Homolog of NCBI NO: 15238378 NR Description: pectinesterase; protein id: At5g04970.1
MQTLNFTSSLLFLSFIFLSCALLISSQQSPSQPHSEPPSQLPFEPPVESPFFPPSQPPIFVPPSQPPSLPPSQSQSPSLACKSTPYPKLCRTILNAVKSSPSDPYRYGKFTIKQCLKQASRLSKVITSYARRVESKPGSATAEEIGAVADCGELSELSVNYLETVTTELKTAQVMTAALVEHVNSLLSGVVTNQQTCLDGLVEAKSGFAAAIGSPMGNLTRLYSISLGLVSHALNRNLKRFKASKGKILGGGNSTYREPLETLIKGLRKTCDNDKDCRKTSRNLGELGETSGGSILVSKAVIVGPFKSDNFTTITDAIAAAPNNTRPEDGYFVIYAREGVYEEYIVVPINKKNLMLMGDGINKTIITGNHNVVDGWTTYNCSSFAVVGERFMAVDVTFRNTAGPEKHQAVALRNNAEGSSFYRCSFEGYQDTLYVHSLRQFYRECDIYGTVDFIFGNAAAIFQNCNIYARKPMAKQKNAITAHGRLDPNQNTGISIINCTIKAAPDLAAEPKSAMTFLGRPWKPYSRTVFMQSYISDIVQPVGWLEWNGTIGLDTIYYGEYSNFGPGANTNQRVQWLGYNLLNLAEAMNFTVYNFTMGDTWLPQTDIPFYGGLLSKE

SEQ ID NO: 42360 - DNA, 1361 bp, Arabidopsis thaliana
  misc_feature (1)..(1361): Ceres Seq. ID no. 13575124
  misc_feature: MA Experiment ID: 20000214 Result: Down-regulated in Transcription
  misc_feature: MA Experiment 20000214 PARAMETER Experiment Name: At_4deg_Cold_P Parameter: Timepoint (hr) Value: 6
  misc_feature: MA Experiment ID: 20001450 Result: Up-regulated in Transcription
  misc_feature: MA Experiment 20001450 PARAMETER Experiment Name: At_Far-red-induction_P Parameter: Age (day) Value: 7
  misc_feature: MA Experiment 20001450 PARAMETER Experiment Name: At_Far-red-induction_P Parameter: Light Value: Far-red vs. White
  misc_feature: MA Experiment 20001450 PARAMETER Experiment Name: At_Far-red-induction_P Parameter: Organism Value: A. thaliana
  misc_feature: MA Experiment 20001450 PARAMETER Experiment Name: At_Far-red-induction_P Parameter: Plant Line Value: Columbia
  misc_feature: MA Experiment 20001450 PARAMETER Experiment Name: At_Far-red-induction_P Parameter: Timepoint (hr) Value: 8
  misc_feature: MA Experiment 20001450 PARAMETER Experiment Name: At_Far-red-induction_P Parameter: Tissue Value: Whole Plant
  misc_feature: MA Experiment ID: 20001560 Result: Down-regulated in Transcription
  misc_feature: MA Experiment 20001560 PARAMETER Experiment Name: At_Drought_Soil_Dry_P Parameter: Age (day) Value: 28
  misc_feature: MA Experiment 20001560 PARAMETER Experiment Name: At_Drought_Soil_Dry_P Parameter: Organism Value: A. thaliana
  misc_feature: MA Experiment 20001560 PARAMETER Experiment Name: At_Drought_Soil_Dry_P Parameter: Plant Line Value: WS
  misc_feature: MA Experiment 20001560 PARAMETER Experiment Name: At_Drought_Soil_Dry_P Parameter: Post Timepoint (hr) Value: None
  misc_feature: MA Experiment 20001560 PARAMETER Experiment Name: At_Drought_Soil_Dry_P Parameter: Post-Treatment Value: None
  misc_feature: MA Experiment 20001560 PARAMETER Experiment Name: At_Drought_Soil_Dry_P Parameter: Timepoint (day) Value: 14
  misc_feature: MA Experiment 20001560 PARAMETER Experiment Name: At_Drought_Soil_Dry_P Parameter: Treatment Value: Drought vs. No Drought
  misc_feature: MA Experiment ID: 20001905 Result: Up-regulated in Transcription
  misc_feature: MA Experiment 20001905 PARAMETER Experiment Name: At_Drought_Reproduction_P Parameter: Age (day) Value: 40
  misc_feature: MA Experiment 20001905 PARAMETER Experiment Name: At_Drought_Reproduction_P Parameter: Organism Value: A. thaliana
  misc_feature: MA Experiment 20001905 PARAMETER Experiment Name: At_Drought_Reproduction_P Parameter: Plant Line Value: WS
  misc_feature: MA Experiment 20001905 PARAMETER Experiment Name: At_Drought_Reproduction_P Parameter: Timepoint (day) Value: 10
  misc_feature: MA Experiment 20001905 PARAMETER Experiment Name: At_Drought_Reproduction_P Parameter: Tissue Value: Rosettes
  misc_feature: MA Experiment 20001905 PARAMETER Experiment Name: At_Drought_Reproduction_P Parameter: Treatment Value: Drought vs. No Drought
  misc_feature: MA Experiment ID: 20001911 Result: Up-regulated in Transcription
  misc_feature: MA Experiment 20001911 PARAMETER Experiment Name: At_Drought_Reproduction_P Parameter: Age (day) Value: 40
  misc_feature: MA Experiment 20001911 PARAMETER Experiment Name: At_Drought_Reproduction_P Parameter: Organism Value: A. thaliana
  misc_feature: MA Experiment 20001911 PARAMETER Experiment Name: At_Drought_Reproduction_P Parameter: Plant Line Value: WS
  misc_feature: MA Experiment 20001911 PARAMETER Experiment Name: At_Drought_Reproduction_P Parameter: Timepoint (day) Value: 10
  misc_feature: MA Experiment 20001911 PARAMETER Experiment Name: At_Drought_Reproduction_P Parameter: Tissue Value: Flowers
  misc_feature: MA Experiment 20001911 PARAMETER Experiment Name: At_Drought_Reproduction_P Parameter: Treatment Value: Drought vs. No Drought
acggacccgtatcccaaagatctcatctttcgtcgagtggttcataaccaaaatcaaaacttgagtgaatcataatcgtcgtctcgtcgccggagaaaatgatcggcggtggtagggtttattgggggaagaagttagataaagagatggaagatgcggcggttgttgacggtggtggatctaacggtgttgttgtgatctttgtttggagctcgattaacgagaaccagcttatgaatttcgttgatctttattcttctcttggttggaattctcttgtttgccgcgctgattttctcaccgcggtttatcctgaaatggctctttctttagcattccatcttctttctgaacttgttgaggagttaaagagtagaccatgtcctgttatctttctagctttctctggtgctcctaaagcttgtatgtataaagttctacaggtgatcatggatgattgtgaagctcaaattcatccggatgatagccagttggttagaacctgtctttctggacatgtctatgactctggcccgttggattttacgagtgatttgaatgtgaaattcgcactacatcccaccatacgacgaatgtctggtccttctagactagtatcttgggtggctaaagggatttcttccgggcttgatggtttatatcttacaagatttgaatcccaacgtagtgagtactggcaggccctctactcatcggttgaaattggggctccatatctcattttgtgctccgagaatgatgaacttgctcctctacaagtaatttcaagctttacccatcaattgcaggaactgggaggagaagttaaggttgtcaagtggaaaaattctcctcatgcaggacactacgcacataaccctatacaataccgggctgttatctccaactttctggagaaagccatatcagttcacttacataaaatccggcagctcggagaaagagctcacacgcatgatgaaatctctgagttaatatgcgaccttcagaaagttgctgtgaactctaaccaaagcctaagaagagtagccactgggccatgtgaccactttttcttacctagctcagcaccgtatcaaagcaacagcaacaacagcgatccatcatcttcacaagaagaacagagagaaagatcgtccttccgcccactccaaccaacgagcataaacgctcacagcgtactcgggcaattcctattcgactcatgtgttccaaagaacatcgaaggatgggatatcagatttgcgggttgtctcaacggtcaaccatatgccacgtcctcctcccgtaagaactcaaatcttggttttaagaaacgctttttccgttcaagactatga

SEQ ID NO: 42361 - protein, 420 aa, Arabidopsis thaliana
  peptide (1)..(420): Ceres Seq. ID no. 13575125
  misc_feature (104)..(385): Pfam Name: Eukaryotic protein of unknown function (DUF829) Pfam Description: Eukaryotic protein of unknown function (DUF829)
  misc_feature (4)..(390): Homolog of NCBI NO: 15241450 NR Description: expressed protein [Arabidopsis thaliana]
  misc_feature (1)..(404): Homolog of NCBI NO: 25411656 NR Description: hypothetical protein At2g15690 [imported] -
  misc_feature (1)..(420): Homolog of NCBI NO: 18397898 NR Description: expressed protein [Arabidopsis thaliana]
MIGGGRVYWGKKLDKEMEDAAVVDGGGSNGVVVIFVWSSINENQLMNFVDLYSSLGWNSLVCRADFLTAVYPEMALSLAFHLLSELVEELKSRPCPVIFLAFSGAPKACMYKVLQVIMDDCEAQIHPDDSQLVRTCLSGHVYDSGPLDFTSDLNVKFALHPTIRRMSGPSRLVSWVAKGISSGLDGLYLTRFESQRSEYWQALYSSVEIGAPYLILCSENDELAPLQVISSFTHQLQELGGEVKVVKWKNSPHAGHYAHNPIQYRAVISNFLEKAISVHLHKIRQLGERAHTHDEISELICDLQKVAVNSNQSLRRVATGPCDHFFLPSSAPYQSNSNNSDPSSSQEEQRERSSFRPLQPTSINAHSVLGQFLFDSCVPKNIEGWDIRFAGCLNGQPYATSSSRKNSNLGFKKRFFRSRL

SEQ ID NO: 42362 - protein, 404 aa, Arabidopsis thaliana
  peptide (1)..(404): Ceres Seq. ID no. 13575126
  misc_feature (88)..(369): Pfam Name: Eukaryotic protein of unknown function (DUF829) Pfam Description: Eukaryotic protein of unknown function (DUF829)
  misc_feature (1)..(374): Homolog of NCBI NO: 15241450 NR Description: expressed protein [Arabidopsis thaliana]
  misc_feature (1)..(388): Homolog of NCBI NO: 25411656 NR Description: hypothetical protein At2g15690 [imported] -
  misc_feature (1)..(404): Homolog of NCBI NO: 18397898 NR Description: expressed protein [Arabidopsis thaliana]
MEDAAVVDGGGSNGVVVIFVWSSINENQLMNFVDLYSSLGWNSLVCRADFLTAVYPEMALSLAFHLLSELVEELKSRPCPVIFLAFSGAPKACMYKVLQVIMDDCEAQIHPDDSQLVRTCLSGHVYDSGPLDFTSDLNVKFALHPTIRRMSGPSRLVSWVAKGISSGLDGLYLTRFESQRSEYWQALYSSVEIGAPYLILCSENDELAPLQVISSFTHQLQELGGEVKVVKWKNSPHAGHYAHNPIQYRAVISNFLEKAISVHLHKIRQLGERAHTHDEISELICDLQKVAVNSNQSLRRVATGPCDHFFLPSSAPYQSNSNNSDPSSSQEEQRERSSFRPLQPTSINAHSVLGQFLFDSCVPKNIEGWDIRFAGCLNGQPYATSSSRKNSNLGFKKRFFRSRL

SEQ ID NO: 42363 - protein, 375 aa, Arabidopsis thaliana
  peptide (1)..(375): Ceres Seq. ID no. 13575127
  misc_feature (59)..(340): Pfam Name: Eukaryotic protein of unknown function (DUF829) Pfam Description: Eukaryotic protein of unknown function (DUF829)
  misc_feature (1)..(345): Homolog of NCBI NO: 15241450 NR Description: expressed protein [Arabidopsis thaliana]
  misc_feature (1)..(359): Homolog of NCBI NO: 25411656 NR Description: hypothetical protein At2g15690 [imported] -
  misc_feature (1)..(375): Homolog of NCBI NO: 18397898 NR Description: expressed protein [Arabidopsis thaliana]
MNFVDLYSSLGWNSLVCRADFLTAVYPEMALSLAFHLLSELVEELKSRPCPVIFLAFSGAPKACMYKVLQVIMDDCEAQIHPDDSQLVRTCLSGHVYDSGPLDFTSDLNVKFALHPTIRRMSGPSRLVSWVAKGISSGLDGLYLTRFESQRSEYWQALYSSVEIGAPYLILCSENDELAPLQVISSFTHQLQELGGEVKVVKWKNSPHAGHYAHNPIQYRAVISNFLEKAISVHLHKIRQLGERAHTHDEISELICDLQKVAVNSNQSLRRVATGPCDHFFLPSSAPYQSNSNNSDPSSSQEEQRERSSFRPLQPTSINAHSVLGQFLFDSCVPKNIEGWDIRFAGCLNGQPYATSSSRKNSNLGFKKRFFRSRL

SEQ ID NO: 42364 - DNA, 860 bp, Arabidopsis thaliana
  misc_feature (1)..(860): Ceres Seq. ID no. 12562645
  misc_feature: MA Experiment ID: 108576 Result: Up-regulated in Transcription
  misc_feature: MA Experiment 108576 PARAMETER Experiment Name: At_42deg_Heat_cDNA_P Parameter: Temperature (deg C) Value: 42 vs. 22
  misc_feature: MA Experiment 108576 PARAMETER Experiment Name: At_42deg_Heat_cDNA_P Parameter: Timepoint (hr) Value: 1
  misc_feature: MA Experiment 108576 PARAMETER Experiment Name: At_42deg_Heat_cDNA_P Parameter: Tissue Value: Aerial
  misc_feature: MA Experiment ID: 20000227 Result: Up-regulated in Transcription
  misc_feature: MA Experiment 20000227 PARAMETER Experiment Name: At_Root-Tips-vs-Tops_P Parameter: Tissue Value: Root Tips vs. Root Tops
  misc_feature: MA Experiment ID: 20001558 Result: Up-regulated in Transcription
  misc_feature: MA Experiment 20001558 PARAMETER Experiment Name: At_Drought_Soil_Dry_P Parameter: Age (day) Value: 27
  misc_feature: MA Experiment 20001558 PARAMETER Experiment Name: At_Drought_Soil_Dry_P Parameter: Organism Value: A. thaliana
  misc_feature: MA Experiment 20001558 PARAMETER Experiment Name: At_Drought_Soil_Dry_P Parameter: Plant Line Value: WS
  misc_feature: MA Experiment 20001558 PARAMETER Experiment Name: At_Drought_Soil_Dry_P Parameter: Post Timepoint (hr) Value: 6
  misc_feature: MA Experiment 20001558 PARAMETER Experiment Name: At_Drought_Soil_Dry_P Parameter: Post-Treatment Value: Re-Water vs. No Drought
  misc_feature: MA Experiment 20001558 PARAMETER Experiment Name: At_Drought_Soil_Dry_P Parameter: Timepoint (day) Value: 13
  misc_feature: MA Experiment 20001558 PARAMETER Experiment Name: At_Drought_Soil_Dry_P Parameter: Treatment Value: Drought vs. No Drought
  misc_feature: MA Experiment ID: 20001560 Result: Up-regulated in Transcription
  misc_feature: MA Experiment 20001560 PARAMETER Experiment Name: At_Drought_Soil_Dry_P Parameter: Age (day) Value: 28
  misc_feature: MA Experiment 20001560 PARAMETER Experiment Name: At_Drought_Soil_Dry_P Parameter: Organism Value: A. thaliana
  misc_feature: MA Experiment 20001560 PARAMETER Experiment Name: At_Drought_Soil_Dry_P Parameter: Plant Line Value: WS
  misc_feature: MA Experiment 20001560 PARAMETER Experiment Name: At_Drought_Soil_Dry_P Parameter: Post Timepoint (hr) Value: None
  misc_feature: MA Experiment 20001560 PARAMETER Experiment Name: At_Drought_Soil_Dry_P Parameter: Post-Treatment Value: None
  misc_feature: MA Experiment 20001560 PARAMETER Experiment Name: At_Drought_Soil_Dry_P Parameter: Timepoint (day) Value: 14
  misc_feature: MA Experiment 20001560 PARAMETER Experiment Name: At_Drought_Soil_Dry_P Parameter: Treatment Value: Drought vs. No Drought
aaaccaaaaaaaaaaaacttcagaaaatttgaaatcctcagaattgcagagcaaagaacaaccatggcgaatcctattcaagagattctggagaagcaagttctaacggtggctaaagctatggaagataagatagacgacgagatcgcctctttagaaaagcttgacgaggacgatctagaggttttgagagagagaaggttaaagcaaatgaagaaaatggcagagaagaagaaacgttggattagtcttggacatggtgaatactctgagatccattctgagaaagacttcttctccgtcgttaaagccagcgaacgcgtcgtctgccatttctaccgcgagaattggccatgtaaagtgatggataagcacatgagtatattggcaaagcaacacattgagacacgttttgtgaagatccaagctgagaaaagtccgttcttggctgagaggctcaagattgttgttctacctactcttgcacttattaagaacactaaagtcgatgattatgtggttgggttcaatgagcttggagggaaagatgatttcagcactgaggatttggaagagagaatagctagagcgcaagtgattcattacgatggagagtcatcgtcgcttaaaccaaagtcgacaacacaagttagaaggaatgtgaggcagagtgctcgttcagattcagactccgaatagactctcgggtttttcagcaaacgtttgttggtatgttcatgatcttcactctatcttcagcccttttttggtgtgagtttgtattgtgcgaattcagttgtgatgtgtaatacaaagtaggagatgatcttatatgcatatttgatgagtttttaaccttg

SEQ ID NO: 42365 - protein, 232 aa, Arabidopsis thaliana
  peptide (1)..(232): Ceres Seq. ID no. 12562646
  misc_feature (28)..(232): Homolog of NCBI NO: 2342477 NR Description: ATP binding protein [Homo sapiens]
  misc_feature (21)..(232): Homolog of NCBI NO: 27924448 NR Description: Similar to ATP binding protein associated with
  misc_feature (28)..(232): Homolog of NCBI NO: 25282435 NR Description: ES cell-related protein; ATP binding protein
  misc_feature (28)..(232): Homolog of NCBI NO: 25286717 NR Description: ATP binding protein associated with cell
  misc_feature (26)..(232): Homolog of NCBI NO: 28277604 NR Description: Similar to ATP binding protein associated with
  misc_feature (26)..(232): Homolog of NCBI NO: 40253924 NR Description: putative ATP binding protein associated with cell
  misc_feature (74)..(232): Homolog of NCBI NO: 26452365 NR Description: unknown protein [Arabidopsis thaliana]
  misc_feature (22)..(232): Homolog of NCBI NO: 21594045 NR Description: putative ATP binding protein [Arabidopsis
  misc_feature (22)..(232): Homolog of NCBI NO: 18404574 NR Description: expressed protein
  misc_feature (22)..(232): Homolog of NCBI NO: 15224267 NR Description: putative ATP binding protein; protein id:
KPKKKNFRKFEILRIAEQRTTMANPIQEILEKQVLTVAKAMEDKIDDEIASLEKLDEDDLEVLRERRLKQMKKMAEKKKRWISLGHGEYSEIHSEKDFFSVVKASERVVCHFYRENWPCKVMDKHMSILAKQHIETRFVKIQAEKSPFLAERLKIVVLPTLALIKNTKVDDYVVGFNELGGKDDFSTEDLEERIARAQVIHYDGESSSLKPKSTTQVRRNVRQSARSDSDSE

SEQ ID NO: 42366 - protein, 211 aa, Arabidopsis thaliana
  peptide (1)..(211): Ceres Seq. ID no. 12562647
  misc_feature (7)..(211): Homolog of NCBI NO: 2342477 NR Description: ATP binding protein [Homo sapiens]
  misc_feature (1)..(211): Homolog of NCBI NO: 27924448 NR Description: Similar to ATP binding protein associated with
  misc_feature (7)..(211): Homolog of NCBI NO: 25282435 NR Description: ES cell-related protein; ATP binding protein
  misc_feature (7)..(211): Homolog of NCBI NO: 25286717 NR Description: ATP binding protein associated with cell
  misc_feature (5)..(211): Homolog of NCBI NO: 28277604 NR Description: Similar to ATP binding protein associated with
  misc_feature (5)..(211): Homolog of NCBI NO: 40253924 NR Description: putative ATP binding protein associated with cell
  misc_feature (53)..(211): Homolog of NCBI NO: 26452365 NR Description: unknown protein [Arabidopsis thaliana]
  misc_feature (1)..(211): Homolog of NCBI NO: 21594045 NR Description: putative ATP binding protein [Arabidopsis
  misc_feature (1)..(211): Homolog of NCBI NO: 18404574 NR Description: expressed protein
  misc_feature (1)..(211): Homolog of NCBI NO: 15224267 NR Description: putative ATP binding protein; protein id:
MANPIQEILEKQVLTVAKAMEDKIDDEIASLEKLDEDDLEVLRERRLKQMKKMAEKKKRWISLGHGEYSEIHSEKDFFSVVKASERVVCHFYRENWPCKVMDKHMSILAKQHIETRFVKIQAEKSPFLAERLKIVVLPTLALIKNTKVDDYVVGFNELGGKDDFSTEDLEERIARAQVIHYDGESSSLKPKSTTQVRRNVRQSARSDSDSE

SEQ ID NO: 42367 - protein, 192 aa, Arabidopsis thaliana
  peptide (1)..(192): Ceres Seq. ID no. 12562648
  misc_feature (1)..(192): Homolog of NCBI NO: 2342477 NR Description: ATP binding protein [Homo sapiens]
  misc_feature (1)..(192): Homolog of NCBI NO: 27924448 NR Description: Similar to ATP binding protein associated with
  misc_feature (1)..(192): Homolog of NCBI NO: 25282435 NR Description: ES cell-related protein; ATP binding protein
  misc_feature (1)..(192): Homolog of NCBI NO: 25286717 NR Description: ATP binding protein associated with cell
  misc_feature (1)..(192): Homolog of NCBI NO: 28277604 NR Description: Similar to ATP binding protein associated with
  misc_feature (1)..(192): Homolog of NCBI NO: 40253924 NR Description: putative ATP binding protein associated with cell
  misc_feature (34)..(192): Homolog of NCBI NO: 26452365 NR Description: unknown protein [Arabidopsis thaliana]
  misc_feature (1)..(192): Homolog of NCBI NO: 21594045 NR Description: putative ATP binding protein [Arabidopsis
  misc_feature (1)..(192): Homolog of NCBI NO: 18404574 NR Description: expressed protein
  misc_feature (1)..(192): Homolog of NCBI NO: 15224267 NR Description: putative ATP binding protein; protein id:
MEDKIDDEIASLEKLDEDDLEVLRERRLKQMKKMAEKKKRWISLGHGEYSEIHSEKDFFSVVKASERVVCHFYRENWPCKVMDKHMSILAKQHIETRFVKIQAEKSPFLAERLKIVVLPTLALIKNTKVDDYVVGFNELGGKDDFSTEDLEERIARAQVIHYDGESSSLKPKSTTQVRRNVRQSARSDSDSE

SEQ ID NO: 42368 - DNA, 1499 bp, Arabidopsis thaliana
  misc_feature (1)..(1499): Ceres Seq. ID no. 13495940
  misc_feature: MA Experiment ID: 20000182 Result: Up-regulated in Transcription
  misc_feature: MA Experiment 20000182 PARAMETER Experiment Name: At_2mM_SA_P Parameter: Age (day) Value: 14
  misc_feature: MA Experiment 20000182 PARAMETER Experiment Name: At_2mM_SA_P Parameter: Organism Value: A. thaliana
  misc_feature: MA Experiment 20000182 PARAMETER Experiment Name: At_2mM_SA_P Parameter: Plant Line Value: WS
  misc_feature: MA Experiment 20000182 PARAMETER Experiment Name: At_2mM_SA_P Parameter: Timepoint (hr) Value: 6
  misc_feature: MA Experiment 20000182 PARAMETER Experiment Name: At_2mM_SA_P Parameter: Tissue Value: Aerial
  misc_feature: MA Experiment 20000182 PARAMETER Experiment Name: At_2mM_SA_P Parameter: Treatment Value: 2mM SA vs. No Treatment
  misc_feature: MA Experiment ID: 20000264 Result: Up-regulated in Transcription
  misc_feature: MA Experiment 20000264 PARAMETER Experiment Name: At_Open_Flower_P Parameter: Age (day) Value: 21
  misc_feature: MA Experiment 20000264 PARAMETER Experiment Name: At_Open_Flower_P Parameter: Plant Line Value: WS
  misc_feature: MA Experiment 20000264 PARAMETER Experiment Name: At_Open_Flower_P Parameter: Tissue Value: Open Flower vs. Whole Plant
  misc_feature: MA Experiment ID: 20000439 Result: Up-regulated in Transcription
  misc_feature: MA Experiment 20000439 PARAMETER Experiment Name: At_Roots__P Parameter: Age (day) Value: 14 vs. 21
  misc_feature: MA Experiment 20000439 PARAMETER Experiment Name: At_Roots__P Parameter: Organism Value: A. thaliana
  misc_feature: MA Experiment 20000439 PARAMETER Experiment Name: At_Roots__P Parameter: Tissue Value: Roots vs. Whole Plant
  misc_feature: MA Experiment ID: 20000794 Result: Up-regulated in Transcription
  misc_feature: MA Experiment 20000794 PARAMETER Experiment Name: At_Petals_P Parameter: Age (day) Value: 23-25 days
  misc_feature: MA Experiment 20000794 PARAMETER Experiment Name: At_Petals_P Parameter: Plant Line Value: WS
  misc_feature: MA Experiment 20000794 PARAMETER Experiment Name: At_Petals_P Parameter: Tissue Value: Petals vs. Whole plant
aggaaagctggtacaaaccaaatttcattttttttcttttaattaattttggccaaaaagaaaaaaaaatcgaaactttttttgtgtaaatggaaggagaaactcatcaatcggagccgttacctttagcatctggagattccgatgaagggatcagtgctgcgattgaggcggagcttgctgagttagctgctggagattcaagcggcggtggtggttgcggcggcggaggaggagggattaggagtaaagtcaaaggaccttggtctacggaggaagacgcggttcttacgaagcttgtgaggaaactaggaccgaggaattggagtttgatcgctcgtggaatccctggtcgttctggtaaatcttgtcgattgcgttggtgtaatcagcttgacccttgtctcaagcgtaaacctttctctgatgaggaagatcgtatgataatttctgctcacgcggttcacggaaacaaatgggcagtgattgcgaaactgttaactggaagaacagataacgctatcaagaaccattggaactcaactcttagacgtaaatacgcagatctatggaataatggtcaatggatggctaattcagttactaccgcttccgtcaaaaacgaaaatgtcgatgaaacaactaatcctccatcctcaaaacaacagttgcctcaaggagatatcaattcctccccgccaaagcctccacaagtgagtgatgttgtaatggaagaggcagctaatgaacctcaagaacctcaagaacaacaagaacaagctccaccggtagtgagtaacgttccaacagaaaataacgtgtttcgccccgtggctcgcgttggtgcattcagtatctataacccaaccagccagaaaaatggttacagagactacaatatagttccatgtgagggaccgttgattcaagcagctaaacccgattcattggctggtaaatttctacaatctctttgtgatgaacctcaaatcccgtcaaaatgtggtcacggctgctctactcttccagctgaaactaagttctcacgtaactcggtgttgggacctgagtttgtggattatgaagagccttctgcggttttcaaccaagaactaatatctatagcaaccgatttgaacaacattgcatggataaagagtggccttgacaatgctgttgtcagagaagcagaacagagtttgaagatggataattacaattataatgatcctcgaatcaagtttactggaatgatgcctagacaagatttcttctgtgcaagaagctgaaactcaaaagtagggcttgagattcatcaaccccttttttttcttttgattctttgcgctttgacgcatatagatgatgaataagtaccagactggtacttatggatgttgttgtttctgacattttgattcggatttggtggaagaaagatagaaaacagagtatgtatcgtgtctcttattatataaaatcctagatcataaatatcg

SEQ ID NO: 42369 - protein, 399 aa, Arabidopsis thaliana
  peptide (1)..(399): Ceres Seq. ID no. 13495941
  misc_feature (56)..(102): Pfam Name: Myb-like DNA-binding domain Pfam Description: Myb-like DNA-binding domain
  misc_feature (54)..(156): Homolog of NCBI NO: 15235484 NR Description: myb DNA-binding protein (AtMYB73) [Arabidopsis
  misc_feature (54)..(171): Homolog of NCBI NO: 9954112 NR Description: tuber-specific and sucrose-responsive element
  misc_feature (38)..(160): Homolog of NCBI NO: 9954116 NR Description: tuber-specific and sucrose-responsive element
  misc_feature (54)..(365): Homolog of NCBI NO: 27529846 NR Description: Myb-like protein [Nicotiana tabacum]
  misc_feature (54)..(288): Homolog of NCBI NO: 9954114 NR Description: tuber-specific and sucrose-responsive element
  misc_feature (8)..(362): Homolog of NCBI NO: 34908320 NR Description: putative MYB transcription factor
  misc_feature (27)..(371): Homolog of NCBI NO: 15232609 NR Description: myb family transcription factor [Arabidopsis
  misc_feature (215)..(389): Homolog of NCBI NO: 15225582 NR Description: myb family transcription factor (MYB25)
  misc_feature (19)..(230): Homolog of NCBI NO: 15225582 NR Description: myb family transcription factor (MYB25)
  misc_feature (1)..(399): Homolog of NCBI NO: 15228182 NR Description: myb family transcription factor (MYB109)
MEGETHQSEPLPLASGDSDEGISAAIEAELAELAAGDSSGGGGCGGGGGGIRSKVKGPWSTEEDAVLTKLVRKLGPRNWSLIARGIPGRSGKSCRLRWCNQLDPCLKRKPFSDEEDRMIISAHAVHGNKWAVIAKLLTGRTDNAIKNHWNSTLRRKYADLWNNGQWMANSVTTASVKNENVDETTNPPSSKQQLPQGDINSSPPKPPQVSDVVMEEAANEPQEPQEQQEQAPPVVSNVPTENNVFRPVARVGAFSIYNPTSQKNGYRDYNIVPCEGPLIQAAKPDSLAGKFLQSLCDEPQIPSKCGHGCSTLPAETKFSRNSVLGPEFVDYEEPSAVFNQELISIATDLNNIAWIKSGLDNAVVREAEQSLKMDNYNYNDPRIKFTGMMPRQDFFCARS

SEQ ID NO: 42370 - protein, 282 aa, Arabidopsis thaliana
  peptide (1)..(282): Ceres Seq. ID no. 13495942
  misc_feature (1)..(39): Homolog of NCBI NO: 15235484 NR Description: myb DNA-binding protein (AtMYB73) [Arabidopsis
  misc_feature (1)..(54): Homolog of NCBI NO: 9954112 NR Description: tuber-specific and sucrose-responsive element
  misc_feature (1)..(43): Homolog of NCBI NO: 9954116 NR Description: tuber-specific and sucrose-responsive element
  misc_feature (1)..(248): Homolog of NCBI NO: 27529846 NR Description: Myb-like protein [Nicotiana tabacum]
  misc_feature (1)..(171): Homolog of NCBI NO: 9954114 NR Description: tuber-specific and sucrose-responsive element
  misc_feature (1)..(245): Homolog of NCBI NO: 34908320 NR Description: putative MYB transcription factor
  misc_feature (1)..(254): Homolog of NCBI NO: 15232609 NR Description: myb family transcription factor [Arabidopsis
  misc_feature (98)..(272): Homolog of NCBI NO: 15225582 NR Description: myb family transcription factor (MYB25)
  misc_feature (1)..(113): Homolog of NCBI NO: 15225582 NR Description: myb family transcription factor (MYB25)
  misc_feature (1)..(282): Homolog of NCBI NO: 15228182 NR Description: myb family transcription factor (MYB109)
MIISAHAVHGNKWAVIAKLLTGRTDNAIKNHWNSTLRRKYADLWNNGQWMANSVTTASVKNENVDETTNPPSSKQQLPQGDINSSPPKPPQVSDVVMEEAANEPQEPQEQQEQAPPVVSNVPTENNVFRPVARVGAFSIYNPTSQKNGYRDYNIVPCEGPLIQAAKPDSLAGKFLQSLCDEPQIPSKCGHGCSTLPAETKFSRNSVLGPEFVDYEEPSAVFNQELISIATDLNNIAWIKSGLDNAVVREAEQSLKMDNYNYNDPRIKFTGMMPRQDFFCARS

SEQ ID NO: 42371 - protein, 233 aa, Arabidopsis thaliana
  peptide (1)..(233): Ceres Seq. ID no. 13495943
  misc_feature (1)..(68): Homolog of NCBI NO: 2129647 NR Description: myb-related protein, 33.2K - Arabidopsis thaliana
  misc_feature (1)..(68): Homolog of NCBI NO: 15229664 NR Description: myb DNA-binding protein (MYB77) [Arabidopsis
  misc_feature (1)..(68): Homolog of NCBI NO: 2832406 NR Description: R2R3-MYB transcription factor [Arabidopsis
  misc_feature (1)..(199): Homolog of NCBI NO: 27529846 NR Description: Myb-like protein [Nicotiana tabacum]
  misc_feature (1)..(122): Homolog of NCBI NO: 9954114 NR Description: tuber-specific and sucrose-responsive element
  misc_feature (1)..(196): Homolog of NCBI NO: 34908320 NR Description: putative MYB transcription factor
  misc_feature (1)..(205): Homolog of NCBI NO: 15232609 NR Description: myb family transcription factor [Arabidopsis
  misc_feature (49)..(223): Homolog of NCBI NO: 15225582 NR Description: myb family transcription factor (MYB25)
  misc_feature (1)..(64): Homolog of NCBI NO: 15225582 NR Description: myb family transcription factor (MYB25)
  misc_feature (1)..(233): Homolog of NCBI NO: 15228182 NR Description: myb family transcription factor (MYB109)
MANSVTTASVKNENVDETTNPPSSKQQLPQGDINSSPPKPPQVSDVVMEEAANEPQEPQEQQEQAPPVVSNVPTENNVFRPVARVGAFSIYNPTSQKNGYRDYNIVPCEGPLIQAAKPDSLAGKFLQSLCDEPQIPSKCGHGCSTLPAETKFSRNSVLGPEFVDYEEPSAVFNQELISIATDLNNIAWIKSGLDNAVVREAEQSLKMDNYNYNDPRIKFTGMMPRQDFFCARS

SEQ ID NO: 42372 - DNA, 1070 bp, Arabidopsis thaliana
  misc_feature (1)..(1070): Ceres Seq. ID no. 12560013
  misc_feature: MA Experiment ID: 20000173 Result: Up-regulated in Transcription
  misc_feature: MA Experiment 20000173 PARAMETER Experiment Name: At_42deg_Heat_P Parameter: Age (day) Value: 14
  misc_feature: MA Experiment 20000173 PARAMETER Experiment Name: At_42deg_Heat_P Parameter: Organism Value: A. thaliana
  misc_feature: MA Experiment 20000173 PARAMETER Experiment Name: At_42deg_Heat_P Parameter: Plant Line Value: WS
  misc_feature: MA Experiment 20000173 PARAMETER Experiment Name: At_42deg_Heat_P Parameter: Temperature (deg C) Value: 42 vs. 22
  misc_feature: MA Experiment 20000173 PARAMETER Experiment Name: At_42deg_Heat_P Parameter: Timepoint (hr) Value: 6
  misc_feature: MA Experiment 20000173 PARAMETER Experiment Name: At_42deg_Heat_P Parameter: Tissue Value: Aerial
  misc_feature: MA Experiment ID: 20000179 Result: Up-regulated in Transcription
  misc_feature: MA Experiment 20000179 PARAMETER Experiment Name: At_Germinating_Seeds_P Parameter: Age (hr) Value: 6 vs. 0
  misc_feature: MA Experiment 20000179 PARAMETER Experiment Name: At_Germinating_Seeds_P Parameter: Tissue Value: Germinating Seeds
  misc_feature: MA Experiment ID: 20001911 Result: Up-regulated in Transcription
  misc_feature: MA Experiment 20001911 PARAMETER Experiment Name: At_Drought_Reproduction_P Parameter: Age (day) Value: 40
  misc_feature: MA Experiment 20001911 PARAMETER Experiment Name: At_Drought_Reproduction_P Parameter: Organism Value: A. thaliana
  misc_feature: MA Experiment 20001911 PARAMETER Experiment Name: At_Drought_Reproduction_P Parameter: Plant Line Value: WS
  misc_feature: MA Experiment 20001911 PARAMETER Experiment Name: At_Drought_Reproduction_P Parameter: Timepoint (day) Value: 10
  misc_feature: MA Experiment 20001911 PARAMETER Experiment Name: At_Drought_Reproduction_P Parameter: Tissue Value: Flowers
  misc_feature: MA Experiment 20001911 PARAMETER Experiment Name: At_Drought_Reproduction_P Parameter: Treatment Value: Drought vs. No Drought
acttttcagttttcatataataatgaaataacttggttactctctttcctcgccgtagtctgagtctgaaccctaaaacatcccgcttcgctgctcaggaccaagaatctcagattcaactgatctttgcaacatgacgagggtttatgtcgggaatttggacccacgcgtcaccgaaagagaactcgaagacgaattcaaggccttcggtgttcttcgcaatgtctgggtagctcgtagacctcctggctacgcattcctcgagttcgatgacgaaagagatgctttggatgcaatcagcgcattggatcgaaagaatgggtggcgtgtggagctttctcataaagataaaggaggtcgtggaggtggtggtggtcgtcgtggaggtattgaggattccaagtgctatgagtgtggtgagcttggacattttgctcgcgagtgtcgccgtggtcgaggctctgtgaggcgtagaagccctagtccccgtcgtcgtaggagtccagattatgggtatgctcgcaggagtataagcccgcgtgggaagaagatctcctccaaggcgtcgcagtgttactccacctcgccgtgggaggagctacagcagatcccctccttatcgtggttcacgccgtgattctcctcgccgcagagactcgccctatggtcgacgttcgccatatgccaatggggtgtgaaactggaccctgaagagaaagaagctattactaagctatgatgctatatctactctgtggcgccttttaggatagatctttatatctgctattatggtattagctcttctaggtttggttgttgagcatggacatgtcatggtatgttcgagttttattagacaattggatttggtgagttctccttcatgctgttttccaacagccgtcttgacttattntctataacacgcactggcctgctgtcttcacacagcgtccttgaacccctacacttgaggtcgttctttcgtatccataaatgttttgtctcttgttgaatgcactttccttattatatagacatatctaaaaagctcaactgtttccact

SEQ ID NO: 42373 - protein, 167 aa, Arabidopsis thaliana
  peptide (1)..(167): Ceres Seq. ID no. 12560014
  misc_feature (4)..(61): Pfam Name: RNA recognition motif. (a.k.a. RRM, RBD, or RNP domain) Pfam Description: RNA recognition motif. (a.k.a. RRM, RBD, or RNP
  misc_feature (2)..(151): Homolog of NCBI NO: 26337671 NR Description: unnamed protein product [Mus musculus]
  misc_feature (2)..(151): Homolog of NCBI NO: 15928796 NR Description: Similar to splicing factor, arginine/serine-rich
  misc_feature (2)..(151): Homolog of NCBI NO: 22122585 NR Description: RIKEN cDNA 9430065L19; hypothetical protein
  misc_feature (2)..(151): Homolog of NCBI NO: 3929380 NR Description: Splicing factor, arginine/serine-rich 7 (Splicing
  misc_feature (1)..(138): Homolog of NCBI NO: 15224171 NR Description: putative RSZp22 splicing factor; protein id:
  misc_feature (1)..(138): Homolog of NCBI NO: 25294318 NR Description: splicing factor RSZp22 [validated] - Arabidopsis
  misc_feature (1)..(138): Homolog of NCBI NO: 15236000 NR Description: splicing factor SRZ_22
  misc_feature (1)..(152): Homolog of NCBI NO: 25294317 NR Description: protein T23E23.2 [imported] - Arabidopsis
  misc_feature (1)..(139): Homolog of NCBI NO: 25294319 NR Description: splicing factor RSZp21 [imported] - Arabidopsis
  misc_feature (1)..(139): Homolog of NCBI NO: 18395314 NR Description: splicing factor SRZ_21
MTRVYVGNLDPRVTERELEDEFKAFGVLRNVWVARRPPGYAFLEFDDERDALDAISALDRKNGWRVELSHKDKGGRGGGGGRRGGIEDSKCYECGELGHFARECRRGRGSVRRRSPSPRRRRSPDYGYARRSISPRGKKISSKASQCYSTSPWEELQQIPSLSWFTP

SEQ ID NO: 42374 - DNA, 981 bp, Arabidopsis thaliana
  misc_feature (1)..(981): Ceres Seq. ID no. 13497651
  misc_feature: MA Experiment ID: 20000184 Result: Down-regulated in Transcription
  misc_feature: MA Experiment 20000184 PARAMETER Experiment Name: At_Shoots__P Parameter: Age (day) Value: 7
  misc_feature: MA Experiment 20000184 PARAMETER Experiment Name: At_Shoots__P Parameter: Tissue Value: Shoots vs. Whole Plant
  misc_feature: MA Experiment ID: 20000214 Result: Down-regulated in Transcription
  misc_feature: MA Experiment 20000214 PARAMETER Experiment Name: At_4deg_Cold_P Parameter: Timepoint (hr) Value: 6
  misc_feature: MA Experiment ID: 20001248 Result: Up-regulated in Transcription
  misc_feature: MA Experiment 20001248 PARAMETER Experiment Name: At_Far-red-induction_P Parameter: Age (day) Value: 7
  misc_feature: MA Experiment 20001248 PARAMETER Experiment Name: At_Far-red-induction_P Parameter: Light Value: Far-red vs. White
  misc_feature: MA Experiment 20001248 PARAMETER Experiment Name: At_Far-red-induction_P Parameter: Organism Value: A. thaliana
  misc_feature: MA Experiment 20001248 PARAMETER Experiment Name: At_Far-red-induction_P Parameter: Plant Line Value: Columbia
  misc_feature: MA Experiment 20001248 PARAMETER Experiment Name: At_Far-red-induction_P Parameter: Timepoint (hr) Value: 4
  misc_feature: MA Experiment 20001248 PARAMETER Experiment Name: At_Far-red-induction_P Parameter: Tissue Value: Whole Plant
  misc_feature: MA Experiment ID: 20001450 Result: Up-regulated in Transcription
  misc_feature: MA Experiment 20001450 PARAMETER Experiment Name: At_Far-red-induction_P Parameter: Age (day) Value: 7
  misc_feature: MA Experiment 20001450 PARAMETER Experiment Name: At_Far-red-induction_P Parameter: Light Value: Far-red vs. White
  misc_feature: MA Experiment 20001450 PARAMETER Experiment Name: At_Far-red-induction_P Parameter: Organism Value: A. thaliana
  misc_feature: MA Experiment 20001450 PARAMETER Experiment Name: At_Far-red-induction_P Parameter: Plant Line Value: Columbia
  misc_feature: MA Experiment 20001450 PARAMETER Experiment Name: At_Far-red-induction_P Parameter: Timepoint (hr) Value: 8
  misc_feature: MA Experiment 20001450 PARAMETER Experiment Name: At_Far-red-induction_P Parameter: Tissue Value: Whole Plant
  misc_feature: MA Experiment ID: 20001560 Result: Down-regulated in Transcription
  misc_feature: MA Experiment 20001560 PARAMETER Experiment Name: At_Drought_Soil_Dry_P Parameter: Age (day) Value: 28
  misc_feature: MA Experiment 20001560 PARAMETER Experiment Name: At_Drought_Soil_Dry_P Parameter: Organism Value: A. thaliana
  misc_feature: MA Experiment 20001560 PARAMETER Experiment Name: At_Drought_Soil_Dry_P Parameter: Plant Line Value: WS
  misc_feature: MA Experiment 20001560 PARAMETER Experiment Name: At_Drought_Soil_Dry_P Parameter: Post Timepoint (hr) Value: None
  misc_feature: MA Experiment 20001560 PARAMETER Experiment Name: At_Drought_Soil_Dry_P Parameter: Post-Treatment Value: None
  misc_feature: MA Experiment 20001560 PARAMETER Experiment Name: At_Drought_Soil_Dry_P Parameter: Timepoint (day) Value: 14
  misc_feature: MA Experiment 20001560 PARAMETER Experiment Name: At_Drought_Soil_Dry_P Parameter: Treatment Value: Drought vs. No Drought
tcttgcgacgggccctgctacccggtgcgtgacaggttgaatcattctcctccgattcacggtgattccggcgactacagactcaacatttaataagccgatctcttacatggtacgagctcggacaaattgaagaatacaaaggtccgagaaataatttggaataatggcgtcttcatcggattcatggatgagagcatacaacgaggctttaaaactctctgaggagattaatggaatgatatcagaaagaagttcatcggctgtcacagggcctgatgctcagcgtcgtgcttcagctatacgaaggaagatcaccattttcggtaacaaattagatagtctgcagtctcttcttgctgaaattcatggaaaacctatttcagagaaagagatgaatcggcgaaaggatatggtagggaatctgaggtcaaaagcaaaccagatggcgaatgctttgaacatgtcaaactttgccaatagagacagcttgctcgggccagatatcaagccggatgattccatgagcagagttactggcatggataaccaaggaattgttggatatcaacgacaagttatgagagaacaagacgaaggacttgagcaattggagggaacagtcatgagcacaaaacacattgctctggctgttagtgaagagcttgacttgcagactaggcttattgatgacttagattaccatgtggatgttactgactctcgcttaaggagagtgcagaagagccttgctgtcatgaacaagaatatgagaagtggttgctcttgcatgtcaatgctcttgtcagtgctggggatcgtcggtcttgctgttgtaatatggatgttggttaagtatatgtaataccaacatcagacaacttataagttcctctgtaggtccactggcctctactctctatgtgaatggttgcaatgtatttcctcattccacatttgtggctgagcttttcatttctc

SEQ ID NO: 42375 - protein, 232 aa, Arabidopsis thaliana
  peptide (1)..(232): Ceres Seq. ID no. 13497652
  misc_feature (141)..(203): Pfam Name: SNARE domain Pfam Description: SNARE domain
  misc_feature (6)..(226): Homolog of NCBI NO: 9055356 NR Description: syntaxin 8; syntaxin-like protein 3I35 [Mus
  misc_feature (6)..(226): Homolog of NCBI NO: 13928908 NR Description: syntaxin 8; syntaxin-like protein 3I35 [Rattus
  misc_feature (1)..(231): Homolog of NCBI NO: 34902234 NR Description: Hypothetical protein [Oryza sativa (japonica
  misc_feature (1)..(195): Homolog of NCBI NO: 22329605 NR Description: hypothetical protein [Arabidopsis thaliana]
  misc_feature (1)..(174): Homolog of NCBI NO: 15219172 NR Description: hypothetical protein [Arabidopsis thaliana]
  misc_feature (1)..(232): Homolog of NCBI NO: 21592406 NR Description: unknown [Arabidopsis thaliana]
  misc_feature (159)..(232): Homolog of NCBI NO: 25372945 NR Description: protein F20B17.2 [imported] - Arabidopsis
  misc_feature (1)..(174): Homolog of NCBI NO: 25372945 NR Description: protein F20B17.2 [imported] - Arabidopsis
  misc_feature (1)..(232): Homolog of NCBI NO: 18412435 NR Description: syntaxin of plants 52 (SYP52) [Arabidopsis
  misc_feature (1)..(232): Homolog of NCBI NO: 18394339 NR Description: syntaxin of plants 51 (SYP51) [Arabidopsis
MASSSDSWMRAYNEALKLSEEINGMISERSSSAVTGPDAQRRASAIRRKITIFGNKLDSLQSLLAEIHGKPISEKEMNRRKDMVGNLRSKANQMANALNMSNFANRDSLLGPDIKPDDSMSRVTGMDNQGIVGYQRQVMREQDEGLEQLEGTVMSTKHIALAVSEELDLQTRLIDDLDYHVDVTDSRLRRVQKSLAVMNKNMRSGCSCMSMLLSVLGIVGLAVVIWMLVKYM

SEQ ID NO: 42376 - protein, 224 aa, Arabidopsis thaliana
  peptide (1)..(224): Ceres Seq. ID no. 13497653
  misc_feature (133)..(195): Pfam Name: SNARE domain Pfam Description: SNARE domain
  misc_feature (1)..(218): Homolog of NCBI NO: 9055356 NR Description: syntaxin 8; syntaxin-like protein 3I35 [Mus
  misc_feature (1)..(218): Homolog of NCBI NO: 13928908 NR Description: syntaxin 8; syntaxin-like protein 3I35 [Rattus
  misc_feature (1)..(223): Homolog of NCBI NO: 34902234 NR Description: Hypothetical protein [Oryza sativa (japonica
  misc_feature (1)..(187): Homolog of NCBI NO: 22329605 NR Description: hypothetical protein [Arabidopsis thaliana]
  misc_feature (1)..(166): Homolog of NCBI NO: 15219172 NR Description: hypothetical protein [Arabidopsis thaliana]
  misc_feature (1)..(224): Homolog of NCBI NO: 21592406 NR Description: unknown [Arabidopsis thaliana]
  misc_feature (151)..(224): Homolog of NCBI NO: 25372945 NR Description: protein F20B17.2 [imported] - Arabidopsis
  misc_feature (1)..(166): Homolog of NCBI NO: 25372945 NR Description: protein F20B17.2 [imported] - Arabidopsis
  misc_feature (1)..(224): Homolog of NCBI NO: 18412435 NR Description: syntaxin of plants 52 (SYP52) [Arabidopsis
  misc_feature (1)..(224): Homolog of NCBI NO: 18394339 NR Description: syntaxin of plants 51 (SYP51) [Arabidopsis
MRAYNEALKLSEEINGMISERSSSAVTGPDAQRRASAIRRKITIFGNKLDSLQSLLAEIHGKPISEKEMNRRKDMVGNLRSKANQMANALNMSNFANRDSLLGPDIKPDDSMSRVTGMDNQGIVGYQRQVMREQDEGLEQLEGTVMSTKHIALAVSEELDLQTRLIDDLDYHVDVTDSRLRRVQKSLAVMNKNMRSGCSCMSMLLSVLGIVGLAVVIWMLVKYM

SEQ ID NO: 42377 - protein, 208 aa, Arabidopsis thaliana
  peptide (1)..(208): Ceres Seq. ID no. 13497654
  misc_feature (117)..(179): Pfam Name: SNARE domain Pfam Description: SNARE domain
  misc_feature (1)..(202): Homolog of NCBI NO: 9055356 NR Description: syntaxin 8; syntaxin-like protein 3I35 [Mus
  misc_feature (1)..(202): Homolog of NCBI NO: 13928908 NR Description: syntaxin 8; syntaxin-like protein 3I35 [Rattus
  misc_feature (1)..(207): Homolog of NCBI NO: 34902234 NR Description: Hypothetical protein [Oryza sativa (japonica
  misc_feature (1)..(171): Homolog of NCBI NO: 22329605 NR Description: hypothetical protein [Arabidopsis thaliana]
  misc_feature (1)..(150): Homolog of NCBI NO: 15219172 NR Description: hypothetical protein [Arabidopsis thaliana]
  misc_feature (1)..(208): Homolog of NCBI NO: 21592406 NR Description: unknown [Arabidopsis thaliana]
  misc_feature (135)..(208): Homolog of NCBI NO: 25372945 NR Description: protein F20B17.2 [imported] - Arabidopsis
  misc_feature (1)..(150): Homolog of NCBI NO: 25372945 NR Description: protein F20B17.2 [imported] - Arabidopsis
  misc_feature (1)..(208): Homolog of NCBI NO: 18412435 NR Description: syntaxin of plants 52 (SYP52) [Arabidopsis
  misc_feature (1)..(208): Homolog of NCBI NO: 18394339 NR Description: syntaxin of plants 51 (SYP51) [Arabidopsis
MISERSSSAVTGPDAQRRASAIRRKITIFGNKLDSLQSLLAEIHGKPISEKEMNRRKDMVGNLRSKANQMANALNMSNFANRDSLLGPDIKPDDSMSRVTGMDNQGIVGYQRQVMREQDEGLEQLEGTVMSTKHIALAVSEELDLQTRLIDDLDYHVDVTDSRLRRVQKSLAVMNKNMRSGCSCMSMLLSVLGIVGLAVVIWMLVKYM

SEQ ID NO: 42378 - DNA, 1704 bp, Arabidopsis thaliana
  misc_feature (1)..(1704): Ceres Seq. ID no. 12338676
  misc_feature: MA Experiment ID: 108595 Result: Up-regulated in Transcription
  misc_feature: MA Experiment 108595 PARAMETER Experiment Name: At_Ler-pi_Ovule_cDNA_P Parameter: Plant Line Value: null
agaaaaaataaattagttaaaaaaggaaagagaagtgttgttgcagctttagcccaaagatctctcctttttgcagagcttcttcttcttcttctccaaaaatcccaactttcttctctttcccggtttcttcgtctccagcattttcgcgtgttgtaacctaatccaaatcttacccattgatggaataacatcatcacgacgcgtcaaaattctgtatcggaggaccgagagatctccatctcctgtccagattcgattcccaccaatcccaatttcgtgaaattcgttagggttttagtttgaatctcatctcatcagatcgagtcgacccaggattaggaagaagaaaagcgatgaagatggcgacgaatggccagtttttcacaatcgggctagtcgcgtcttggtactcatcgaacattggtgtattgttgctgaacaagtacttgcttagcaattacggattcaagtacccgatctttctcaccatgtgtcacatgacggcttgttcgttactcagctacgtcgccattgcttggttgaagatggttccgatgcagacgattcgatccagagttcagttctttaagatcgcagctctaagtctcgttttttgtgtgtcggtggtctttggtaacatctctctccgctttcttcctgtttcgtttaaccaagccattggtgctacgacgccgtttttcaccgccgtgtttgcttacctgatgacgcgtaagaaagaggcttggttgacttacttcactctcgtccctgtcgtcaccggagttgttattgctagtgggggtgagccaagctttcacctgtttggattccttatgtgcattgcagcaacagctgcgagagcacttaaatcagtgcttcaaggaattttgctttcttctgaaggggaaaagctgaactccatgaatctcctcctttacatggctccaatagctgtcgtgctccttctgcctgctactcttatcatggagaaaaatgttgtcggcattacaattgcacttgcaagagatgatttcagaatcgtttggtatcttctattcaattcagcgctcgcctatttagtcaacttgacaaatttcttagtcacaaaccacactagcgccctgactttacaggtgctaggaaacgccaaaggagcagtagcagtggtggtctctattctaatcttcaagaatccggtgtcagtgaccggaatgctgggttactccctcaccgtctgtggagttatcctgtacagcgaagccaagaaacgaaacaaaaattagaacactaaacacacacaaagcttttacttcttcttcatcattcccccctatatatatgttttatattttctcccctatggatatacaggcaagtagtctcttttgctgggccaaactgactcttgtcttaatgaaaagctgggccaaaaacatctcttttttttggcagaaacagagaagcaaagccacacaaagattgattaccaaaggcaagaatttagagaacttcctcctatgaataagtaacctttttgtttttcatttttgttctttcttctcggattctcttgcctttcctctgtaggttgtttgttgaattaggtttgtttcttcgattctttacattttagttttgtgatgtcaacattttacaacaacacggattgattcatttaatcgaaagagagaaagtncctcc

SEQ ID NO: 42379 - protein, 309 aa, Arabidopsis thaliana
  peptide (1)..(309): Ceres Seq. ID no. 12338677
  misc_feature (25)..(148): Pfam Name: Integral membrane protein DUF6 Pfam Description: Integral membrane protein DUF6
  misc_feature (15)..(300): Homolog of NCBI NO: 38567832 NR Description: OSJNBb0020J19.10 [Oryza sativa (japonica
  misc_feature (1)..(250): Homolog of NCBI NO: 15229717 NR Description: integral membrane protein, putative; protein id:
  misc_feature (151)..(308): Homolog of NCBI NO: 15229717 NR Description: integral membrane protein, putative; protein id:
  misc_feature (11)..(309): Homolog of NCBI NO: 15221371 NR Description: hypothetical protein; protein id: At1g12500.1
  misc_feature (10)..(306): Homolog of NCBI NO: 15228248 NR Description: unknown protein; protein id: At3g10290.1
  misc_feature (10)..(306): Homolog of NCBI NO: 17064798 NR Description: phosphate/phosphoenolpyruvate translocator-like
  misc_feature (10)..(306): Homolog of NCBI NO: 15237644 NR Description: phosphate/phosphoenolpyruvate translocator - like
  misc_feature (6)..(308): Homolog of NCBI NO: 27476065 NR Description: Putative phosphate/phosphoenolpyruvate
  misc_feature (3)..(309): Homolog of NCBI NO: 9759107 NR Description: phosphate/phosphoenolpyruvate translocator
  misc_feature (1)..(309): Homolog of NCBI NO: 30681126 NR Description: phosphate translocator-related [Arabidopsis
MKMATNGQFFTIGLVASWYSSNIGVLLLNKYLLSNYGFKYPIFLTMCHMTACSLLSYVAIAWLKMVPMQTIRSRVQFFKIAALSLVFCVSVVFGNISLRFLPVSFNQAIGATTPFFTAVFAYLMTRKKEAWLTYFTLVPVVTGVVIASGGEPSFHLFGFLMCIAATAARALKSVLQGILLSSEGEKLNSMNLLLYMAPIAVVLLLPATLIMEKNVVGITIALARDDFRIVWYLLFNSALAYLVNLTNFLVTNHTSALTLQVLGNAKGAVAVVVSILIFKNPVSVTGMLGYSLTVCGVILYSEAKKRNKN

SEQ ID NO: 42380 - protein, 307 aa, Arabidopsis thaliana
  peptide (1)..(307): Ceres Seq. ID no. 12338679
  misc_feature (23)..(146): Pfam Name: Integral membrane protein DUF6 Pfam Description: Integral membrane protein DUF6
  misc_feature (13)..(298): Homolog of NCBI NO: 38567832 NR Description: OSJNBb0020J19.10 [Oryza sativa (japonica
  misc_feature (1)..(248): Homolog of NCBI NO: 15229717 NR Description: integral membrane protein, putative; protein id:
  misc_feature (149)..(306): Homolog of NCBI NO: 15229717 NR Description: integral membrane protein, putative; protein id:
  misc_feature (9)..(307): Homolog of NCBI NO: 15221371 NR Description: hypothetical protein; protein id: At1g12500.1
  misc_feature (8)..(304): Homolog of NCBI NO: 15228248 NR Description: unknown protein; protein id: At3g10290.1
  misc_feature (8)..(304): Homolog of NCBI NO: 17064798 NR Description: phosphate/phosphoenolpyruvate translocator-like
  misc_feature (8)..(304): Homolog of NCBI NO: 15237644 NR Description: phosphate/phosphoenolpyruvate translocator - like
  misc_feature (4)..(306): Homolog of NCBI NO: 27476065 NR Description: Putative phosphate/phosphoenolpyruvate
  misc_feature (1)..(307): Homolog of NCBI NO: 9759107 NR Description: phosphate/phosphoenolpyruvate translocator
  misc_feature (1)..(307): Homolog of NCBI NO: 30681126 NR Description: phosphate translocator-related [Arabidopsis
MATNGQFFTIGLVASWYSSNIGVLLLNKYLLSNYGFKYPIFLTMCHMTACSLLSYVAIAWLKMVPMQTIRSRVQFFKIAALSLVFCVSVVFGNISLRFLPVSFNQAIGATTPFFTAVFAYLMTRKKEAWLTYFTLVPVVTGVVIASGGEPSFHLFGFLMCIAATAARALKSVLQGILLSSEGEKLNSMNLLLYMAPIAVVLLLPATLIMEKNVVGITIALARDDFRIVWYLLFNSALAYLVNLTNFLVTNHTSALTLQVLGNAKGAVAVVVSILIFKNPVSVTGMLGYSLTVCGVILYSEAKKRNKN

SEQ ID NO: 42381 - protein, 264 aa, Arabidopsis thaliana
  peptide (1)..(264): Ceres Seq. ID no. 12338680
  misc_feature (1)..(103): Pfam Name: Integral membrane protein DUF6 Pfam Description: Integral membrane protein DUF6
  misc_feature (1)..(255): Homolog of NCBI NO: 38567832 NR Description: OSJNBb0020J19.10 [Oryza sativa (japonica
  misc_feature (1)..(205): Homolog of NCBI NO: 15229717 NR Description: integral membrane protein, putative; protein id:
  misc_feature (106)..(263): Homolog of NCBI NO: 15229717 NR Description: integral membrane protein, putative; protein id:
  misc_feature (1)..(264): Homolog of NCBI NO: 15221371 NR Description: hypothetical protein; protein id: At1g12500.1
  misc_feature (1)..(261): Homolog of NCBI NO: 15228248 NR Description: unknown protein; protein id: At3g10290.1
  misc_feature (1)..(261): Homolog of NCBI NO: 17064798 NR Description: phosphate/phosphoenolpyruvate translocator-like
  misc_feature (1)..(261): Homolog of NCBI NO: 15237644 NR Description: phosphate/phosphoenolpyruvate translocator - like
  misc_feature (1)..(263): Homolog of NCBI NO: 27476065 NR Description: Putative phosphate/phosphoenolpyruvate
  misc_feature (1)..(264): Homolog of NCBI NO: 9759107 NR Description: phosphate/phosphoenolpyruvate translocator
  misc_feature (1)..(264): Homolog of NCBI NO: 30681126 NR Description: phosphate translocator-related [Arabidopsis
MCHMTACSLLSYVAIAWLKMVPMQTIRSRVQFFKIAALSLVFCVSVVFGNISLRFLPVSFNQAIGATTPFFTAVFAYLMTRKKEAWLTYFTLVPVVTGVVIASGGEPSFHLFGFLMCIAATAARALKSVLQGILLSSEGEKLNSMNLLLYMAPIAVVLLLPATLIMEKNVVGITIALARDDFRIVWYLLFNSALAYLVNLTNFLVTNHTSALTLQVLGNAKGAVAVVVSILIFKNPVSVTGMLGYSLTVCGVILYSEAKKRNKN

SEQ ID NO: 42382 - DNA, 1620 bp, Arabidopsis thaliana
  misc_feature (1)..(1620): Ceres Seq. ID no. 13592581
  misc_feature: MA Experiment ID: 20000173 Result: Down-regulated in Transcription
  misc_feature: MA Experiment 20000173 PARAMETER Experiment Name: At_42deg_Heat_P Parameter: Age (day) Value: 14
  misc_feature: MA Experiment 20000173 PARAMETER Experiment Name: At_42deg_Heat_P Parameter: Organism Value: A. thaliana
  misc_feature: MA Experiment 20000173 PARAMETER Experiment Name: At_42deg_Heat_P Parameter: Plant Line Value: WS
  misc_feature: MA Experiment 20000173 PARAMETER Experiment Name: At_42deg_Heat_P Parameter: Temperature (deg C) Value: 42 vs. 22
  misc_feature: MA Experiment 20000173 PARAMETER Experiment Name: At_42deg_Heat_P Parameter: Timepoint (hr) Value: 6
  misc_feature: MA Experiment 20000173 PARAMETER Experiment Name: At_42deg_Heat_P Parameter: Tissue Value: Aerial
  misc_feature: MA Experiment ID: 20000180 Result: Up-regulated in Transcription
  misc_feature: MA Experiment 20000180 PARAMETER Experiment Name: At_Germinating_Seeds_P Parameter: Age (hr) Value: 24 vs. 0
  misc_feature: MA Experiment 20000180 PARAMETER Experiment Name: At_Germinating_Seeds_P Parameter: Tissue Value: Germinating Seeds
  misc_feature: MA Experiment ID: 20000185 Result: Down-regulated in Transcription
  misc_feature: MA Experiment 20000185 PARAMETER Experiment Name: At_Roots__P Parameter: Age (day) Value: 7 vs. 21
  misc_feature: MA Experiment 20000185 PARAMETER Experiment Name: At_Roots__P Parameter: Organism Value: A. thaliana
  misc_feature: MA Experiment 20000185 PARAMETER Experiment Name: At_Roots__P Parameter: Tissue Value: Roots vs. Whole Plant
  misc_feature: MA Experiment ID: 20000436 Result: Down-regulated in Transcription
  misc_feature: MA Experiment 20000436 PARAMETER Experiment Name: At_Drought_P Parameter: Age (day) Value: 7
  misc_feature: MA Experiment 20000436 PARAMETER Experiment Name: At_Drought_P Parameter: Organism Value: A. thaliana
  misc_feature: MA Experiment 20000436 PARAMETER Experiment Name: At_Drought_P Parameter: Plant Line Value: WS
  misc_feature: MA Experiment 20000436 PARAMETER Experiment Name: At_Drought_P Parameter: Timepoint (hr) Value: 12
  misc_feature: MA Experiment 20000436 PARAMETER Experiment Name: At_Drought_P Parameter: Tissue Value: Whole Plant
  misc_feature: MA Experiment 20000436 PARAMETER Experiment Name: At_Drought_P Parameter: Treatment Value: Drought vs. No Drought
  misc_feature: MA Experiment ID: 20000437 Result: Down-regulated in Transcription
  misc_feature: MA Experiment 20000437 PARAMETER Experiment Name: At_Drought_P Parameter: Age (day) Value: 8
  misc_feature: MA Experiment 20000437 PARAMETER Experiment Name: At_Drought_P Parameter: Organism Value: A. thaliana
  misc_feature: MA Experiment 20000437 PARAMETER Experiment Name: At_Drought_P Parameter: Plant Line Value: WS
  misc_feature: MA Experiment 20000437 PARAMETER Experiment Name: At_Drought_P Parameter: Timepoint (hr) Value: 24
  misc_feature: MA Experiment 20000437 PARAMETER Experiment Name: At_Drought_P Parameter: Tissue Value: Whole Plant
  misc_feature: MA Experiment 20000437 PARAMETER Experiment Name: At_Drought_P Parameter: Treatment Value: Drought vs. No Drought
  misc_feature: MA Experiment ID: 20000439 Result: Down-regulated in Transcription
  misc_feature: MA Experiment 20000439 PARAMETER Experiment Name: At_Roots__P Parameter: Age (day) Value: 14 vs. 21
  misc_feature: MA Experiment 20000439 PARAMETER Experiment Name: At_Roots__P Parameter: Organism Value: A. thaliana
  misc_feature: MA Experiment 20000439 PARAMETER Experiment Name: At_Roots__P Parameter: Tissue Value: Roots vs. Whole Plant
  misc_feature: MA Experiment ID: 20001451 Result: Up-regulated in Transcription
  misc_feature: MA Experiment 20001451 PARAMETER Experiment Name: At_Far-red-induction_P Parameter: Age (day) Value: 7
  misc_feature: MA Experiment 20001451 PARAMETER Experiment Name: At_Far-red-induction_P Parameter: Light Value: Far-red vs. White
  misc_feature: MA Experiment 20001451 PARAMETER Experiment Name: At_Far-red-induction_P Parameter: Organism Value: A. thaliana
  misc_feature: MA Experiment 20001451 PARAMETER Experiment Name: At_Far-red-induction_P Parameter: Plant Line Value: Columbia
  misc_feature: MA Experiment 20001451 PARAMETER Experiment Name: At_Far-red-induction_P Parameter: Timepoint (hr) Value: 24
  misc_feature: MA Experiment 20001451 PARAMETER Experiment Name: At_Far-red-induction_P Parameter: Tissue Value: Whole Plant
  misc_feature: MA Experiment ID: 20001555 Result: Down-regulated in Transcription
  misc_feature: MA Experiment 20001555 PARAMETER Experiment Name: At_Drought_Soil_Dry_P Parameter: Age (day) Value: 24
  misc_feature: MA Experiment 20001555 PARAMETER Experiment Name: At_Drought_Soil_Dry_P Parameter: Organism Value: A. thaliana
  misc_feature: MA Experiment 20001555 PARAMETER Experiment Name: At_Drought_Soil_Dry_P Parameter: Plant Line Value: WS
  misc_feature: MA Experiment 20001555 PARAMETER Experiment Name: At_Drought_Soil_Dry_P Parameter: Post Timepoint (hr) Value: None
  misc_feature: MA Experiment 20001555 PARAMETER Experiment Name: At_Drought_Soil_Dry_P Parameter: Post-Treatment Value: None
  misc_feature: MA Experiment 20001555 PARAMETER Experiment Name: At_Drought_Soil_Dry_P Parameter: Timepoint (day) Value: 10
  misc_feature: MA Experiment 20001555 PARAMETER Experiment Name: At_Drought_Soil_Dry_P Parameter: Treatment Value: Drought vs. No Drought
  misc_feature: MA Experiment ID: 20001556 Result: Down-regulated in Transcription
  misc_feature: MA Experiment 20001556 PARAMETER Experiment Name: At_Drought_Soil_Dry_P Parameter: Age (day) Value: 26
  misc_feature: MA Experiment 20001556 PARAMETER Experiment Name: At_Drought_Soil_Dry_P Parameter: Organism Value: A. thaliana
  misc_feature: MA Experiment 20001556 PARAMETER Experiment Name: At_Drought_Soil_Dry_P Parameter: Plant Line Value: WS
  misc_feature: MA Experiment 20001556 PARAMETER Experiment Name: At_Drought_Soil_Dry_P Parameter: Post Timepoint (hr) Value: None
  misc_feature: MA Experiment 20001556 PARAMETER Experiment Name: At_Drought_Soil_Dry_P Parameter: Post-Treatment Value: None
  misc_feature: MA Experiment 20001556 PARAMETER Experiment Name: At_Drought_Soil_Dry_P Parameter: Timepoint (day) Value: 12
  misc_feature: MA Experiment 20001556 PARAMETER Experiment Name: At_Drought_Soil_Dry_P Parameter: Treatment Value: Drought vs. No Drought
  misc_feature: MA Experiment ID: 20001557 Result: Down-regulated in Transcription
  misc_feature: MA Experiment 20001557 PARAMETER Experiment Name: At_Drought_Soil_Dry_P Parameter: Age (day) Value: 27
  misc_feature: MA Experiment 20001557 PARAMETER Experiment Name: At_Drought_Soil_Dry_P Parameter: Organism Value: A. thaliana
  misc_feature: MA Experiment 20001557 PARAMETER Experiment Name: At_Drought_Soil_Dry_P Parameter: Plant Line Value: WS
  misc_feature: MA Experiment 20001557 PARAMETER Experiment Name: At_Drought_Soil_Dry_P Parameter: Post Timepoint (hr) Value: 3
  misc_feature: MA Experiment 20001557 PARAMETER Experiment Name: At_Drought_Soil_Dry_P Parameter: Post-Treatment Value: Re-Water vs. No Drought
  misc_feature: MA Experiment 20001557 PARAMETER Experiment Name: At_Drought_Soil_Dry_P Parameter: Timepoint (day) Value: 13
  misc_feature: MA Experiment 20001557 PARAMETER Experiment Name: At_Drought_Soil_Dry_P Parameter: Treatment Value: Drought vs. No Drought
  misc_feature: MA Experiment ID: 20001559 Result: Down-regulated in Transcription
  misc_feature: MA Experiment 20001559 PARAMETER Experiment Name: At_Drought_Soil_Dry_P Parameter: Age (day) Value: 28
  misc_feature: MA Experiment 20001559 PARAMETER Experiment Name: At_Drought_Soil_Dry_P Parameter: Organism Value: A. thaliana
  misc_feature: MA Experiment 20001559 PARAMETER Experiment Name: At_Drought_Soil_Dry_P Parameter: Plant Line Value: WS
  misc_feature: MA Experiment 20001559 PARAMETER Experiment Name: At_Drought_Soil_Dry_P Parameter: Post Timepoint (hr) Value: 29
  misc_feature: MA Experiment 20001559 PARAMETER Experiment Name: At_Drought_Soil_Dry_P Parameter: Post-Treatment Value: Re-Water vs. No Drought
  misc_feature: MA Experiment 20001559 PARAMETER Experiment Name: At_Drought_Soil_Dry_P Parameter: Timepoint (day) Value: 14
  misc_feature: MA Experiment 20001559 PARAMETER Experiment Name: At_Drought_Soil_Dry_P Parameter: Treatment Value: Drought vs. No Drought
  misc_feature: MA Experiment ID: 20001904 Result: Down-regulated in Transcription
  misc_feature: MA Experiment 20001904 PARAMETER Experiment Name: At_Drought_Reproduction_P Parameter: Age (day) Value: 37
  misc_feature: MA Experiment 20001904 PARAMETER Experiment Name: At_Drought_Reproduction_P Parameter: Organism Value: A. thaliana
  misc_feature: MA Experiment 20001904 PARAMETER Experiment Name: At_Drought_Reproduction_P Parameter: Plant Line Value: WS
  misc_feature: MA Experiment 20001904 PARAMETER Experiment Name: At_Drought_Reproduction_P Parameter: Timepoint (day) Value: 7
  misc_feature: MA Experiment 20001904 PARAMETER Experiment Name: At_Drought_Reproduction_P Parameter: Tissue Value: Rosettes
  misc_feature: MA Experiment 20001904 PARAMETER Experiment Name: At_Drought_Reproduction_P Parameter: Treatment Value: Drought vs. No Drought
  misc_feature: MA Experiment ID: 20001905 Result: Down-regulated in Transcription
  misc_feature: MA Experiment 20001905 PARAMETER Experiment Name: At_Drought_Reproduction_P Parameter: Age (day) Value: 40
  misc_feature: MA Experiment 20001905 PARAMETER Experiment Name: At_Drought_Reproduction_P Parameter: Organism Value: A. thaliana
  misc_feature: MA Experiment 20001905 PARAMETER Experiment Name: At_Drought_Reproduction_P Parameter: Plant Line Value: WS
  misc_feature: MA Experiment 20001905 PARAMETER Experiment Name: At_Drought_Reproduction_P Parameter: Timepoint (day) Value: 10
  misc_feature: MA Experiment 20001905 PARAMETER Experiment Name: At_Drought_Reproduction_P Parameter: Tissue Value: Rosettes
  misc_feature: MA Experiment 20001905 PARAMETER Experiment Name: At_Drought_Reproduction_P Parameter: Treatment Value: Drought vs. No Drought
  misc_feature: MA Experiment ID: 20001906 Result: Down-regulated in Transcription
  misc_feature: MA Experiment 20001906 PARAMETER Experiment Name: At_Drought_Reproduction_P Parameter: Age (day) Value: 35
  misc_feature: MA Experiment 20001906 PARAMETER Experiment Name: At_Drought_Reproduction_P Parameter: Organism Value: A. thaliana
  misc_feature: MA Experiment 20001906 PARAMETER Experiment Name: At_Drought_Reproduction_P Parameter: Plant Line Value: WS
  misc_feature: MA Experiment 20001906 PARAMETER Experiment Name: At_Drought_Reproduction_P Parameter: Timepoint (day) Value: 5
  misc_feature: MA Experiment 20001906 PARAMETER Experiment Name: At_Drought_Reproduction_P Parameter: Tissue Value: Siliques
  misc_feature: MA Experiment 20001906 PARAMETER Experiment Name: At_Drought_Reproduction_P Parameter: Treatment Value: Drought vs. No Drought
aattacctatcttgcttcttcaatatttaatttatatttattatagcatcacttccaaaaaaaaatcagaagaagaagatagagagaaagaaagagagagatatcgacaacaacaatggaagattcaagcaaaaaaagccaaaagaagaagaagaacaaaagcaagaacaacatcccaactgtttggttctcactcaagaaatccctccactgtaaatccgaaccatctgatgtccacgacccaatatccaccactaaacagcaacaacacctctccacaatctccaccaagaaaatctccggcatatcatccggcggagccgccgtatgcggtggtggtttatcaggatgttcaagatcaatagcaaatctcaaagacgtaatccatggaagcaaaagacatttcgagaaaccaccaataagtagtcctcgttctattggaagcaatgagtttctaaatcctataactcatgaagttattcttagtaactcaacttgtgagcttaagatcactggtgtcggagacatggcttcacctgtcggagcagcggattccggcggaggtggcggtggaggaaatggtcggtctacgacttatgtagggatgcttagaccaggaacaccgatgcattatcttaaccattcagcttcttacaggagccaaacaagaaagggttcgtttgctttgtcggagagagatcgaggaggaggaggaggaggagaagggttagggtttcatacaaacagaagggtttcattggagatgaacagagaatccaccattaatggaggcaacaattcctctgtttcttgtcataaatgtggtgaacagttcaataagcttgaagctgctgaagctcatcatctctctaaacatgccgtaacggagcttgtagaaggagattcatcaagaaaaatagtggagataatctgcagaacaagctggttaaagtcagagaaccaatgtggaagaatcgatagagttttaaaagtacacaacatgcagaagacattagctagattcgaggaatacagagaaacagttaaaatcagagcaagcaaacttcagaagaagcatccaagatgtctcgcagacggtaacgagctacttaggttccacggaaccaccgtggcttgtggtttaggtataaacgggtcaacaagtgtttgcacggcggagaaatgttgtgtctgtcggattatacgaaacgggttctcgtcgaaacgggagaagaataatggggttggtgttttcacggcgtctactagtggaagagcgttcgagtcgattttggttaacggtggagatgagagtggagatgttgatcggacggtgaggaaagtgttgattgtgtgtagggttatcgccggaagagttcatcggccggtggagaatgtggaggagatgaatgggttgatgagtgggtttgattctttggctggcaaagttggtttgtatacaaatgtggaggagctttatttgcttaatcctaaagctttgcttccttgctttgtggtcatttgcaagccctaaaacatttagcatgttggggaaaaagattgaattttcttttgttgataaatttatgtatcgtataatgagaattgaaatcaataggt

SEQ ID NO: 42383 - protein, 472 aa, Arabidopsis thaliana
  peptide (1)..(472): Ceres Seq. ID no. 15221122
  misc_feature (231)..(254): Pfam Name: Zinc finger, C2H2 type Pfam Description: Zinc finger, C2H2 type
  misc_feature (231)..(254): Pfam Name: Zinc finger, C2H2 type Pfam Description: Zinc finger, C2H2 type
  misc_feature (232)..(471): Homolog of NCBI NO: 15222333 NR Description: expressed protein [Arabidopsis thaliana]
  misc_feature (232)..(471): Homolog of NCBI NO: 15220992 NR Description: reverse transcriptase-related [Arabidopsis
  misc_feature (177)..(469): Homolog of NCBI NO: 38345520 NR Description: OSJNBa0039K24.23 [Oryza sativa (japonica
  misc_feature (232)..(471): Homolog of NCBI NO: 9802582 NR Description: T2E6.3 [Arabidopsis thaliana]
  misc_feature (177)..(469): Homolog of NCBI NO: 5777616 NR Description: CAA30374.1 protein [Oryza sativa]
  misc_feature (232)..(471): Homolog of NCBI NO: 15222333 NR Description: expressed protein [Arabidopsis thaliana]
  misc_feature (177)..(469): Homolog of NCBI NO: 38345520 NR Description: OSJNBa0039K24.23 [Oryza sativa (japonica
  misc_feature (177)..(469): Homolog of NCBI NO: 5777616 NR Description: CAA30374.1 protein [Oryza sativa]
  misc_feature (1)..(472): Homolog of NCBI NO: 15239695 NR Description: expressed protein [Arabidopsis thaliana]
  misc_feature (158)..(472): Homolog of NCBI NO: 18416951 NR Description: expressed protein [Arabidopsis thaliana]
  misc_feature (1)..(136): Homolog of NCBI NO: 18416951 NR Description: expressed protein [Arabidopsis thaliana]
  misc_feature (21)..(471): Homolog of NCBI NO: 34910152 NR Description: B1070A12.19 [Oryza sativa (japonica
  misc_feature (231)..(472): Homolog of NCBI NO: 15220394 NR Description: hypothetical protein [Arabidopsis thaliana]
  misc_feature (232)..(471): Homolog of NCBI NO: 9802582 NR Description: T2E6.3 [Arabidopsis thaliana]
  misc_feature (232)..(471): Homolog of NCBI NO: 15220992 NR Description: reverse transcriptase-related [Arabidopsis
  misc_feature (231)..(472): Homolog of NCBI NO: 15220394 NR Description: hypothetical protein [Arabidopsis thaliana]
  misc_feature (21)..(471): Homolog of NCBI NO: 34910152 NR Description: B1070A12.19 [Oryza sativa (japonica
  misc_feature (1)..(136): Homolog of NCBI NO: 18416951 NR Description: expressed protein [Arabidopsis thaliana]
  misc_feature (158)..(472): Homolog of NCBI NO: 18416951 NR Description: expressed protein [Arabidopsis thaliana]
  misc_feature (1)..(472): Homolog of NCBI NO: 15239695 NR Description: expressed protein [Arabidopsis thaliana]
MEDSSKKSQKKKKNKSKNNIPTVWFSLKKSLHCKSEPSDVHDPISTTKQQQHLSTISTKKISGISSGGAAVCGGGLSGCSRSIANLKDVIHGSKRHFEKPPISSPRSIGSNEFLNPITHEVILSNSTCELKITGVGDMASPVGAADSGGGGGGGNGRSTTYVGMLRPGTPMHYLNHSASYRSQTRKGSFALSERDRGGGGGGEGLGFHTNRRVSLEMNRESTINGGNNSSVSCHKCGEQFNKLEAAEAHHLSKHAVTELVEGDSSRKIVEIICRTSWLKSENQCGRIDRVLKVHNMQKTLARFEEYRETVKIRASKLQKKHPRCLADGNELLRFHGTTVACGLGINGSTSVCTAEKCCVCRIIRNGFSSKREKNNGVGVFTASTSGRAFESILVNGGDESGDVDRTVRKVLIVCRVIAGRVHRPVENVEEMNGLMSGFDSLAGKVGLYTNVEELYLLNPKALLPCFVVICKP

SEQ ID NO: 42384 - protein, 335 aa, Arabidopsis thaliana
  peptide (1)..(335): Ceres Seq. ID no. 15221123
  misc_feature (94)..(117): Pfam Name: Zinc finger, C2H2 type Pfam Description: Zinc finger, C2H2 type
  misc_feature (94)..(117): Pfam Name: Zinc finger, C2H2 type Pfam Description: Zinc finger, C2H2 type
  misc_feature (94)..(308): Homolog of NCBI NO: 6554199 NR Description: T23J18.16 [Arabidopsis thaliana]
  misc_feature (95)..(334): Homolog of NCBI NO: 15222333 NR Description: expressed protein [Arabidopsis thaliana]
  misc_feature (95)..(334): Homolog of NCBI NO: 15220992 NR Description: reverse transcriptase-related [Arabidopsis
  misc_feature (40)..(332): Homolog of NCBI NO: 38345520 NR Description: OSJNBa0039K24.23 [Oryza sativa (japonica
  misc_feature (95)..(334): Homolog of NCBI NO: 9802582 NR Description: T2E6.3 [Arabidopsis thaliana]
  misc_feature (94)..(308): Homolog of NCBI NO: 6554199 NR Description: T23J18.16 [Arabidopsis thaliana]
  misc_feature (95)..(334): Homolog of NCBI NO: 15220992 NR Description: reverse transcriptase-related [Arabidopsis
  misc_feature (95)..(334): Homolog of NCBI NO: 9802582 NR Description: T2E6.3 [Arabidopsis thaliana]
  misc_feature (1)..(335): Homolog of NCBI NO: 15239695 NR Description: expressed protein [Arabidopsis thaliana]
  misc_feature (21)..(335): Homolog of NCBI NO: 18416951 NR Description: expressed protein [Arabidopsis thaliana]
  misc_feature (1)..(334): Homolog of NCBI NO: 34910152 NR Description: B1070A12.19 [Oryza sativa (japonica
  misc_feature (94)..(335): Homolog of NCBI NO: 15220394 NR Description: hypothetical protein [Arabidopsis thaliana]
  misc_feature (40)..(332): Homolog of NCBI NO: 5777616 NR Description: CAA30374.1 protein [Oryza sativa]
  misc_feature (40)..(332): Homolog of NCBI NO: 38345520 NR Description: OSJNBa0039K24.23 [Oryza sativa (japonica
  misc_feature (95)..(334): Homolog of NCBI NO: 15222333 NR Description: expressed protein [Arabidopsis thaliana]
  misc_feature (40)..(332): Homolog of NCBI NO: 5777616 NR Description: CAA30374.1 protein [Oryza sativa]
  misc_feature (94)..(335): Homolog of NCBI NO: 15220394 NR Description: hypothetical protein [Arabidopsis thaliana]
  misc_feature (1)..(334): Homolog of NCBI NO: 34910152 NR Description: B1070A12.19 [Oryza sativa (japonica
  misc_feature (21)..(335): Homolog of NCBI NO: 18416951 NR Description: expressed protein [Arabidopsis thaliana]
  misc_feature (1)..(335): Homolog of NCBI NO: 15239695 NR Description: expressed protein [Arabidopsis thaliana]
MASPVGAADSGGGGGGGNGRSTTYVGMLRPGTPMHYLNHSASYRSQTRKGSFALSERDRGGGGGGEGLGFHTNRRVSLEMNRESTINGGNNSSVSCHKCGEQFNKLEAAEAHHLSKHAVTELVEGDSSRKIVEIICRTSWLKSENQCGRIDRVLKVHNMQKTLARFEEYRETVKIRASKLQKKHPRCLADGNELLRFHGTTVACGLGINGSTSVCTAEKCCVCRIIRNGFSSKREKNNGVGVFTASTSGRAFESILVNGGDESGDVDRTVRKVLIVCRVIAGRVHRPVENVEEMNGLMSGFDSLAGKVGLYTNVEELYLLNPKALLPCFVVICKP

SEQ ID NO: 42385 - protein, 309 aa, Arabidopsis thaliana
  peptide (1)..(309): Ceres Seq. ID no. 15221124
  misc_feature (68)..(91): Pfam Name: Zinc finger, C2H2 type Pfam Description: Zinc finger, C2H2 type
  misc_feature (68)..(91): Pfam Name: Zinc finger, C2H2 type Pfam Description: Zinc finger, C2H2 type
  misc_feature (68)..(282): Homolog of NCBI NO: 6554199 NR Description: T23J18.16 [Arabidopsis thaliana]
  misc_feature (69)..(308): Homolog of NCBI NO: 15222333 NR Description: expressed protein [Arabidopsis thaliana]
  misc_feature (69)..(308): Homolog of NCBI NO: 15220992 NR Description: reverse transcriptase-related [Arabidopsis
  misc_feature (14)..(306): Homolog of NCBI NO: 38345520 NR Description: OSJNBa0039K24.23 [Oryza sativa (japonica
  misc_feature (69)..(308): Homolog of NCBI NO: 9802582 NR Description: T2E6.3 [Arabidopsis thaliana]
  misc_feature (68)..(282): Homolog of NCBI NO: 6554199 NR Description: T23J18.16 [Arabidopsis thaliana]
  misc_feature (69)..(308): Homolog of NCBI NO: 15220992 NR Description: reverse transcriptase-related [Arabidopsis
  misc_feature (69)..(308): Homolog of NCBI NO: 9802582 NR Description: T2E6.3 [Arabidopsis thaliana]
  misc_feature (1)..(309): Homolog of NCBI NO: 15239695 NR Description: expressed protein [Arabidopsis thaliana]
  misc_feature (1)..(309): Homolog of NCBI NO: 18416951 NR Description: expressed protein [Arabidopsis thaliana]
  misc_feature (1)..(308): Homolog of NCBI NO: 34910152 NR Description: B1070A12.19 [Oryza sativa (japonica
  misc_feature (68)..(309): Homolog of NCBI NO: 15220394 NR Description: hypothetical protein [Arabidopsis thaliana]
  misc_feature (14)..(306): Homolog of NCBI NO: 5777616 NR Description: CAA30374.1 protein [Oryza sativa]
  misc_feature (14)..(306): Homolog of NCBI NO: 38345520 NR Description: OSJNBa0039K24.23 [Oryza sativa (japonica
  misc_feature (69)..(308): Homolog of NCBI NO: 15222333 NR Description: expressed protein [Arabidopsis thaliana]
  misc_feature (14)..(306): Homolog of NCBI NO: 5777616 NR Description: CAA30374.1 protein [Oryza sativa]
  misc_feature (68)..(309): Homolog of NCBI NO: 15220394 NR Description: hypothetical protein [Arabidopsis thaliana]
  misc_feature (1)..(308): Homolog of NCBI NO: 34910152 NR Description: B1070A12.19 [Oryza sativa (japonica
  misc_feature (1)..(309): Homolog of NCBI NO: 18416951 NR Description: expressed protein [Arabidopsis thaliana]
  misc_feature (1)..(309): Homolog of NCBI NO: 15239695 NR Description: expressed protein [Arabidopsis thaliana]
MLRPGTPMHYLNHSASYRSQTRKGSFALSERDRGGGGGGEGLGFHTNRRVSLEMNRESTINGGNNSSVSCHKCGEQFNKLEAAEAHHLSKHAVTELVEGDSSRKIVEIICRTSWLKSENQCGRIDRVLKVHNMQKTLARFEEYRETVKIRASKLQKKHPRCLADGNELLRFHGTTVACGLGINGSTSVCTAEKCCVCRIIRNGFSSKREKNNGVGVFTASTSGRAFESILVNGGDESGDVDRTVRKVLIVCRVIAGRVHRPVENVEEMNGLMSGFDSLAGKVGLYTNVEELYLLNPKALLPCFVVICKP

SEQ ID NO: 42386 - DNA, 1213 bp, Arabidopsis thaliana; identical to SEQ ID NO: 35540
  misc_feature (1)..(1213): Ceres Seq. ID no. 13647078
  misc_feature: MA Experiment ID: 108434 Result: Down-regulated in Transcription
  misc_feature: MA Experiment 108434 PARAMETER Experiment Name: At_Root_Tips_cDNA_P Parameter: Tissue Value: Root Tips
  misc_feature: MA Experiment ID: 108435 Result: Up-regulated in Transcription
  misc_feature: MA Experiment 108435 PARAMETER Experiment Name: At_stm_Mutants_cDNA_P Parameter: Plant Line Value: wt Landsburg vs stm
  misc_feature: MA Experiment 108435 PARAMETER Experiment Name: At_stm_Mutants_cDNA_P Parameter: Tissue Value: Shoot Apical Meristem Region
  misc_feature: MA Experiment ID: 108461 Result: Up-regulated in Transcription
  misc_feature: MA Experiment 108461 PARAMETER Experiment Name: At_Germinating_Seeds_cDNA_P Parameter: Age (day) Value: 1 vs. 0
  misc_feature: MA Experiment 108461 PARAMETER Experiment Name: At_Germinating_Seeds_cDNA_P Parameter: Tissue Value: Germinating Seeds
  misc_feature: MA Experiment ID: 108462 Result: Up-regulated in Transcription
  misc_feature: MA Experiment 108462 PARAMETER Experiment Name: At_Germinating_Seeds_cDNA_P Parameter: Age (day) Value: 2 vs. 0
  misc_feature: MA Experiment 108462 PARAMETER Experiment Name: At_Germinating_Seeds_cDNA_P Parameter: Tissue Value: Germinating Seeds
  misc_feature: MA Experiment ID: 108463 Result: Up-regulated in Transcription
  misc_feature: MA Experiment 108463 PARAMETER Experiment Name: At_Germinating_Seeds_cDNA_P Parameter: Age (day) Value: 3 vs. 0
  misc_feature: MA Experiment 108463 PARAMETER Experiment Name: At_Germinating_Seeds_cDNA_P Parameter: Tissue Value: Germinating Seeds
  misc_feature: MA Experiment ID: 108473 Result: Up-regulated in Transcription
  misc_feature: MA Experiment 108473 PARAMETER Experiment Name: At_Drought_Flowers_cDNA_P Parameter: Timepoint (hr) Value: 7 d
  misc_feature: MA Experiment 108473 PARAMETER Experiment Name: At_Drought_Flowers_cDNA_P Parameter: Tissue Value: Flower
  misc_feature: MA Experiment 108473 PARAMETER Experiment Name: At_Drought_Flowers_cDNA_P Parameter: Treatment Value: Drought vs. No Drought
  misc_feature: MA Experiment ID: 108474 Result: Up-regulated in Transcription
  misc_feature: MA Experiment 108474 PARAMETER Experiment Name: At_Drought_Flowers_cDNA_P Parameter: Timepoint (hr) Value: null
  misc_feature: MA Experiment 108474 PARAMETER Experiment Name: At_Drought_Flowers_cDNA_P Parameter: Treatment Value: Drought vs. No Drought
  misc_feature: MA Experiment ID: 108488 Result: Up-regulated in Transcription
  misc_feature: MA Experiment ID: 108489 Result: Up-regulated in Transcription
  misc_feature: MA Experiment ID: 108501 Result: Up-regulated in Transcription
  misc_feature: MA Experiment 108501 PARAMETER Experiment Name: At_ap2_floral_buds_cDNA_P Parameter: Plant Line Value: ap2 (Ler.)
  misc_feature: MA Experiment 108501 PARAMETER Experiment Name: At_ap2_floral_buds_cDNA_P Parameter: Tissue Value: Closed Flower
  misc_feature: MA Experiment ID: 108594 Result: Down-regulated in Transcription
  misc_feature: MA Experiment 108594 PARAMETER Experiment Name: At_Ler-rhl_Root_cDNA_P Parameter: Plant Line Value: null
  misc_feature: MA Experiment ID: 108605 Result: Up-regulated in Transcription
  misc_feature: MA Experiment 108605 PARAMETER Experiment Name: At_100uM_ABA_cDNA_P Parameter: Timepoint (hr) Value: 6
  misc_feature: MA Experiment 108605 PARAMETER Experiment Name: At_100uM_ABA_cDNA_P Parameter: Tissue Value: Aerial
  misc_feature: MA Experiment 108605 PARAMETER Experiment Name: At_100uM_ABA_cDNA_P Parameter: Treatment Value: 100uM ABA vs. No Treatment
  misc_feature: MA Experiment ID: 108607 Result: Up-regulated in Transcription
  misc_feature: MA Experiment 108607 PARAMETER Experiment Name: At_100uM_ABA_cDNA_P Parameter: Timepoint (hr) Value: 4
  misc_feature: MA Experiment 108607 PARAMETER Experiment Name: At_100uM_ABA_cDNA_P Parameter: Tissue Value: Aerial
  misc_feature: MA Experiment 108607 PARAMETER Experiment Name: At_100uM_ABA_cDNA_P Parameter: Treatment Value: 100uM ABA vs. No Treatment
  misc_feature: MA Experiment ID: 108609 Result: Up-regulated in Transcription
  misc_feature: MA Experiment 108609 PARAMETER Experiment Name: At_100uM_ABA_cDNA_P Parameter: Timepoint (hr) Value: 24
  misc_feature: MA Experiment 108609 PARAMETER Experiment Name: At_100uM_ABA_cDNA_P Parameter: Tissue Value: Aerial
  misc_feature: MA Experiment 108609 PARAMETER Experiment Name: At_100uM_ABA_cDNA_P Parameter: Treatment Value: 100uM ABA vs. No Treatment
  misc_feature: MA Experiment ID: 20000070 Result: Up-regulated in Transcription
  misc_feature: MA Experiment 20000070 PARAMETER Experiment Name: At_100uM_ABA_Mutants_cDNA_P Parameter: Plant Line Value: CS24
  misc_feature: MA Experiment 20000070 PARAMETER Experiment Name: At_100uM_ABA_Mutants_cDNA_P Parameter: Timepoint (hr) Value: 6
  misc_feature: MA Experiment 20000070 PARAMETER Experiment Name: At_100uM_ABA_Mutants_cDNA_P Parameter: Tissue Value: Aerial
  misc_feature: MA Experiment 20000070 PARAMETER Experiment Name: At_100uM_ABA_Mutants_cDNA_P Parameter: Treatment Value: 100uM ABA vs. No Treatment
  misc_feature: MA Experiment ID: 20000071 Result: Up-regulated in Transcription
  misc_feature: MA Experiment 20000071 PARAMETER Experiment Name: At_100uM_ABA_Mutants_cDNA_P Parameter: Plant Line Value: CS8104
  misc_feature: MA Experiment 20000071 PARAMETER Experiment Name: At_100uM_ABA_Mutants_cDNA_P Parameter: Timepoint (hr) Value: 6
  misc_feature: MA Experiment 20000071 PARAMETER Experiment Name: At_100uM_ABA_Mutants_cDNA_P Parameter: Tissue Value: Aerial
  misc_feature: MA Experiment 20000071 PARAMETER Experiment Name: At_100uM_ABA_Mutants_cDNA_P Parameter: Treatment Value: 100uM ABA vs. No Treatment
  misc_feature: MA Experiment ID: 20000072 Result: Up-regulated in Transcription
  misc_feature: MA Experiment 20000072 PARAMETER Experiment Name: At_100uM_ABA_Mutants_cDNA_P Parameter: Plant Line Value: CS8105
  misc_feature: MA Experiment 20000072 PARAMETER Experiment Name: At_100uM_ABA_Mutants_cDNA_P Parameter: Timepoint (hr) Value: 6
  misc_feature: MA Experiment 20000072 PARAMETER Experiment Name: At_100uM_ABA_Mutants_cDNA_P Parameter: Tissue Value: Aerial
  misc_feature: MA Experiment 20000072 PARAMETER Experiment Name: At_100uM_ABA_Mutants_cDNA_P Parameter: Treatment Value: 100uM ABA vs. No Treatment
  misc_feature: MA Experiment ID: 20000086 Result: Up-regulated in Transcription
  misc_feature: MA Experiment 20000086 PARAMETER Experiment Name: At_100uM_ABA_Mutants_cDNA_P Parameter: Plant Line Value: CS22
  misc_feature: MA Experiment 20000086 PARAMETER Experiment Name: At_100uM_ABA_Mutants_cDNA_P Parameter: Timepoint (hr) Value: 6
  misc_feature: MA Experiment 20000086 PARAMETER Experiment Name: At_100uM_ABA_Mutants_cDNA_P Parameter: Tissue Value: Aerial
  misc_feature: MA Experiment 20000086 PARAMETER Experiment Name: At_100uM_ABA_Mutants_cDNA_P Parameter: Treatment Value: 100uM ABA vs. No Treatment
  misc_feature: MA Experiment ID: 20000087 Result: Up-regulated in Transcription
  misc_feature: MA Experiment 20000087 PARAMETER Experiment Name: At_100uM_ABA_Mutants_cDNA_P Parameter: Plant Line Value: WS
  misc_feature: MA Experiment 20000087 PARAMETER Experiment Name: At_100uM_ABA_Mutants_cDNA_P Parameter: Timepoint (hr) Value: 6
  misc_feature: MA Experiment 20000087 PARAMETER Experiment Name: At_100uM_ABA_Mutants_cDNA_P Parameter: Tissue Value: Aerial
  misc_feature: MA Experiment 20000087 PARAMETER Experiment Name: At_100uM_ABA_Mutants_cDNA_P Parameter: Treatment Value: 100uM ABA vs. No Treatment
  misc_feature: MA Experiment ID: 20000088 Result: Up-regulated in Transcription
  misc_feature: MA Experiment 20000088 PARAMETER Experiment Name: At_100uM_ABA_Mutants_cDNA_P Parameter: Plant Line Value: Landsberg
  misc_feature: MA Experiment 20000088 PARAMETER Experiment Name: At_100uM_ABA_Mutants_cDNA_P Parameter: Timepoint (hr) Value: 6
  misc_feature: MA Experiment 20000088 PARAMETER Experiment Name: At_100uM_ABA_Mutants_cDNA_P Parameter: Tissue Value: Aerial
  misc_feature: MA Experiment 20000088 PARAMETER Experiment Name: At_100uM_ABA_Mutants_cDNA_P Parameter: Treatment Value: 100uM ABA vs. No Treatment
  misc_feature: MA Experiment ID: 20000090 Result: Up-regulated in Transcription
  misc_feature: MA Experiment ID: 20000117 Result: Up-regulated in Transcription
  misc_feature: MA Experiment 20000117 PARAMETER Experiment Name: At_100uM_ABA_Mutants_cDNA_P Parameter: Plant Line Value: Columbia
  misc_feature: MA Experiment 20000117 PARAMETER Experiment Name: At_100uM_ABA_Mutants_cDNA_P Parameter: Timepoint (hr) Value: 6
  misc_feature: MA Experiment 20000117 PARAMETER Experiment Name: At_100uM_ABA_Mutants_cDNA_P Parameter: Tissue Value: Aerial
  misc_feature: MA Experiment 20000117 PARAMETER Experiment Name: At_100uM_ABA_Mutants_cDNA_P Parameter: Treatment Value: 100uM ABA vs. No Treatment
  misc_feature: MA Experiment ID: 20000169 Result: Up-regulated in Transcription
  misc_feature: MA Experiment 20000169 PARAMETER Experiment Name: At_100uM_ABA_P Parameter: Age (day) Value: 14
  misc_feature: MA Experiment 20000169 PARAMETER Experiment Name: At_100uM_ABA_P Parameter: Organism Value: A. thaliana
  misc_feature: MA Experiment 20000169 PARAMETER Experiment Name: At_100uM_ABA_P Parameter: Plant Line Value: WS
  misc_feature: MA Experiment 20000169 PARAMETER Experiment Name: At_100uM_ABA_P Parameter: Timepoint (hr) Value: 6
  misc_feature: MA Experiment 20000169 PARAMETER Experiment Name: At_100uM_ABA_P Parameter: Tissue Value: Aerial
  misc_feature: MA Experiment 20000169 PARAMETER Experiment Name: At_100uM_ABA_P Parameter: Treatment Value: 100uM ABA vs. No Treatment
  misc_feature: MA Experiment ID: 20000180 Result: Up-regulated in Transcription
  misc_feature: MA Experiment 20000180 PARAMETER Experiment Name: At_Germinating_Seeds_P Parameter: Age (hr) Value: 24 vs. 0
  misc_feature: MA Experiment 20000180 PARAMETER Experiment Name: At_Germinating_Seeds_P Parameter: Tissue Value: Germinating Seeds
  misc_feature: MA Experiment ID: 20000185 Result: Up-regulated in Transcription
  misc_feature: MA Experiment 20000185 PARAMETER Experiment Name: At_Roots__P Parameter: Age (day) Value: 7 vs. 21
  misc_feature: MA Experiment 20000185 PARAMETER Experiment Name: At_Roots__P Parameter: Organism Value: A. thaliana
  misc_feature: MA Experiment 20000185 PARAMETER Experiment Name: At_Roots__P Parameter: Tissue Value: Roots vs. Whole Plant
  misc_feature: MA Experiment ID: 20000234 Result: Down-regulated in Transcription
  misc_feature: MA Experiment 20000234 PARAMETER Experiment Name: At_Siliques_P Parameter: Age (day) Value: 21
  misc_feature: MA Experiment 20000234 PARAMETER Experiment Name: At_Siliques_P Parameter: Organism Value: A. thaliana
  misc_feature: MA Experiment 20000234 PARAMETER Experiment Name: At_Siliques_P Parameter: Plant Line Value: WS
  misc_feature: MA Experiment 20000234 PARAMETER Experiment Name: At_Siliques_P Parameter: Tissue Value: Less Than 5mm Siliques vs. Whole Plant
  misc_feature: MA Experiment ID: 20000264 Result: Down-regulated in Transcription
  misc_feature: MA Experiment 20000264 PARAMETER Experiment Name: At_Open_Flower_P Parameter: Age (day) Value: 21
  misc_feature: MA Experiment 20000264 PARAMETER Experiment Name: At_Open_Flower_P Parameter: Plant Line Value: WS
  misc_feature: MA Experiment 20000264 PARAMETER Experiment Name: At_Open_Flower_P Parameter: Tissue Value: Open Flower vs. Whole Plant
  misc_feature: MA Experiment ID: 20000265 Result: Down-regulated in Transcription
  misc_feature: MA Experiment 20000265 PARAMETER Experiment Name: At_Open_Flower_P Parameter: Age (day) Value: 21
  misc_feature: MA Experiment 20000265 PARAMETER Experiment Name: At_Open_Flower_P Parameter: Plant Line Value: WS
  misc_feature: MA Experiment 20000265 PARAMETER Experiment Name: At_Open_Flower_P Parameter: Tissue Value: Closed Flower vs. Whole Plant
  misc_feature: MA Experiment ID: 20000267 Result: Up-regulated in Transcription
  misc_feature: MA Experiment 20000267 PARAMETER Experiment Name: At_Drought_P Parameter: Age (day) Value: 7
  misc_feature: MA Experiment 20000267 PARAMETER Experiment Name: At_Drought_P Parameter: Organism Value: A. thaliana
  misc_feature: MA Experiment 20000267 PARAMETER Experiment Name: At_Drought_P Parameter: Plant Line Value: WS
  misc_feature: MA Experiment 20000267 PARAMETER Experiment Name: At_Drought_P Parameter: Timepoint (hr) Value: 6
  misc_feature: MA Experiment 20000267 PARAMETER Experiment Name: At_Drought_P Parameter: Tissue Value: Whole Plant
  misc_feature: MA Experiment 20000267 PARAMETER Experiment Name: At_Drought_P Parameter: Treatment Value: Drought vs. No Drought
  misc_feature: MA Experiment ID: 20000268 Result: Up-regulated in Transcription
  misc_feature: MA Experiment 20000268 PARAMETER Experiment Name: At_100mM_NaCl__P Parameter: Age (day) Value: 14
  misc_feature: MA Experiment 20000268 PARAMETER Experiment Name: At_100mM_NaCl__P Parameter: Organism Value: A. thaliana
  misc_feature: MA Experiment 20000268 PARAMETER Experiment Name: At_100mM_NaCl__P Parameter: Plant Line Value: WS
  misc_feature: MA Experiment 20000268 PARAMETER Experiment Name: At_100mM_NaCl__P Parameter: Timepoint (hr) Value: 6
  misc_feature: MA Experiment 20000268 PARAMETER Experiment Name: At_100mM_NaCl__P Parameter: Tissue Value: Whole Plant
  misc_feature: MA Experiment 20000268 PARAMETER Experiment Name: At_100mM_NaCl__P Parameter: Treatment Value: 100mM NaCl vs. No Treatment
  misc_feature: MA Experiment ID: 20000286 Result: Down-regulated in Transcription
  misc_feature: MA Experiment 20000286 PARAMETER Experiment Name: At_Open_Flower_P Parameter: Age (day) Value: 21
  misc_feature: MA Experiment 20000286 PARAMETER Experiment Name: At_Open_Flower_P Parameter: Plant Line Value: WS
  misc_feature: MA Experiment 20000286 PARAMETER Experiment Name: At_Open_Flower_P Parameter: Tissue Value: Half Open vs. Whole Plant
  misc_feature: MA Experiment ID: 20000308 Result: Up-regulated in Transcription
  misc_feature: MA Experiment 20000308 PARAMETER Experiment Name: At_100mM_NaCl__P Parameter: Age (day) Value: 17
  misc_feature: MA Experiment 20000308 PARAMETER Experiment Name: At_100mM_NaCl__P Parameter: Organism Value: A. thaliana
  misc_feature: MA Experiment 20000308 PARAMETER Experiment Name: At_100mM_NaCl__P Parameter: Plant Line Value: WS
  misc_feature: MA Experiment 20000308 PARAMETER Experiment Name: At_100mM_NaCl__P Parameter: Timepoint (hr) Value: 72
  misc_feature: MA Experiment 20000308 PARAMETER Experiment Name: At_100mM_NaCl__P Parameter: Tissue Value: Whole Plant
  misc_feature: MA Experiment 20000308 PARAMETER Experiment Name: At_100mM_NaCl__P Parameter: Treatment Value: 100mM NaCl vs. No Treatment
  misc_feature: MA Experiment ID: 20000437 Result: Up-regulated in Transcription
  misc_feature: MA Experiment 20000437 PARAMETER Experiment Name: At_Drought_P Parameter: Age (day) Value: 8
  misc_feature: MA Experiment 20000437 PARAMETER Experiment Name: At_Drought_P Parameter: Organism Value: A. thaliana
  misc_feature: MA Experiment 20000437 PARAMETER Experiment Name: At_Drought_P Parameter: Plant Line Value: WS
  misc_feature: MA Experiment 20000437 PARAMETER Experiment Name: At_Drought_P Parameter: Timepoint (hr) Value: 24
  misc_feature: MA Experiment 20000437 PARAMETER Experiment Name: At_Drought_P Parameter: Tissue Value: Whole Plant
  misc_feature: MA Experiment 20000437 PARAMETER Experiment Name: At_Drought_P Parameter: Treatment Value: Drought vs. No Drought
  misc_feature: MA Experiment ID: 20000441 Result: Down-regulated in Transcription
  misc_feature: MA Experiment 20000441 PARAMETER Experiment Name: At_1uM_BR-BRZ__P Parameter: Tissue Value: Shoot Apices
  misc_feature: MA Experiment 20000441 PARAMETER Experiment Name: At_1uM_BR-BRZ__P Parameter: Treatment Value: 1uM BR vs. No Treatment
  misc_feature: MA Experiment ID: 20000451 Result: Up-regulated in Transcription
  misc_feature: MA Experiment 20000451 PARAMETER Experiment Name: At_CS6879_Shoots-Roots_P Parameter: Age (day) Value: 14
  misc_feature: MA Experiment 20000451 PARAMETER Experiment Name: At_CS6879_Shoots-Roots_P Parameter: Organism Value: A. thaliana
  misc_feature: MA Experiment 20000451 PARAMETER Experiment Name: At_CS6879_Shoots-Roots_P Parameter: Plant Line Value: CS6879 vs. WS
  misc_feature: MA Experiment 20000451 PARAMETER Experiment Name: At_CS6879_Shoots-Roots_P Parameter: Tissue Value: Roots
  misc_feature: MA Experiment ID: 20000452 Result: Up-regulated in Transcription
  misc_feature: MA Experiment 20000452 PARAMETER Experiment Name: At_CS6879_Shoots-Roots_P Parameter: Age (day) Value: 14
  misc_feature: MA Experiment 20000452 PARAMETER Experiment Name: At_CS6879_Shoots-Roots_P Parameter: Organism Value: A. thaliana
  misc_feature: MA Experiment 20000452 PARAMETER Experiment Name: At_CS6879_Shoots-Roots_P Parameter: Plant Line Value: CS6879 vs. WS
  misc_feature: MA Experiment 20000452 PARAMETER Experiment Name: At_CS6879_Shoots-Roots_P Parameter: Tissue Value: Shoots
  misc_feature: MA Experiment ID: 20000453 Result: Up-regulated in Transcription
  misc_feature: MA Experiment 20000453 PARAMETER Experiment Name: At_100uM_ABA_P Parameter: Age (day) Value: 15
  misc_feature: MA Experiment 20000453 PARAMETER Experiment Name: At_100uM_ABA_P Parameter: Organism Value: A. thaliana
  misc_feature: MA Experiment 20000453 PARAMETER Experiment Name: At_100uM_ABA_P Parameter: Plant Line Value: WS
  misc_feature: MA Experiment 20000453 PARAMETER Experiment Name: At_100uM_ABA_P Parameter: Timepoint (hr) Value: 24
  misc_feature: MA Experiment 20000453 PARAMETER Experiment Name: At_100uM_ABA_P Parameter: Tissue Value: Aerial
  misc_feature: MA Experiment 20000453 PARAMETER Experiment Name: At_100uM_ABA_P Parameter: Treatment Value: 100uM ABA vs. No Treatment
  misc_feature: MA Experiment ID: 20000455 Result: Up-regulated in Transcription
  misc_feature: MA Experiment 20000455 PARAMETER Experiment Name: At_100uM_ABA_P Parameter: Age (day) Value: 16
  misc_feature: MA Experiment 20000455 PARAMETER Experiment Name: At_100uM_ABA_P Parameter: Organism Value: A. thaliana
  misc_feature: MA Experiment 20000455 PARAMETER Experiment Name: At_100uM_ABA_P Parameter: Plant Line Value: WS
  misc_feature: MA Experiment 20000455 PARAMETER Experiment Name: At_100uM_ABA_P Parameter: Timepoint (hr) Value: 48
  misc_feature: MA Experiment 20000455 PARAMETER Experiment Name: At_100uM_ABA_P Parameter: Tissue Value: Aerial
  misc_feature: MA Experiment 20000455 PARAMETER Experiment Name: At_100uM_ABA_P Parameter: Treatment Value: 100uM ABA vs. No Treatment
  misc_feature: MA Experiment ID: 20000794 Result: Down-regulated in Transcription
  misc_feature: MA Experiment 20000794 PARAMETER Experiment Name: At_Petals_P Parameter: Age (day) Value: 23-25 days
  misc_feature: MA Experiment 20000794 PARAMETER Experiment Name: At_Petals_P Parameter: Plant Line Value: WS
  misc_feature: MA Experiment 20000794 PARAMETER Experiment Name: At_Petals_P Parameter: Tissue Value: Petals vs. Whole plant
  misc_feature: MA Experiment ID: 20001554 Result: Up-regulated in Transcription
  misc_feature: MA Experiment 20001554 PARAMETER Experiment Name: At_Drought_Soil_Dry_P Parameter: Age (day) Value: 21
  misc_feature: MA Experiment 20001554 PARAMETER Experiment Name: At_Drought_Soil_Dry_P Parameter: Organism Value: A. thaliana
  misc_feature: MA Experiment 20001554 PARAMETER Experiment Name: At_Drought_Soil_Dry_P Parameter: Plant Line Value: WS
  misc_feature: MA Experiment 20001554 PARAMETER Experiment Name: At_Drought_Soil_Dry_P Parameter: Post Timepoint (hr) Value: None
  misc_feature: MA Experiment 20001554 PARAMETER Experiment Name: At_Drought_Soil_Dry_P Parameter: Post-Treatment Value: None
  misc_feature: MA Experiment 20001554 PARAMETER Experiment Name: At_Drought_Soil_Dry_P Parameter: Timepoint (day) Value: 7
  misc_feature: MA Experiment 20001554 PARAMETER Experiment Name: At_Drought_Soil_Dry_P Parameter: Treatment Value: Drought vs. No Drought
  misc_feature: MA Experiment ID: 20001555 Result: Up-regulated in Transcription
  misc_feature: MA Experiment 20001555 PARAMETER Experiment Name: At_Drought_Soil_Dry_P Parameter: Age (day) Value: 24
  misc_feature: MA Experiment 20001555 PARAMETER Experiment Name: At_Drought_Soil_Dry_P Parameter: Organism Value: A. thaliana
  misc_feature: MA Experiment 20001555 PARAMETER Experiment Name: At_Drought_Soil_Dry_P Parameter: Plant Line Value: WS
  misc_feature: MA Experiment 20001555 PARAMETER Experiment Name: At_Drought_Soil_Dry_P Parameter: Post Timepoint (hr) Value: None
  misc_feature: MA Experiment 20001555 PARAMETER Experiment Name: At_Drought_Soil_Dry_P Parameter: Post-Treatment Value: None
  misc_feature: MA Experiment 20001555 PARAMETER Experiment Name: At_Drought_Soil_Dry_P Parameter: Timepoint (day) Value: 10
  misc_feature: MA Experiment 20001555 PARAMETER Experiment Name: At_Drought_Soil_Dry_P Parameter: Treatment Value: Drought vs. No Drought
  misc_feature: MA Experiment ID: 20001556 Result: Up-regulated in Transcription
  misc_feature: MA Experiment 20001556 PARAMETER Experiment Name: At_Drought_Soil_Dry_P Parameter: Age (day) Value: 26
  misc_feature: MA Experiment 20001556 PARAMETER Experiment Name: At_Drought_Soil_Dry_P Parameter: Organism Value: A. thaliana
  misc_feature: MA Experiment 20001556 PARAMETER Experiment Name: At_Drought_Soil_Dry_P Parameter: Plant Line Value: WS
  misc_feature: MA Experiment 20001556 PARAMETER Experiment Name: At_Drought_Soil_Dry_P Parameter: Post Timepoint (hr) Value: None
  misc_feature: MA Experiment 20001556 PARAMETER Experiment Name: At_Drought_Soil_Dry_P Parameter: Post-Treatment Value: None
  misc_feature: MA Experiment 20001556 PARAMETER Experiment Name: At_Drought_Soil_Dry_P Parameter: Timepoint (day) Value: 12
  misc_feature: MA Experiment 20001556 PARAMETER Experiment Name: At_Drought_Soil_Dry_P Parameter: Treatment Value: Drought vs. No Drought
  misc_feature: MA Experiment ID: 20001559 Result: Up-regulated in Transcription
  misc_feature: MA Experiment 20001559 PARAMETER Experiment Name: At_Drought_Soil_Dry_P Parameter: Age (day) Value: 28
  misc_feature: MA Experiment 20001559 PARAMETER Experiment Name: At_Drought_Soil_Dry_P Parameter: Organism Value: A. thaliana
  misc_feature: MA Experiment 20001559 PARAMETER Experiment Name: At_Drought_Soil_Dry_P Parameter: Plant Line Value: WS
  misc_feature: MA Experiment 20001559 PARAMETER Experiment Name: At_Drought_Soil_Dry_P Parameter: Post Timepoint (hr) Value: 29
  misc_feature: MA Experiment 20001559 PARAMETER Experiment Name: At_Drought_Soil_Dry_P Parameter: Post-Treatment Value: Re-Water vs. No Drought
  misc_feature: MA Experiment 20001559 PARAMETER Experiment Name: At_Drought_Soil_Dry_P Parameter: Timepoint (day) Value: 14
  misc_feature: MA Experiment 20001559 PARAMETER Experiment Name: At_Drought_Soil_Dry_P Parameter: Treatment Value: Drought vs. No Drought
  misc_feature: MA Experiment ID: 20001904 Result: Up-regulated in Transcription
  misc_feature: MA Experiment 20001904 PARAMETER Experiment Name: At_Drought_Reproduction_P Parameter: Age (day) Value: 37
  misc_feature: MA Experiment 20001904 PARAMETER Experiment Name: At_Drought_Reproduction_P Parameter: Organism Value: A. thaliana
  misc_feature: MA Experiment 20001904 PARAMETER Experiment Name: At_Drought_Reproduction_P Parameter: Plant Line Value: WS
  misc_feature: MA Experiment 20001904 PARAMETER Experiment Name: At_Drought_Reproduction_P Parameter: Timepoint (day) Value: 7
  misc_feature: MA Experiment 20001904 PARAMETER Experiment Name: At_Drought_Reproduction_P Parameter: Tissue Value: Rosettes
  misc_feature: MA Experiment 20001904 PARAMETER Experiment Name: At_Drought_Reproduction_P Parameter: Treatment Value: Drought vs. No Drought
  misc_feature: MA Experiment ID: 20001905 Result: Up-regulated in Transcription
  misc_feature: MA Experiment 20001905 PARAMETER Experiment Name: At_Drought_Reproduction_P Parameter: Age (day) Value: 40
  misc_feature: MA Experiment 20001905 PARAMETER Experiment Name: At_Drought_Reproduction_P Parameter: Organism Value: A. thaliana
  misc_feature: MA Experiment 20001905 PARAMETER Experiment Name: At_Drought_Reproduction_P Parameter: Plant Line Value: WS
  misc_feature: MA Experiment 20001905 PARAMETER Experiment Name: At_Drought_Reproduction_P Parameter: Timepoint (day) Value: 10
  misc_feature: MA Experiment 20001905 PARAMETER Experiment Name: At_Drought_Reproduction_P Parameter: Tissue Value: Rosettes
  misc_feature: MA Experiment 20001905 PARAMETER Experiment Name: At_Drought_Reproduction_P Parameter: Treatment Value: Drought vs. No Drought
  misc_feature: MA Experiment ID: 20001906 Result: Up-regulated in Transcription
  misc_feature: MA Experiment 20001906 PARAMETER Experiment Name: At_Drought_Reproduction_P Parameter: Age (day) Value: 35
  misc_feature: MA Experiment 20001906 PARAMETER Experiment Name: At_Drought_Reproduction_P Parameter: Organism Value: A. thaliana
  misc_feature: MA Experiment 20001906 PARAMETER Experiment Name: At_Drought_Reproduction_P Parameter: Plant Line Value: WS
  misc_feature: MA Experiment 20001906 PARAMETER Experiment Name: At_Drought_Reproduction_P Parameter: Timepoint (day) Value: 5
  misc_feature: MA Experiment 20001906 PARAMETER Experiment Name: At_Drought_Reproduction_P Parameter: Tissue Value: Siliques
  misc_feature: MA Experiment 20001906 PARAMETER Experiment Name: At_Drought_Reproduction_P Parameter: Treatment Value: Drought vs. No Drought
  misc_feature: MA Experiment ID: 20001910 Result: Up-regulated in Transcription
  misc_feature: MA Experiment 20001910 PARAMETER Experiment Name: At_Drought_Reproduction_P Parameter: Age (day) Value: 37
  misc_feature: MA Experiment 20001910 PARAMETER Experiment Name: At_Drought_Reproduction_P Parameter: Organism Value: A. thaliana
  misc_feature: MA Experiment 20001910 PARAMETER Experiment Name: At_Drought_Reproduction_P Parameter: Plant Line Value: WS
  misc_feature: MA Experiment 20001910 PARAMETER Experiment Name: At_Drought_Reproduction_P Parameter: Timepoint (day) Value: 7
  misc_feature: MA Experiment 20001910 PARAMETER Experiment Name: At_Drought_Reproduction_P Parameter: Tissue Value: Flowers
  misc_feature: MA Experiment 20001910 PARAMETER Experiment Name: At_Drought_Reproduction_P Parameter: Treatment Value: Drought vs. No Drought
  misc_feature: MA Experiment ID: 20001911 Result: Up-regulated in Transcription
  misc_feature: MA Experiment 20001911 PARAMETER Experiment Name: At_Drought_Reproduction_P Parameter: Age (day) Value: 40
  misc_feature: MA Experiment 20001911 PARAMETER Experiment Name: At_Drought_Reproduction_P Parameter: Organism Value: A. thaliana
  misc_feature: MA Experiment 20001911 PARAMETER Experiment Name: At_Drought_Reproduction_P Parameter: Plant Line Value: WS
  misc_feature: MA Experiment 20001911 PARAMETER Experiment Name: At_Drought_Reproduction_P Parameter: Timepoint (day) Value: 10
  misc_feature: MA Experiment 20001911 PARAMETER Experiment Name: At_Drought_Reproduction_P Parameter: Tissue Value: Flowers
  misc_feature: MA Experiment 20001911 PARAMETER Experiment Name: At_Drought_Reproduction_P Parameter: Treatment Value: Drought vs. No Drought

SEQ ID NO: 42387 - protein, 327 aa, Arabidopsis thaliana; identical to SEQ ID NO: 35541
  peptide (1)..(327): Ceres Seq. ID no. 15219131
  misc_feature (23)..(90): Pfam Name: Annexin Pfam Description: Annexin
  misc_feature (23)..(90): Pfam Name: Annexin Pfam Description: Annexin
  misc_feature (11)..(326): Homolog of NCBI NO: 12084607 NR Description: Chain A, Crystal Structure Of Annexin 24(Ca32)
  misc_feature (11)..(326): Homolog of NCBI NO: 2129923 NR Description: annexin - pepper
  misc_feature (12)..(323): Homolog of NCBI NO: 7441510 NR Description: annexin - upland cotton (fragment)
  misc_feature (11)..(327): Homolog of NCBI NO: 2459926 NR Description: annexin [Lavatera thuringiaca]
  misc_feature (12)..(323): Homolog of NCBI NO: 33357398 NR Description: Chain A, Annexin Gh1 From Cotton
  misc_feature (11)..(326): Homolog of NCBI NO: 12084607 NR Description: Chain A, Crystal Structure Of Annexin 24(Ca32)
  misc_feature (12)..(323): Homolog of NCBI NO: 7441510 NR Description: annexin - upland cotton (fragment)
  misc_feature (12)..(323): Homolog of NCBI NO: 33357398 NR Description: Chain A, Annexin Gh1 From Cotton
  misc_feature (11)..(327): Homolog of NCBI NO: 15220216 NR Description: Ca2+-dependent membrane-binding protein annexin
  misc_feature (11)..(327): Homolog of NCBI NO: 1621539 NR Description: annexin-like protein
  misc_feature (13)..(327): Homolog of NCBI NO: 1429207 NR Description: annexin [Arabidopsis thaliana]
  misc_feature (11)..(323): Homolog of NCBI NO: 7484723 NR Description: fiber annexin - upland cotton
  misc_feature (12)..(323): Homolog of NCBI NO: 15214410 NR Description: annexin [Gossypium hirsutum]
  misc_feature (11)..(327): Homolog of NCBI NO: 2459926 NR Description: annexin [Lavatera thuringiaca]
  misc_feature (11)..(326): Homolog of NCBI NO: 2129923 NR Description: annexin - pepper
  misc_feature (12)..(323): Homolog of NCBI NO: 15214410 NR Description: annexin [Gossypium hirsutum]
  misc_feature (11)..(323): Homolog of NCBI NO: 7484723 NR Description: fiber annexin - upland cotton
  misc_feature (13)..(327): Homolog of NCBI NO: 1429207 NR Description: annexin [Arabidopsis thaliana]
  misc_feature (11)..(327): Homolog of NCBI NO: 1621539 NR Description: annexin-like protein
  misc_feature (11)..(327): Homolog of NCBI NO: 15220216 NR Description: Ca2+-dependent membrane-binding protein annexin

SEQ ID NO: 42388 - protein, 317 aa, Arabidopsis thaliana; identical to SEQ ID NO: 35542
  peptide (1)..(317): Ceres Seq. ID no. 15219132
  misc_feature (13)..(80): Pfam Name: Annexin Pfam Description: Annexin
  misc_feature (13)..(80): Pfam Name: Annexin Pfam Description: Annexin
  misc_feature (1)..(316): Homolog of NCBI NO: 12084607 NR Description: Chain A, Crystal Structure Of Annexin 24(Ca32)
  misc_feature (1)..(316): Homolog of NCBI NO: 2129923 NR Description: annexin - pepper
  misc_feature (2)..(313): Homolog of NCBI NO: 7441510 NR Description: annexin - upland cotton (fragment)
  misc_feature (1)..(317): Homolog of NCBI NO: 2459926 NR Description: annexin [Lavatera thuringiaca]
  misc_feature (2)..(313): Homolog of NCBI NO: 33357398 NR Description: Chain A, Annexin Gh1 From Cotton
  misc_feature (1)..(316): Homolog of NCBI NO: 12084607 NR Description: Chain A, Crystal Structure Of Annexin 24(Ca32)
  misc_feature (2)..(313): Homolog of NCBI NO: 7441510 NR Description: annexin - upland cotton (fragment)
  misc_feature (2)..(313): Homolog of NCBI NO: 33357398 NR Description: Chain A, Annexin Gh1 From Cotton
  misc_feature (1)..(317): Homolog of NCBI NO: 15220216 NR Description: Ca2+-dependent membrane-binding protein annexin
  misc_feature (1)..(317): Homolog of NCBI NO: 1621539 NR Description: annexin-like protein
  misc_feature (3)..(317): Homolog of NCBI NO: 1429207 NR Description: annexin [Arabidopsis thaliana]
  misc_feature (1)..(313): Homolog of NCBI NO: 7484723 NR Description: fiber annexin - upland cotton
  misc_feature (2)..(313): Homolog of NCBI NO: 15214410 NR Description: annexin [Gossypium hirsutum]
  misc_feature (1)..(317): Homolog of NCBI NO: 2459926 NR Description: annexin [Lavatera thuringiaca]
  misc_feature (1)..(316): Homolog of NCBI NO: 2129923 NR Description: annexin - pepper
  misc_feature (2)..(313): Homolog of NCBI NO: 15214410 NR Description: annexin [Gossypium hirsutum]
  misc_feature (1)..(313): Homolog of NCBI NO: 7484723 NR Description: fiber annexin - upland cotton
  misc_feature (3)..(317): Homolog of NCBI NO: 1429207 NR Description: annexin [Arabidopsis thaliana]
  misc_feature (1)..(317): Homolog of NCBI NO: 1621539 NR Description: annexin-like protein
  misc_feature (1)..(317): Homolog of NCBI NO: 15220216 NR Description: Ca2+-dependent membrane-binding protein annexin

SEQ ID NO: 42389 - protein, 211 aa, Arabidopsis thaliana; identical to SEQ ID NO: 24550
  peptide (1)..(211): Ceres Seq. ID no. 15219133
  misc_feature (1)..(210): Homolog of NCBI NO: 12084607 NR Description: Chain A, Crystal Structure Of Annexin 24(Ca32)
  misc_feature (1)..(210): Homolog of NCBI NO: 2129923 NR Description: annexin - pepper
  misc_feature (1)..(207): Homolog of NCBI NO: 7441510 NR Description: annexin - upland cotton (fragment)
  misc_feature (1)..(211): Homolog of NCBI NO: 2459926 NR Description: annexin [Lavatera thuringiaca]
  misc_feature (1)..(207): Homolog of NCBI NO: 33357398 NR Description: Chain A, Annexin Gh1 From Cotton
  misc_feature (1)..(207): Homolog of NCBI NO: 15214410 NR Description: annexin [Gossypium hirsutum]
  misc_feature (1)..(207): Homolog of NCBI NO: 7484723 NR Description: fiber annexin - upland cotton
  misc_feature (1)..(211): Homolog of NCBI NO: 1429207 NR Description: annexin [Arabidopsis thaliana]
  misc_feature (1)..(211): Homolog of NCBI NO: 1621539 NR Description: annexin-like protein
  misc_feature (1)..(211): Homolog of NCBI NO: 15220216 NR Description: Ca2+-dependent membrane-binding protein annexin
  misc_feature (1)..(210): Homolog of NCBI NO: 12084607 NR Description: Chain A, Crystal Structure Of Annexin 24(Ca32)
  misc_feature (1)..(210): Homolog of NCBI NO: 2129923 NR Description: annexin - pepper
  misc_feature (1)..(207): Homolog of NCBI NO: 7441510 NR Description: annexin - upland cotton (fragment)
  misc_feature (1)..(211): Homolog of NCBI NO: 2459926 NR Description: annexin [Lavatera thuringiaca]
  misc_feature (1)..(207): Homolog of NCBI NO: 33357398 NR Description: Chain A, Annexin Gh1 From Cotton
  misc_feature (1)..(207): Homolog of NCBI NO: 15214410 NR Description: annexin [Gossypium hirsutum]
  misc_feature (1)..(207): Homolog of NCBI NO: 7484723 NR Description: fiber annexin - upland cotton
  misc_feature (1)..(211): Homolog of NCBI NO: 1429207 NR Description: annexin [Arabidopsis thaliana]
  misc_feature (1)..(211): Homolog of NCBI NO: 1621539 NR Description: annexin-like protein
  misc_feature (1)..(211): Homolog of NCBI NO: 15220216 NR Description: Ca2+-dependent membrane-binding protein annexin

SEQ ID NO: 42390 - DNA, 1864 bp, Arabidopsis thaliana; identical to SEQ ID NO: 22233
  misc_feature (1)..(1864): Ceres Seq. ID no. 12562449
  misc_feature: MA Experiment ID: 20000180 Result: Up-regulated in Transcription
  misc_feature: MA Experiment 20000180 PARAMETER Experiment Name: At_Germinating_Seeds_P Parameter: Age (hr) Value: 24 vs. 0
  misc_feature: MA Experiment 20000180 PARAMETER Experiment Name: At_Germinating_Seeds_P Parameter: Tissue Value: Germinating Seeds
  misc_feature: MA Experiment ID: 20000184 Result: Up-regulated in Transcription
  misc_feature: MA Experiment 20000184 PARAMETER Experiment Name: At_Shoots__P Parameter: Age (day) Value: 7
  misc_feature: MA Experiment 20000184 PARAMETER Experiment Name: At_Shoots__P Parameter: Tissue Value: Shoots vs. Whole Plant
  misc_feature: MA Experiment ID: 20000185 Result: Up-regulated in Transcription
  misc_feature: MA Experiment 20000185 PARAMETER Experiment Name: At_Roots__P Parameter: Age (day) Value: 7 vs. 21
  misc_feature: MA Experiment 20000185 PARAMETER Experiment Name: At_Roots__P Parameter: Organism Value: A. thaliana
  misc_feature: MA Experiment 20000185 PARAMETER Experiment Name: At_Roots__P Parameter: Tissue Value: Roots vs. Whole Plant
  misc_feature: MA Experiment ID: 20000264 Result: Up-regulated in Transcription
  misc_feature: MA Experiment 20000264 PARAMETER Experiment Name: At_Open_Flower_P Parameter: Age (day) Value: 21
  misc_feature: MA Experiment 20000264 PARAMETER Experiment Name: At_Open_Flower_P Parameter: Plant Line Value: WS
  misc_feature: MA Experiment 20000264 PARAMETER Experiment Name: At_Open_Flower_P Parameter: Tissue Value: Open Flower vs. Whole Plant
  misc_feature: MA Experiment ID: 20000286 Result: Up-regulated in Transcription
  misc_feature: MA Experiment 20000286 PARAMETER Experiment Name: At_Open_Flower_P Parameter: Age (day) Value: 21
  misc_feature: MA Experiment 20000286 PARAMETER Experiment Name: At_Open_Flower_P Parameter: Plant Line Value: WS
  misc_feature: MA Experiment 20000286 PARAMETER Experiment Name: At_Open_Flower_P Parameter: Tissue Value: Half Open vs. Whole Plant
  misc_feature: MA Experiment ID: 20000439 Result: Up-regulated in Transcription
  misc_feature: MA Experiment 20000439 PARAMETER Experiment Name: At_Roots__P Parameter: Age (day) Value: 14 vs. 21
  misc_feature: MA Experiment 20000439 PARAMETER Experiment Name: At_Roots__P Parameter: Organism Value: A. thaliana
  misc_feature: MA Experiment 20000439 PARAMETER Experiment Name: At_Roots__P Parameter: Tissue Value: Roots vs. Whole Plant
  misc_feature: MA Experiment ID: 20000495 Result: Down-regulated in Transcription
  misc_feature: MA Experiment 20000495 PARAMETER Experiment Name: At_Guard_Cells_P Parameter: Harvest Date Value: 8/2/2002
  misc_feature: MA Experiment 20000495 PARAMETER Experiment Name: At_Guard_Cells_P Parameter: Organism Value: A. thaliana
  misc_feature: MA Experiment 20000495 PARAMETER Experiment Name: At_Guard_Cells_P Parameter: Tissue Value: Guard Cells vs. Leaves
  misc_feature: MA Experiment ID: 20000527 Result: Down-regulated in Transcription
  misc_feature: MA Experiment 20000527 PARAMETER Experiment Name: At_10percent_PEG_P Parameter: Age (day) Value: 20
  misc_feature: MA Experiment 20000527 PARAMETER Experiment Name: At_10percent_PEG_P Parameter: Organism Value: A. thaliana
  misc_feature: MA Experiment 20000527 PARAMETER Experiment Name: At_10percent_PEG_P Parameter: Plant Line Value: WS
  misc_feature: MA Experiment 20000527 PARAMETER Experiment Name: At_10percent_PEG_P Parameter: Timepoint (day) Value: 20
  misc_feature: MA Experiment 20000527 PARAMETER Experiment Name: At_10percent_PEG_P Parameter: Tissue Value: Whole Plant
  misc_feature: MA Experiment 20000527 PARAMETER Experiment Name: At_10percent_PEG_P Parameter: Treatment Value: 10percent PEG vs. No Treatment
  misc_feature: MA Experiment ID: 20001248 Result: Down-regulated in Transcription
  misc_feature: MA Experiment 20001248 PARAMETER Experiment Name: At_Far-red-induction_P Parameter: Age (day) Value: 7
  misc_feature: MA Experiment 20001248 PARAMETER Experiment Name: At_Far-red-induction_P Parameter: Light Value: Far-red vs. White
  misc_feature: MA Experiment 20001248 PARAMETER Experiment Name: At_Far-red-induction_P Parameter: Organism Value: A. thaliana
  misc_feature: MA Experiment 20001248 PARAMETER Experiment Name: At_Far-red-induction_P Parameter: Plant Line Value: Columbia
  misc_feature: MA Experiment 20001248 PARAMETER Experiment Name: At_Far-red-induction_P Parameter: Timepoint (hr) Value: 4
  misc_feature: MA Experiment 20001248 PARAMETER Experiment Name: At_Far-red-induction_P Parameter: Tissue Value: Whole Plant
  misc_feature: MA Experiment ID: 20001450 Result: Down-regulated in Transcription
  misc_feature: MA Experiment 20001450 PARAMETER Experiment Name: At_Far-red-induction_P Parameter: Age (day) Value: 7
  misc_feature: MA Experiment 20001450 PARAMETER Experiment Name: At_Far-red-induction_P Parameter: Light Value: Far-red vs. White
  misc_feature: MA Experiment 20001450 PARAMETER Experiment Name: At_Far-red-induction_P Parameter: Organism Value: A. thaliana
  misc_feature: MA Experiment 20001450 PARAMETER Experiment Name: At_Far-red-induction_P Parameter: Plant Line Value: Columbia
  misc_feature: MA Experiment 20001450 PARAMETER Experiment Name: At_Far-red-induction_P Parameter: Timepoint (hr) Value: 8
  misc_feature: MA Experiment 20001450 PARAMETER Experiment Name: At_Far-red-induction_P Parameter: Tissue Value: Whole Plant
  misc_feature: MA Experiment ID: 20001451 Result: Down-regulated in Transcription
  misc_feature: MA Experiment 20001451 PARAMETER Experiment Name: At_Far-red-induction_P Parameter: Age (day) Value: 7
  misc_feature: MA Experiment 20001451 PARAMETER Experiment Name: At_Far-red-induction_P Parameter: Light Value: Far-red vs. White
  misc_feature: MA Experiment 20001451 PARAMETER Experiment Name: At_Far-red-induction_P Parameter: Organism Value: A. thaliana
  misc_feature: MA Experiment 20001451 PARAMETER Experiment Name: At_Far-red-induction_P Parameter: Plant Line Value: Columbia
  misc_feature: MA Experiment 20001451 PARAMETER Experiment Name: At_Far-red-induction_P Parameter: Timepoint (hr) Value: 24
  misc_feature: MA Experiment 20001451 PARAMETER Experiment Name: At_Far-red-induction_P Parameter: Tissue Value: Whole Plant
  misc_feature: MA Experiment ID: 20001905 Result: Up-regulated in Transcription
  misc_feature: MA Experiment 20001905 PARAMETER Experiment Name: At_Drought_Reproduction_P Parameter: Age (day) Value: 40
  misc_feature: MA Experiment 20001905 PARAMETER Experiment Name: At_Drought_Reproduction_P Parameter: Organism Value: A. thaliana
  misc_feature: MA Experiment 20001905 PARAMETER Experiment Name: At_Drought_Reproduction_P Parameter: Plant Line Value: WS
  misc_feature: MA Experiment 20001905 PARAMETER Experiment Name: At_Drought_Reproduction_P Parameter: Timepoint (day) Value: 10
  misc_feature: MA Experiment 20001905 PARAMETER Experiment Name: At_Drought_Reproduction_P Parameter: Tissue Value: Rosettes
  misc_feature: MA Experiment 20001905 PARAMETER Experiment Name: At_Drought_Reproduction_P Parameter: Treatment Value: Drought vs. No Drought
  misc_feature: MA Experiment ID: 20001911 Result: Down-regulated in Transcription
  misc_feature: MA Experiment 20001911 PARAMETER Experiment Name: At_Drought_Reproduction_P Parameter: Age (day) Value: 40
  misc_feature: MA Experiment 20001911 PARAMETER Experiment Name: At_Drought_Reproduction_P Parameter: Organism Value: A. thaliana
  misc_feature: MA Experiment 20001911 PARAMETER Experiment Name: At_Drought_Reproduction_P Parameter: Plant Line Value: WS
  misc_feature: MA Experiment 20001911 PARAMETER Experiment Name: At_Drought_Reproduction_P Parameter: Timepoint (day) Value: 10
  misc_feature: MA Experiment 20001911 PARAMETER Experiment Name: At_Drought_Reproduction_P Parameter: Tissue Value: Flowers
  misc_feature: MA Experiment 20001911 PARAMETER Experiment Name: At_Drought_Reproduction_P Parameter: Treatment Value: Drought vs. No Drought

SEQ ID NO: 42391 - protein, 527 aa, Arabidopsis thaliana; identical to SEQ ID NO: 22234
  peptide (1)..(527): Ceres Seq. ID no. 12562450
  misc_feature (74)..(511): Pfam Name: Class-II DAHP synthetase family Pfam Description: Class-II DAHP synthetase family
  misc_feature (74)..(511): Pfam Name: Class-II DAHP synthetase family Pfam Description: Class-II DAHP synthetase family
  misc_feature (1)..(523): Homolog of NCBI NO: 15236093 NR Description: 2-dehydro-3-deoxyphosphoheptonate aldolase
  misc_feature (31)..(525): Homolog of NCBI NO: 2546988 NR Description: 2-dehydro-3-deoxyphosphoheptonate aldolase
  misc_feature (1)..(521): Homolog of NCBI NO: 34906844 NR Description: putative phospho-2-dehydro-3-deoxyheptonate
  misc_feature (25)..(522): Homolog of NCBI NO: 584778 NR Description: Phospho-2-dehydro-3-deoxyheptonate aldolase 2, precursor (Phospho-2-keto-3-deoxyheptonate aldolase 2) (DAHP
  misc_feature (3)..(522): Homolog of NCBI NO: 584777 NR Description: Phospho-2-dehydro-3-deoxyheptonate aldolase 1, precursor (Phospho-2-keto-3-deoxyheptonate aldolase 1) (DAHP
  misc_feature (31)..(525): Homolog of NCBI NO: 2546988 NR Description: 2-dehydro-3-deoxyphosphoheptonate aldolase
  misc_feature (25)..(522): Homolog of NCBI NO: 584778 NR Description: Phospho-2-dehydro-3-deoxyheptonate aldolase 2, precursor (Phospho-2-keto-3-deoxyheptonate aldolase 2) (DAHP
  misc_feature (1)..(527): Homolog of NCBI NO: 15219878 NR Description: 3-deoxy-D-arabino-heptulosonate 7-phosphate,
  misc_feature (1)..(526): Homolog of NCBI NO: 2398679 NR Description: 3-deoxy-D-arabino-heptulosonate 7-phosphate
  misc_feature (1)..(523): Homolog of NCBI NO: 7488957 NR Description: probable 2-dehydro-3-deoxy-phosphoheptonate
  misc_feature (24)..(522): Homolog of NCBI NO: 114193 NR Description: Phospho-2-dehydro-3-deoxyheptonate aldolase 1, precursor (Phospho-2-keto-3-deoxyheptonate aldolase 1) (DAHP
  misc_feature (3)..(525): Homolog of NCBI NO: 24745903 NR Description: 3-deoxy-D-arabino-heptulosonate 7-phosphate
  misc_feature (3)..(522): Homolog of NCBI NO: 584777 NR Description: Phospho-2-dehydro-3-deoxyheptonate aldolase 1, precursor (Phospho-2-keto-3-deoxyheptonate aldolase 1) (DAHP
  misc_feature (1)..(521): Homolog of NCBI NO: 34906844 NR Description: putative phospho-2-dehydro-3-deoxyheptonate
  misc_feature (1)..(523): Homolog of NCBI NO: 15236093 NR Description: 2-dehydro-3-deoxyphosphoheptonate aldolase
  misc_feature (3)..(525): Homolog of NCBI NO: 24745903 NR Description: 3-deoxy-D-arabino-heptulosonate 7-phosphate
  misc_feature (24)..(522): Homolog of NCBI NO: 114193 NR Description: Phospho-2-dehydro-3-deoxyheptonate aldolase 1, precursor (Phospho-2-keto-3-deoxyheptonate aldolase 1) (DAHP
  misc_feature (1)..(523): Homolog of NCBI NO: 7488957 NR Description: probable 2-dehydro-3-deoxy-phosphoheptonate
  misc_feature (1)..(526): Homolog of NCBI NO: 2398679 NR Description: 3-deoxy-D-arabino-heptulosonate 7-phosphate
  misc_feature (1)..(527): Homolog of NCBI NO: 15219878 NR Description: 3-deoxy-D-arabino-heptulosonate 7-phosphate,

SEQ ID NO: 42392 - protein, 524 aa, Arabidopsis thaliana; identical to SEQ ID NO: 22235
  peptide (1)..(524): Ceres Seq. ID no. 12562451
  misc_feature (71)..(508): Pfam Name: Class-II DAHP synthetase family Pfam Description: Class-II DAHP synthetase family
  misc_feature (71)..(508): Pfam Name: Class-II DAHP synthetase family Pfam Description: Class-II DAHP synthetase family
  misc_feature (1)..(520): Homolog of NCBI NO: 15236093 NR Description: 2-dehydro-3-deoxyphosphoheptonate aldolase
  misc_feature (28)..(522): Homolog of NCBI NO: 2546988 NR Description: 2-dehydro-3-deoxyphosphoheptonate aldolase
  misc_feature (1)..(518): Homolog of NCBI NO: 34906844 NR Description: putative phospho-2-dehydro-3-deoxyheptonate
  misc_feature (22)..(519): Homolog of NCBI NO: 584778 NR Description: Phospho-2-dehydro-3-deoxyheptonate aldolase 2, precursor (Phospho-2-keto-3-deoxyheptonate aldolase 2) (DAHP
  misc_feature (1)..(519): Homolog of NCBI NO: 584777 NR Description: Phospho-2-dehydro-3-deoxyheptonate aldolase 1, precursor (Phospho-2-keto-3-deoxyheptonate aldolase 1) (DAHP
  misc_feature (1)..(520): Homolog of NCBI NO: 15236093 NR Description: 2-dehydro-3-deoxyphosphoheptonate aldolase
  misc_feature (1)..(518): Homolog of NCBI NO: 34906844 NR Description: putative phospho-2-dehydro-3-deoxyheptonate
  misc_feature (1)..(519): Homolog of NCBI NO: 584777 NR Description: Phospho-2-dehydro-3-deoxyheptonate aldolase 1, precursor (Phospho-2-keto-3-deoxyheptonate aldolase 1) (DAHP
  misc_feature (1)..(524): Homolog of NCBI NO: 15219878 NR Description: 3-deoxy-D-arabino-heptulosonate 7-phosphate,
  misc_feature (1)..(523): Homolog of NCBI NO: 2398679 NR Description: 3-deoxy-D-arabino-heptulosonate 7-phosphate
  misc_feature (1)..(520): Homolog of NCBI NO: 7488957 NR Description: probable 2-dehydro-3-deoxy-phosphoheptonate
  misc_feature (21)..(519): Homolog of NCBI NO: 114193 NR Description: Phospho-2-dehydro-3-deoxyheptonate aldolase 1, precursor (Phospho-2-keto-3-deoxyheptonate aldolase 1) (DAHP
  misc_feature (1)..(522): Homolog of NCBI NO: 24745903 NR Description: 3-deoxy-D-arabino-heptulosonate 7-phosphate
  misc_feature (22)..(519): Homolog of NCBI NO: 584778 NR Description: Phospho-2-dehydro-3-deoxyheptonate aldolase 2, precursor (Phospho-2-keto-3-deoxyheptonate aldolase 2) (DAHP
  misc_feature (28)..(522): Homolog of NCBI NO: 2546988 NR Description: 2-dehydro-3-deoxyphosphoheptonate aldolase
  misc_feature (1)..(522): Homolog of NCBI NO: 24745903 NR Description: 3-deoxy-D-arabino-heptulosonate 7-phosphate
  misc_feature (21)..(519): Homolog of NCBI NO: 114193 NR Description: Phospho-2-dehydro-3-deoxyheptonate aldolase 1, precursor (Phospho-2-keto-3-deoxyheptonate aldolase 1) (DAHP
  misc_feature (1)..(520): Homolog of NCBI NO: 7488957 NR Description: probable 2-dehydro-3-deoxy-phosphoheptonate
  misc_feature (1)..(523): Homolog of NCBI NO: 2398679 NR Description: 3-deoxy-D-arabino-heptulosonate 7-phosphate
  misc_feature (1)..(524): Homolog of NCBI NO: 15219878 NR Description: 3-deoxy-D-arabino-heptulosonate 7-phosphate,

SEQ ID NO: 42393 - protein, 520 aa, Arabidopsis thaliana; identical to SEQ ID NO: 22236
  peptide (1)..(520): Ceres Seq. ID no. 12562452
  misc_feature (67)..(504): Pfam Name: Class-II DAHP synthetase family Pfam Description: Class-II DAHP synthetase family
  misc_feature (67)..(504): Pfam Name: Class-II DAHP synthetase family Pfam Description: Class-II DAHP synthetase family
  misc_feature (1)..(516): Homolog of NCBI NO: 15236093 NR Description: 2-dehydro-3-deoxyphosphoheptonate aldolase
  misc_feature (24)..(518): Homolog of NCBI NO: 2546988 NR Description: 2-dehydro-3-deoxyphosphoheptonate aldolase
  misc_feature (1)..(514): Homolog of NCBI NO: 34906844 NR Description: putative phospho-2-dehydro-3-deoxyheptonate
  misc_feature (18)..(515): Homolog of NCBI NO: 584778 NR Description: Phospho-2-dehydro-3-deoxyheptonate aldolase 2, precursor (Phospho-2-keto-3-deoxyheptonate aldolase 2) (DAHP
  misc_feature (1)..(515): Homolog of NCBI NO: 584777 NR Description: Phospho-2-dehydro-3-deoxyheptonate aldolase 1, precursor (Phospho-2-keto-3-deoxyheptonate aldolase 1) (DAHP
  misc_feature (1)..(516): Homolog of NCBI NO: 15236093 NR Description: 2-dehydro-3-deoxyphosphoheptonate aldolase
  misc_feature (1)..(514): Homolog of NCBI NO: 34906844 NR Description: putative phospho-2-dehydro-3-deoxyheptonate
  misc_feature (1)..(515): Homolog of NCBI NO: 584777 NR Description: Phospho-2-dehydro-3-deoxyheptonate aldolase 1, precursor (Phospho-2-keto-3-deoxyheptonate aldolase 1) (DAHP
  misc_feature (1)..(520): Homolog of NCBI NO: 15219878 NR Description: 3-deoxy-D-arabino-heptulosonate 7-phosphate,
  misc_feature (1)..(519): Homolog of NCBI NO: 2398679 NR Description: 3-deoxy-D-arabino-heptulosonate 7-phosphate
  misc_feature (1)..(516): Homolog of NCBI NO: 7488957 NR Description: probable 2-dehydro-3-deoxy-phosphoheptonate
  misc_feature (17)..(515): Homolog of NCBI NO: 114193 NR Description: Phospho-2-dehydro-3-deoxyheptonate aldolase 1, precursor (Phospho-2-keto-3-deoxyheptonate aldolase 1) (DAHP
  misc_feature (1)..(518): Homolog of NCBI NO: 24745903 NR Description: 3-deoxy-D-arabino-heptulosonate 7-phosphate
  misc_feature (18)..(515): Homolog of NCBI NO: 584778 NR Description: Phospho-2-dehydro-3-deoxyheptonate aldolase 2, precursor (Phospho-2-keto-3-deoxyheptonate aldolase 2) (DAHP
  misc_feature (24)..(518): Homolog of NCBI NO: 2546988 NR Description: 2-dehydro-3-deoxyphosphoheptonate aldolase
  misc_feature (1)..(518): Homolog of NCBI NO: 24745903 NR Description: 3-deoxy-D-arabino-heptulosonate 7-phosphate
  misc_feature (17)..(515): Homolog of NCBI NO: 114193 NR Description: Phospho-2-dehydro-3-deoxyheptonate aldolase 1, precursor (Phospho-2-keto-3-deoxyheptonate aldolase 1) (DAHP
  misc_feature (1)..(516): Homolog of NCBI NO: 7488957 NR Description: probable 2-dehydro-3-deoxy-phosphoheptonate
  misc_feature (1)..(519): Homolog of NCBI NO: 2398679 NR Description: 3-deoxy-D-arabino-heptulosonate 7-phosphate
  misc_feature (1)..(520): Homolog of NCBI NO: 15219878 NR Description: 3-deoxy-D-arabino-heptulosonate 7-phosphate,

SEQ ID NO: 42394 - DNA, 1309 bp, Arabidopsis thaliana; identical to SEQ ID NO: 39384
  misc_feature (1)..(1309): Ceres Seq. ID no. 13501404
  misc_feature: MA Experiment ID: 108435 Result: Down-regulated in Transcription
  misc_feature: MA Experiment 108435 PARAMETER Experiment Name: At_stm_Mutants_cDNA_P Parameter: Plant Line Value: wt Landsburg vs stm
  misc_feature: MA Experiment 108435 PARAMETER Experiment Name: At_stm_Mutants_cDNA_P Parameter: Tissue Value: Shoot Apical Meristem Region
  misc_feature: MA Experiment ID: 108464 Result: Up-regulated in Transcription
  misc_feature: MA Experiment 108464 PARAMETER Experiment Name: At_Germinating_Seeds_cDNA_P Parameter: Age (day) Value: 4 vs. 0
  misc_feature: MA Experiment 108464 PARAMETER Experiment Name: At_Germinating_Seeds_cDNA_P Parameter: Tissue Value: Germinating Seeds
  misc_feature: MA Experiment ID: 108595 Result: Down-regulated in Transcription
  misc_feature: MA Experiment 108595 PARAMETER Experiment Name: At_Ler-pi_Ovule_cDNA_P Parameter: Plant Line Value: null
  misc_feature: MA Experiment ID: 108668 Result: Down-regulated in Transcription
  misc_feature: MA Experiment 108668 PARAMETER Experiment Name: At_2mM_SA_cDNA_P Parameter: Plant Line Value: WS
  misc_feature: MA Experiment 108668 PARAMETER Experiment Name: At_2mM_SA_cDNA_P Parameter: Timepoint (hr) Value: 6
  misc_feature: MA Experiment 108668 PARAMETER Experiment Name: At_2mM_SA_cDNA_P Parameter: Treatment Value: 2mM SA vs. No Treatment
  misc_feature: MA Experiment ID: 20000185 Result: Down-regulated in Transcription
  misc_feature: MA Experiment 20000185 PARAMETER Experiment Name: At_Roots__P Parameter: Age (day) Value: 7 vs. 21
  misc_feature: MA Experiment 20000185 PARAMETER Experiment Name: At_Roots__P Parameter: Organism Value: A. thaliana
  misc_feature: MA Experiment 20000185 PARAMETER Experiment Name: At_Roots__P Parameter: Tissue Value: Roots vs. Whole Plant
  misc_feature: MA Experiment ID: 20000224 Result: Up-regulated in Transcription
  misc_feature: MA Experiment ID: 20000265 Result: Down-regulated in Transcription
  misc_feature: MA Experiment 20000265 PARAMETER Experiment Name: At_Open_Flower_P Parameter: Age (day) Value: 21
  misc_feature: MA Experiment 20000265 PARAMETER Experiment Name: At_Open_Flower_P Parameter: Plant Line Value: WS
  misc_feature: MA Experiment 20000265 PARAMETER Experiment Name: At_Open_Flower_P Parameter: Tissue Value: Closed Flower vs. Whole Plant
  misc_feature: MA Experiment ID: 20000439 Result: Down-regulated in Transcription
  misc_feature: MA Experiment 20000439 PARAMETER Experiment Name: At_Roots__P Parameter: Age (day) Value: 14 vs. 21
  misc_feature: MA Experiment 20000439 PARAMETER Experiment Name: At_Roots__P Parameter: Organism Value: A. thaliana
  misc_feature: MA Experiment 20000439 PARAMETER Experiment Name: At_Roots__P Parameter: Tissue Value: Roots vs. Whole Plant
  misc_feature: MA Experiment ID: 20001555 Result: Down-regulated in Transcription
  misc_feature: MA Experiment 20001555 PARAMETER Experiment Name: At_Drought_Soil_Dry_P Parameter: Age (day) Value: 24
  misc_feature: MA Experiment 20001555 PARAMETER Experiment Name: At_Drought_Soil_Dry_P Parameter: Organism Value: A. thaliana
  misc_feature: MA Experiment 20001555 PARAMETER Experiment Name: At_Drought_Soil_Dry_P Parameter: Plant Line Value: WS
  misc_feature: MA Experiment 20001555 PARAMETER Experiment Name: At_Drought_Soil_Dry_P Parameter: Post Timepoint (hr) Value: None
  misc_feature: MA Experiment 20001555 PARAMETER Experiment Name: At_Drought_Soil_Dry_P Parameter: Post-Treatment Value: None
  misc_feature: MA Experiment 20001555 PARAMETER Experiment Name: At_Drought_Soil_Dry_P Parameter: Timepoint (day) Value: 10
  misc_feature: MA Experiment 20001555 PARAMETER Experiment Name: At_Drought_Soil_Dry_P Parameter: Treatment Value: Drought vs. No Drought
  misc_feature: MA Experiment ID: 20001556 Result: Down-regulated in Transcription
  misc_feature: MA Experiment 20001556 PARAMETER Experiment Name: At_Drought_Soil_Dry_P Parameter: Age (day) Value: 26
  misc_feature: MA Experiment 20001556 PARAMETER Experiment Name: At_Drought_Soil_Dry_P Parameter: Organism Value: A. thaliana
  misc_feature: MA Experiment 20001556 PARAMETER Experiment Name: At_Drought_Soil_Dry_P Parameter: Plant Line Value: WS
  misc_feature: MA Experiment 20001556 PARAMETER Experiment Name: At_Drought_Soil_Dry_P Parameter: Post Timepoint (hr) Value: None
  misc_feature: MA Experiment 20001556 PARAMETER Experiment Name: At_Drought_Soil_Dry_P Parameter: Post-Treatment Value: None
  misc_feature: MA Experiment 20001556 PARAMETER Experiment Name: At_Drought_Soil_Dry_P Parameter: Timepoint (day) Value: 12
  misc_feature: MA Experiment 20001556 PARAMETER Experiment Name: At_Drought_Soil_Dry_P Parameter: Treatment Value: Drought vs. No Drought
  misc_feature: MA Experiment ID: 20001558 Result: Down-regulated in Transcription
  misc_feature: MA Experiment 20001558 PARAMETER Experiment Name: At_Drought_Soil_Dry_P Parameter: Age (day) Value: 27
  misc_feature: MA Experiment 20001558 PARAMETER Experiment Name: At_Drought_Soil_Dry_P Parameter: Organism Value: A. thaliana
  misc_feature: MA Experiment 20001558 PARAMETER Experiment Name: At_Drought_Soil_Dry_P Parameter: Plant Line Value: WS
  misc_feature: MA Experiment 20001558 PARAMETER Experiment Name: At_Drought_Soil_Dry_P Parameter: Post Timepoint (hr) Value: 6
  misc_feature: MA Experiment 20001558 PARAMETER Experiment Name: At_Drought_Soil_Dry_P Parameter: Post-Treatment Value: Re-Water vs. No Drought
  misc_feature: MA Experiment 20001558 PARAMETER Experiment Name: At_Drought_Soil_Dry_P Parameter: Timepoint (day) Value: 13
  misc_feature: MA Experiment 20001558 PARAMETER Experiment Name: At_Drought_Soil_Dry_P Parameter: Treatment Value: Drought vs. No Drought
  misc_feature: MA Experiment ID: 20001559 Result: Down-regulated in Transcription
  misc_feature: MA Experiment 20001559 PARAMETER Experiment Name: At_Drought_Soil_Dry_P Parameter: Age (day) Value: 28
  misc_feature: MA Experiment 20001559 PARAMETER Experiment Name: At_Drought_Soil_Dry_P Parameter: Organism Value: A. thaliana
  misc_feature: MA Experiment 20001559 PARAMETER Experiment Name: At_Drought_Soil_Dry_P Parameter: Plant Line Value: WS
  misc_feature: MA Experiment 20001559 PARAMETER Experiment Name: At_Drought_Soil_Dry_P Parameter: Post Timepoint (hr) Value: 29
  misc_feature: MA Experiment 20001559 PARAMETER Experiment Name: At_Drought_Soil_Dry_P Parameter: Post-Treatment Value: Re-Water vs. No Drought
  misc_feature: MA Experiment 20001559 PARAMETER Experiment Name: At_Drought_Soil_Dry_P Parameter: Timepoint (day) Value: 14
  misc_feature: MA Experiment 20001559 PARAMETER Experiment Name: At_Drought_Soil_Dry_P Parameter: Treatment Value: Drought vs. No Drought
  misc_feature: MA Experiment ID: 20001560 Result: Down-regulated in Transcription
  misc_feature: MA Experiment 20001560 PARAMETER Experiment Name: At_Drought_Soil_Dry_P Parameter: Age (day) Value: 28
  misc_feature: MA Experiment 20001560 PARAMETER Experiment Name: At_Drought_Soil_Dry_P Parameter: Organism Value: A. thaliana
  misc_feature: MA Experiment 20001560 PARAMETER Experiment Name: At_Drought_Soil_Dry_P Parameter: Plant Line Value: WS
  misc_feature: MA Experiment 20001560 PARAMETER Experiment Name: At_Drought_Soil_Dry_P Parameter: Post Timepoint (hr) Value: None
  misc_feature: MA Experiment 20001560 PARAMETER Experiment Name: At_Drought_Soil_Dry_P Parameter: Post-Treatment Value: None
  misc_feature: MA Experiment 20001560 PARAMETER Experiment Name: At_Drought_Soil_Dry_P Parameter: Timepoint (day) Value: 14
  misc_feature: MA Experiment 20001560 PARAMETER Experiment Name: At_Drought_Soil_Dry_P Parameter: Treatment Value: Drought vs. No Drought

SEQ ID NO: 42395 - protein, 402 aa, Arabidopsis thaliana; identical to SEQ ID NO: 39385
  peptide (1)..(402): Ceres Seq. ID no. 13501405
  misc_feature (75)..(337): Homolog of NCBI NO: 40538958 NR Description: expressed protein [Oryza sativa (japonica
  misc_feature (48)..(402): Homolog of NCBI NO: 21536629 NR Description: seed maturation-like protein [Arabidopsis
  misc_feature (48)..(402): Homolog of NCBI NO: 15242177 NR Description: seed maturation -related protein [Arabidopsis
  misc_feature (75)..(337): Homolog of NCBI NO: 40538958 NR Description: expressed protein [Oryza sativa (japonica
  misc_feature (48)..(402): Homolog of NCBI NO: 21536629 NR Description: seed maturation-like protein [Arabidopsis
  misc_feature (48)..(402): Homolog of NCBI NO: 15242177 NR Description: seed maturation -related protein [Arabidopsis

SEQ ID NO: 42396 - protein, 355 aa, Arabidopsis thaliana; identical to SEQ ID NO: 39386
  peptide (1)..(355): Ceres Seq. ID no. 13501406
  misc_feature (28)..(290): Homolog of NCBI NO: 40538958 NR Description: expressed protein [Oryza sativa (japonica
  misc_feature (1)..(355): Homolog of NCBI NO: 21536629 NR Description: seed maturation-like protein [Arabidopsis
  misc_feature (1)..(355): Homolog of NCBI NO: 15242177 NR Description: seed maturation -related protein [Arabidopsis
  misc_feature (28)..(290): Homolog of NCBI NO: 40538958 NR Description: expressed protein [Oryza sativa (japonica
  misc_feature (1)..(355): Homolog of NCBI NO: 21536629 NR Description: seed maturation-like protein [Arabidopsis
  misc_feature (1)..(355): Homolog of NCBI NO: 15242177 NR Description: seed maturation -related protein [Arabidopsis

SEQ ID NO: 42397 - protein, 345 aa, Arabidopsis thaliana; identical to SEQ ID NO: 39387
  peptide (1)..(345): Ceres Seq. ID no. 13501407
  misc_feature (18)..(280): Homolog of NCBI NO: 40538958 NR Description: expressed protein [Oryza sativa (japonica
  misc_feature (1)..(345): Homolog of NCBI NO: 21536629 NR Description: seed maturation-like protein [Arabidopsis
  misc_feature (1)..(345): Homolog of NCBI NO: 15242177 NR Description: seed maturation -related protein [Arabidopsis
  misc_feature (18)..(280): Homolog of NCBI NO: 40538958 NR Description: expressed protein [Oryza sativa (japonica
  misc_feature (1)..(345): Homolog of NCBI NO: 21536629 NR Description: seed maturation-like protein [Arabidopsis
  misc_feature (1)..(345): Homolog of NCBI NO: 15242177 NR Description: seed maturation -related protein [Arabidopsis

SEQ ID NO: 42398 - DNA, 1774 bp, Arabidopsis thaliana
  misc_feature (1)..(1774): Ceres Seq. ID no. 12562421
  misc_feature: MA Experiment ID: 108595 Result: Up-regulated in Transcription
  misc_feature: MA Experiment 108595 PARAMETER Experiment Name: At_Ler-pi_Ovule_cDNA_P Parameter: Plant Line Value: null
  misc_feature: MA Experiment ID: 20000227 Result: Down-regulated in Transcription
  misc_feature: MA Experiment 20000227 PARAMETER Experiment Name: At_Root-Tips-vs-Tops_P Parameter: Tissue Value: Root Tips vs. Root Tops
  misc_feature: MA Experiment ID: 20001247 Result: Up-regulated in Transcription
  misc_feature: MA Experiment 20001247 PARAMETER Experiment Name: At_Far-red-induction_P Parameter: Age (day) Value: 7
  misc_feature: MA Experiment 20001247 PARAMETER Experiment Name: At_Far-red-induction_P Parameter: Light Value: Far-red vs. White
  misc_feature: MA Experiment 20001247 PARAMETER Experiment Name: At_Far-red-induction_P Parameter: Organism Value: A. thaliana
  misc_feature: MA Experiment 20001247 PARAMETER Experiment Name: At_Far-red-induction_P Parameter: Plant Line Value: Columbia
  misc_feature: MA Experiment 20001247 PARAMETER Experiment Name: At_Far-red-induction_P Parameter: Timepoint (hr) Value: 1
  misc_feature: MA Experiment 20001247 PARAMETER Experiment Name: At_Far-red-induction_P Parameter: Tissue Value: Whole Plant
  misc_feature: MA Experiment ID: 20001248 Result: Up-regulated in Transcription
  misc_feature: MA Experiment 20001248 PARAMETER Experiment Name: At_Far-red-induction_P Parameter: Age (day) Value: 7
  misc_feature: MA Experiment 20001248 PARAMETER Experiment Name: At_Far-red-induction_P Parameter: Light Value: Far-red vs. White
  misc_feature: MA Experiment 20001248 PARAMETER Experiment Name: At_Far-red-induction_P Parameter: Organism Value: A. thaliana
  misc_feature: MA Experiment 20001248 PARAMETER Experiment Name: At_Far-red-induction_P Parameter: Plant Line Value: Columbia
  misc_feature: MA Experiment 20001248 PARAMETER Experiment Name: At_Far-red-induction_P Parameter: Timepoint (hr) Value: 4
  misc_feature: MA Experiment 20001248 PARAMETER Experiment Name: At_Far-red-induction_P Parameter: Tissue Value: Whole Plant
  misc_feature: MA Experiment ID: 20001450 Result: Up-regulated in Transcription
  misc_feature: MA Experiment 20001450 PARAMETER Experiment Name: At_Far-red-induction_P Parameter: Age (day) Value: 7
  misc_feature: MA Experiment 20001450 PARAMETER Experiment Name: At_Far-red-induction_P Parameter: Light Value: Far-red vs. White
  misc_feature: MA Experiment 20001450 PARAMETER Experiment Name: At_Far-red-induction_P Parameter: Organism Value: A. thaliana
  misc_feature: MA Experiment 20001450 PARAMETER Experiment Name: At_Far-red-induction_P Parameter: Plant Line Value: Columbia
  misc_feature: MA Experiment 20001450 PARAMETER Experiment Name: At_Far-red-induction_P Parameter: Timepoint (hr) Value: 8
  misc_feature: MA Experiment 20001450 PARAMETER Experiment Name: At_Far-red-induction_P Parameter: Tissue Value: Whole Plant
  misc_feature: MA Experiment ID: 20001451 Result: Down-regulated in Transcription
  misc_feature: MA Experiment 20001451 PARAMETER Experiment Name: At_Far-red-induction_P Parameter: Age (day) Value: 7
  misc_feature: MA Experiment 20001451 PARAMETER Experiment Name: At_Far-red-induction_P Parameter: Light Value: Far-red vs. White
  misc_feature: MA Experiment 20001451 PARAMETER Experiment Name: At_Far-red-induction_P Parameter: Organism Value: A. thaliana
  misc_feature: MA Experiment 20001451 PARAMETER Experiment Name: At_Far-red-induction_P Parameter: Plant Line Value: Columbia
  misc_feature: MA Experiment 20001451 PARAMETER Experiment Name: At_Far-red-induction_P Parameter: Timepoint (hr) Value: 24
  misc_feature: MA Experiment 20001451 PARAMETER Experiment Name: At_Far-red-induction_P Parameter: Tissue Value: Whole Plant
aacttagccttgttcttcttcttcatcgcgatatctccggtgtcttcttcgtctccatcagaagaagaagctctctgtatccatccatatcgaaaaaccagagatcggaggaaggagagagagataccaatctctgttgctttggttttaagggtttagaggagatgtcaaaccacccgaagatcacatcggcgcatcagaatgtggaggagaagctaagggaacttcaggagaggttctgtcatcttcaagctgctaggaaagaagggcggcatggtgaccttgcgcttttagaagcccaaatctctcagaatattcgggagtggcaagctgaactcactgctccttctcctgaatcttctctgttgggtgaaggtattagccaattccttgaggagtttgctcctctgttgaaattagacgaggaggatgatgcaactagtacgctaaaagaacatgctggagcaaagcctgatcctgagggtttttctcaaagcttgtgccctcctgaatggacatctgagaattttagtcaaagtcctttcaacggaaatttctcctgcggctttgaggatgctcttaatagcacagaaacacatggccagcaactccattatggatatgaagggtttgatccaagcataaactccgctcctgatttccatgaccaaaaactcagcagcaacttggatataacttctcagtatgattatattttctccgaagtgcgtcaggaactagataacagcccttccactaagcttgattcttctgaagagattgacaactttgctgaattttctactccatcaagtgtccgtgtgcctccatctgcttttctgggacctaagtgtgcactatgggattgcacaaggcctgctcagggctccgagtggtacctggattactgcagtaactaccatgggactctagctctgaatgaagattcgcctggcacagcacctgtattgaggccagggggcatcagtttgaaagataatctattgattgatgctcttcgtgcaaagactcagggtaagaatgttgggatcccagtgtgtgaaggagctgttaacacaaaatgcccatggaacgcagcagagctatttcatcttgaactggttgaaggcgaaacaattagagagtggctcttctttgacaaacctagaagagcatatgatagcggaaaccgaaagcaaagatcacttccagattacagtggaagaggttggcatgaatcaagaaaacaactgatgaaggaacaagaaggccagaagagatcttactatatggatccacaacctccaggtccctttgagtggcatctctttgaataccaaatcaatgaatctgacgcatgtgcgttatatcgcctagaacttaaagtaggaaatggaaagaagagtcctaagggaaagatttcaaaagaccctctggctgatctgcagaagaagatgggacagtttaaagtggcttcagacaaaccctctcctccaaccaaaggtcgtaaggagtgaagttagctattggtaatctaactcaagactcctgcaacaatagctccaagttgtctccagcattctacaaaagagccatcgccacctctgttttctttttttttttctttctgactgtattatgaagagataggatctttgatgtgttgtgttaatatggacaagtctggtctttgccctttttcttgatagaatcgtagatgggtttgtaaatttttgcattttatttttctcctttaaaaccacaaggattttgt

SEQ ID NO: 42399 - protein, 504 aa, Arabidopsis thaliana
  peptide (1)..(504): Ceres Seq. ID no. 12562422
  misc_feature (54)..(325): Homolog of NCBI NO: 34909602 NR Description: P0435B05.21 [Oryza sativa (japonica
  misc_feature (55)..(265): Homolog of NCBI NO: 25370817 NR Description: hypothetical protein At2g42400 [imported] -
  misc_feature (367)..(487): Homolog of NCBI NO: 6691215 NR Description: F1K23.24 [Arabidopsis thaliana]
  misc_feature (218)..(495): Homolog of NCBI NO: 34909602 NR Description: P0435B05.21 [Oryza sativa (japonica
  misc_feature (69)..(159): Homolog of NCBI NO: 15218694 NR Description: unknown protein; protein id: At1g28520.1
  misc_feature (216)..(487): Homolog of NCBI NO: 15218694 NR Description: unknown protein; protein id: At1g28520.1
  misc_feature (116)..(504): Homolog of NCBI NO: 25370817 NR Description: hypothetical protein At2g42400 [imported] -
  misc_feature (55)..(504): Homolog of NCBI NO: 18405962 NR Description: expressed protein
LSLVLLLHRDISGVFFVSIRRRSSLYPSISKNQRSEEGERDTNLCCFGFKGLEEMSNHPKITSAHQNVEEKLRELQERFCHLQAARKEGRHGDLALLEAQISQNIREWQAELTAPSPESSLLGEGISQFLEEFAPLLKLDEEDDATSTLKEHAGAKPDPEGFSQSLCPPEWTSENFSQSPFNGNFSCGFEDALNSTETHGQQLHYGYEGFDPSINSAPDFHDQKLSSNLDITSQYDYIFSEVRQELDNSPSTKLDSSEEIDNFAEFSTPSSVRVPPSAFLGPKCALWDCTRPAQGSEWYLDYCSNYHGTLALNEDSPGTAPVLRPGGISLKDNLLIDALRAKTQGKNVGIPVCEGAVNTKCPWNAAELFHLELVEGETIREWLFFDKPRRAYDSGNRKQRSLPDYSGRGWHESRKQLMKEQEGQKRSYYMDPQPPGPFEWHLFEYQINESDACALYRLELKVGNGKKSPKGKISKDPLADLQKKMGQFKVASDKPSPPTKGRKE

SEQ ID NO: 42400 - protein, 450 aa, Arabidopsis thaliana
  peptide (1)..(450): Ceres Seq. ID no. 12562423
  misc_feature (1)..(271): Homolog of NCBI NO: 34909602 NR Description: P0435B05.21 [Oryza sativa (japonica
  misc_feature (1)..(211): Homolog of NCBI NO: 25370817 NR Description: hypothetical protein At2g42400 [imported] -
  misc_feature (313)..(433): Homolog of NCBI NO: 6691215 NR Description: F1K23.24 [Arabidopsis thaliana]
  misc_feature (164)..(441): Homolog of NCBI NO: 34909602 NR Description: P0435B05.21 [Oryza sativa (japonica
  misc_feature (15)..(105): Homolog of NCBI NO: 15218694 NR Description: unknown protein; protein id: At1g28520.1
  misc_feature (162)..(433): Homolog of NCBI NO: 15218694 NR Description: unknown protein; protein id: At1g28520.1
  misc_feature (62)..(450): Homolog of NCBI NO: 25370817 NR Description: hypothetical protein At2g42400 [imported] -
  misc_feature (1)..(450): Homolog of NCBI NO: 18405962 NR Description: expressed protein
MSNHPKITSAHQNVEEKLRELQERFCHLQAARKEGRHGDLALLEAQISQNIREWQAELTAPSPESSLLGEGISQFLEEFAPLLKLDEEDDATSTLKEHAGAKPDPEGFSQSLCPPEWTSENFSQSPFNGNFSCGFEDALNSTETHGQQLHYGYEGFDPSINSAPDFHDQKLSSNLDITSQYDYIFSEVRQELDNSPSTKLDSSEEIDNFAEFSTPSSVRVPPSAFLGPKCALWDCTRPAQGSEWYLDYCSNYHGTLALNEDSPGTAPVLRPGGISLKDNLLIDALRAKTQGKNVGIPVCEGAVNTKCPWNAAELFHLELVEGETIREWLFFDKPRRAYDSGNRKQRSLPDYSGRGWHESRKQLMKEQEGQKRSYYMDPQPPGPFEWHLFEYQINESDACALYRLELKVGNGKKSPKGKISKDPLADLQKKMGQFKVASDKPSPPTKGRKE

SEQ ID NO: 42401 - DNA, 1365 bp, Arabidopsis thaliana
  misc_feature (1)..(1365): Ceres Seq. ID no. 13494652
  misc_feature: MA Experiment ID: 20000234 Result: Up-regulated in Transcription
  misc_feature: MA Experiment 20000234 PARAMETER Experiment Name: At_Siliques_P Parameter: Age (day) Value: 21
  misc_feature: MA Experiment 20000234 PARAMETER Experiment Name: At_Siliques_P Parameter: Organism Value: A. thaliana
  misc_feature: MA Experiment 20000234 PARAMETER Experiment Name: At_Siliques_P Parameter: Plant Line Value: WS
  misc_feature: MA Experiment 20000234 PARAMETER Experiment Name: At_Siliques_P Parameter: Tissue Value: Less Than 5mm Siliques vs. Whole Plant
atgggtgcaatgctaaatcttttgctcgtcgttactgtcattctctgttcaatcttatcacccacacggtttatgattatgattgataaaatggttgcagatggatacgatcctcttgatccgttcggaaaaatcattatcaaatgggatcttcttttatcatcacctggccaacaccacgtacaagtaacgttagagaacatgcaagagtatcgacacgtggaaaagccagggtggaagcttagctggcattggctcaaccaagaagtgatatgggacatgaaaggagctgagacgacggagcaaggtaattgctctgcctttgcctccagcggtaaccttcctcactgctgtctcgagcgaccaaccatagtcgaccttcttcccggtgcttctctcaacgttcaagttgccaattgttgccgtggaggcgtcttgacttccatgtctcaggaccacgccaatcacgtctctgcttttcacatgacagttggaagctctcctgatggccctgaggagttcaatatgccttctaatttcgatataggggtcccgggttatagctgcgacaatgctacatccgtgtccccgactaagtttagtactgataagggccgtcgcaaaacacaagctctagcaacatgggaggcagtgtgtgtatactcgcagtttcggtcatcaccatcgccaaaatgctgcgtttcactctctgccttctactaccaaaacattgttccttgtcctacctgtagctgcggctgctcgagttcccattgtgtcaaggatggagagttgccgccatatcttgaacagaaacatgatccagatgaggaagtatcgcctgtcgtgaagtgttcggatcatatgtgtcccatccgcatccactggcatgtgaaagtgaactatagagagtattggagggttaagatcacagcaacaaatttcaacacaatgaagaattacactaattggaacttagtggtgcttcatccaaacttgaaaagcgtccaacaagtctttagctttaactacaaatctttgacaccatatcaaaacagcatcaatgacacagggatgttttggggagtccagttttataatgatgttttgcttcaagaaggaaagattgggaatgttcaaacagagttattgctgaagaaggatatgggaaatttcactttcagagaaggttgggctttcccaaggagaatcttgttcaatggtgatgaatgtgttatgccttctccagatgactttccaaggctgccaaaatctgctcattcctcttcgtcttcctctgctgttattagctctgtttcagtcgttttctgttttctccttcatcatcttcttctactagtttga

SEQ ID NO: 42402 - protein, 454 aa, Arabidopsis thaliana
  peptide (1)..(454): Ceres Seq. ID no. 13494653
  misc_feature (24)..(445): Homolog of NCBI NO: 18424412 NR Description: phytochelatin synthetase - like protein
  misc_feature (24)..(454): Homolog of NCBI NO: 38344980 NR Description: OSJNBa0011L07.10 [Oryza sativa (japonica
  misc_feature (33)..(454): Homolog of NCBI NO: 34394569 NR Description: putative phytochelatin synthetase
  misc_feature (24)..(445): Homolog of NCBI NO: 21553837 NR Description: phytochelatin synthetase-like protein
  misc_feature (24)..(448): Homolog of NCBI NO: 15232863 NR Description: predicted GPI-anchored protein [Arabidopsis
  misc_feature (12)..(426): Homolog of NCBI NO: 30090026 NR Description: phytochelatin synthetase-like protein 2 [Sorghum
  misc_feature (1)..(60): Homolog of NCBI NO: 25402576 NR Description: hypothetical protein [imported] - Arabidopsis
  misc_feature (61)..(185): Homolog of NCBI NO: 25402576 NR Description: hypothetical protein [imported] - Arabidopsis
  misc_feature (213)..(442): Homolog of NCBI NO: 25402576 NR Description: hypothetical protein [imported] - Arabidopsis
  misc_feature (1)..(454): Homolog of NCBI NO: 30681356 NR Description: phytochelatin synthetase -related [Arabidopsis
MGAMLNLLLVVTVILCSILSPTRFMIMIDKMVADGYDPLDPFGKIIIKWDLLLSSPGQHHVQVTLENMQEYRHVEKPGWKLSWHWLNQEVIWDMKGAETTEQGNCSAFASSGNLPHCCLERPTIVDLLPGASLNVQVANCCRGGVLTSMSQDHANHVSAFHMTVGSSPDGPEEFNMPSNFDIGVPGYSCDNATSVSPTKFSTDKGRRKTQALATWEAVCVYSQFRSSPSPKCCVSLSAFYYQNIVPCPTCSCGCSSSHCVKDGELPPYLEQKHDPDEEVSPVVKCSDHMCPIRIHWHVKVNYREYWRVKITATNFNTMKNYTNWNLVVLHPNLKSVQQVFSFNYKSLTPYQNSINDTGMFWGVQFYNDVLLQEGKIGNVQTELLLKKDMGNFTFREGWAFPRRILFNGDECVMPSPDDFPRLPKSAHSSSSSSAVISSVSVVFCFLLHHLLLLV

SEQ ID NO: 42403 - protein, 451 aa, Arabidopsis thaliana
  peptide (1)..(451): Ceres Seq. ID no. 13494654
  misc_feature (21)..(442): Homolog of NCBI NO: 18424412 NR Description: phytochelatin synthetase - like protein
  misc_feature (21)..(451): Homolog of NCBI NO: 38344980 NR Description: OSJNBa0011L07.10 [Oryza sativa (japonica
  misc_feature (30)..(451): Homolog of NCBI NO: 34394569 NR Description: putative phytochelatin synthetase
  misc_feature (21)..(442): Homolog of NCBI NO: 21553837 NR Description: phytochelatin synthetase-like protein
  misc_feature (21)..(445): Homolog of NCBI NO: 15232863 NR Description: predicted GPI-anchored protein [Arabidopsis
  misc_feature (9)..(423): Homolog of NCBI NO: 30090026 NR Description: phytochelatin synthetase-like protein 2 [Sorghum
  misc_feature (1)..(57): Homolog of NCBI NO: 25402576 NR Description: hypothetical protein [imported] - Arabidopsis
  misc_feature (58)..(182): Homolog of NCBI NO: 25402576 NR Description: hypothetical protein [imported] - Arabidopsis
  misc_feature (210)..(439): Homolog of NCBI NO: 25402576 NR Description: hypothetical protein [imported] - Arabidopsis
  misc_feature (1)..(451): Homolog of NCBI NO: 30681356 NR Description: phytochelatin synthetase -related [Arabidopsis
MLNLLLVVTVILCSILSPTRFMIMIDKMVADGYDPLDPFGKIIIKWDLLLSSPGQHHVQVTLENMQEYRHVEKPGWKLSWHWLNQEVIWDMKGAETTEQGNCSAFASSGNLPHCCLERPTIVDLLPGASLNVQVANCCRGGVLTSMSQDHANHVSAFHMTVGSSPDGPEEFNMPSNFDIGVPGYSCDNATSVSPTKFSTDKGRRKTQALATWEAVCVYSQFRSSPSPKCCVSLSAFYYQNIVPCPTCSCGCSSSHCVKDGELPPYLEQKHDPDEEVSPVVKCSDHMCPIRIHWHVKVNYREYWRVKITATNFNTMKNYTNWNLVVLHPNLKSVQQVFSFNYKSLTPYQNSINDTGMFWGVQFYNDVLLQEGKIGNVQTELLLKKDMGNFTFREGWAFPRRILFNGDECVMPSPDDFPRLPKSAHSSSSSSAVISSVSVVFCFLLHHLLLLV

SEQ ID NO: 42404 - protein, 430 aa, Arabidopsis thaliana
  peptide (1)..(430): Ceres Seq. ID no. 13494655
  misc_feature (1)..(421): Homolog of NCBI NO: 18424412 NR Description: phytochelatin synthetase - like protein
  misc_feature (1)..(430): Homolog of NCBI NO: 38344980 NR Description: OSJNBa0011L07.10 [Oryza sativa (japonica
  misc_feature (9)..(430): Homolog of NCBI NO: 34394569 NR Description: putative phytochelatin synthetase
  misc_feature (1)..(421): Homolog of NCBI NO: 21553837 NR Description: phytochelatin synthetase-like protein
  misc_feature (1)..(424): Homolog of NCBI NO: 15232863 NR Description: predicted GPI-anchored protein [Arabidopsis
  misc_feature (1)..(402): Homolog of NCBI NO: 30090026 NR Description: phytochelatin synthetase-like protein 2 [Sorghum
  misc_feature (1)..(36): Homolog of NCBI NO: 25402576 NR Description: hypothetical protein [imported] - Arabidopsis
  misc_feature (37)..(161): Homolog of NCBI NO: 25402576 NR Description: hypothetical protein [imported] - Arabidopsis
  misc_feature (189)..(418): Homolog of NCBI NO: 25402576 NR Description: hypothetical protein [imported] - Arabidopsis
  misc_feature (1)..(430): Homolog of NCBI NO: 30681356 NR Description: phytochelatin synthetase -related [Arabidopsis
MIMIDKMVADGYDPLDPFGKIIIKWDLLLSSPGQHHVQVTLENMQEYRHVEKPGWKLSWHWLNQEVIWDMKGAETTEQGNCSAFASSGNLPHCCLERPTIVDLLPGASLNVQVANCCRGGVLTSMSQDHANHVSAFHMTVGSSPDGPEEFNMPSNFDIGVPGYSCDNATSVSPTKFSTDKGRRKTQALATWEAVCVYSQFRSSPSPKCCVSLSAFYYQNIVPCPTCSCGCSSSHCVKDGELPPYLEQKHDPDEEVSPVVKCSDHMCPIRIHWHVKVNYREYWRVKITATNFNTMKNYTNWNLVVLHPNLKSVQQVFSFNYKSLTPYQNSINDTGMFWGVQFYNDVLLQEGKIGNVQTELLLKKDMGNFTFREGWAFPRRILFNGDECVMPSPDDFPRLPKSAHSSSSSSAVISSVSVVFCFLLHHLLLLV

SEQ ID NO: 42405 - DNA, 769 bp, Arabidopsis thaliana
  misc_feature (1)..(769): Ceres Seq. ID no. 13488305
  misc_feature: MA Experiment ID: 20000173 Result: Up-regulated in Transcription
  misc_feature: MA Experiment 20000173 PARAMETER Experiment Name: At_42deg_Heat_P Parameter: Age (day) Value: 14
  misc_feature: MA Experiment 20000173 PARAMETER Experiment Name: At_42deg_Heat_P Parameter: Organism Value: A. thaliana
  misc_feature: MA Experiment 20000173 PARAMETER Experiment Name: At_42deg_Heat_P Parameter: Plant Line Value: WS
  misc_feature: MA Experiment 20000173 PARAMETER Experiment Name: At_42deg_Heat_P Parameter: Temperature (deg C) Value: 42 vs. 22
  misc_feature: MA Experiment 20000173 PARAMETER Experiment Name: At_42deg_Heat_P Parameter: Timepoint (hr) Value: 6
  misc_feature: MA Experiment 20000173 PARAMETER Experiment Name: At_42deg_Heat_P Parameter: Tissue Value: Aerial
  misc_feature: MA Experiment ID: 20000180 Result: Down-regulated in Transcription
  misc_feature: MA Experiment 20000180 PARAMETER Experiment Name: At_Germinating_Seeds_P Parameter: Age (hr) Value: 24 vs. 0
  misc_feature: MA Experiment 20000180 PARAMETER Experiment Name: At_Germinating_Seeds_P Parameter: Tissue Value: Germinating Seeds
  misc_feature: MA Experiment ID: 20000184 Result: Down-regulated in Transcription
  misc_feature: MA Experiment 20000184 PARAMETER Experiment Name: At_Shoots__P Parameter: Age (day) Value: 7
  misc_feature: MA Experiment 20000184 PARAMETER Experiment Name: At_Shoots__P Parameter: Tissue Value: Shoots vs. Whole Plant
  misc_feature: MA Experiment ID: 20000234 Result: Up-regulated in Transcription
  misc_feature: MA Experiment 20000234 PARAMETER Experiment Name: At_Siliques_P Parameter: Age (day) Value: 21
  misc_feature: MA Experiment 20000234 PARAMETER Experiment Name: At_Siliques_P Parameter: Organism Value: A. thaliana
  misc_feature: MA Experiment 20000234 PARAMETER Experiment Name: At_Siliques_P Parameter: Plant Line Value: WS
  misc_feature: MA Experiment 20000234 PARAMETER Experiment Name: At_Siliques_P Parameter: Tissue Value: Less Than 5mm Siliques vs. Whole Plant
  misc_feature: MA Experiment ID: 20000264 Result: Up-regulated in Transcription
  misc_feature: MA Experiment 20000264 PARAMETER Experiment Name: At_Open_Flower_P Parameter: Age (day) Value: 21
  misc_feature: MA Experiment 20000264 PARAMETER Experiment Name: At_Open_Flower_P Parameter: Plant Line Value: WS
  misc_feature: MA Experiment 20000264 PARAMETER Experiment Name: At_Open_Flower_P Parameter: Tissue Value: Open Flower vs. Whole Plant
  misc_feature: MA Experiment ID: 20000265 Result: Up-regulated in Transcription
  misc_feature: MA Experiment 20000265 PARAMETER Experiment Name: At_Open_Flower_P Parameter: Age (day) Value: 21
  misc_feature: MA Experiment 20000265 PARAMETER Experiment Name: At_Open_Flower_P Parameter: Plant Line Value: WS
  misc_feature: MA Experiment 20000265 PARAMETER Experiment Name: At_Open_Flower_P Parameter: Tissue Value: Closed Flower vs. Whole Plant
  misc_feature: MA Experiment ID: 20000495 Result: Up-regulated in Transcription
  misc_feature: MA Experiment 20000495 PARAMETER Experiment Name: At_Guard_Cells_P Parameter: Harvest Date Value: 8/2/2002
  misc_feature: MA Experiment 20000495 PARAMETER Experiment Name: At_Guard_Cells_P Parameter: Organism Value: A. thaliana
  misc_feature: MA Experiment 20000495 PARAMETER Experiment Name: At_Guard_Cells_P Parameter: Tissue Value: Guard Cells vs. Leaves
  misc_feature: MA Experiment ID: 20001555 Result: Up-regulated in Transcription
  misc_feature: MA Experiment 20001555 PARAMETER Experiment Name: At_Drought_Soil_Dry_P Parameter: Age (day) Value: 24
  misc_feature: MA Experiment 20001555 PARAMETER Experiment Name: At_Drought_Soil_Dry_P Parameter: Organism Value: A. thaliana
  misc_feature: MA Experiment 20001555 PARAMETER Experiment Name: At_Drought_Soil_Dry_P Parameter: Plant Line Value: WS
  misc_feature: MA Experiment 20001555 PARAMETER Experiment Name: At_Drought_Soil_Dry_P Parameter: Post Timepoint (hr) Value: None
  misc_feature: MA Experiment 20001555 PARAMETER Experiment Name: At_Drought_Soil_Dry_P Parameter: Post-Treatment Value: None
  misc_feature: MA Experiment 20001555 PARAMETER Experiment Name: At_Drought_Soil_Dry_P Parameter: Timepoint (day) Value: 10
  misc_feature: MA Experiment 20001555 PARAMETER Experiment Name: At_Drought_Soil_Dry_P Parameter: Treatment Value: Drought vs. No Drought
  misc_feature: MA Experiment ID: 20001556 Result: Up-regulated in Transcription
  misc_feature: MA Experiment 20001556 PARAMETER Experiment Name: At_Drought_Soil_Dry_P Parameter: Age (day) Value: 26
  misc_feature: MA Experiment 20001556 PARAMETER Experiment Name: At_Drought_Soil_Dry_P Parameter: Organism Value: A. thaliana
  misc_feature: MA Experiment 20001556 PARAMETER Experiment Name: At_Drought_Soil_Dry_P Parameter: Plant Line Value: WS
  misc_feature: MA Experiment 20001556 PARAMETER Experiment Name: At_Drought_Soil_Dry_P Parameter: Post Timepoint (hr) Value: None
  misc_feature: MA Experiment 20001556 PARAMETER Experiment Name: At_Drought_Soil_Dry_P Parameter: Post-Treatment Value: None
  misc_feature: MA Experiment 20001556 PARAMETER Experiment Name: At_Drought_Soil_Dry_P Parameter: Timepoint (day) Value: 12
  misc_feature: MA Experiment 20001556 PARAMETER Experiment Name: At_Drought_Soil_Dry_P Parameter: Treatment Value: Drought vs. No Drought
  misc_feature: MA Experiment ID: 20001557 Result: Up-regulated in Transcription
  misc_feature: MA Experiment 20001557 PARAMETER Experiment Name: At_Drought_Soil_Dry_P Parameter: Age (day) Value: 27
  misc_feature: MA Experiment 20001557 PARAMETER Experiment Name: At_Drought_Soil_Dry_P Parameter: Organism Value: A. thaliana
  misc_feature: MA Experiment 20001557 PARAMETER Experiment Name: At_Drought_Soil_Dry_P Parameter: Plant Line Value: WS
  misc_feature: MA Experiment 20001557 PARAMETER Experiment Name: At_Drought_Soil_Dry_P Parameter: Post Timepoint (hr) Value: 3
  misc_feature: MA Experiment 20001557 PARAMETER Experiment Name: At_Drought_Soil_Dry_P Parameter: Post-Treatment Value: Re-Water vs. No Drought
  misc_feature: MA Experiment 20001557 PARAMETER Experiment Name: At_Drought_Soil_Dry_P Parameter: Timepoint (day) Value: 13
  misc_feature: MA Experiment 20001557 PARAMETER Experiment Name: At_Drought_Soil_Dry_P Parameter: Treatment Value: Drought vs. No Drought
  misc_feature: MA Experiment ID: 20001558 Result: Up-regulated in Transcription
  misc_feature: MA Experiment 20001558 PARAMETER Experiment Name: At_Drought_Soil_Dry_P Parameter: Age (day) Value: 27
  misc_feature: MA Experiment 20001558 PARAMETER Experiment Name: At_Drought_Soil_Dry_P Parameter: Organism Value: A. thaliana
  misc_feature: MA Experiment 20001558 PARAMETER Experiment Name: At_Drought_Soil_Dry_P Parameter: Plant Line Value: WS
  misc_feature: MA Experiment 20001558 PARAMETER Experiment Name: At_Drought_Soil_Dry_P Parameter: Post Timepoint (hr) Value: 6
  misc_feature: MA Experiment 20001558 PARAMETER Experiment Name: At_Drought_Soil_Dry_P Parameter: Post-Treatment Value: Re-Water vs. No Drought
  misc_feature: MA Experiment 20001558 PARAMETER Experiment Name: At_Drought_Soil_Dry_P Parameter: Timepoint (day) Value: 13
  misc_feature: MA Experiment 20001558 PARAMETER Experiment Name: At_Drought_Soil_Dry_P Parameter: Treatment Value: Drought vs. No Drought
  misc_feature: MA Experiment ID: 20001560 Result: Up-regulated in Transcription
  misc_feature: MA Experiment 20001560 PARAMETER Experiment Name: At_Drought_Soil_Dry_P Parameter: Age (day) Value: 28
  misc_feature: MA Experiment 20001560 PARAMETER Experiment Name: At_Drought_Soil_Dry_P Parameter: Organism Value: A. thaliana
  misc_feature: MA Experiment 20001560 PARAMETER Experiment Name: At_Drought_Soil_Dry_P Parameter: Plant Line Value: WS
  misc_feature: MA Experiment 20001560 PARAMETER Experiment Name: At_Drought_Soil_Dry_P Parameter: Post Timepoint (hr) Value: None
  misc_feature: MA Experiment 20001560 PARAMETER Experiment Name: At_Drought_Soil_Dry_P Parameter: Post-Treatment Value: None
  misc_feature: MA Experiment 20001560 PARAMETER Experiment Name: At_Drought_Soil_Dry_P Parameter: Timepoint (day) Value: 14
  misc_feature: MA Experiment 20001560 PARAMETER Experiment Name: At_Drought_Soil_Dry_P Parameter: Treatment Value: Drought vs. No Drought
  misc_feature: MA Experiment ID: 20001911 Result: Up-regulated in Transcription
  misc_feature: MA Experiment 20001911 PARAMETER Experiment Name: At_Drought_Reproduction_P Parameter: Age (day) Value: 40
  misc_feature: MA Experiment 20001911 PARAMETER Experiment Name: At_Drought_Reproduction_P Parameter: Organism Value: A. thaliana
  misc_feature: MA Experiment 20001911 PARAMETER Experiment Name: At_Drought_Reproduction_P Parameter: Plant Line Value: WS
  misc_feature: MA Experiment 20001911 PARAMETER Experiment Name: At_Drought_Reproduction_P Parameter: Timepoint (day) Value: 10
  misc_feature: MA Experiment 20001911 PARAMETER Experiment Name: At_Drought_Reproduction_P Parameter: Tissue Value: Flowers
  misc_feature: MA Experiment 20001911 PARAMETER Experiment Name: At_Drought_Reproduction_P Parameter: Treatment Value: Drought vs. No Drought
cttccgcctccgtcatagaacgcagaactgggtggatcaccgtggtcgtcaaattcctagctcctcgactccaaaaaaaaatcataaacgtattaccgtctcttgttttcctcgtaaggtattatatcggtcgaagtctccaatcatcggtctgagtaatctctgacaatggctgcaagagttttggcaagtgtgattgtgatgggctctggaatcatagccagggcttgtactcaggcatatcgtcaggcgcttgcaaatgcatcaaaaaccggggttgcgcatgaagcgacacagactattaagagagggttgactataggtgaagcagaagctagacagattcttggtgtaactgagaaatcatcttgggacgagattcttaagaaatacgacacgttgttcgaacgcaatgcgcagaatggaagcttctatctccaatctaaggtccatagagctaaggaatgcttagagactgcataccagaagagtacaacaacaagcgcatgaacaagcaataaaacaataggagcaaatcaggaacatatcttttgatacaagttatagttttaggacagaagtttgaaattgagtggagatagccgcaaaagttgaaattgagacaaggtcggtgatggccggaatgctgccagtaaccgactcaccggcgttgttaaaagtcttgttattttgtttaataatattgacttttctagttcttaggtaaactagttgaattctagcatgtctattgaattatctgagtttg

SEQ ID NO: 42406 - protein, 113 aa, Arabidopsis thaliana
  peptide (1)..(113): Ceres Seq. ID no. 13488306
  misc_feature (1)..(113): Pfam Name: Uncharacterised protein family (UPF0108) Pfam Description: Uncharacterised protein family (UPF0108)
  misc_feature (4)..(103): Homolog of NCBI NO: 19112141 NR Description: conserved hypothetical protein; similar to S.
  misc_feature (12)..(108): Homolog of NCBI NO: 37535410 NR Description: putative pol polyprotein [Oryza sativa (japonica
  misc_feature (1)..(112): Homolog of NCBI NO: 34905796 NR Description: P0401G10.24 [Oryza sativa (japonica
  misc_feature (1)..(106): Homolog of NCBI NO: 11357639 NR Description: hypothetical protein F25L23.140 - Arabidopsis
  misc_feature (1)..(106): Homolog of NCBI NO: 18411133 NR Description: expressed protein [Arabidopsis thaliana]
  misc_feature (12)..(113): Homolog of NCBI NO: 10176880 NR Description: gene_id:MAC9.20~unknown protein [Arabidopsis
  misc_feature (1)..(113): Homolog of NCBI NO: 18424521 NR Description: auxin-regulated protein [Arabidopsis thaliana]
MAARVLASVIVMGSGIIARACTQAYRQALANASKTGVAHEATQTIKRGLTIGEAEARQILGVTEKSSWDEILKKYDTLFERNAQNGSFYLQSKVHRAKECLETAYQKSTTTSA

SEQ ID NO: 42407 - protein, 102 aa, Arabidopsis thaliana
  peptide (1)..(102): Ceres Seq. ID no. 13488307
  misc_feature (1)..(102): Pfam Name: Uncharacterised protein family (UPF0108) Pfam Description: Uncharacterised protein family (UPF0108)
  misc_feature (1)..(92): Homolog of NCBI NO: 19112141 NR Description: conserved hypothetical protein; similar to S.
  misc_feature (1)..(97): Homolog of NCBI NO: 37535410 NR Description: putative pol polyprotein [Oryza sativa (japonica
  misc_feature (1)..(101): Homolog of NCBI NO: 34905796 NR Description: P0401G10.24 [Oryza sativa (japonica
  misc_feature (1)..(95): Homolog of NCBI NO: 11357639 NR Description: hypothetical protein F25L23.140 - Arabidopsis
  misc_feature (1)..(95): Homolog of NCBI NO: 18411133 NR Description: expressed protein [Arabidopsis thaliana]
  misc_feature (1)..(102): Homolog of NCBI NO: 10176880 NR Description: gene_id:MAC9.20~unknown protein [Arabidopsis
  misc_feature (1)..(102): Homolog of NCBI NO: 18424521 NR Description: auxin-regulated protein [Arabidopsis thaliana]
MGSGIIARACTQAYRQALANASKTGVAHEATQTIKRGLTIGEAEARQILGVTEKSSWDEILKKYDTLFERNAQNGSFYLQSKVHRAKECLETAYQKSTTTSA

SEQ ID NO: 42408 - DNA, 2346 bp, Arabidopsis thaliana
  misc_feature (1)..(2346): Ceres Seq. ID no. 13509044
  misc_feature: MA Experiment ID: 20000315 Result: Down-regulated in Transcription
  misc_feature: MA Experiment 20000315 PARAMETER Experiment Name: At_14day_Shoots-Roots_Sub_P Parameter: Age (day) Value: 14
  misc_feature: MA Experiment 20000315 PARAMETER Experiment Name: At_14day_Shoots-Roots_Sub_P Parameter: Organism Value: A. thaliana
  misc_feature: MA Experiment 20000315 PARAMETER Experiment Name: At_14day_Shoots-Roots_Sub_P Parameter: Plant Line Value: WS
  misc_feature: MA Experiment 20000315 PARAMETER Experiment Name: At_14day_Shoots-Roots_Sub_P Parameter: Tissue Value: Shoots vs. Whole Plant
  misc_feature: MA Experiment ID: 20000347 Result: Up-regulated in Transcription
  misc_feature: MA Experiment 20000347 PARAMETER Experiment Name: At_2mM_SA_Sub_P Parameter: Age (day) Value: 14
  misc_feature: MA Experiment 20000347 PARAMETER Experiment Name: At_2mM_SA_Sub_P Parameter: Organism Value: A. thaliana
  misc_feature: MA Experiment 20000347 PARAMETER Experiment Name: At_2mM_SA_Sub_P Parameter: Plant Line Value: WS
  misc_feature: MA Experiment 20000347 PARAMETER Experiment Name: At_2mM_SA_Sub_P Parameter: Timepoint (hr) Value: 6
  misc_feature: MA Experiment 20000347 PARAMETER Experiment Name: At_2mM_SA_Sub_P Parameter: Tissue Value: Aerial
  misc_feature: MA Experiment 20000347 PARAMETER Experiment Name: At_2mM_SA_Sub_P Parameter: Treatment Value: 2mM SA vs. No Treatment
atcctttgataactttccggcaaaatctcagaacctccccatttttctttgccgattattgatcggaattgctttgttcgctcatctgccaacttccttcctactcggtgtaggaatcttacgtgtccaatcatctgtctatttttggaaacaaatcctcagtgattttgtactttacttatatcaaattcgataactagggtttatcgaatcggattgttgtttctccaattataataattcaagttggttcacacagtagcgtcgacttttcatagccgctgttgtcgaattttgaatttctcgattttcccggcgcttttgttacgattcaaggagtttgaacaagtagggcttctcgttgcggagatcatggatattgacggagtagacgacgatcttcatattttagatcctgagctcttgcagctccccggtttgtctccttctcccctcaaaccaacctctcttattgctgatgacctcttctctcagtggctctcactccctgaaactgccacattggtcaagtctttgattgatgatgctaaatctggaacaccaactaataaatccaagaatttgccttctgtgtttctgagcagcagcactcccccactatctccacgaagctcctctggttcccctcgtttctccaggcaaaggactagccctccttctctccactctcctcttagatcactcaaggagccaaagcgccaactcattcctcagttctactaccaacacgggcgtccaccagcaaaagaactaaaggagcaatgtctatccatggttgatcaagtttttagaatatataaggcagttcattttaccattctcgttcctcttgcagaattcaaatccattacgaaacaagtctgcaagctgccttcttttctttctcctgcacttttcagaaagatcgatcccaattgcactgatatagttacaagggatgcatttatcaagtattggattgatggcaatatgttaactatggacacagcctcccagatatataatatactaaggcagcagggctgcagctatctcagacaggcagacttcaaaccagttcttgatgagcttctggcaacacatcctggattagaatttttgaggacgataagcgagtttcaagaaagatatgctgaaacggtcatctacagaatattttactacattaacagatccggaactggctgccttactcttagagagctgagacgtggaaatttaattgctgctatgcaacaacttgatgaagaggacgacattaataaaattattaggtacttctcctatgagcacttctacgtgatatactgcaaattttgggaacttgatggtgaccatgattgttttattgataaggacaatctcatcaaatatggtaataatgcccttacctacaggattgttgatagaatattttcacagattccaaggaagtttacgagtaaagttgaagggaagatgagttatgaagattttgtgtacttcattctcgctgaggaagacaagtcttccgagcctagtcttgagtattggttcaaatgcgtagacttggatggaaatggggtaatcacttcaaacgaaatgcagtttttcttcgaagagcagctgcatcgcatggaatgcataacccaggaagctgttcttttcagtgatatcctatgtcaaataattgacatgattggacccgagaaggagaactgtatcaccctccaggatctgaaaggatcgaaactttcagcaaacgttttcaatatactcttcaaccttaataagttcatggcatttgaaacacgtgacccatttctcattcgccaggaacgggaagatccaaatttgacagagtgggatcgatttgctcagagagagtatgcgagattgtcaatggaggaagatgtagatgaagtctcaaatgggagtgcagatgtctgggatgaaccactcgaacctccattttagtccatagtgaaaccaaccaaataaggagacttatgatttgaggttttccctggagagagatccatgatcagagattggaggtcactgttggttgttaccagacgctttcatcatcatttccaaaagagtctcagccaaattcatgaaattttagcaattttgttttggtttcattataaagattatatcaagttgggccctctctccctctacatcatctagtgtccatataaccagttggattgtccaactcagaatgtactcataaatctgaattgttaaactcttttagtctttactgtcacacgaatatattttcagaaagaaatctgaattgtaaatctctttagttgcactgatatctttttc

SEQ ID NO: 42409 - protein, 534 aa, Arabidopsis thaliana
  peptide (1)..(534): Ceres Seq. ID no. 13509045
  misc_feature (390)..(418): Pfam Name: EF hand Pfam Description: EF hand
  misc_feature (1)..(195): Homolog of NCBI NO: 16905168 NR Description: putative phosphatase subunit, 3'-partial [Oryza
  misc_feature (176)..(488): Homolog of NCBI NO: 16905168 NR Description: putative phosphatase subunit, 3'-partial [Oryza
  misc_feature (13)..(534): Homolog of NCBI NO: 15221817 NR Description: protein phosphatase 2A 72 kDa regulatory subunit
  misc_feature (6)..(534): Homolog of NCBI NO: 18421273 NR Description: protein phosphatase 2A regulatory subunit
  misc_feature (6)..(534): Homolog of NCBI NO: 15241978 NR Description: protein phosphatase 2A regulatory subunit
  misc_feature (1)..(195): Homolog of NCBI NO: 37535364 NR Description: putative protein phosphatase 2A regulatory
  misc_feature (176)..(534): Homolog of NCBI NO: 37535364 NR Description: putative protein phosphatase 2A regulatory
  misc_feature (1)..(534): Homolog of NCBI NO: 15240089 NR Description: protein phosphatase 2A 62 kDa B regulatory
  misc_feature (1)..(534): Homolog of NCBI NO: 28393301 NR Description: putative protein phosphatase 2A [Arabidopsis
  misc_feature (1)..(534): Homolog of NCBI NO: 15219596 NR Description: protein phosphatase 2A -related [Arabidopsis
MDIDGVDDDLHILDPELLQLPGLSPSPLKPTSLIADDLFSQWLSLPETATLVKSLIDDAKSGTPTNKSKNLPSVFLSSSTPPLSPRSSSGSPRFSRQRTSPPSLHSPLRSLKEPKRQLIPQFYYQHGRPPAKELKEQCLSMVDQVFRIYKAVHFTILVPLAEFKSITKQVCKLPSFLSPALFRKIDPNCTDIVTRDAFIKYWIDGNMLTMDTASQIYNILRQQGCSYLRQADFKPVLDELLATHPGLEFLRTISEFQERYAETVIYRIFYYINRSGTGCLTLRELRRGNLIAAMQQLDEEDDINKIIRYFSYEHFYVIYCKFWELDGDHDCFIDKDNLIKYGNNALTYRIVDRIFSQIPRKFTSKVEGKMSYEDFVYFILAEEDKSSEPSLEYWFKCVDLDGNGVITSNEMQFFFEEQLHRMECITQEAVLFSDILCQIIDMIGPEKENCITLQDLKGSKLSANVFNILFNLNKFMAFETRDPFLIRQEREDPNLTEWDRFAQREYARLSMEEDVDEVSNGSADVWDEPLEPPF

SEQ ID NO: 42410 - protein, 394 aa, Arabidopsis thaliana
  peptide (1)..(394): Ceres Seq. ID no. 13509046
  misc_feature (250)..(278): Pfam Name: EF hand Pfam Description: EF hand
  misc_feature (1)..(55): Homolog of NCBI NO: 16905168 NR Description: putative phosphatase subunit, 3'-partial [Oryza
  misc_feature (36)..(348): Homolog of NCBI NO: 16905168 NR Description: putative phosphatase subunit, 3'-partial [Oryza
  misc_feature (1)..(394): Homolog of NCBI NO: 15221817 NR Description: protein phosphatase 2A 72 kDa regulatory subunit
  misc_feature (1)..(394): Homolog of NCBI NO: 18421273 NR Description: protein phosphatase 2A regulatory subunit
  misc_feature (1)..(394): Homolog of NCBI NO: 15241978 NR Description: protein phosphatase 2A regulatory subunit
  misc_feature (1)..(55): Homolog of NCBI NO: 37535364 NR Description: putative protein phosphatase 2A regulatory
  misc_feature (36)..(394): Homolog of NCBI NO: 37535364 NR Description: putative protein phosphatase 2A regulatory
  misc_feature (1)..(394): Homolog of NCBI NO: 15240089 NR Description: protein phosphatase 2A 62 kDa B regulatory
  misc_feature (1)..(394): Homolog of NCBI NO: 28393301 NR Description: putative protein phosphatase 2A [Arabidopsis
  misc_feature (1)..(394): Homolog of NCBI NO: 15219596 NR Description: protein phosphatase 2A -related [Arabidopsis
MVDQVFRIYKAVHFTILVPLAEFKSITKQVCKLPSFLSPALFRKIDPNCTDIVTRDAFIKYWIDGNMLTMDTASQIYNILRQQGCSYLRQADFKPVLDELLATHPGLEFLRTISEFQERYAETVIYRIFYYINRSGTGCLTLRELRRGNLIAAMQQLDEEDDINKIIRYFSYEHFYVIYCKFWELDGDHDCFIDKDNLIKYGNNALTYRIVDRIFSQIPRKFTSKVEGKMSYEDFVYFILAEEDKSSEPSLEYWFKCVDLDGNGVITSNEMQFFFEEQLHRMECITQEAVLFSDILCQIIDMIGPEKENCITLQDLKGSKLSANVFNILFNLNKFMAFETRDPFLIRQEREDPNLTEWDRFAQREYARLSMEEDVDEVSNGSADVWDEPLEPPF

SEQ ID NO: 42411 - protein, 328 aa, Arabidopsis thaliana
  peptide (1)..(328): Ceres Seq. ID no. 13509047
  misc_feature (184)..(212): Pfam Name: EF hand Pfam Description: EF hand
  misc_feature (1)..(326): Homolog of NCBI NO: 19923229 NR Description: protein phosphatase 2 (formerly 2A), regulatory
  misc_feature (24)..(328): Homolog of NCBI NO: 30692025 NR Description: protein phosphatase 2A regulatory subunit
  misc_feature (1)..(282): Homolog of NCBI NO: 16905168 NR Description: putative phosphatase subunit, 3'-partial [Oryza
  misc_feature (1)..(328): Homolog of NCBI NO: 15221817 NR Description: protein phosphatase 2A 72 kDa regulatory subunit
  misc_feature (1)..(328): Homolog of NCBI NO: 18421273 NR Description: protein phosphatase 2A regulatory subunit
  misc_feature (1)..(328): Homolog of NCBI NO: 15241978 NR Description: protein phosphatase 2A regulatory subunit
  misc_feature (1)..(328): Homolog of NCBI NO: 37535364 NR Description: putative protein phosphatase 2A regulatory
  misc_feature (1)..(328): Homolog of NCBI NO: 15240089 NR Description: protein phosphatase 2A 62 kDa B regulatory
  misc_feature (1)..(328): Homolog of NCBI NO: 28393301 NR Description: putative protein phosphatase 2A [Arabidopsis
  misc_feature (1)..(328): Homolog of NCBI NO: 15219596 NR Description: protein phosphatase 2A -related [Arabidopsis
MLTMDTASQIYNILRQQGCSYLRQADFKPVLDELLATHPGLEFLRTISEFQERYAETVIYRIFYYINRSGTGCLTLRELRRGNLIAAMQQLDEEDDINKIIRYFSYEHFYVIYCKFWELDGDHDCFIDKDNLIKYGNNALTYRIVDRIFSQIPRKFTSKVEGKMSYEDFVYFILAEEDKSSEPSLEYWFKCVDLDGNGVITSNEMQFFFEEQLHRMECITQEAVLFSDILCQIIDMIGPEKENCITLQDLKGSKLSANVFNILFNLNKFMAFETRDPFLIRQEREDPNLTEWDRFAQREYARLSMEEDVDEVSNGSADVWDEPLEPPF

SEQ ID NO: 42412 - DNA, 1152 bp, Arabidopsis thaliana
  misc_feature (1)..(1152): Ceres Seq. ID no. 13495917
  misc_feature: MA Experiment ID: 108464 Result: Down-regulated in Transcription
  misc_feature: MA Experiment 108464 PARAMETER Experiment Name: At_Germinating_Seeds_cDNA_P Parameter: Age (day) Value: 4 vs. 0
  misc_feature: MA Experiment 108464 PARAMETER Experiment Name: At_Germinating_Seeds_cDNA_P Parameter: Tissue Value: Germinating Seeds
  misc_feature: MA Experiment ID: 20000264 Result: Up-regulated in Transcription
  misc_feature: MA Experiment 20000264 PARAMETER Experiment Name: At_Open_Flower_P Parameter: Age (day) Value: 21
  misc_feature: MA Experiment 20000264 PARAMETER Experiment Name: At_Open_Flower_P Parameter: Plant Line Value: WS
  misc_feature: MA Experiment 20000264 PARAMETER Experiment Name: At_Open_Flower_P Parameter: Tissue Value: Open Flower vs. Whole Plant
  misc_feature: MA Experiment ID: 20000265 Result: Up-regulated in Transcription
  misc_feature: MA Experiment 20000265 PARAMETER Experiment Name: At_Open_Flower_P Parameter: Age (day) Value: 21
  misc_feature: MA Experiment 20000265 PARAMETER Experiment Name: At_Open_Flower_P Parameter: Plant Line Value: WS
  misc_feature: MA Experiment 20000265 PARAMETER Experiment Name: At_Open_Flower_P Parameter: Tissue Value: Closed Flower vs. Whole Plant
  misc_feature: MA Experiment ID: 20000286 Result: Up-regulated in Transcription
  misc_feature: MA Experiment 20000286 PARAMETER Experiment Name: At_Open_Flower_P Parameter: Age (day) Value: 21
  misc_feature: MA Experiment 20000286 PARAMETER Experiment Name: At_Open_Flower_P Parameter: Plant Line Value: WS
  misc_feature: MA Experiment 20000286 PARAMETER Experiment Name: At_Open_Flower_P Parameter: Tissue Value: Half Open vs. Whole Plant
  misc_feature: MA Experiment ID: 20000794 Result: Up-regulated in Transcription
  misc_feature: MA Experiment 20000794 PARAMETER Experiment Name: At_Petals_P Parameter: Age (day) Value: 23-25 days
  misc_feature: MA Experiment 20000794 PARAMETER Experiment Name: At_Petals_P Parameter: Plant Line Value: WS
  misc_feature: MA Experiment 20000794 PARAMETER Experiment Name: At_Petals_P Parameter: Tissue Value: Petals vs. Whole plant
  misc_feature: MA Experiment ID: 20001910 Result: Up-regulated in Transcription
  misc_feature: MA Experiment 20001910 PARAMETER Experiment Name: At_Drought_Reproduction_P Parameter: Age (day) Value: 37
  misc_feature: MA Experiment 20001910 PARAMETER Experiment Name: At_Drought_Reproduction_P Parameter: Organism Value: A. thaliana
  misc_feature: MA Experiment 20001910 PARAMETER Experiment Name: At_Drought_Reproduction_P Parameter: Plant Line Value: WS
  misc_feature: MA Experiment 20001910 PARAMETER Experiment Name: At_Drought_Reproduction_P Parameter: Timepoint (day) Value: 7
  misc_feature: MA Experiment 20001910 PARAMETER Experiment Name: At_Drought_Reproduction_P Parameter: Tissue Value: Flowers
  misc_feature: MA Experiment 20001910 PARAMETER Experiment Name: At_Drought_Reproduction_P Parameter: Treatment Value: Drought vs. No Drought
attattttatttatctcaccaaggaaaacaaaacacaaaacaaacaaacaaacaaacccataaatcaagatctctgttttcagacagattattatcggaacaaaatgtcatcatcaggatccgacaaagagagagagacttttgtctatatggctaagctctccgaacaagccgagcgatacgacgagatggtggagacgatgaagaaagtggcgagggttaatagcgagctgactgtggaagagaggaatctgttgtcggttggttacaagaacgtgatcggagcaagaagagcttcgtggaggataatgtcgtccatcgagcagaaagaagagtctaaaggcaatgaatcaaacgtgaaacaaatcaagggttatcgccaaaaggtagaagatgagctcgctaacatttgccaagacattctcaccatcattgatcagcatctcatccctcacgctacctcaggggaagctaccgtcttctactacaagatgaaaggagattattaccgttacttggctgagtttaagaccgagcaagagaggaaggaagctgctgaacagtctctcaaaggctatgaggctgcaacacaagctgcaagcactgagcttccttcgacccatccaattcgtcttggccttgctcttaacttctctgttttctactatgagatcatgaactctcctgaaagagcttgccatttggctaagcaagccttcgatgaggcgattgcagagttagatactctaagtgaggagtcgtacaaggacagcactttgatcatgcagctcctgagagacaacctcaccctctggacttctgatcttcctgaagatggaggagaagacaacatcaagactgaagaatccaagcaagaacaggccaagcctgccgatgccactgagaactgatcaaagggcttggaagttgaatgagatttagattcgatgtccagaagggggaggcaaattcctttaaattccatagcttggtttcatcaggaagatgagatcagagacaattgaattcaatcctatattgtttcttttttgtattacttttcgtcttctttattttgttctcaattttcatgtcatcaagtattttatgttacgcaattttattatgatttgatcagcatatgcttttgcc

SEQ ID NO: 42413 - protein, 302 aa, Arabidopsis thaliana
  peptide (1)..(302): Ceres Seq. ID no. 13495918
  misc_feature (44)..(279): Pfam Name: 14-3-3 protein Pfam Description: 14-3-3 protein
  misc_feature (39)..(299): Homolog of NCBI NO: 1531629 NR Description: GF14 mu [Arabidopsis thaliana]
  misc_feature (40)..(286): Homolog of NCBI NO: 8099061 NR Description: 14-3-3 protein [Populus x canescens]
  misc_feature (40)..(281): Homolog of NCBI NO: 6752903 NR Description: 14-3-3-like protein [Euphorbia esula]
  misc_feature (40)..(282): Homolog of NCBI NO: 2822483 NR Description: 14-3-3 protein homolog [Maackia amurensis]
  misc_feature (40)..(286): Homolog of NCBI NO: 8515890 NR Description: 14-3-3 protein [Populus x canescens]
  misc_feature (40)..(290): Homolog of NCBI NO: 16755676 NR Description: 14-3-3 protein [Fritillaria cirrhosa]
  misc_feature (50)..(302): Homolog of NCBI NO: 21553476 NR Description: 14-3-3-like protein GF14 iota (General regulatory
  misc_feature (35)..(302): Homolog of NCBI NO: 18395915 NR Description: 14-3-3 protein GF14 iota (grf12) [Arabidopsis
  misc_feature (35)..(301): Homolog of NCBI NO: 25288844 NR Description: T1K7.15 protein - Arabidopsis thaliana
YFIYLTKENKTQNKQTNKPINQDLCFQTDYYRNKMSSSGSDKERETFVYMAKLSEQAERYDEMVETMKKVARVNSELTVEERNLLSVGYKNVIGARRASWRIMSSIEQKEESKGNESNVKQIKGYRQKVEDELANICQDILTIIDQHLIPHATSGEATVFYYKMKGDYYRYLAEFKTEQERKEAAEQSLKGYEAATQAASTELPSTHPIRLGLALNFSVFYYEIMNSPERACHLAKQAFDEAIAELDTLSEESYKDSTLIMQLLRDNLTLWTSDLPEDGGEDNIKTEESKQEQAKPADATEN

SEQ ID NO: 42414 - protein, 268 aa, Arabidopsis thaliana
  peptide (1)..(268): Ceres Seq. ID no. 13495919
  misc_feature (10)..(245): Pfam Name: 14-3-3 protein Pfam Description: 14-3-3 protein
  misc_feature (5)..(265): Homolog of NCBI NO: 1531629 NR Description: GF14 mu [Arabidopsis thaliana]
  misc_feature (6)..(252): Homolog of NCBI NO: 8099061 NR Description: 14-3-3 protein [Populus x canescens]
  misc_feature (6)..(247): Homolog of NCBI NO: 6752903 NR Description: 14-3-3-like protein [Euphorbia esula]
  misc_feature (6)..(248): Homolog of NCBI NO: 2822483 NR Description: 14-3-3 protein homolog [Maackia amurensis]
  misc_feature (6)..(252): Homolog of NCBI NO: 8515890 NR Description: 14-3-3 protein [Populus x canescens]
  misc_feature (6)..(256): Homolog of NCBI NO: 16755676 NR Description: 14-3-3 protein [Fritillaria cirrhosa]
  misc_feature (16)..(268): Homolog of NCBI NO: 21553476 NR Description: 14-3-3-like protein GF14 iota (General regulatory
  misc_feature (1)..(268): Homolog of NCBI NO: 18395915 NR Description: 14-3-3 protein GF14 iota (grf12) [Arabidopsis
  misc_feature (1)..(267): Homolog of NCBI NO: 25288844 NR Description: T1K7.15 protein - Arabidopsis thaliana
MSSSGSDKERETFVYMAKLSEQAERYDEMVETMKKVARVNSELTVEERNLLSVGYKNVIGARRASWRIMSSIEQKEESKGNESNVKQIKGYRQKVEDELANICQDILTIIDQHLIPHATSGEATVFYYKMKGDYYRYLAEFKTEQERKEAAEQSLKGYEAATQAASTELPSTHPIRLGLALNFSVFYYEIMNSPERACHLAKQAFDEAIAELDTLSEESYKDSTLIMQLLRDNLTLWTSDLPEDGGEDNIKTEESKQEQAKPADATEN

SEQ ID NO: 42415 - protein, 253 aa, Arabidopsis thaliana
  peptide (1)..(253): Ceres Seq. ID no. 13495920
  misc_feature (1)..(230): Pfam Name: 14-3-3 protein Pfam Description: 14-3-3 protein
  misc_feature (1)..(250): Homolog of NCBI NO: 1531629 NR Description: GF14 mu [Arabidopsis thaliana]
  misc_feature (1)..(237): Homolog of NCBI NO: 8099061 NR Description: 14-3-3 protein [Populus x canescens]
  misc_feature (1)..(232): Homolog of NCBI NO: 6752903 NR Description: 14-3-3-like protein [Euphorbia esula]
  misc_feature (1)..(233): Homolog of NCBI NO: 2822483 NR Description: 14-3-3 protein homolog [Maackia amurensis]
  misc_feature (1)..(237): Homolog of NCBI NO: 8515890 NR Description: 14-3-3 protein [Populus x canescens]
  misc_feature (1)..(241): Homolog of NCBI NO: 16755676 NR Description: 14-3-3 protein [Fritillaria cirrhosa]
  misc_feature (1)..(253): Homolog of NCBI NO: 21553476 NR Description: 14-3-3-like protein GF14 iota (General regulatory
  misc_feature (1)..(253): Homolog of NCBI NO: 18395915 NR Description: 14-3-3 protein GF14 iota (grf12) [Arabidopsis
  misc_feature (1)..(252): Homolog of NCBI NO: 25288844 NR Description: T1K7.15 protein - Arabidopsis thaliana
MAKLSEQAERYDEMVETMKKVARVNSELTVEERNLLSVGYKNVIGARRASWRIMSSIEQKEESKGNESNVKQIKGYRQKVEDELANICQDILTIIDQHLIPHATSGEATVFYYKMKGDYYRYLAEFKTEQERKEAAEQSLKGYEAATQAASTELPSTHPIRLGLALNFSVFYYEIMNSPERACHLAKQAFDEAIAELDTLSEESYKDSTLIMQLLRDNLTLWTSDLPEDGGEDNIKTEESKQEQAKPADATEN

SEQ ID NO: 42416 - DNA, 1887 bp, Arabidopsis thaliana
  misc_feature (1)..(1887): Ceres Seq. ID no. 13592813
  misc_feature: MA Experiment ID: 20000315 Result: Down-regulated in Transcription
  misc_feature: MA Experiment 20000315 PARAMETER Experiment Name: At_14day_Shoots-Roots_Sub_P Parameter: Age (day) Value: 14
  misc_feature: MA Experiment 20000315 PARAMETER Experiment Name: At_14day_Shoots-Roots_Sub_P Parameter: Organism Value: A. thaliana
  misc_feature: MA Experiment 20000315 PARAMETER Experiment Name: At_14day_Shoots-Roots_Sub_P Parameter: Plant Line Value: WS
  misc_feature: MA Experiment 20000315 PARAMETER Experiment Name: At_14day_Shoots-Roots_Sub_P Parameter: Tissue Value: Shoots vs. Whole Plant
  misc_feature: MA Experiment ID: 20000328 Result: Down-regulated in Transcription
  misc_feature: MA Experiment 20000328 PARAMETER Experiment Name: At_42deg_Heat_Sub_P Parameter: Age (day) Value: 14
  misc_feature: MA Experiment 20000328 PARAMETER Experiment Name: At_42deg_Heat_Sub_P Parameter: Organism Value: A. thaliana
  misc_feature: MA Experiment 20000328 PARAMETER Experiment Name: At_42deg_Heat_Sub_P Parameter: Plant Line Value: WS
  misc_feature: MA Experiment 20000328 PARAMETER Experiment Name: At_42deg_Heat_Sub_P Parameter: Temperature (deg C) Value: 42 vs. 22
  misc_feature: MA Experiment 20000328 PARAMETER Experiment Name: At_42deg_Heat_Sub_P Parameter: Timepoint (hr) Value: 6
  misc_feature: MA Experiment 20000328 PARAMETER Experiment Name: At_42deg_Heat_Sub_P Parameter: Tissue Value: Aerial
aacacttgagagagtctctgtctctgtaaaagatatttgagcttgagaagaacagaagaaacttccaggatcaatcaatcgatcaactttagtgaactaactcttgatttttcattcgaagttatggaatcggttcccgaatccgtaccatcgccgaactcgaatacaccgtcaataccaccgccggtgaactccgtaccgcctttcttgagtaaaacctacgacatggttgatgatccgttgaccaatgaggtcgtttcgtggagcagcgggaacaacagcttcgtcgtctggagtgtcccggagttctcgaaggtgctcttgcccaagtatttcaagcacaacaacttctccagcttcgtcagacagttaaatacttatggtttcagaaaagttgatcctgaccgatgggaatttgcaaatgaaggatttcttagaggccgaaaacaactactgaagagtattgtcaggagaaaaccttcgcatgtgcagcagaatcagcaacaaactcaagttcagagctcatctcttggtgcttgtgtcgaggtggggaagtttggaatagaagaagaagtggaaagacttaagcgggataagaatgttcttatgcaagaactcgtcaggttaaggcagcaacagcaagctactgaaaaccaactgcagaatgtgggacagaaagttcaggtgatggagcaaaggcaacaacaaatgatgtcgtttttagcaaaggctgttcaaagtccaggtttcttaaaccagttagtacaacagaataataatgatggcaacagacaaattccaggaagcaacaaaaagaggagacttcctgtagatgagcaggagaatcgtggcgacaatgtggctaatggtcttaaccgccagattgttagatatcagccgtcgataaacgaagcagcacaaaatatgcttcgacagttcttaaatactagtacctcacctcggtatgaatcagtttcaaacaatcctgacagtttcctattgggtgatgttcccagttctacctctgtagacaatgggaacccttcaagtagagtttctggagtaacattggccgagttttcacccaacacagttcagtcagcaacgaatcaagtacccgaagcaagtttggctcatcatcctcaagctggtctggttcagccaaatataggtcaaagtccggctcaaggagcagcacctgcagactcttggagccctgaatttgatttagttggatgcgagacagatagtggagagtgttttgatccaataatggctgttttagatgagtcagaaggcgatgcaatttctcctgaaggtgagggaaagatgaatgagttactggagggagtccctaagctgcccggaatccaagatccattctgggaacagttcttttctgttgaactcccagcgattgcagatacagacgagattctatcaggatcagtggagaataatgacttggtaatggaacaagaaccaaacgagtggacccgtaatgaacaacaaatgaagtatcttactgaacaaatgggactgctttcctcagaagcacagaggaaataaaggggaggttgcgaaaggagatatcaaggaaggaggaatatatcagatggtgtgtataccctttacatttttacttaaatgaagaaaaaaaacagagagaagaaacataaaagatttaccaccaagcttgtgaatagttagtagagatcggtttttgtgttgtttatattatacttttgtgtgaaaacgttcatcttgttcaattatcatctcagtagtacggtaatctgttggtcactgaccggttaatgaccaaaaaatcaagattattttcttatgtttatttcttttgatcatgaagatccttatggagggggg

SEQ ID NO: 42417 - protein, 481 aa, Arabidopsis thaliana
  peptide (1)..(481): Ceres Seq. ID no. 15221168
  misc_feature (26)..(200): Pfam Name: HSF-type DNA-binding Pfam Description: HSF-type DNA-binding
  misc_feature (1)..(477): Homolog of NCBI NO: 15223168 NR Description: heat shock transcription factor family
  misc_feature (3)..(329): Homolog of NCBI NO: 11386827 NR Description: Heat shock factor protein HSF8 (Heat shock
  misc_feature (5)..(329): Homolog of NCBI NO: 729775 NR Description: HEAT SHOCK FACTOR PROTEIN HSF8 (HEAT SHOCK
  misc_feature (26)..(476): Homolog of NCBI NO: 29126355 NR Description: putative heat shock transcription factor
  misc_feature (1)..(481): Homolog of NCBI NO: 6624612 NR Description: heat shock factor 2 [Arabidopsis thaliana]
  misc_feature (1)..(481): Homolog of NCBI NO: 15228440 NR Description: heat shock transcription factor 2 (HSF2)
  misc_feature (1)..(383): Homolog of NCBI NO: 27261140 NR Description: HSF3 DNA-binding domain/VP16 activation domain
  misc_feature (35)..(481): Homolog of NCBI NO: 11357325 NR Description: Heat Shock Factor 3 - Arabidopsis thaliana
  misc_feature (1)..(481): Homolog of NCBI NO: 30686034 NR Description: heat shock transcription factor 3 (HSF3)
  misc_feature (1)..(481): Homolog of NCBI NO: 25296101 NR Description: heat shock transcription factor HSF3
MESVPESVPSPNSNTPSIPPPVNSVPPFLSKTYDMVDDPLTNEVVSWSSGNNSFVVWSVPEFSKVLLPKYFKHNNFSSFVRQLNTYGFRKVDPDRWEFANEGFLRGRKQLLKSIVRRKPSHVQQNQQQTQVQSSSLGACVEVGKFGIEEEVERLKRDKNVLMQELVRLRQQQQATENQLQNVGQKVQVMEQRQQQMMSFLAKAVQSPGFLNQLVQQNNNDGNRQIPGSNKKRRLPVDEQENRGDNVANGLNRQIVRYQPSINEAAQNMLRQFLNTSTSPRYESVSNNPDSFLLGDVPSSTSVDNGNPSSRVSGVTLAEFSPNTVQSATNQVPEASLAHHPQAGLVQPNIGQSPAQGAAPADSWSPEFDLVGCETDSGECFDPIMAVLDESEGDAISPEGEGKMNELLEGVPKLPGIQDPFWEQFFSVELPAIADTDEILSGSVENNDLVMEQEPNEWTRNEQQMKYLTEQMGLLSSEAQRK

SEQ ID NO: 42418 - protein, 447 aa, Arabidopsis thaliana
  peptide (1)..(447): Ceres Seq. ID no. 15221169
  misc_feature (1)..(166): Pfam Name: HSF-type DNA-binding Pfam Description: HSF-type DNA-binding
  misc_feature (1)..(443): Homolog of NCBI NO: 15223168 NR Description: heat shock transcription factor family
  misc_feature (1)..(295): Homolog of NCBI NO: 11386827 NR Description: Heat shock factor protein HSF8 (Heat shock
  misc_feature (1)..(295): Homolog of NCBI NO: 729775 NR Description: HEAT SHOCK FACTOR PROTEIN HSF8 (HEAT SHOCK
  misc_feature (1)..(442): Homolog of NCBI NO: 29126355 NR Description: putative heat shock transcription factor
  misc_feature (1)..(447): Homolog of NCBI NO: 6624612 NR Description: heat shock factor 2 [Arabidopsis thaliana]
  misc_feature (1)..(447): Homolog of NCBI NO: 15228440 NR Description: heat shock transcription factor 2 (HSF2)
  misc_feature (1)..(349): Homolog of NCBI NO: 27261140 NR Description: HSF3 DNA-binding domain/VP16 activation domain
  misc_feature (1)..(447): Homolog of NCBI NO: 11357325 NR Description: Heat Shock Factor 3 - Arabidopsis thaliana
  misc_feature (1)..(447): Homolog of NCBI NO: 30686034 NR Description: heat shock transcription factor 3 (HSF3)
  misc_feature (1)..(447): Homolog of NCBI NO: 25296101 NR Description: heat shock transcription factor HSF3
MVDDPLTNEVVSWSSGNNSFVVWSVPEFSKVLLPKYFKHNNFSSFVRQLNTYGFRKVDPDRWEFANEGFLRGRKQLLKSIVRRKPSHVQQNQQQTQVQSSSLGACVEVGKFGIEEEVERLKRDKNVLMQELVRLRQQQQATENQLQNVGQKVQVMEQRQQQMMSFLAKAVQSPGFLNQLVQQNNNDGNRQIPGSNKKRRLPVDEQENRGDNVANGLNRQIVRYQPSINEAAQNMLRQFLNTSTSPRYESVSNNPDSFLLGDVPSSTSVDNGNPSSRVSGVTLAEFSPNTVQSATNQVPEASLAHHPQAGLVQPNIGQSPAQGAAPADSWSPEFDLVGCETDSGECFDPIMAVLDESEGDAISPEGEGKMNELLEGVPKLPGIQDPFWEQFFSVELPAIADTDEILSGSVENNDLVMEQEPNEWTRNEQQMKYLTEQMGLLSSEAQRK

SEQ ID NO: 42419 - protein, 320 aa, Arabidopsis thaliana
  peptide (1)..(320): Ceres Seq. ID no. 15221170
  misc_feature (1)..(316): Homolog of NCBI NO: 15223168 NR Description: heat shock transcription factor family
  misc_feature (1)..(168): Homolog of NCBI NO: 11386827 NR Description: Heat shock factor protein HSF8 (Heat shock
  misc_feature (1)..(168): Homolog of NCBI NO: 729775 NR Description: HEAT SHOCK FACTOR PROTEIN HSF8 (HEAT SHOCK
  misc_feature (1)..(315): Homolog of NCBI NO: 29126355 NR Description: putative heat shock transcription factor
  misc_feature (1)..(320): Homolog of NCBI NO: 6624612 NR Description: heat shock factor 2 [Arabidopsis thaliana]
  misc_feature (1)..(320): Homolog of NCBI NO: 15228440 NR Description: heat shock transcription factor 2 (HSF2)
  misc_feature (1)..(222): Homolog of NCBI NO: 27261140 NR Description: HSF3 DNA-binding domain/VP16 activation domain
  misc_feature (1)..(320): Homolog of NCBI NO: 11357325 NR Description: Heat Shock Factor 3 - Arabidopsis thaliana
  misc_feature (1)..(320): Homolog of NCBI NO: 30686034 NR Description: heat shock transcription factor 3 (HSF3)
  misc_feature (1)..(320): Homolog of NCBI NO: 25296101 NR Description: heat shock transcription factor HSF3
MQELVRLRQQQQATENQLQNVGQKVQVMEQRQQQMMSFLAKAVQSPGFLNQLVQQNNNDGNRQIPGSNKKRRLPVDEQENRGDNVANGLNRQIVRYQPSINEAAQNMLRQFLNTSTSPRYESVSNNPDSFLLGDVPSSTSVDNGNPSSRVSGVTLAEFSPNTVQSATNQVPEASLAHHPQAGLVQPNIGQSPAQGAAPADSWSPEFDLVGCETDSGECFDPIMAVLDESEGDAISPEGEGKMNELLEGVPKLPGIQDPFWEQFFSVELPAIADTDEILSGSVENNDLVMEQEPNEWTRNEQQMKYLTEQMGLLSSEAQRK

SEQ ID NO: 42420 - DNA, 878 bp, Arabidopsis thaliana
  misc_feature (1)..(878): Ceres Seq. ID no. 13576604
  misc_feature: MA Experiment ID: 20000227 Result: Down-regulated in Transcription
  misc_feature: MA Experiment 20000227 PARAMETER Experiment Name: At_Root-Tips-vs-Tops_P Parameter: Tissue Value: Root Tips vs. Root Tops
  misc_feature: MA Experiment ID: 20000437 Result: Down-regulated in Transcription
  misc_feature: MA Experiment 20000437 PARAMETER Experiment Name: At_Drought_P Parameter: Age (day) Value: 8
  misc_feature: MA Experiment 20000437 PARAMETER Experiment Name: At_Drought_P Parameter: Organism Value: A. thaliana
  misc_feature: MA Experiment 20000437 PARAMETER Experiment Name: At_Drought_P Parameter: Plant Line Value: WS
  misc_feature: MA Experiment 20000437 PARAMETER Experiment Name: At_Drought_P Parameter: Timepoint (hr) Value: 24
  misc_feature: MA Experiment 20000437 PARAMETER Experiment Name: At_Drought_P Parameter: Tissue Value: Whole Plant
  misc_feature: MA Experiment 20000437 PARAMETER Experiment Name: At_Drought_P Parameter: Treatment Value: Drought vs. No Drought
  misc_feature: MA Experiment ID: 20000794 Result: Down-regulated in Transcription
  misc_feature: MA Experiment 20000794 PARAMETER Experiment Name: At_Petals_P Parameter: Age (day) Value: 23-25 days
  misc_feature: MA Experiment 20000794 PARAMETER Experiment Name: At_Petals_P Parameter: Plant Line Value: WS
  misc_feature: MA Experiment 20000794 PARAMETER Experiment Name: At_Petals_P Parameter: Tissue Value: Petals vs. Whole plant
  misc_feature: MA Experiment ID: 20001560 Result: Up-regulated in Transcription
  misc_feature: MA Experiment 20001560 PARAMETER Experiment Name: At_Drought_Soil_Dry_P Parameter: Age (day) Value: 28
  misc_feature: MA Experiment 20001560 PARAMETER Experiment Name: At_Drought_Soil_Dry_P Parameter: Organism Value: A. thaliana
  misc_feature: MA Experiment 20001560 PARAMETER Experiment Name: At_Drought_Soil_Dry_P Parameter: Plant Line Value: WS
  misc_feature: MA Experiment 20001560 PARAMETER Experiment Name: At_Drought_Soil_Dry_P Parameter: Post Timepoint (hr) Value: None
  misc_feature: MA Experiment 20001560 PARAMETER Experiment Name: At_Drought_Soil_Dry_P Parameter: Post-Treatment Value: None
  misc_feature: MA Experiment 20001560 PARAMETER Experiment Name: At_Drought_Soil_Dry_P Parameter: Timepoint (day) Value: 14
  misc_feature: MA Experiment 20001560 PARAMETER Experiment Name: At_Drought_Soil_Dry_P Parameter: Treatment Value: Drought vs. No Drought
  misc_feature: MA Experiment ID: 20001757 Result: Up-regulated in Transcription
  misc_feature: MA Experiment 20001757 PARAMETER Experiment Name: At_50mM_NH4NO3_L-to-H_P Parameter: Timepoint (hr) Value: 6
  misc_feature: MA Experiment 20001757 PARAMETER Experiment Name: At_50mM_NH4NO3_L-to-H_P Parameter: Tissue Value: Leaf
  misc_feature: MA Experiment 20001757 PARAMETER Experiment Name: At_50mM_NH4NO3_L-to-H_P Parameter: Treatment Value: 50mM NH4NO3 vs 100mM Mannitol
aaagcaagaaaaagagaatgtcaaaggagaaacaaggaagaagcttagcttataatcgaatctaagccgtttcgggaaattctgtttgtaggtgacaaaatcctcttatagggttattcttagctatgaatttcctctgcaatttctttttttccccgccaaaatttctcctgaagcaaatgtagctttttacttgctgaactagggttttgttcgattttgttcctctttcctcgctgattttgtcggaatttctgggtttgggaagagaaattggagtcgttattgattgaaatgaagaagcttttaggaggtccgggaactgtgtgtggtctgttactgagaatcggacaatgtgcttcagctgctgcttcaatcggcgttatggtctctgctaaagagttctctgttcacactgctttttgctacttgattgcgtcaatgggtcttcaattgttgtggagctttgggctagcatgtcttgatgtttatgctctcaggggaaagaaagatctccaaaaccctatcttggttagcttattcgtcgttggtgattgggtgacggcaatgttatctcttgcagctgcatgttcatcagcaggagttgtagtcttgtatgaaaaagatatcaagtattgcaatactcaaagccaatatccatgtcttaggtatgaagtagctgtagcgctttctttcgtcacttggatccagattgctgtttcttctcatgtcacattttggatcttagcctcggtttagttagtttcgcaaagaactcccaactttttcttcttcttggaatgttgagacatctttgtagcttttgatgacgttaacaatctgcttctaatcgaatctatcaatgtttcttgcaatcg

SEQ ID NO: 42421 - protein, 154 aa, Arabidopsis thaliana
  peptide (1)..(154): Ceres Seq. ID no. 13576605
  misc_feature (6)..(139): Pfam Name: Domain of unknown function (DUF588) Pfam Description: Domain of unknown function (DUF588)
  misc_feature (1)..(154): Homolog of NCBI NO: 22330130 NR Description: hypothetical protein [Arabidopsis thaliana]
  misc_feature (6)..(100): Homolog of NCBI NO: 7939530 NR Description: gb|AAD20689.1~gene_id:K14B15.11~similar to
  misc_feature (8)..(137): Homolog of NCBI NO: 26006486 NR Description: Unknown protein [Oryza sativa (japonica
  misc_feature (1)..(153): Homolog of NCBI NO: 30687069 NR Description: expressed protein [Arabidopsis thaliana]
  misc_feature (1)..(153): Homolog of NCBI NO: 25408537 NR Description: hypothetical protein At2g37200 [imported] -
  misc_feature (1)..(153): Homolog of NCBI NO: 18401722 NR Description: expressed protein [Arabidopsis thaliana]
  misc_feature (6)..(153): Homolog of NCBI NO: 30686969 NR Description: expressed protein [Arabidopsis thaliana]
  misc_feature (1)..(151): Homolog of NCBI NO: 15241672 NR Description: hypothetical protein [Arabidopsis thaliana]
  misc_feature (36)..(154): Homolog of NCBI NO: 11357817 NR Description: hypothetical protein F5K20.150 - Arabidopsis
  misc_feature (1)..(154): Homolog of NCBI NO: 18409932 NR Description: expressed protein [Arabidopsis thaliana]
MKKLLGGPGTVCGLLLRIGQCASAAASIGVMVSAKEFSVHTAFCYLIASMGLQLLWSFGLACLDVYALRGKKDLQNPILVSLFVVGDWVTAMLSLAAACSSAGVVVLYEKDIKYCNTQSQYPCLRYEVAVALSFVTWIQIAVSSHVTFWILASV

SEQ ID NO: 42422 - protein, 124 aa, Arabidopsis thaliana
  peptide (1)..(124): Ceres Seq. ID no. 13576606
  misc_feature (1)..(109): Pfam Name: Domain of unknown function (DUF588) Pfam Description: Domain of unknown function (DUF588)
  misc_feature (1)..(124): Homolog of NCBI NO: 22330130 NR Description: hypothetical protein [Arabidopsis thaliana]
  misc_feature (1)..(70): Homolog of NCBI NO: 7939530 NR Description: gb|AAD20689.1~gene_id:K14B15.11~similar to
  misc_feature (1)..(107): Homolog of NCBI NO: 26006486 NR Description: Unknown protein [Oryza sativa (japonica
  misc_feature (1)..(123): Homolog of NCBI NO: 30687069 NR Description: expressed protein [Arabidopsis thaliana]
  misc_feature (1)..(123): Homolog of NCBI NO: 25408537 NR Description: hypothetical protein At2g37200 [imported] -
  misc_feature (1)..(123): Homolog of NCBI NO: 18401722 NR Description: expressed protein [Arabidopsis thaliana]
  misc_feature (1)..(123): Homolog of NCBI NO: 30686969 NR Description: expressed protein [Arabidopsis thaliana]
  misc_feature (1)..(121): Homolog of NCBI NO: 15241672 NR Description: hypothetical protein [Arabidopsis thaliana]
  misc_feature (6)..(124): Homolog of NCBI NO: 11357817 NR Description: hypothetical protein F5K20.150 - Arabidopsis
  misc_feature (1)..(124): Homolog of NCBI NO: 18409932 NR Description: expressed protein [Arabidopsis thaliana]
MVSAKEFSVHTAFCYLIASMGLQLLWSFGLACLDVYALRGKKDLQNPILVSLFVVGDWVTAMLSLAAACSSAGVVVLYEKDIKYCNTQSQYPCLRYEVAVALSFVTWIQIAVSSHVTFWILASV

SEQ ID NO: 42423 - protein, 105 aa, Arabidopsis thaliana
  peptide (1)..(105): Ceres Seq. ID no. 13576607
  misc_feature (1)..(90): Pfam Name: Domain of unknown function (DUF588) Pfam Description: Domain of unknown function (DUF588)
  misc_feature (1)..(105): Homolog of NCBI NO: 22330130 NR Description: hypothetical protein [Arabidopsis thaliana]
  misc_feature (1)..(51): Homolog of NCBI NO: 7939530 NR Description: gb|AAD20689.1~gene_id:K14B15.11~similar to
  misc_feature (1)..(88): Homolog of NCBI NO: 26006486 NR Description: Unknown protein [Oryza sativa (japonica
  misc_feature (1)..(104): Homolog of NCBI NO: 30687069 NR Description: expressed protein [Arabidopsis thaliana]
  misc_feature (1)..(104): Homolog of NCBI NO: 25408537 NR Description: hypothetical protein At2g37200 [imported] -
  misc_feature (1)..(104): Homolog of NCBI NO: 18401722 NR Description: expressed protein [Arabidopsis thaliana]
  misc_feature (1)..(104): Homolog of NCBI NO: 30686969 NR Description: expressed protein [Arabidopsis thaliana]
  misc_feature (1)..(102): Homolog of NCBI NO: 15241672 NR Description: hypothetical protein [Arabidopsis thaliana]
  misc_feature (1)..(105): Homolog of NCBI NO: 11357817 NR Description: hypothetical protein F5K20.150 - Arabidopsis
  misc_feature (1)..(105): Homolog of NCBI NO: 18409932 NR Description: expressed protein [Arabidopsis thaliana]
MGLQLLWSFGLACLDVYALRGKKDLQNPILVSLFVVGDWVTAMLSLAAACSSAGVVVLYEKDIKYCNTQSQYPCLRYEVAVALSFVTWIQIAVSSHVTFWILASV

SEQ ID NO: 42424 - DNA, 610 bp, Arabidopsis thaliana
  misc_feature (1)..(610): Ceres Seq. ID no. 13645969
  misc_feature: MA Experiment ID: 20000180 Result: Up-regulated in Transcription
  misc_feature: MA Experiment 20000180 PARAMETER Experiment Name: At_Germinating_Seeds_P Parameter: Age (hr) Value: 24 vs. 0
  misc_feature: MA Experiment 20000180 PARAMETER Experiment Name: At_Germinating_Seeds_P Parameter: Tissue Value: Germinating Seeds
  misc_feature: MA Experiment ID: 20000265 Result: Down-regulated in Transcription
  misc_feature: MA Experiment 20000265 PARAMETER Experiment Name: At_Open_Flower_P Parameter: Age (day) Value: 21
  misc_feature: MA Experiment 20000265 PARAMETER Experiment Name: At_Open_Flower_P Parameter: Plant Line Value: WS
  misc_feature: MA Experiment 20000265 PARAMETER Experiment Name: At_Open_Flower_P Parameter: Tissue Value: Closed Flower vs. Whole Plant
  misc_feature: MA Experiment ID: 20000437 Result: Down-regulated in Transcription
  misc_feature: MA Experiment 20000437 PARAMETER Experiment Name: At_Drought_P Parameter: Age (day) Value: 8
  misc_feature: MA Experiment 20000437 PARAMETER Experiment Name: At_Drought_P Parameter: Organism Value: A. thaliana
  misc_feature: MA Experiment 20000437 PARAMETER Experiment Name: At_Drought_P Parameter: Plant Line Value: WS
  misc_feature: MA Experiment 20000437 PARAMETER Experiment Name: At_Drought_P Parameter: Timepoint (hr) Value: 24
  misc_feature: MA Experiment 20000437 PARAMETER Experiment Name: At_Drought_P Parameter: Tissue Value: Whole Plant
  misc_feature: MA Experiment 20000437 PARAMETER Experiment Name: At_Drought_P Parameter: Treatment Value: Drought vs. No Drought
  misc_feature: MA Experiment ID: 20000794 Result: Down-regulated in Transcription
  misc_feature: MA Experiment 20000794 PARAMETER Experiment Name: At_Petals_P Parameter: Age (day) Value: 23-25 days
  misc_feature: MA Experiment 20000794 PARAMETER Experiment Name: At_Petals_P Parameter: Plant Line Value: WS
  misc_feature: MA Experiment 20000794 PARAMETER Experiment Name: At_Petals_P Parameter: Tissue Value: Petals vs. Whole plant
  misc_feature: MA Experiment ID: 20001451 Result: Down-regulated in Transcription
  misc_feature: MA Experiment 20001451 PARAMETER Experiment Name: At_Far-red-induction_P Parameter: Age (day) Value: 7
  misc_feature: MA Experiment 20001451 PARAMETER Experiment Name: At_Far-red-induction_P Parameter: Light Value: Far-red vs. White
  misc_feature: MA Experiment 20001451 PARAMETER Experiment Name: At_Far-red-induction_P Parameter: Organism Value: A. thaliana
  misc_feature: MA Experiment 20001451 PARAMETER Experiment Name: At_Far-red-induction_P Parameter: Plant Line Value: Columbia
  misc_feature: MA Experiment 20001451 PARAMETER Experiment Name: At_Far-red-induction_P Parameter: Timepoint (hr) Value: 24
  misc_feature: MA Experiment 20001451 PARAMETER Experiment Name: At_Far-red-induction_P Parameter: Tissue Value: Whole Plant
  misc_feature: MA Experiment ID: 20001555 Result: Down-regulated in Transcription
  misc_feature: MA Experiment 20001555 PARAMETER Experiment Name: At_Drought_Soil_Dry_P Parameter: Age (day) Value: 24
  misc_feature: MA Experiment 20001555 PARAMETER Experiment Name: At_Drought_Soil_Dry_P Parameter: Organism Value: A. thaliana
  misc_feature: MA Experiment 20001555 PARAMETER Experiment Name: At_Drought_Soil_Dry_P Parameter: Plant Line Value: WS
  misc_feature: MA Experiment 20001555 PARAMETER Experiment Name: At_Drought_Soil_Dry_P Parameter: Post Timepoint (hr) Value: None
  misc_feature: MA Experiment 20001555 PARAMETER Experiment Name: At_Drought_Soil_Dry_P Parameter: Post-Treatment Value: None
  misc_feature: MA Experiment 20001555 PARAMETER Experiment Name: At_Drought_Soil_Dry_P Parameter: Timepoint (day) Value: 10
  misc_feature: MA Experiment 20001555 PARAMETER Experiment Name: At_Drought_Soil_Dry_P Parameter: Treatment Value: Drought vs. No Drought
  misc_feature: MA Experiment ID: 20001557 Result: Down-regulated in Transcription
  misc_feature: MA Experiment 20001557 PARAMETER Experiment Name: At_Drought_Soil_Dry_P Parameter: Age (day) Value: 27
  misc_feature: MA Experiment 20001557 PARAMETER Experiment Name: At_Drought_Soil_Dry_P Parameter: Organism Value: A. thaliana
  misc_feature: MA Experiment 20001557 PARAMETER Experiment Name: At_Drought_Soil_Dry_P Parameter: Plant Line Value: WS
  misc_feature: MA Experiment 20001557 PARAMETER Experiment Name: At_Drought_Soil_Dry_P Parameter: Post Timepoint (hr) Value: 3
  misc_feature: MA Experiment 20001557 PARAMETER Experiment Name: At_Drought_Soil_Dry_P Parameter: Post-Treatment Value: Re-Water vs. No Drought
  misc_feature: MA Experiment 20001557 PARAMETER Experiment Name: At_Drought_Soil_Dry_P Parameter: Timepoint (day) Value: 13
  misc_feature: MA Experiment 20001557 PARAMETER Experiment Name: At_Drought_Soil_Dry_P Parameter: Treatment Value: Drought vs. No Drought
  misc_feature: MA Experiment ID: 20001559 Result: Down-regulated in Transcription
  misc_feature: MA Experiment 20001559 PARAMETER Experiment Name: At_Drought_Soil_Dry_P Parameter: Age (day) Value: 28
  misc_feature: MA Experiment 20001559 PARAMETER Experiment Name: At_Drought_Soil_Dry_P Parameter: Organism Value: A. thaliana
  misc_feature: MA Experiment 20001559 PARAMETER Experiment Name: At_Drought_Soil_Dry_P Parameter: Plant Line Value: WS
  misc_feature: MA Experiment 20001559 PARAMETER Experiment Name: At_Drought_Soil_Dry_P Parameter: Post Timepoint (hr) Value: 29
  misc_feature: MA Experiment 20001559 PARAMETER Experiment Name: At_Drought_Soil_Dry_P Parameter: Post-Treatment Value: Re-Water vs. No Drought
  misc_feature: MA Experiment 20001559 PARAMETER Experiment Name: At_Drought_Soil_Dry_P Parameter: Timepoint (day) Value: 14
  misc_feature: MA Experiment 20001559 PARAMETER Experiment Name: At_Drought_Soil_Dry_P Parameter: Treatment Value: Drought vs. No Drought
  misc_feature: MA Experiment ID: 20001560 Result: Down-regulated in Transcription
  misc_feature: MA Experiment 20001560 PARAMETER Experiment Name: At_Drought_Soil_Dry_P Parameter: Age (day) Value: 28
  misc_feature: MA Experiment 20001560 PARAMETER Experiment Name: At_Drought_Soil_Dry_P Parameter: Organism Value: A. thaliana
  misc_feature: MA Experiment 20001560 PARAMETER Experiment Name: At_Drought_Soil_Dry_P Parameter: Plant Line Value: WS
  misc_feature: MA Experiment 20001560 PARAMETER Experiment Name: At_Drought_Soil_Dry_P Parameter: Post Timepoint (hr) Value: None
  misc_feature: MA Experiment 20001560 PARAMETER Experiment Name: At_Drought_Soil_Dry_P Parameter: Post-Treatment Value: None
  misc_feature: MA Experiment 20001560 PARAMETER Experiment Name: At_Drought_Soil_Dry_P Parameter: Timepoint (day) Value: 14
  misc_feature: MA Experiment 20001560 PARAMETER Experiment Name: At_Drought_Soil_Dry_P Parameter: Treatment Value: Drought vs. No Drought
  misc_feature: MA Experiment ID: 20001757 Result: Up-regulated in Transcription
  misc_feature: MA Experiment 20001757 PARAMETER Experiment Name: At_50mM_NH4NO3_L-to-H_P Parameter: Timepoint (hr) Value: 6
  misc_feature: MA Experiment 20001757 PARAMETER Experiment Name: At_50mM_NH4NO3_L-to-H_P Parameter: Tissue Value: Leaf
  misc_feature: MA Experiment 20001757 PARAMETER Experiment Name: At_50mM_NH4NO3_L-to-H_P Parameter: Treatment Value: 50mM NH4NO3 vs 100mM Mannitol
gaagaacctctctgcatcaatggcgatctccaagctccatctactcttccttctctcagtctttctctcccttcatcctcttgttctttccgacaccgccgatgaagaagatgttcttcttacaggcatcaacagttacagagcatcactaaacctaacaaccttaatacacaaccacaacgcagaatgtctagcagacgaaatcgcagaccaattcaagaaccaaccttgcacaaacaccactggctcagcctctgtccctggaaccacacctggattcccaaacttgcctaacctcctctcaaaatgccgcctcaaccctaccgtaactagagacggtgcgattttgccagcttgtgttcccaaccttgatcctagccttgtcttgaccaatttcacaatgtcacagtactccaaggacctgaatgattctaagttcactggtattggtattggttctgatgataattggattgttgttgtcctcactactagcacaccggagggtagctattctccggcctctaactcaggagctttcgcgttcggagttaatggccttgtttcttcaagtttgatgtttcttctcttttgcttcttcatgttttga

SEQ ID NO: 42425 - protein, 202 aa, Arabidopsis thaliana
  peptide (1)..(202): Ceres Seq. ID no. 13645970
  misc_feature (7)..(113): Homolog of NCBI NO: 24417290 NR Description: unknown [Arabidopsis thaliana]
  misc_feature (3)..(202): Homolog of NCBI NO: 18405086 NR Description: expressed protein [Arabidopsis thaliana]
  misc_feature (10)..(201): Homolog of NCBI NO: 34904816 NR Description: contains ESTs
  misc_feature (7)..(195): Homolog of NCBI NO: 34395876 NR Description: Putative GPI-anchored protein At5g19240 precursor
  misc_feature (7)..(195): Homolog of NCBI NO: 15239686 NR Description: expressed protein [Arabidopsis thaliana]
  misc_feature (7)..(202): Homolog of NCBI NO: 15239685 NR Description: expressed protein [Arabidopsis thaliana]
  misc_feature (7)..(202): Homolog of NCBI NO: 24417436 NR Description: unknown [Arabidopsis thaliana]
  misc_feature (7)..(202): Homolog of NCBI NO: 18397452 NR Description: expressed protein [Arabidopsis thaliana]
  misc_feature (7)..(202): Homolog of NCBI NO: 21594024 NR Description: unknown [Arabidopsis thaliana]
  misc_feature (7)..(202): Homolog of NCBI NO: 15239687 NR Description: expressed protein [Arabidopsis thaliana]
KNLSASMAISKLHLLFLLSVFLSLHPLVLSDTADEEDVLLTGINSYRASLNLTTLIHNHNAECLADEIADQFKNQPCTNTTGSASVPGTTPGFPNLPNLLSKCRLNPTVTRDGAILPACVPNLDPSLVLTNFTMSQYSKDLNDSKFTGIGIGSDDNWIVVVLTTSTPEGSYSPASNSGAFAFGVNGLVSSSLMFLLFCFFMF

SEQ ID NO: 42426 - protein, 196 aa, Arabidopsis thaliana
  peptide (1)..(196): Ceres Seq. ID no. 13645971
  misc_feature (1)..(107): Homolog of NCBI NO: 24417290 NR Description: unknown [Arabidopsis thaliana]
  misc_feature (1)..(196): Homolog of NCBI NO: 18405086 NR Description: expressed protein [Arabidopsis thaliana]
  misc_feature (4)..(195): Homolog of NCBI NO: 34904816 NR Description: contains ESTs
  misc_feature (1)..(189): Homolog of NCBI NO: 34395876 NR Description: Putative GPI-anchored protein At5g19240 precursor
  misc_feature (1)..(189): Homolog of NCBI NO: 15239686 NR Description: expressed protein [Arabidopsis thaliana]
  misc_feature (1)..(196): Homolog of NCBI NO: 15239685 NR Description: expressed protein [Arabidopsis thaliana]
  misc_feature (1)..(196): Homolog of NCBI NO: 24417436 NR Description: unknown [Arabidopsis thaliana]
  misc_feature (1)..(196): Homolog of NCBI NO: 18397452 NR Description: expressed protein [Arabidopsis thaliana]
  misc_feature (1)..(196): Homolog of NCBI NO: 21594024 NR Description: unknown [Arabidopsis thaliana]
  misc_feature (1)..(196): Homolog of NCBI NO: 15239687 NR Description: expressed protein [Arabidopsis thaliana]
MAISKLHLLFLLSVFLSLHPLVLSDTADEEDVLLTGINSYRASLNLTTLIHNHNAECLADEIADQFKNQPCTNTTGSASVPGTTPGFPNLPNLLSKCRLNPTVTRDGAILPACVPNLDPSLVLTNFTMSQYSKDLNDSKFTGIGIGSDDNWIVVVLTTSTPEGSYSPASNSGAFAFGVNGLVSSSLMFLLFCFFMF

SEQ ID NO: 42427 - DNA, 1353 bp, Arabidopsis thaliana
  misc_feature (1)..(1353): Ceres Seq. ID no. 12385463
  misc_feature: MA Experiment ID: 20000117 Result: Down-regulated in Transcription
  misc_feature: MA Experiment 20000117 PARAMETER Experiment Name: At_100uM_ABA_Mutants_cDNA_P Parameter: Plant Line Value: Columbia
  misc_feature: MA Experiment 20000117 PARAMETER Experiment Name: At_100uM_ABA_Mutants_cDNA_P Parameter: Timepoint (hr) Value: 6
  misc_feature: MA Experiment 20000117 PARAMETER Experiment Name: At_100uM_ABA_Mutants_cDNA_P Parameter: Tissue Value: Aerial
  misc_feature: MA Experiment 20000117 PARAMETER Experiment Name: At_100uM_ABA_Mutants_cDNA_P Parameter: Treatment Value: 100uM ABA vs. No Treatment
  misc_feature: MA Experiment ID: 20000227 Result: Up-regulated in Transcription
  misc_feature: MA Experiment 20000227 PARAMETER Experiment Name: At_Root-Tips-vs-Tops_P Parameter: Tissue Value: Root Tips vs. Root Tops
  misc_feature: MA Experiment ID: 20000234 Result: Up-regulated in Transcription
  misc_feature: MA Experiment 20000234 PARAMETER Experiment Name: At_Siliques_P Parameter: Age (day) Value: 21
  misc_feature: MA Experiment 20000234 PARAMETER Experiment Name: At_Siliques_P Parameter: Organism Value: A. thaliana
  misc_feature: MA Experiment 20000234 PARAMETER Experiment Name: At_Siliques_P Parameter: Plant Line Value: WS
  misc_feature: MA Experiment 20000234 PARAMETER Experiment Name: At_Siliques_P Parameter: Tissue Value: Less Than 5mm Siliques vs. Whole Plant
  misc_feature: MA Experiment ID: 20000235 Result: Up-regulated in Transcription
  misc_feature: MA Experiment 20000235 PARAMETER Experiment Name: At_Siliques_P Parameter: Age (day) Value: 21
  misc_feature: MA Experiment 20000235 PARAMETER Experiment Name: At_Siliques_P Parameter: Organism Value: A. thaliana
  misc_feature: MA Experiment 20000235 PARAMETER Experiment Name: At_Siliques_P Parameter: Plant Line Value: WS
  misc_feature: MA Experiment 20000235 PARAMETER Experiment Name: At_Siliques_P Parameter: Tissue Value: 5-10mm Siliques vs. Whole Plant
  misc_feature: MA Experiment ID: 20000264 Result: Up-regulated in Transcription
  misc_feature: MA Experiment 20000264 PARAMETER Experiment Name: At_Open_Flower_P Parameter: Age (day) Value: 21
  misc_feature: MA Experiment 20000264 PARAMETER Experiment Name: At_Open_Flower_P Parameter: Plant Line Value: WS
  misc_feature: MA Experiment 20000264 PARAMETER Experiment Name: At_Open_Flower_P Parameter: Tissue Value: Open Flower vs. Whole Plant
  misc_feature: MA Experiment ID: 20000455 Result: Down-regulated in Transcription
  misc_feature: MA Experiment 20000455 PARAMETER Experiment Name: At_100uM_ABA_P Parameter: Age (day) Value: 16
  misc_feature: MA Experiment 20000455 PARAMETER Experiment Name: At_100uM_ABA_P Parameter: Organism Value: A. thaliana
  misc_feature: MA Experiment 20000455 PARAMETER Experiment Name: At_100uM_ABA_P Parameter: Plant Line Value: WS
  misc_feature: MA Experiment 20000455 PARAMETER Experiment Name: At_100uM_ABA_P Parameter: Timepoint (hr) Value: 48
  misc_feature: MA Experiment 20000455 PARAMETER Experiment Name: At_100uM_ABA_P Parameter: Tissue Value: Aerial
  misc_feature: MA Experiment 20000455 PARAMETER Experiment Name: At_100uM_ABA_P Parameter: Treatment Value: 100uM ABA vs. No Treatment
  misc_feature: MA Experiment ID: 20000495 Result: Up-regulated in Transcription
  misc_feature: MA Experiment 20000495 PARAMETER Experiment Name: At_Guard_Cells_P Parameter: Harvest Date Value: 8/2/2002
  misc_feature: MA Experiment 20000495 PARAMETER Experiment Name: At_Guard_Cells_P Parameter: Organism Value: A. thaliana
  misc_feature: MA Experiment 20000495 PARAMETER Experiment Name: At_Guard_Cells_P Parameter: Tissue Value: Guard Cells vs. Leaves
atttcactcatttacgtttgtctctttccccgctctctcgctctcgccgccgtctgcgtaacggtctccggccacattacgccgatcaacctattcactccaccgtcggttcgatatcgtttctctccaagtcaatttgaagtattccgattcgattacattctcattcactttccgaaagcttcttctactcagaaaggtgtgcaaaatgattggatcgtttctaacaagaggactagtaatggtatttggatatgcgtatcctgcttatgaatgttacaaagcggttgaaaagaataagcctgagatgcaacagcttcgattctggtgccaatactggattttggtggctgctttgacaattttcgaaagagttggcgatgctcttgcttcatgggttccactatactgtgaggcaaaactggcatttttcatatatctttggttccccaagaccagaggaactacatacgtgtacgattcattctttcagccatatgttgcaaagcatgaaaatgaaatcgaccgcagcttgattgagctaaggaccaaagctggggatctggcagtgatatactgcagaaaagcagtgagctatggacaaacaagaatcgtagagatcctgcattttgtagctctccagtcaacaccaaaacctaagcctaaggaaaagaagcaggcagcagcaccagaagaggaagaacagaaacaaccggatcttaaggcgacgagccaagcagcttcttctaatcctcaagtgcgtctgcaatcgaagaaaccacagcttgtaaccaaagaacctatatcaccaaagcctctttcatccccacgtaagcaacaacaactacaaacagagaccaaggaagcaaaagcaagcgtgtcacaaaccaaactcactactctaactccaccaggaccaccaccaccaccaccaccaccgccaccatcgcccacaaccgccgcgaaacgaaacgctgatccagcacagccatcaccaacagaggcagaagaagcgtcacagactgtcgcagctttaccagaaccagcgtctgagattcagcgagcgtcatcgtcgaaagagactataatggaggaaacactaaggatcactcgtgggagtctgagaaaagctcgttctgcgggagcaccgcgctaagagaatgattaaaaaagaaaaggggaacacataattttaaatctctaaccccttttgattggtttctctttaaaacagcaataatggtttttatttggttatttgttgtttttagtccgatgtaaatttcagacttcagactaatattggatgttgatctgtccttagctgagtaaaaccacaaaaaaagtttttat

SEQ ID NO: 42428 - protein, 315 aa, Arabidopsis thaliana
  peptide (1)..(315): Ceres Seq. ID no. 12385464
  misc_feature (3)..(98): Pfam Name: TB2/DP1, HVA22 family Pfam Description: TB2/DP1, HVA22 family
  misc_feature (1)..(146): Homolog of NCBI NO: 21671921 NR Description: Putative protein with HVA22 domain
  misc_feature (1)..(312): Homolog of NCBI NO: 37531658 NR Description: putative Magnaporthe grisea pathogenicity protein
  misc_feature (1)..(153): Homolog of NCBI NO: 20502988 NR Description: Putative InsB from Escherichia coli
  misc_feature (12)..(165): Homolog of NCBI NO: 15222332 NR Description: hypothetical protein; protein id: At1g75700.1
  misc_feature (12)..(285): Homolog of NCBI NO: 9759014 NR Description: gene_id:K16E1.3~unknown protein [Arabidopsis
  misc_feature (1)..(285): Homolog of NCBI NO: 21553813 NR Description: unknown [Arabidopsis thaliana]
  misc_feature (1)..(285): Homolog of NCBI NO: 18422223 NR Description: expressed protein
  misc_feature (1)..(315): Homolog of NCBI NO: 21553483 NR Description: pathogenicity protein PATH531-like protein
  misc_feature (12)..(315): Homolog of NCBI NO: 25513732 NR Description: T20H2.26 protein - Arabidopsis thaliana
  misc_feature (1)..(315): Homolog of NCBI NO: 18394805 NR Description: expressed protein
MIGSFLTRGLVMVFGYAYPAYECYKAVEKNKPEMQQLRFWCQYWILVAALTIFERVGDALASWVPLYCEAKLAFFIYLWFPKTRGTTYVYDSFFQPYVAKHENEIDRSLIELRTKAGDLAVIYCRKAVSYGQTRIVEILHFVALQSTPKPKPKEKKQAAAPEEEEQKQPDLKATSQAASSNPQVRLQSKKPQLVTKEPISPKPLSSPRKQQQLQTETKEAKASVSQTKLTTLTPPGPPPPPPPPPPSPTTAAKRNADPAQPSPTEAEEASQTVAALPEPASEIQRASSSKETIMEETLRITRGSLRKARSAGAPR

SEQ ID NO: 42429 - protein, 304 aa, Arabidopsis thaliana
  peptide (1)..(304): Ceres Seq. ID no. 12385465
  misc_feature (1)..(87): Pfam Name: TB2/DP1, HVA22 family Pfam Description: TB2/DP1, HVA22 family
  misc_feature (1)..(135): Homolog of NCBI NO: 21671921 NR Description: Putative protein with HVA22 domain
  misc_feature (1)..(301): Homolog of NCBI NO: 37531658 NR Description: putative Magnaporthe grisea pathogenicity protein
  misc_feature (1)..(142): Homolog of NCBI NO: 20502988 NR Description: Putative InsB from Escherichia coli
  misc_feature (1)..(154): Homolog of NCBI NO: 15222332 NR Description: hypothetical protein; protein id: At1g75700.1
  misc_feature (1)..(274): Homolog of NCBI NO: 9759014 NR Description: gene_id:K16E1.3~unknown protein [Arabidopsis
  misc_feature (1)..(274): Homolog of NCBI NO: 21553813 NR Description: unknown [Arabidopsis thaliana]
  misc_feature (1)..(274): Homolog of NCBI NO: 18422223 NR Description: expressed protein
  misc_feature (1)..(304): Homolog of NCBI NO: 21553483 NR Description: pathogenicity protein PATH531-like protein
  misc_feature (1)..(304): Homolog of NCBI NO: 25513732 NR Description: T20H2.26 protein - Arabidopsis thaliana
  misc_feature (1)..(304): Homolog of NCBI NO: 18394805 NR Description: expressed protein
MVFGYAYPAYECYKAVEKNKPEMQQLRFWCQYWILVAALTIFERVGDALASWVPLYCEAKLAFFIYLWFPKTRGTTYVYDSFFQPYVAKHENEIDRSLIELRTKAGDLAVIYCRKAVSYGQTRIVEILHFVALQSTPKPKPKEKKQAAAPEEEEQKQPDLKATSQAASSNPQVRLQSKKPQLVTKEPISPKPLSSPRKQQQLQTETKEAKASVSQTKLTTLTPPGPPPPPPPPPPSPTTAAKRNADPAQPSPTEAEEASQTVAALPEPASEIQRASSSKETIMEETLRITRGSLRKARSAGAPR

SEQ ID NO: 42430 - protein, 282 aa, Arabidopsis thaliana
  peptide (1)..(282): Ceres Seq. ID no. 12385466
  misc_feature (1)..(65): Pfam Name: TB2/DP1, HVA22 family Pfam Description: TB2/DP1, HVA22 family
  misc_feature (1)..(113): Homolog of NCBI NO: 21671921 NR Description: Putative protein with HVA22 domain
  misc_feature (1)..(279): Homolog of NCBI NO: 37531658 NR Description: putative Magnaporthe grisea pathogenicity protein
  misc_feature (1)..(120): Homolog of NCBI NO: 20502988 NR Description: Putative InsB from Escherichia coli
  misc_feature (1)..(132): Homolog of NCBI NO: 15222332 NR Description: hypothetical protein; protein id: At1g75700.1
  misc_feature (1)..(252): Homolog of NCBI NO: 9759014 NR Description: gene_id:K16E1.3~unknown protein [Arabidopsis
  misc_feature (1)..(252): Homolog of NCBI NO: 21553813 NR Description: unknown [Arabidopsis thaliana]
  misc_feature (1)..(252): Homolog of NCBI NO: 18422223 NR Description: expressed protein
  misc_feature (1)..(282): Homolog of NCBI NO: 21553483 NR Description: pathogenicity protein PATH531-like protein
  misc_feature (1)..(282): Homolog of NCBI NO: 25513732 NR Description: T20H2.26 protein - Arabidopsis thaliana
  misc_feature (1)..(282): Homolog of NCBI NO: 18394805 NR Description: expressed protein
MQQLRFWCQYWILVAALTIFERVGDALASWVPLYCEAKLAFFIYLWFPKTRGTTYVYDSFFQPYVAKHENEIDRSLIELRTKAGDLAVIYCRKAVSYGQTRIVEILHFVALQSTPKPKPKEKKQAAAPEEEEQKQPDLKATSQAASSNPQVRLQSKKPQLVTKEPISPKPLSSPRKQQQLQTETKEAKASVSQTKLTTLTPPGPPPPPPPPPPSPTTAAKRNADPAQPSPTEAEEASQTVAALPEPASEIQRASSSKETIMEETLRITRGSLRKARSAGAPR

SEQ ID NO: 42431 - DNA, 2447 bp, Arabidopsis thaliana
  misc_feature (1)..(2447): Ceres Seq. ID no. 13509107
  misc_feature: MA Experiment ID: 20000171 Result: Down-regulated in Transcription
  misc_feature: MA Experiment 20000171 PARAMETER Experiment Name: At_42deg_Heat_P Parameter: Age (day) Value: 14
  misc_feature: MA Experiment 20000171 PARAMETER Experiment Name: At_42deg_Heat_P Parameter: Organism Value: A. thaliana
  misc_feature: MA Experiment 20000171 PARAMETER Experiment Name: At_42deg_Heat_P Parameter: Plant Line Value: WS
  misc_feature: MA Experiment 20000171 PARAMETER Experiment Name: At_42deg_Heat_P Parameter: Temperature (deg C) Value: 42 vs. 22
  misc_feature: MA Experiment 20000171 PARAMETER Experiment Name: At_42deg_Heat_P Parameter: Timepoint (hr) Value: 1
  misc_feature: MA Experiment 20000171 PARAMETER Experiment Name: At_42deg_Heat_P Parameter: Tissue Value: Aerial
  misc_feature: MA Experiment ID: 20000173 Result: Down-regulated in Transcription
  misc_feature: MA Experiment 20000173 PARAMETER Experiment Name: At_42deg_Heat_P Parameter: Age (day) Value: 14
  misc_feature: MA Experiment 20000173 PARAMETER Experiment Name: At_42deg_Heat_P Parameter: Organism Value: A. thaliana
  misc_feature: MA Experiment 20000173 PARAMETER Experiment Name: At_42deg_Heat_P Parameter: Plant Line Value: WS
  misc_feature: MA Experiment 20000173 PARAMETER Experiment Name: At_42deg_Heat_P Parameter: Temperature (deg C) Value: 42 vs. 22
  misc_feature: MA Experiment 20000173 PARAMETER Experiment Name: At_42deg_Heat_P Parameter: Timepoint (hr) Value: 6
  misc_feature: MA Experiment 20000173 PARAMETER Experiment Name: At_42deg_Heat_P Parameter: Tissue Value: Aerial
  misc_feature: MA Experiment ID: 20000184 Result: Up-regulated in Transcription
  misc_feature: MA Experiment 20000184 PARAMETER Experiment Name: At_Shoots__P Parameter: Age (day) Value: 7
  misc_feature: MA Experiment 20000184 PARAMETER Experiment Name: At_Shoots__P Parameter: Tissue Value: Shoots vs. Whole Plant
  misc_feature: MA Experiment ID: 20000185 Result: Up-regulated in Transcription
  misc_feature: MA Experiment 20000185 PARAMETER Experiment Name: At_Roots__P Parameter: Age (day) Value: 7 vs. 21
  misc_feature: MA Experiment 20000185 PARAMETER Experiment Name: At_Roots__P Parameter: Organism Value: A. thaliana
  misc_feature: MA Experiment 20000185 PARAMETER Experiment Name: At_Roots__P Parameter: Tissue Value: Roots vs. Whole Plant
  misc_feature: MA Experiment ID: 20000234 Result: Up-regulated in Transcription
  misc_feature: MA Experiment 20000234 PARAMETER Experiment Name: At_Siliques_P Parameter: Age (day) Value: 21
  misc_feature: MA Experiment 20000234 PARAMETER Experiment Name: At_Siliques_P Parameter: Organism Value: A. thaliana
  misc_feature: MA Experiment 20000234 PARAMETER Experiment Name: At_Siliques_P Parameter: Plant Line Value: WS
  misc_feature: MA Experiment 20000234 PARAMETER Experiment Name: At_Siliques_P Parameter: Tissue Value: Less Than 5mm Siliques vs. Whole Plant
  misc_feature: MA Experiment ID: 20000264 Result: Up-regulated in Transcription
  misc_feature: MA Experiment 20000264 PARAMETER Experiment Name: At_Open_Flower_P Parameter: Age (day) Value: 21
  misc_feature: MA Experiment 20000264 PARAMETER Experiment Name: At_Open_Flower_P Parameter: Plant Line Value: WS
  misc_feature: MA Experiment 20000264 PARAMETER Experiment Name: At_Open_Flower_P Parameter: Tissue Value: Open Flower vs. Whole Plant
  misc_feature: MA Experiment ID: 20000286 Result: Up-regulated in Transcription
  misc_feature: MA Experiment 20000286 PARAMETER Experiment Name: At_Open_Flower_P Parameter: Age (day) Value: 21
  misc_feature: MA Experiment 20000286 PARAMETER Experiment Name: At_Open_Flower_P Parameter: Plant Line Value: WS
  misc_feature: MA Experiment 20000286 PARAMETER Experiment Name: At_Open_Flower_P Parameter: Tissue Value: Half Open vs. Whole Plant
  misc_feature: MA Experiment ID: 20000438 Result: Up-regulated in Transcription
  misc_feature: MA Experiment 20000438 PARAMETER Experiment Name: At_Shoots__P Parameter: Age (day) Value: 14
  misc_feature: MA Experiment 20000438 PARAMETER Experiment Name: At_Shoots__P Parameter: Tissue Value: Shoots vs. Whole Plant
  misc_feature: MA Experiment ID: 20000439 Result: Up-regulated in Transcription
  misc_feature: MA Experiment 20000439 PARAMETER Experiment Name: At_Roots__P Parameter: Age (day) Value: 14 vs. 21
  misc_feature: MA Experiment 20000439 PARAMETER Experiment Name: At_Roots__P Parameter: Organism Value: A. thaliana
  misc_feature: MA Experiment 20000439 PARAMETER Experiment Name: At_Roots__P Parameter: Tissue Value: Roots vs. Whole Plant
  misc_feature: MA Experiment ID: 20001451 Result: Down-regulated in Transcription
  misc_feature: MA Experiment 20001451 PARAMETER Experiment Name: At_Far-red-induction_P Parameter: Age (day) Value: 7
  misc_feature: MA Experiment 20001451 PARAMETER Experiment Name: At_Far-red-induction_P Parameter: Light Value: Far-red vs. White
  misc_feature: MA Experiment 20001451 PARAMETER Experiment Name: At_Far-red-induction_P Parameter: Organism Value: A. thaliana
  misc_feature: MA Experiment 20001451 PARAMETER Experiment Name: At_Far-red-induction_P Parameter: Plant Line Value: Columbia
  misc_feature: MA Experiment 20001451 PARAMETER Experiment Name: At_Far-red-induction_P Parameter: Timepoint (hr) Value: 24
  misc_feature: MA Experiment 20001451 PARAMETER Experiment Name: At_Far-red-induction_P Parameter: Tissue Value: Whole Plant
cgatttctctacttctcagaggagattttagaggcaaaagatggctccaaggttggatttttcagattggtgggcgaaagacacgaggaaaggaacaccagttgtggtgaaaatggagaatcctaattactctgtagttgaaatcgacggtccagattcggcttttagaccagtggagaagagcagaggcaagaacgctaagcaagtcacttgggttttgcttctcaaagctcatagagctgttggatgtctcacttggctcgccactgtcttttggtctctccttggtgccatcaagaaacggcttagtttcactcacccacttggctctgagaaattaggcagagacagatggcttttcactgccattaagctcttcttagctgtttccttagtgattctcggctttgagattgttgcttattttagaggatggcattactttcaaagccctagtcttcacatccccactagcacacttgagatccagagcctgtttcatcttgtgtatgttggttggttaacccttagagctgattatattgctcctcccatcaaagctctctccaagttttgtattgtgctgttccttatacagtcagtagatcgtttggtactttgcttgggttgtttttggatcaagtataagaaaattaagccgagatttgatgaggaacctttccgtaatgatgatgctgagggatctggatctgagtatccaatggttcttgttcagattccaatgtgcaatgagagagaggtgtatgaacaatctatatctgccgtgtgtcaacttgactggccgaaagatcgaatactggttcaggttctcgatgattcgaatgatgaaagcatccaacagttaattaaagctgaggttgccaaatggagccaaaagggagtcaacataatctacaggcatcgcttggttagaactggatataaagctggtaacctcaaatcagcaatgagctgtgattacgttgaagcatacgagtatgtcgcaatctttgatgccgatttccagcctactccggatttccttaaactaacagttccacatttcaaggataacccagagttaggtctagttcaagctagatggacatttgtgaacaaagacgagaacttgttgacccgtcttcagaacatcaatctgtgttttcactttgaggtggagcagcaagtgaacggcgtgttcttgaacttctttggtttcaatggaacagctggagtatggagaatcaaagcccttgaggaatctggtggttggcttgaaaggactactgtggaggatatggacatagcagtccgcgctcatcttcatggatggaagttcatatatcttaatgacgtcaaggtcctttgcgaagttcctgagtcctacgaggcatataagaagcagcaacaccgttggcattcgggacctatgcagcttttccgcttgtgtcttggttcaatcttgacctctaagatagcgatatggaagaaggcgaatctgatacttctcttctttcttcttaggaaactcatacttcctttctactccttcactttgttctgcataatccttccactcaccatgtttgttccagaagctgagctccctgtttgggtcatctgctacataccagttttcatgtctttcctcaaccttcttccatctccaaaatcgtttcctttcatcgttccttatctcttattcgagaacacaatgtctgtcaccaagttcaatgcgatggtgtccggattattccaattgggtagctcttacgagtggattgtcacaaagaaagctggaagatcatcagagtcagatcttttatctatcaccgagaaagagacaccaaccaagaaaagtcaattgcttaggggagtttccgacagcgaacttttggagctgagccaacttgaagaacagaaacaagcggtttcaaagaaacctgtcaagaaaaccaacaagatataccacaaagagctcgcattggcctttcttttgctcactgcagcgcttaggagtctcttggcagcacaaggagtgcatttctacttcctgttattccaaggtgttacctttcttcttgtgggtctcgatctcataggcgagcagatgagctgagaagaacaaaagaagattcataactcgggtcaataaatcagtgagtttgaatttccacttcctctatgttcagtggtatcctctgtaatgagattgttggaaccatagtggtaggcattaattgattttccgtttcgtttgtttgtttgttatgttggtttgattcctccattgttagggatagagtgtgagccagagattcatacatgtatacaatatctgtaaagttggaacatgttgttggcagttaaaagacttgaactaatttcaaggatcatgtcaaatcactgcagagaatttatgtaatttaaagttcaacctttgtggc

SEQ ID NO: 42432 - protein, 692 aa, Arabidopsis thaliana
  peptide (1)..(692): Ceres Seq. ID no. 13509108
  misc_feature (230)..(405): Pfam Name: Glycosyl transferase Pfam Description: Glycosyl transferase
  misc_feature (96)..(691): Homolog of NCBI NO: 16974749 NR Description: CSLC9 [Oryza sativa]
  misc_feature (6)..(692): Homolog of NCBI NO: 15231448 NR Description: glycosyltransferase family 2 [Arabidopsis
  misc_feature (18)..(691): Homolog of NCBI NO: 28201308 NR Description: putative CSLC9(cellulose synthase-like)
  misc_feature (21)..(692): Homolog of NCBI NO: 18405677 NR Description: glycosyltransferase family 2 [Arabidopsis
  misc_feature (1)..(691): Homolog of NCBI NO: 15235900 NR Description: glycosyltransferase family 2 [Arabidopsis
  misc_feature (11)..(691): Homolog of NCBI NO: 34419218 NR Description: TPA: cellulose synthase-like C2
  misc_feature (607)..(692): Homolog of NCBI NO: 34419220 NR Description: TPA: cellulose synthase-like C3
  misc_feature (1)..(137): Homolog of NCBI NO: 34419220 NR Description: TPA: cellulose synthase-like C3
  misc_feature (140)..(632): Homolog of NCBI NO: 34419220 NR Description: TPA: cellulose synthase-like C3
  misc_feature (102)..(692): Homolog of NCBI NO: 7635490 NR Description: putative glucosyltransferase [Cicer arietinum]
MAPRLDFSDWWAKDTRKGTPVVVKMENPNYSVVEIDGPDSAFRPVEKSRGKNAKQVTWVLLLKAHRAVGCLTWLATVFWSLLGAIKKRLSFTHPLGSEKLGRDRWLFTAIKLFLAVSLVILGFEIVAYFRGWHYFQSPSLHIPTSTLEIQSLFHLVYVGWLTLRADYIAPPIKALSKFCIVLFLIQSVDRLVLCLGCFWIKYKKIKPRFDEEPFRNDDAEGSGSEYPMVLVQIPMCNEREVYEQSISAVCQLDWPKDRILVQVLDDSNDESIQQLIKAEVAKWSQKGVNIIYRHRLVRTGYKAGNLKSAMSCDYVEAYEYVAIFDADFQPTPDFLKLTVPHFKDNPELGLVQARWTFVNKDENLLTRLQNINLCFHFEVEQQVNGVFLNFFGFNGTAGVWRIKALEESGGWLERTTVEDMDIAVRAHLHGWKFIYLNDVKVLCEVPESYEAYKKQQHRWHSGPMQLFRLCLGSILTSKIAIWKKANLILLFFLLRKLILPFYSFTLFCIILPLTMFVPEAELPVWVICYIPVFMSFLNLLPSPKSFPFIVPYLLFENTMSVTKFNAMVSGLFQLGSSYEWIVTKKAGRSSESDLLSITEKETPTKKSQLLRGVSDSELLELSQLEEQKQAVSKKPVKKTNKIYHKELALAFLLLTAALRSLLAAQGVHFYFLLFQGVTFLLVGLDLIGEQMS

SEQ ID NO: 42433 - protein, 668 aa, Arabidopsis thaliana
  peptide (1)..(668): Ceres Seq. ID no. 13509109
  misc_feature (206)..(381): Pfam Name: Glycosyl transferase Pfam Description: Glycosyl transferase
  misc_feature (72)..(667): Homolog of NCBI NO: 16974749 NR Description: CSLC9 [Oryza sativa]
  misc_feature (1)..(668): Homolog of NCBI NO: 15231448 NR Description: glycosyltransferase family 2 [Arabidopsis
  misc_feature (1)..(667): Homolog of NCBI NO: 28201308 NR Description: putative CSLC9(cellulose synthase-like)
  misc_feature (1)..(668): Homolog of NCBI NO: 18405677 NR Description: glycosyltransferase family 2 [Arabidopsis
  misc_feature (1)..(667): Homolog of NCBI NO: 15235900 NR Description: glycosyltransferase family 2 [Arabidopsis
  misc_feature (1)..(667): Homolog of NCBI NO: 34419218 NR Description: TPA: cellulose synthase-like C2
  misc_feature (583)..(668): Homolog of NCBI NO: 34419220 NR Description: TPA: cellulose synthase-like C3
  misc_feature (1)..(113): Homolog of NCBI NO: 34419220 NR Description: TPA: cellulose synthase-like C3
  misc_feature (116)..(608): Homolog of NCBI NO: 34419220 NR Description: TPA: cellulose synthase-like C3
  misc_feature (78)..(668): Homolog of NCBI NO: 7635490 NR Description: putative glucosyltransferase [Cicer arietinum]
MENPNYSVVEIDGPDSAFRPVEKSRGKNAKQVTWVLLLKAHRAVGCLTWLATVFWSLLGAIKKRLSFTHPLGSEKLGRDRWLFTAIKLFLAVSLVILGFEIVAYFRGWHYFQSPSLHIPTSTLEIQSLFHLVYVGWLTLRADYIAPPIKALSKFCIVLFLIQSVDRLVLCLGCFWIKYKKIKPRFDEEPFRNDDAEGSGSEYPMVLVQIPMCNEREVYEQSISAVCQLDWPKDRILVQVLDDSNDESIQQLIKAEVAKWSQKGVNIIYRHRLVRTGYKAGNLKSAMSCDYVEAYEYVAIFDADFQPTPDFLKLTVPHFKDNPELGLVQARWTFVNKDENLLTRLQNINLCFHFEVEQQVNGVFLNFFGFNGTAGVWRIKALEESGGWLERTTVEDMDIAVRAHLHGWKFIYLNDVKVLCEVPESYEAYKKQQHRWHSGPMQLFRLCLGSILTSKIAIWKKANLILLFFLLRKLILPFYSFTLFCIILPLTMFVPEAELPVWVICYIPVFMSFLNLLPSPKSFPFIVPYLLFENTMSVTKFNAMVSGLFQLGSSYEWIVTKKAGRSSESDLLSITEKETPTKKSQLLRGVSDSELLELSQLEEQKQAVSKKPVKKTNKIYHKELALAFLLLTAALRSLLAAQGVHFYFLLFQGVTFLLVGLDLIGEQMS

SEQ ID NO: 42434 - protein, 465 aa, Arabidopsis thaliana
  peptide (1)..(465): Ceres Seq. ID no. 13509110
  misc_feature (3)..(178): Pfam Name: Glycosyl transferase Pfam Description: Glycosyl transferase
  misc_feature (1)..(464): Homolog of NCBI NO: 17385963 NR Description: CSLC9 [Oryza sativa]
  misc_feature (1)..(464): Homolog of NCBI NO: 16974749 NR Description: CSLC9 [Oryza sativa]
  misc_feature (1)..(465): Homolog of NCBI NO: 15231448 NR Description: glycosyltransferase family 2 [Arabidopsis
  misc_feature (1)..(464): Homolog of NCBI NO: 28201308 NR Description: putative CSLC9(cellulose synthase-like)
  misc_feature (1)..(465): Homolog of NCBI NO: 18405677 NR Description: glycosyltransferase family 2 [Arabidopsis
  misc_feature (1)..(464): Homolog of NCBI NO: 15235900 NR Description: glycosyltransferase family 2 [Arabidopsis
  misc_feature (1)..(464): Homolog of NCBI NO: 34419218 NR Description: TPA: cellulose synthase-like C2
  misc_feature (380)..(465): Homolog of NCBI NO: 34419220 NR Description: TPA: cellulose synthase-like C3
  misc_feature (1)..(405): Homolog of NCBI NO: 34419220 NR Description: TPA: cellulose synthase-like C3
  misc_feature (1)..(465): Homolog of NCBI NO: 7635490 NR Description: putative glucosyltransferase [Cicer arietinum]
MVLVQIPMCNEREVYEQSISAVCQLDWPKDRILVQVLDDSNDESIQQLIKAEVAKWSQKGVNIIYRHRLVRTGYKAGNLKSAMSCDYVEAYEYVAIFDADFQPTPDFLKLTVPHFKDNPELGLVQARWTFVNKDENLLTRLQNINLCFHFEVEQQVNGVFLNFFGFNGTAGVWRIKALEESGGWLERTTVEDMDIAVRAHLHGWKFIYLNDVKVLCEVPESYEAYKKQQHRWHSGPMQLFRLCLGSILTSKIAIWKKANLILLFFLLRKLILPFYSFTLFCIILPLTMFVPEAELPVWVICYIPVFMSFLNLLPSPKSFPFIVPYLLFENTMSVTKFNAMVSGLFQLGSSYEWIVTKKAGRSSESDLLSITEKETPTKKSQLLRGVSDSELLELSQLEEQKQAVSKKPVKKTNKIYHKELALAFLLLTAALRSLLAAQGVHFYFLLFQGVTFLLVGLDLIGEQMS

SEQ ID NO: 42435 - DNA, 1396 bp, Arabidopsis thaliana
  misc_feature (1)..(1396): Ceres Seq. ID no. 13491615
  misc_feature: MA Experiment ID: 20000265 Result: Up-regulated in Transcription
  misc_feature: MA Experiment 20000265 PARAMETER Experiment Name: At_Open_Flower_P Parameter: Age (day) Value: 21
  misc_feature: MA Experiment 20000265 PARAMETER Experiment Name: At_Open_Flower_P Parameter: Plant Line Value: WS
  misc_feature: MA Experiment 20000265 PARAMETER Experiment Name: At_Open_Flower_P Parameter: Tissue Value: Closed Flower vs. Whole Plant
  misc_feature: MA Experiment ID: 20000286 Result: Up-regulated in Transcription
  misc_feature: MA Experiment 20000286 PARAMETER Experiment Name: At_Open_Flower_P Parameter: Age (day) Value: 21
  misc_feature: MA Experiment 20000286 PARAMETER Experiment Name: At_Open_Flower_P Parameter: Plant Line Value: WS
  misc_feature: MA Experiment 20000286 PARAMETER Experiment Name: At_Open_Flower_P Parameter: Tissue Value: Half Open vs. Whole Plant
  misc_feature: MA Experiment ID: 20001910 Result: Down-regulated in Transcription
  misc_feature: MA Experiment 20001910 PARAMETER Experiment Name: At_Drought_Reproduction_P Parameter: Age (day) Value: 37
  misc_feature: MA Experiment 20001910 PARAMETER Experiment Name: At_Drought_Reproduction_P Parameter: Organism Value: A. thaliana
  misc_feature: MA Experiment 20001910 PARAMETER Experiment Name: At_Drought_Reproduction_P Parameter: Plant Line Value: WS
  misc_feature: MA Experiment 20001910 PARAMETER Experiment Name: At_Drought_Reproduction_P Parameter: Timepoint (day) Value: 7
  misc_feature: MA Experiment 20001910 PARAMETER Experiment Name: At_Drought_Reproduction_P Parameter: Tissue Value: Flowers
  misc_feature: MA Experiment 20001910 PARAMETER Experiment Name: At_Drought_Reproduction_P Parameter: Treatment Value: Drought vs. No Drought
aagaacaagaagaaaaaggtttgtgaaaaaaaaacaaaggcaaacatggtggagggcataccaaagagatggaaggtgctaagtggccaaaacaaatggaaaggcctgcttgatccacttgacccggatcttcgccgctacatcattcactacggcgagatgtctcaggttggttacgatgcctttaactgggaccgtaagtccagatacgccggtgattgttattactccaagaaccgactgtttgctcgaaccggcttccttaaagccaaccctttcaggtacaaagtgactaagtacatctacgcaacagcttccataaagttaccaatctctttcatcgtaaagtctttgtcaaaggatgcatctcacgtgcagactaactggatgggttacattgcggtagctacagaccagggaaaagcgatgttagggaggagagacattgttgttgcatggagaggaactctacagccatatgaatgggctaatgatttcgattttccgcttgagccagctatctcggttttcccagtaactgaccccaaagataaccctcgtattggaagtggctggctcgacatctataccgcttctgattctcgctcaccttatgacacgactagtgcacaagaacaggtacaaggagagctcaagaggttgctagaactttacaaggatgaagaaataagcatcaccttcacaggccatagcttgggcgcagttatgtcagttctatcagctgcagatcttgtctatggcaaaaagaataatatcaatataaatcttcaaaaaaagcaagttcctatcacagtttttgctttcgggagtcctcggattggagaccataacttcaaaaacgtagtcgactcactccaaccactaaacattctaagaatagtaaatgttccagatgtcgcaccacattatccactcttactgtactcagaaattggcgaggtgttagagatcaatactttgaactcaacatacctgaaacggtctctgaacttcaggaactaccataacctggagatatacctgcacggcatggcagggatgcaagatacagacggggtattcaagctggagattggccgggatatttcgttggtcaataaaggattggatgctctaaaggacgagtacttagtgccaagtacctggaggtgtctggcaaacaaagggatgcttcaaatggatgatgggacatggaagctggatgtccacaggagagatcatgatgatgatgttgatgctgatgacaatgatgactcctcaactagtaaccaactacaagagctaaatacagattagttacaaaaacttatataagattctgcacaatatgtttgtacacaaaaaaaaattcatttagaagaacaaagaatctggg

SEQ ID NO: 42436 - protein, 438 aa, Arabidopsis thaliana; identical to SEQ ID NO: 29053
  peptide (1)..(438): Ceres Seq. ID no. 13491616
  misc_feature (17)..(413): Homolog of NCBI NO: 1527001 NR Description: Ipomoea nil Pn47p
  misc_feature (23)..(422): Homolog of NCBI NO: 34911832 NR Description: lipase-like protein [Oryza sativa (japonica
  misc_feature (20)..(213): Homolog of NCBI NO: 34911870 NR Description: lipase-like protein [Oryza sativa (japonica
  misc_feature (209)..(417): Homolog of NCBI NO: 34911870 NR Description: lipase-like protein [Oryza sativa (japonica
  misc_feature (20)..(417): Homolog of NCBI NO: 34911830 NR Description: lipase-like protein [Oryza sativa (japonica
  misc_feature (3)..(419): Homolog of NCBI NO: 15233922 NR Description: lipase (class 3) family [Arabidopsis thaliana]
  misc_feature (16)..(56): Homolog of NCBI NO: 15224613 NR Description: lipase, putative [Arabidopsis thaliana]
  misc_feature (137)..(424): Homolog of NCBI NO: 15224613 NR Description: lipase, putative [Arabidopsis thaliana]
  misc_feature (16)..(438): Homolog of NCBI NO: 15221426 NR Description: lipase (class 3) family [Arabidopsis thaliana]
  misc_feature (16)..(438): Homolog of NCBI NO: 21537306 NR Description: lipase-like protein [Arabidopsis thaliana]

SEQ ID NO: 42437 - protein, 423 aa, Arabidopsis thaliana; identical to SEQ ID NO: 29054
  peptide (1)..(423): Ceres Seq. ID no. 13491617
  misc_feature (2)..(398): Homolog of NCBI NO: 1527001 NR Description: Ipomoea nil Pn47p
  misc_feature (8)..(407): Homolog of NCBI NO: 34911832 NR Description: lipase-like protein [Oryza sativa (japonica
  misc_feature (5)..(198): Homolog of NCBI NO: 34911870 NR Description: lipase-like protein [Oryza sativa (japonica
  misc_feature (194)..(402): Homolog of NCBI NO: 34911870 NR Description: lipase-like protein [Oryza sativa (japonica
  misc_feature (5)..(402): Homolog of NCBI NO: 34911830 NR Description: lipase-like protein [Oryza sativa (japonica
  misc_feature (1)..(404): Homolog of NCBI NO: 15233922 NR Description: lipase (class 3) family [Arabidopsis thaliana]
  misc_feature (1)..(41): Homolog of NCBI NO: 15224613 NR Description: lipase, putative [Arabidopsis thaliana]
  misc_feature (122)..(409): Homolog of NCBI NO: 15224613 NR Description: lipase, putative [Arabidopsis thaliana]
  misc_feature (1)..(423): Homolog of NCBI NO: 15221426 NR Description: lipase (class 3) family [Arabidopsis thaliana]
  misc_feature (1)..(423): Homolog of NCBI NO: 21537306 NR Description: lipase-like protein [Arabidopsis thaliana]

SEQ ID NO: 42438 - protein, 385 aa, Arabidopsis thaliana; identical to SEQ ID NO: 29055
  peptide (1)..(385): Ceres Seq. ID no. 13491618
  misc_feature (1)..(357): Homolog of NCBI NO: 34911842 NR Description: lipase-like protein [Oryza sativa (japonica
  misc_feature (1)..(360): Homolog of NCBI NO: 1527001 NR Description: Ipomoea nil Pn47p
  misc_feature (1)..(369): Homolog of NCBI NO: 34911832 NR Description: lipase-like protein [Oryza sativa (japonica
  misc_feature (1)..(160): Homolog of NCBI NO: 34911870 NR Description: lipase-like protein [Oryza sativa (japonica
  misc_feature (156)..(364): Homolog of NCBI NO: 34911870 NR Description: lipase-like protein [Oryza sativa (japonica
  misc_feature (1)..(364): Homolog of NCBI NO: 34911830 NR Description: lipase-like protein [Oryza sativa (japonica
  misc_feature (1)..(366): Homolog of NCBI NO: 15233922 NR Description: lipase (class 3) family [Arabidopsis thaliana]
  misc_feature (84)..(371): Homolog of NCBI NO: 15224613 NR Description: lipase, putative [Arabidopsis thaliana]
  misc_feature (1)..(385): Homolog of NCBI NO: 15221426 NR Description: lipase (class 3) family [Arabidopsis thaliana]
  misc_feature (1)..(385): Homolog of NCBI NO: 21537306 NR Description: lipase-like protein [Arabidopsis thaliana]

SEQ ID NO: 42439 - DNA, 1704 bp, Arabidopsis thaliana
  misc_feature (1)..(1704): Ceres Seq. ID no. 12395036
  misc_feature: MA Experiment ID: 20000072 Result: Up-regulated in Transcription
  misc_feature: MA Experiment 20000072 PARAMETER Experiment Name: At_100uM_ABA_Mutants_cDNA_P Parameter: Plant Line Value: CS8105
  misc_feature: MA Experiment 20000072 PARAMETER Experiment Name: At_100uM_ABA_Mutants_cDNA_P Parameter: Timepoint (hr) Value: 6
  misc_feature: MA Experiment 20000072 PARAMETER Experiment Name: At_100uM_ABA_Mutants_cDNA_P Parameter: Tissue Value: Aerial
  misc_feature: MA Experiment 20000072 PARAMETER Experiment Name: At_100uM_ABA_Mutants_cDNA_P Parameter: Treatment Value: 100uM ABA vs. No Treatment
  misc_feature: MA Experiment ID: 20000169 Result: Up-regulated in Transcription
  misc_feature: MA Experiment 20000169 PARAMETER Experiment Name: At_100uM_ABA_P Parameter: Age (day) Value: 14
  misc_feature: MA Experiment 20000169 PARAMETER Experiment Name: At_100uM_ABA_P Parameter: Organism Value: A. thaliana
  misc_feature: MA Experiment 20000169 PARAMETER Experiment Name: At_100uM_ABA_P Parameter: Plant Line Value: WS
  misc_feature: MA Experiment 20000169 PARAMETER Experiment Name: At_100uM_ABA_P Parameter: Timepoint (hr) Value: 6
  misc_feature: MA Experiment 20000169 PARAMETER Experiment Name: At_100uM_ABA_P Parameter: Tissue Value: Aerial
  misc_feature: MA Experiment 20000169 PARAMETER Experiment Name: At_100uM_ABA_P Parameter: Treatment Value: 100uM ABA vs. No Treatment
  misc_feature: MA Experiment ID: 20000213 Result: Down-regulated in Transcription
  misc_feature: MA Experiment 20000213 PARAMETER Experiment Name: At_4deg_Cold_P Parameter: Timepoint (hr) Value: 2
  misc_feature: MA Experiment ID: 20000265 Result: Up-regulated in Transcription
  misc_feature: MA Experiment 20000265 PARAMETER Experiment Name: At_Open_Flower_P Parameter: Age (day) Value: 21
  misc_feature: MA Experiment 20000265 PARAMETER Experiment Name: At_Open_Flower_P Parameter: Plant Line Value: WS
  misc_feature: MA Experiment 20000265 PARAMETER Experiment Name: At_Open_Flower_P Parameter: Tissue Value: Closed Flower vs. Whole Plant
  misc_feature: MA Experiment ID: 20000286 Result: Up-regulated in Transcription
  misc_feature: MA Experiment 20000286 PARAMETER Experiment Name: At_Open_Flower_P Parameter: Age (day) Value: 21
  misc_feature: MA Experiment 20000286 PARAMETER Experiment Name: At_Open_Flower_P Parameter: Plant Line Value: WS
  misc_feature: MA Experiment 20000286 PARAMETER Experiment Name: At_Open_Flower_P Parameter: Tissue Value: Half Open vs. Whole Plant
  misc_feature: MA Experiment ID: 20000436 Result: Up-regulated in Transcription
  misc_feature: MA Experiment 20000436 PARAMETER Experiment Name: At_Drought_P Parameter: Age (day) Value: 7
  misc_feature: MA Experiment 20000436 PARAMETER Experiment Name: At_Drought_P Parameter: Organism Value: A. thaliana
  misc_feature: MA Experiment 20000436 PARAMETER Experiment Name: At_Drought_P Parameter: Plant Line Value: WS
  misc_feature: MA Experiment 20000436 PARAMETER Experiment Name: At_Drought_P Parameter: Timepoint (hr) Value: 12
  misc_feature: MA Experiment 20000436 PARAMETER Experiment Name: At_Drought_P Parameter: Tissue Value: Whole Plant
  misc_feature: MA Experiment 20000436 PARAMETER Experiment Name: At_Drought_P Parameter: Treatment Value: Drought vs. No Drought
  misc_feature: MA Experiment ID: 20000437 Result: Up-regulated in Transcription
  misc_feature: MA Experiment 20000437 PARAMETER Experiment Name: At_Drought_P Parameter: Age (day) Value: 8
  misc_feature: MA Experiment 20000437 PARAMETER Experiment Name: At_Drought_P Parameter: Organism Value: A. thaliana
  misc_feature: MA Experiment 20000437 PARAMETER Experiment Name: At_Drought_P Parameter: Plant Line Value: WS
  misc_feature: MA Experiment 20000437 PARAMETER Experiment Name: At_Drought_P Parameter: Timepoint (hr) Value: 24
  misc_feature: MA Experiment 20000437 PARAMETER Experiment Name: At_Drought_P Parameter: Tissue Value: Whole Plant
  misc_feature: MA Experiment 20000437 PARAMETER Experiment Name: At_Drought_P Parameter: Treatment Value: Drought vs. No Drought
  misc_feature: MA Experiment ID: 20000441 Result: Up-regulated in Transcription
  misc_feature: MA Experiment 20000441 PARAMETER Experiment Name: At_1uM_BR-BRZ__P Parameter: Tissue Value: Shoot Apices
  misc_feature: MA Experiment 20000441 PARAMETER Experiment Name: At_1uM_BR-BRZ__P Parameter: Treatment Value: 1uM BR vs. No Treatment
  misc_feature: MA Experiment ID: 20000453 Result: Up-regulated in Transcription
  misc_feature: MA Experiment 20000453 PARAMETER Experiment Name: At_100uM_ABA_P Parameter: Age (day) Value: 15
  misc_feature: MA Experiment 20000453 PARAMETER Experiment Name: At_100uM_ABA_P Parameter: Organism Value: A. thaliana
  misc_feature: MA Experiment 20000453 PARAMETER Experiment Name: At_100uM_ABA_P Parameter: Plant Line Value: WS
  misc_feature: MA Experiment 20000453 PARAMETER Experiment Name: At_100uM_ABA_P Parameter: Timepoint (hr) Value: 24
  misc_feature: MA Experiment 20000453 PARAMETER Experiment Name: At_100uM_ABA_P Parameter: Tissue Value: Aerial
  misc_feature: MA Experiment 20000453 PARAMETER Experiment Name: At_100uM_ABA_P Parameter: Treatment Value: 100uM ABA vs. No Treatment
  misc_feature: MA Experiment ID: 20000527 Result: Up-regulated in Transcription
  misc_feature: MA Experiment 20000527 PARAMETER Experiment Name: At_10percent_PEG_P Parameter: Age (day) Value: 20
  misc_feature: MA Experiment 20000527 PARAMETER Experiment Name: At_10percent_PEG_P Parameter: Organism Value: A. thaliana
  misc_feature: MA Experiment 20000527 PARAMETER Experiment Name: At_10percent_PEG_P Parameter: Plant Line Value: WS
  misc_feature: MA Experiment 20000527 PARAMETER Experiment Name: At_10percent_PEG_P Parameter: Timepoint (day) Value: 20
  misc_feature: MA Experiment 20000527 PARAMETER Experiment Name: At_10percent_PEG_P Parameter: Tissue Value: Whole Plant
  misc_feature: MA Experiment 20000527 PARAMETER Experiment Name: At_10percent_PEG_P Parameter: Treatment Value: 10percent PEG vs. No Treatment
  misc_feature: MA Experiment ID: 20000794 Result: Up-regulated in Transcription
  misc_feature: MA Experiment 20000794 PARAMETER Experiment Name: At_Petals_P Parameter: Age (day) Value: 23-25 days
  misc_feature: MA Experiment 20000794 PARAMETER Experiment Name: At_Petals_P Parameter: Plant Line Value: WS
  misc_feature: MA Experiment 20000794 PARAMETER Experiment Name: At_Petals_P Parameter: Tissue Value: Petals vs. Whole plant
  misc_feature: MA Experiment ID: 20001248 Result: Up-regulated in Transcription
  misc_feature: MA Experiment 20001248 PARAMETER Experiment Name: At_Far-red-induction_P Parameter: Age (day) Value: 7
  misc_feature: MA Experiment 20001248 PARAMETER Experiment Name: At_Far-red-induction_P Parameter: Light Value: Far-red vs. White
  misc_feature: MA Experiment 20001248 PARAMETER Experiment Name: At_Far-red-induction_P Parameter: Organism Value: A. thaliana
  misc_feature: MA Experiment 20001248 PARAMETER Experiment Name: At_Far-red-induction_P Parameter: Plant Line Value: Columbia
  misc_feature: MA Experiment 20001248 PARAMETER Experiment Name: At_Far-red-induction_P Parameter: Timepoint (hr) Value: 4
  misc_feature: MA Experiment 20001248 PARAMETER Experiment Name: At_Far-red-induction_P Parameter: Tissue Value: Whole Plant
  misc_feature: MA Experiment ID: 20001450 Result: Up-regulated in Transcription
  misc_feature: MA Experiment 20001450 PARAMETER Experiment Name: At_Far-red-induction_P Parameter: Age (day) Value: 7
  misc_feature: MA Experiment 20001450 PARAMETER Experiment Name: At_Far-red-induction_P Parameter: Light Value: Far-red vs. White
  misc_feature: MA Experiment 20001450 PARAMETER Experiment Name: At_Far-red-induction_P Parameter: Organism Value: A. thaliana
  misc_feature: MA Experiment 20001450 PARAMETER Experiment Name: At_Far-red-induction_P Parameter: Plant Line Value: Columbia
  misc_feature: MA Experiment 20001450 PARAMETER Experiment Name: At_Far-red-induction_P Parameter: Timepoint (hr) Value: 8
  misc_feature: MA Experiment 20001450 PARAMETER Experiment Name: At_Far-red-induction_P Parameter: Tissue Value: Whole Plant
  misc_feature: MA Experiment ID: 20001451 Result: Up-regulated in Transcription
  misc_feature: MA Experiment 20001451 PARAMETER Experiment Name: At_Far-red-induction_P Parameter: Age (day) Value: 7
  misc_feature: MA Experiment 20001451 PARAMETER Experiment Name: At_Far-red-induction_P Parameter: Light Value: Far-red vs. White
  misc_feature: MA Experiment 20001451 PARAMETER Experiment Name: At_Far-red-induction_P Parameter: Organism Value: A. thaliana
  misc_feature: MA Experiment 20001451 PARAMETER Experiment Name: At_Far-red-induction_P Parameter: Plant Line Value: Columbia
  misc_feature: MA Experiment 20001451 PARAMETER Experiment Name: At_Far-red-induction_P Parameter: Timepoint (hr) Value: 24
  misc_feature: MA Experiment 20001451 PARAMETER Experiment Name: At_Far-red-induction_P Parameter: Tissue Value: Whole Plant
  misc_feature: MA Experiment ID: 20001559 Result: Up-regulated in Transcription
  misc_feature: MA Experiment 20001559 PARAMETER Experiment Name: At_Drought_Soil_Dry_P Parameter: Age (day) Value: 28
  misc_feature: MA Experiment 20001559 PARAMETER Experiment Name: At_Drought_Soil_Dry_P Parameter: Organism Value: A. thaliana
  misc_feature: MA Experiment 20001559 PARAMETER Experiment Name: At_Drought_Soil_Dry_P Parameter: Plant Line Value: WS
  misc_feature: MA Experiment 20001559 PARAMETER Experiment Name: At_Drought_Soil_Dry_P Parameter: Post Timepoint (hr) Value: 29
  misc_feature: MA Experiment 20001559 PARAMETER Experiment Name: At_Drought_Soil_Dry_P Parameter: Post-Treatment Value: Re-Water vs. No Drought
  misc_feature: MA Experiment 20001559 PARAMETER Experiment Name: At_Drought_Soil_Dry_P Parameter: Timepoint (day) Value: 14
  misc_feature: MA Experiment 20001559 PARAMETER Experiment Name: At_Drought_Soil_Dry_P Parameter: Treatment Value: Drought vs. No Drought
  misc_feature: MA Experiment ID: 20001560 Result: Up-regulated in Transcription
  misc_feature: MA Experiment 20001560 PARAMETER Experiment Name: At_Drought_Soil_Dry_P Parameter: Age (day) Value: 28
  misc_feature: MA Experiment 20001560 PARAMETER Experiment Name: At_Drought_Soil_Dry_P Parameter: Organism Value: A. thaliana
  misc_feature: MA Experiment 20001560 PARAMETER Experiment Name: At_Drought_Soil_Dry_P Parameter: Plant Line Value: WS
  misc_feature: MA Experiment 20001560 PARAMETER Experiment Name: At_Drought_Soil_Dry_P Parameter: Post Timepoint (hr) Value: None
  misc_feature: MA Experiment 20001560 PARAMETER Experiment Name: At_Drought_Soil_Dry_P Parameter: Post-Treatment Value: None
  misc_feature: MA Experiment 20001560 PARAMETER Experiment Name: At_Drought_Soil_Dry_P Parameter: Timepoint (day) Value: 14
  misc_feature: MA Experiment 20001560 PARAMETER Experiment Name: At_Drought_Soil_Dry_P Parameter: Treatment Value: Drought vs. No Drought
  misc_feature: MA Experiment ID: 20001904 Result: Up-regulated in Transcription
  misc_feature: MA Experiment 20001904 PARAMETER Experiment Name: At_Drought_Reproduction_P Parameter: Age (day) Value: 37
  misc_feature: MA Experiment 20001904 PARAMETER Experiment Name: At_Drought_Reproduction_P Parameter: Organism Value: A. thaliana
  misc_feature: MA Experiment 20001904 PARAMETER Experiment Name: At_Drought_Reproduction_P Parameter: Plant Line Value: WS
  misc_feature: MA Experiment 20001904 PARAMETER Experiment Name: At_Drought_Reproduction_P Parameter: Timepoint (day) Value: 7
  misc_feature: MA Experiment 20001904 PARAMETER Experiment Name: At_Drought_Reproduction_P Parameter: Tissue Value: Rosettes
  misc_feature: MA Experiment 20001904 PARAMETER Experiment Name: At_Drought_Reproduction_P Parameter: Treatment Value: Drought vs. No Drought
  misc_feature: MA Experiment ID: 20001905 Result: Up-regulated in Transcription
  misc_feature: MA Experiment 20001905 PARAMETER Experiment Name: At_Drought_Reproduction_P Parameter: Age (day) Value: 40
  misc_feature: MA Experiment 20001905 PARAMETER Experiment Name: At_Drought_Reproduction_P Parameter: Organism Value: A. thaliana
  misc_feature: MA Experiment 20001905 PARAMETER Experiment Name: At_Drought_Reproduction_P Parameter: Plant Line Value: WS
  misc_feature: MA Experiment 20001905 PARAMETER Experiment Name: At_Drought_Reproduction_P Parameter: Timepoint (day) Value: 10
  misc_feature: MA Experiment 20001905 PARAMETER Experiment Name: At_Drought_Reproduction_P Parameter: Tissue Value: Rosettes
  misc_feature: MA Experiment 20001905 PARAMETER Experiment Name: At_Drought_Reproduction_P Parameter: Treatment Value: Drought vs. No Drought
  misc_feature: MA Experiment ID: 20001906 Result: Up-regulated in Transcription
  misc_feature: MA Experiment 20001906 PARAMETER Experiment Name: At_Drought_Reproduction_P Parameter: Age (day) Value: 35
  misc_feature: MA Experiment 20001906 PARAMETER Experiment Name: At_Drought_Reproduction_P Parameter: Organism Value: A. thaliana
  misc_feature: MA Experiment 20001906 PARAMETER Experiment Name: At_Drought_Reproduction_P Parameter: Plant Line Value: WS
  misc_feature: MA Experiment 20001906 PARAMETER Experiment Name: At_Drought_Reproduction_P Parameter: Timepoint (day) Value: 5
  misc_feature: MA Experiment 20001906 PARAMETER Experiment Name: At_Drought_Reproduction_P Parameter: Tissue Value: Siliques
  misc_feature: MA Experiment 20001906 PARAMETER Experiment Name: At_Drought_Reproduction_P Parameter: Treatment Value: Drought vs. No Drought
  misc_feature: MA Experiment ID: 20001908 Result: Up-regulated in Transcription
  misc_feature: MA Experiment 20001908 PARAMETER Experiment Name: At_Drought_Reproduction_P Parameter: Age (day) Value: 40
  misc_feature: MA Experiment 20001908 PARAMETER Experiment Name: At_Drought_Reproduction_P Parameter: Organism Value: A. thaliana
  misc_feature: MA Experiment 20001908 PARAMETER Experiment Name: At_Drought_Reproduction_P Parameter: Plant Line Value: WS
  misc_feature: MA Experiment 20001908 PARAMETER Experiment Name: At_Drought_Reproduction_P Parameter: Timepoint (day) Value: 10
  misc_feature: MA Experiment 20001908 PARAMETER Experiment Name: At_Drought_Reproduction_P Parameter: Tissue Value: Siliques
  misc_feature: MA Experiment 20001908 PARAMETER Experiment Name: At_Drought_Reproduction_P Parameter: Treatment Value: Drought vs. No Drought
  misc_feature: MA Experiment ID: 20001910 Result: Up-regulated in Transcription
  misc_feature: MA Experiment 20001910 PARAMETER Experiment Name: At_Drought_Reproduction_P Parameter: Age (day) Value: 37
  misc_feature: MA Experiment 20001910 PARAMETER Experiment Name: At_Drought_Reproduction_P Parameter: Organism Value: A. thaliana
  misc_feature: MA Experiment 20001910 PARAMETER Experiment Name: At_Drought_Reproduction_P Parameter: Plant Line Value: WS
  misc_feature: MA Experiment 20001910 PARAMETER Experiment Name: At_Drought_Reproduction_P Parameter: Timepoint (day) Value: 7
  misc_feature: MA Experiment 20001910 PARAMETER Experiment Name: At_Drought_Reproduction_P Parameter: Tissue Value: Flowers
  misc_feature: MA Experiment 20001910 PARAMETER Experiment Name: At_Drought_Reproduction_P Parameter: Treatment Value: Drought vs. No Drought
  misc_feature: MA Experiment ID: 20001911 Result: Up-regulated in Transcription
  misc_feature: MA Experiment 20001911 PARAMETER Experiment Name: At_Drought_Reproduction_P Parameter: Age (day) Value: 40
  misc_feature: MA Experiment 20001911 PARAMETER Experiment Name: At_Drought_Reproduction_P Parameter: Organism Value: A. thaliana
  misc_feature: MA Experiment 20001911 PARAMETER Experiment Name: At_Drought_Reproduction_P Parameter: Plant Line Value: WS
  misc_feature: MA Experiment 20001911 PARAMETER Experiment Name: At_Drought_Reproduction_P Parameter: Timepoint (day) Value: 10
  misc_feature: MA Experiment 20001911 PARAMETER Experiment Name: At_Drought_Reproduction_P Parameter: Tissue Value: Flowers
  misc_feature: MA Experiment 20001911 PARAMETER Experiment Name: At_Drought_Reproduction_P Parameter: Treatment Value: Drought vs. No Drought
accatcgaaacagtgtcgtcgtagtctctctctctctccgcaaaatatcatcggagaaaagaaacagagacacgaaacagagaaaaccatgcagagattcgcggcgaaaagatcggtgcaaaacatttccgtctctctatggcgtcgatgtatctcatcgacgtctcaggcagcgacagcttccgttaaggattccgacgagtttcaggcgaggcttcctccttttgcttacactcctccgccgtatactggtccttccgccgatgttatccttagcaaaaggaaggagtttctcagtccttccatgttctgtctctatcggaaaccgttaaacattgtggatgggaaaatgcagtatctatttgatgagagtggtcggagatatttagatgcatttgctgggattgctgttgtgaattgtggacattgtcatccagatgtggttgagccagtgattaatcaaatcaagaggcttcagcatcctactgttctttaccttaaccatgccattgctgatttctctgaggctcttgcttctaaacttcccggtgatctaaaggtggtgtttttcactaactcagggacagaggctaatgaattggcgcttatgatggctaagttgtatactggatgtcaagatattgtggcggttcgaaacgggtatcatggtaatgcagctgcaactatgggggctactggtcagagtatgtggaagtttaatgtggttcagaatagtgttcatcatgctttgaaccctgatccttatagaggtgtgtttggttctgatggagagaagtatgcaaaggatttgcaagatcttattcaatatggtacgactggtcacattgccggttttatttgtgaagctattcagggagttggagggatcgtggaactagcaccgggatatttgtcagcggcttacgatactgttaagaaagctggtggattgttcattgcggatgaagttcagtctggtttcgcacgtactggtaacttttggggatttgaggcacacaatgttgtccctgacatagtaaccatggcaaagggaattgggaatgggtttcctttgggagctgttgtgacaactccagagatagcaggagtgttgactcgccgtagctacttcaatacatttggtggaaattctgtgtctactacagctggtctcgctgttctgaatgtgattgagaaagagaagcttcaggaaaatgctgcaatggttggatcctatctgaaagaaaaactcacacagctgaaagaaaaacacgagattatcggggatgtccggggaagaggactgatgcttggagtggagctggtgagtgatcgcaagcttaagactcctgcaaccgccgagactctgcacattatggatcaaatgaaagaattgggtgtgttgattggaaaaggaggctactttggaaatgtctttagaatcacaccacctctctgcttcaccaaggacgatgcagattttctcgtggaagcgatggactactcaatgtcgaagatgtgaagaaatggaaaatgatagatgatggttttatgaaatatggtttactaagttgtggtgaagaatgcttgtaattatgctatgaacgactacaagattgatgagccaacatctcgttgcttctcaatcactatgttttcttaatgttcacaactttgcttgtgtcaaaataaagtcacatcatt

SEQ ID NO: 42440 - protein, 506 aa, Arabidopsis thaliana
  peptide (1)..(506): Ceres Seq. ID no. 12395037
  misc_feature (100)..(502): Pfam Name: Aminotransferase class-III Pfam Description: Aminotransferase class-III
  misc_feature (264)..(505): Homolog of NCBI NO: 39595899 NR Description: Hypothetical protein CBG12888 [Caenorhabditis
  misc_feature (48)..(260): Homolog of NCBI NO: 16198011 NR Description: LD24726p [Drosophila melanogaster]
  misc_feature (263)..(505): Homolog of NCBI NO: 16198011 NR Description: LD24726p [Drosophila melanogaster]
  misc_feature (48)..(260): Homolog of NCBI NO: 28574759 NR Description: CG11241-PA [Drosophila melanogaster]
  misc_feature (263)..(505): Homolog of NCBI NO: 28574759 NR Description: CG11241-PA [Drosophila melanogaster]
  misc_feature (30)..(506): Homolog of NCBI NO: 18420498 NR Description: putative protein
  misc_feature (30)..(506): Homolog of NCBI NO: 5731259 NR Description: alanine:glyoxylate aminotransferase 2 homolog
  misc_feature (30)..(506): Homolog of NCBI NO: 15231974 NR Description: putative aminotransferase
  misc_feature (30)..(506): Homolog of NCBI NO: 15028237 NR Description: putative beta-alanine-pyruvate aminotransferase
  misc_feature (30)..(506): Homolog of NCBI NO: 15224499 NR Description: putative beta-alanine-pyruvate aminotransferase
PSKQCRRSLSLSPQNIIGEKKQRHETEKTMQRFAAKRSVQNISVSLWRRCISSTSQAATASVKDSDEFQARLPPFAYTPPPYTGPSADVILSKRKEFLSPSMFCLYRKPLNIVDGKMQYLFDESGRRYLDAFAGIAVVNCGHCHPDVVEPVINQIKRLQHPTVLYLNHAIADFSEALASKLPGDLKVVFFTNSGTEANELALMMAKLYTGCQDIVAVRNGYHGNAAATMGATGQSMWKFNVVQNSVHHALNPDPYRGVFGSDGEKYAKDLQDLIQYGTTGHIAGFICEAIQGVGGIVELAPGYLSAAYDTVKKAGGLFIADEVQSGFARTGNFWGFEAHNVVPDIVTMAKGIGNGFPLGAVVTTPEIAGVLTRRSYFNTFGGNSVSTTAGLAVLNVIEKEKLQENAAMVGSYLKEKLTQLKEKHEIIGDVRGRGLMLGVELVSDRKLKTPATAETLHIMDQMKELGVLIGKGGYFGNVFRITPPLCFTKDDADFLVEAMDYSMSKM

SEQ ID NO: 42441 - protein, 477 aa, Arabidopsis thaliana
  peptide (1)..(477): Ceres Seq. ID no. 12395038
  misc_feature (71)..(473): Pfam Name: Aminotransferase class-III Pfam Description: Aminotransferase class-III
  misc_feature (235)..(476): Homolog of NCBI NO: 39595899 NR Description: Hypothetical protein CBG12888 [Caenorhabditis
  misc_feature (19)..(231): Homolog of NCBI NO: 16198011 NR Description: LD24726p [Drosophila melanogaster]
  misc_feature (234)..(476): Homolog of NCBI NO: 16198011 NR Description: LD24726p [Drosophila melanogaster]
  misc_feature (19)..(231): Homolog of NCBI NO: 28574759 NR Description: CG11241-PA [Drosophila melanogaster]
  misc_feature (234)..(476): Homolog of NCBI NO: 28574759 NR Description: CG11241-PA [Drosophila melanogaster]
  misc_feature (1)..(477): Homolog of NCBI NO: 18420498 NR Description: putative protein
  misc_feature (1)..(477): Homolog of NCBI NO: 5731259 NR Description: alanine:glyoxylate aminotransferase 2 homolog
  misc_feature (1)..(477): Homolog of NCBI NO: 15231974 NR Description: putative aminotransferase
  misc_feature (1)..(477): Homolog of NCBI NO: 15028237 NR Description: putative beta-alanine-pyruvate aminotransferase
  misc_feature (1)..(477): Homolog of NCBI NO: 15224499 NR Description: putative beta-alanine-pyruvate aminotransferase
MQRFAAKRSVQNISVSLWRRCISSTSQAATASVKDSDEFQARLPPFAYTPPPYTGPSADVILSKRKEFLSPSMFCLYRKPLNIVDGKMQYLFDESGRRYLDAFAGIAVVNCGHCHPDVVEPVINQIKRLQHPTVLYLNHAIADFSEALASKLPGDLKVVFFTNSGTEANELALMMAKLYTGCQDIVAVRNGYHGNAAATMGATGQSMWKFNVVQNSVHHALNPDPYRGVFGSDGEKYAKDLQDLIQYGTTGHIAGFICEAIQGVGGIVELAPGYLSAAYDTVKKAGGLFIADEVQSGFARTGNFWGFEAHNVVPDIVTMAKGIGNGFPLGAVVTTPEIAGVLTRRSYFNTFGGNSVSTTAGLAVLNVIEKEKLQENAAMVGSYLKEKLTQLKEKHEIIGDVRGRGLMLGVELVSDRKLKTPATAETLHIMDQMKELGVLIGKGGYFGNVFRITPPLCFTKDDADFLVEAMDYSMSKM

SEQ ID NO: 42442 - protein, 405 aa, Arabidopsis thaliana
  peptide (1)..(405): Ceres Seq. ID no. 12395039
  misc_feature (1)..(401): Pfam Name: Aminotransferase class-III Pfam Description: Aminotransferase class-III
  misc_feature (163)..(404): Homolog of NCBI NO: 39595899 NR Description: Hypothetical protein CBG12888 [Caenorhabditis
  misc_feature (1)..(159): Homolog of NCBI NO: 16198011 NR Description: LD24726p [Drosophila melanogaster]
  misc_feature (162)..(404): Homolog of NCBI NO: 16198011 NR Description: LD24726p [Drosophila melanogaster]
  misc_feature (1)..(159): Homolog of NCBI NO: 28574759 NR Description: CG11241-PA [Drosophila melanogaster]
  misc_feature (162)..(404): Homolog of NCBI NO: 28574759 NR Description: CG11241-PA [Drosophila melanogaster]
  misc_feature (1)..(405): Homolog of NCBI NO: 18420498 NR Description: putative protein
  misc_feature (1)..(405): Homolog of NCBI NO: 5731259 NR Description: alanine:glyoxylate aminotransferase 2 homolog
  misc_feature (1)..(405): Homolog of NCBI NO: 15231974 NR Description: putative aminotransferase
  misc_feature (1)..(405): Homolog of NCBI NO: 15028237 NR Description: putative beta-alanine-pyruvate aminotransferase
  misc_feature (1)..(405): Homolog of NCBI NO: 15224499 NR Description: putative beta-alanine-pyruvate aminotransferase
MFCLYRKPLNIVDGKMQYLFDESGRRYLDAFAGIAVVNCGHCHPDVVEPVINQIKRLQHPTVLYLNHAIADFSEALASKLPGDLKVVFFTNSGTEANELALMMAKLYTGCQDIVAVRNGYHGNAAATMGATGQSMWKFNVVQNSVHHALNPDPYRGVFGSDGEKYAKDLQDLIQYGTTGHIAGFICEAIQGVGGIVELAPGYLSAAYDTVKKAGGLFIADEVQSGFARTGNFWGFEAHNVVPDIVTMAKGIGNGFPLGAVVTTPEIAGVLTRRSYFNTFGGNSVSTTAGLAVLNVIEKEKLQENAAMVGSYLKEKLTQLKEKHEIIGDVRGRGLMLGVELVSDRKLKTPATAETLHIMDQMKELGVLIGKGGYFGNVFRITPPLCFTKDDADFLVEAMDYSMSKM

SEQ ID NO: 42443 - DNA, 1411 bp, Arabidopsis thaliana
  misc_feature (1)..(1411): Ceres Seq. ID no. 12348683
  misc_feature: MA Experiment ID: 20000184 Result: Up-regulated in Transcription
  misc_feature: MA Experiment 20000184 PARAMETER Experiment Name: At_Shoots__P Parameter: Age (day) Value: 7
  misc_feature: MA Experiment 20000184 PARAMETER Experiment Name: At_Shoots__P Parameter: Tissue Value: Shoots vs. Whole Plant
  misc_feature: MA Experiment ID: 20000185 Result: Up-regulated in Transcription
  misc_feature: MA Experiment 20000185 PARAMETER Experiment Name: At_Roots__P Parameter: Age (day) Value: 7 vs. 21
  misc_feature: MA Experiment 20000185 PARAMETER Experiment Name: At_Roots__P Parameter: Organism Value: A. thaliana
  misc_feature: MA Experiment 20000185 PARAMETER Experiment Name: At_Roots__P Parameter: Tissue Value: Roots vs. Whole Plant
  misc_feature: MA Experiment ID: 20000227 Result: Down-regulated in Transcription
  misc_feature: MA Experiment 20000227 PARAMETER Experiment Name: At_Root-Tips-vs-Tops_P Parameter: Tissue Value: Root Tips vs. Root Tops
  misc_feature: MA Experiment ID: 20000439 Result: Up-regulated in Transcription
  misc_feature: MA Experiment 20000439 PARAMETER Experiment Name: At_Roots__P Parameter: Age (day) Value: 14 vs. 21
  misc_feature: MA Experiment 20000439 PARAMETER Experiment Name: At_Roots__P Parameter: Organism Value: A. thaliana
  misc_feature: MA Experiment 20000439 PARAMETER Experiment Name: At_Roots__P Parameter: Tissue Value: Roots vs. Whole Plant
  misc_feature: MA Experiment ID: 20000495 Result: Up-regulated in Transcription
  misc_feature: MA Experiment 20000495 PARAMETER Experiment Name: At_Guard_Cells_P Parameter: Harvest Date Value: 8/2/2002
  misc_feature: MA Experiment 20000495 PARAMETER Experiment Name: At_Guard_Cells_P Parameter: Organism Value: A. thaliana
  misc_feature: MA Experiment 20000495 PARAMETER Experiment Name: At_Guard_Cells_P Parameter: Tissue Value: Guard Cells vs. Leaves
  misc_feature: MA Experiment ID: 20000794 Result: Down-regulated in Transcription
  misc_feature: MA Experiment 20000794 PARAMETER Experiment Name: At_Petals_P Parameter: Age (day) Value: 23-25 days
  misc_feature: MA Experiment 20000794 PARAMETER Experiment Name: At_Petals_P Parameter: Plant Line Value: WS
  misc_feature: MA Experiment 20000794 PARAMETER Experiment Name: At_Petals_P Parameter: Tissue Value: Petals vs. Whole plant
  misc_feature: MA Experiment ID: 20001248 Result: Down-regulated in Transcription
  misc_feature: MA Experiment 20001248 PARAMETER Experiment Name: At_Far-red-induction_P Parameter: Age (day) Value: 7
  misc_feature: MA Experiment 20001248 PARAMETER Experiment Name: At_Far-red-induction_P Parameter: Light Value: Far-red vs. White
  misc_feature: MA Experiment 20001248 PARAMETER Experiment Name: At_Far-red-induction_P Parameter: Organism Value: A. thaliana
  misc_feature: MA Experiment 20001248 PARAMETER Experiment Name: At_Far-red-induction_P Parameter: Plant Line Value: Columbia
  misc_feature: MA Experiment 20001248 PARAMETER Experiment Name: At_Far-red-induction_P Parameter: Timepoint (hr) Value: 4
  misc_feature: MA Experiment 20001248 PARAMETER Experiment Name: At_Far-red-induction_P Parameter: Tissue Value: Whole Plant
  misc_feature: MA Experiment ID: 20001557 Result: Down-regulated in Transcription
  misc_feature: MA Experiment 20001557 PARAMETER Experiment Name: At_Drought_Soil_Dry_P Parameter: Age (day) Value: 27
  misc_feature: MA Experiment 20001557 PARAMETER Experiment Name: At_Drought_Soil_Dry_P Parameter: Organism Value: A. thaliana
  misc_feature: MA Experiment 20001557 PARAMETER Experiment Name: At_Drought_Soil_Dry_P Parameter: Plant Line Value: WS
  misc_feature: MA Experiment 20001557 PARAMETER Experiment Name: At_Drought_Soil_Dry_P Parameter: Post Timepoint (hr) Value: 3
  misc_feature: MA Experiment 20001557 PARAMETER Experiment Name: At_Drought_Soil_Dry_P Parameter: Post-Treatment Value: Re-Water vs. No Drought
  misc_feature: MA Experiment 20001557 PARAMETER Experiment Name: At_Drought_Soil_Dry_P Parameter: Timepoint (day) Value: 13
  misc_feature: MA Experiment 20001557 PARAMETER Experiment Name: At_Drought_Soil_Dry_P Parameter: Treatment Value: Drought vs. No Drought
  misc_feature: MA Experiment ID: 20001905 Result: Down-regulated in Transcription
  misc_feature: MA Experiment 20001905 PARAMETER Experiment Name: At_Drought_Reproduction_P Parameter: Age (day) Value: 40
  misc_feature: MA Experiment 20001905 PARAMETER Experiment Name: At_Drought_Reproduction_P Parameter: Organism Value: A. thaliana
  misc_feature: MA Experiment 20001905 PARAMETER Experiment Name: At_Drought_Reproduction_P Parameter: Plant Line Value: WS
  misc_feature: MA Experiment 20001905 PARAMETER Experiment Name: At_Drought_Reproduction_P Parameter: Timepoint (day) Value: 10
  misc_feature: MA Experiment 20001905 PARAMETER Experiment Name: At_Drought_Reproduction_P Parameter: Tissue Value: Rosettes
  misc_feature: MA Experiment 20001905 PARAMETER Experiment Name: At_Drought_Reproduction_P Parameter: Treatment Value: Drought vs. No Drought
  misc_feature: MA Experiment ID: 20001906 Result: Down-regulated in Transcription
  misc_feature: MA Experiment 20001906 PARAMETER Experiment Name: At_Drought_Reproduction_P Parameter: Age (day) Value: 35
  misc_feature: MA Experiment 20001906 PARAMETER Experiment Name: At_Drought_Reproduction_P Parameter: Organism Value: A. thaliana
  misc_feature: MA Experiment 20001906 PARAMETER Experiment Name: At_Drought_Reproduction_P Parameter: Plant Line Value: WS
  misc_feature: MA Experiment 20001906 PARAMETER Experiment Name: At_Drought_Reproduction_P Parameter: Timepoint (day) Value: 5
  misc_feature: MA Experiment 20001906 PARAMETER Experiment Name: At_Drought_Reproduction_P Parameter: Tissue Value: Siliques
  misc_feature: MA Experiment 20001906 PARAMETER Experiment Name: At_Drought_Reproduction_P Parameter: Treatment Value: Drought vs. No Drought
atttctttctctctgcttctctctcttctctatttgtcctaacgacctgattgcattagacaggaacgaaaaggaatgcaaaagatgagagtttcggggtttagagttcttctcttggtttcttgtttcttctgcaaatccaaaggagctgttgttcctgcactcatcatgtttggcgactccattgttgacgttggcaacaacaataacttactcagcattgtcaaatccaactttcttccttacggtagagacttcatcaaccaaagacccaccggaagattctgcaacggaaaactcgctgtagatttctcagccgagtaccttggtttctcttcatacccacctgcattcctaagccgggaagcaagcaacaagaatatcctgatcggtgccaactttgcatcagcttcttcaggatactatgatgccacatctgttccatttggctcgatctccttaacacgacagctgagctattacagggcgtatcaaaatagagtaacgagaatgatcgggagggggaacgcgcgcatactgttctctagaggtatccacattttgagtgcgggatctagcgactttcttcagaattattacatcaatcctctactcaacatcctaaatacacctgatcagttcgctgacattctcctgagatccttctcagaattcatccagaatctgtatgaactaggagcaaggagaatcggagtgatatcgctaccgccgatgggttgcctgcctgcagctatcactcttttcggtgcaggaaacaaaagttgtgttgagagactgaacaacgacgctatcatgttcaataccaaacttgagaacacaacccggttattgatgaatagacactcaggtctcagactcgtcgcctttaatgtctaccaacctttcctggacatcatcaccaacccaactgacaatggattctttgaaacaaaaagggcatgctgcggaacagggacaatagaaacatcgttcctttgcaattctctatccttcggaacgtgtgtaaatgccactggatatgtgttttgggatggatttcatcccacagaggctgtaaacgagctgttggctggtcaactactgggtcaagggatttctctaatcaattgaattgagcttcatcccagttggattgaattcaaactgtatacctacaaatagctaccaaagttggtctctctcttctctcttttctctttctctctctctatatgtaactcacaaataagagacagattgtgtgtgcgtgtgtgtgactgaatgtagaaactaccaatctggtctgtgtcactgtgtgacgggtctataggtccaagctttgtttgagaagatcacaatctttggtattttatttttgttccgaatctacctctttaacatttctaaggtt

SEQ ID NO: 42444 - protein, 351 aa, Arabidopsis thaliana
  peptide (1)..(351): Ceres Seq. ID no. 12348684
  misc_feature (30)..(289): Pfam Name: GDSL-like Lipase/Acylhydrolase Pfam Description: GDSL-like Lipase/Acylhydrolase
  misc_feature (33)..(350): Homolog of NCBI NO: 2062167 NR Description: Proline-rich protein APG isolog [Arabidopsis
  misc_feature (7)..(350): Homolog of NCBI NO: 15228189 NR Description: putative APG protein
  misc_feature (12)..(351): Homolog of NCBI NO: 13174242 NR Description: putative proline-rich protein [Oryza sativa]
  misc_feature (26)..(351): Homolog of NCBI NO: 15237137 NR Description: GDSL-motif lipase/hydrolase-like protein; protein
  misc_feature (34)..(351): Homolog of NCBI NO: 15237528 NR Description: putative protein; protein id: At5g03810.1
  misc_feature (3)..(351): Homolog of NCBI NO: 15237531 NR Description: putative protein; protein id: At5g03820.1
  misc_feature (3)..(351): Homolog of NCBI NO: 9758010 NR Description: proline-rich protein APG-like [Arabidopsis
  misc_feature (321)..(351): Homolog of NCBI NO: 11280580 NR Description: hypothetical protein T4D2.30 - Arabidopsis
  misc_feature (4)..(289): Homolog of NCBI NO: 11280580 NR Description: hypothetical protein T4D2.30 - Arabidopsis
  misc_feature (1)..(351): Homolog of NCBI NO: 30693763 NR Description: GDSL-motif lipase/hydrolase protein [Arabidopsis
MQKMRVSGFRVLLLVSCFFCKSKGAVVPALIMFGDSIVDVGNNNNLLSIVKSNFLPYGRDFINQRPTGRFCNGKLAVDFSAEYLGFSSYPPAFLSREASNKNILIGANFASASSGYYDATSVPFGSISLTRQLSYYRAYQNRVTRMIGRGNARILFSRGIHILSAGSSDFLQNYYINPLLNILNTPDQFADILLRSFSEFIQNLYELGARRIGVISLPPMGCLPAAITLFGAGNKSCVERLNNDAIMFNTKLENTTRLLMNRHSGLRLVAFNVYQPFLDIITNPTDNGFFETKRACCGTGTIETSFLCNSLSFGTCVNATGYVFWDGFHPTEAVNELLAGQLLGQGISLIN

SEQ ID NO: 42445 - protein, 348 aa, Arabidopsis thaliana
  peptide (1)..(348): Ceres Seq. ID no. 12348685
  misc_feature (27)..(286): Pfam Name: GDSL-like Lipase/Acylhydrolase Pfam Description: GDSL-like Lipase/Acylhydrolase
  misc_feature (30)..(347): Homolog of NCBI NO: 2062167 NR Description: Proline-rich protein APG isolog [Arabidopsis
  misc_feature (4)..(347): Homolog of NCBI NO: 15228189 NR Description: putative APG protein
  misc_feature (9)..(348): Homolog of NCBI NO: 13174242 NR Description: putative proline-rich protein [Oryza sativa]
  misc_feature (23)..(348): Homolog of NCBI NO: 15237137 NR Description: GDSL-motif lipase/hydrolase-like protein; protein
  misc_feature (31)..(348): Homolog of NCBI NO: 15237528 NR Description: putative protein; protein id: At5g03810.1
  misc_feature (1)..(348): Homolog of NCBI NO: 15237531 NR Description: putative protein; protein id: At5g03820.1
  misc_feature (1)..(348): Homolog of NCBI NO: 9758010 NR Description: proline-rich protein APG-like [Arabidopsis
  misc_feature (318)..(348): Homolog of NCBI NO: 11280580 NR Description: hypothetical protein T4D2.30 - Arabidopsis
  misc_feature (1)..(286): Homolog of NCBI NO: 11280580 NR Description: hypothetical protein T4D2.30 - Arabidopsis
  misc_feature (1)..(348): Homolog of NCBI NO: 30693763 NR Description: GDSL-motif lipase/hydrolase protein [Arabidopsis
MRVSGFRVLLLVSCFFCKSKGAVVPALIMFGDSIVDVGNNNNLLSIVKSNFLPYGRDFINQRPTGRFCNGKLAVDFSAEYLGFSSYPPAFLSREASNKNILIGANFASASSGYYDATSVPFGSISLTRQLSYYRAYQNRVTRMIGRGNARILFSRGIHILSAGSSDFLQNYYINPLLNILNTPDQFADILLRSFSEFIQNLYELGARRIGVISLPPMGCLPAAITLFGAGNKSCVERLNNDAIMFNTKLENTTRLLMNRHSGLRLVAFNVYQPFLDIITNPTDNGFFETKRACCGTGTIETSFLCNSLSFGTCVNATGYVFWDGFHPTEAVNELLAGQLLGQGISLIN

SEQ ID NO: 42446 - protein, 320 aa, Arabidopsis thaliana
  peptide (1)..(320): Ceres Seq. ID no. 12348686
  misc_feature (1)..(258): Pfam Name: GDSL-like Lipase/Acylhydrolase Pfam Description: GDSL-like Lipase/Acylhydrolase
  misc_feature (2)..(319): Homolog of NCBI NO: 2062167 NR Description: Proline-rich protein APG isolog [Arabidopsis
  misc_feature (1)..(319): Homolog of NCBI NO: 15228189 NR Description: putative APG protein
  misc_feature (1)..(320): Homolog of NCBI NO: 13174242 NR Description: putative proline-rich protein [Oryza sativa]
  misc_feature (1)..(320): Homolog of NCBI NO: 15237137 NR Description: GDSL-motif lipase/hydrolase-like protein; protein
  misc_feature (3)..(320): Homolog of NCBI NO: 15237528 NR Description: putative protein; protein id: At5g03810.1
  misc_feature (1)..(320): Homolog of NCBI NO: 15237531 NR Description: putative protein; protein id: At5g03820.1
  misc_feature (1)..(320): Homolog of NCBI NO: 9758010 NR Description: proline-rich protein APG-like [Arabidopsis
  misc_feature (290)..(320): Homolog of NCBI NO: 11280580 NR Description: hypothetical protein T4D2.30 - Arabidopsis
  misc_feature (1)..(258): Homolog of NCBI NO: 11280580 NR Description: hypothetical protein T4D2.30 - Arabidopsis
  misc_feature (1)..(320): Homolog of NCBI NO: 30693763 NR Description: GDSL-motif lipase/hydrolase protein [Arabidopsis
MFGDSIVDVGNNNNLLSIVKSNFLPYGRDFINQRPTGRFCNGKLAVDFSAEYLGFSSYPPAFLSREASNKNILIGANFASASSGYYDATSVPFGSISLTRQLSYYRAYQNRVTRMIGRGNARILFSRGIHILSAGSSDFLQNYYINPLLNILNTPDQFADILLRSFSEFIQNLYELGARRIGVISLPPMGCLPAAITLFGAGNKSCVERLNNDAIMFNTKLENTTRLLMNRHSGLRLVAFNVYQPFLDIITNPTDNGFFETKRACCGTGTIETSFLCNSLSFGTCVNATGYVFWDGFHPTEAVNELLAGQLLGQGISLIN

SEQ ID NO: 42447 - DNA, 1219 bp, Arabidopsis thaliana; identical to SEQ ID NO: 34888
  misc_feature (1)..(1219): Ceres Seq. ID no. 12603201
  misc_feature: MA Experiment ID: 108461 Result: Up-regulated in Transcription
  misc_feature: MA Experiment 108461 PARAMETER Experiment Name: At_Germinating_Seeds_cDNA_P Parameter: Age (day) Value: 1 vs. 0
  misc_feature: MA Experiment 108461 PARAMETER Experiment Name: At_Germinating_Seeds_cDNA_P Parameter: Tissue Value: Germinating Seeds
  misc_feature: MA Experiment ID: 108462 Result: Up-regulated in Transcription
  misc_feature: MA Experiment 108462 PARAMETER Experiment Name: At_Germinating_Seeds_cDNA_P Parameter: Age (day) Value: 2 vs. 0
  misc_feature: MA Experiment 108462 PARAMETER Experiment Name: At_Germinating_Seeds_cDNA_P Parameter: Tissue Value: Germinating Seeds
  misc_feature: MA Experiment ID: 108569 Result: Up-regulated in Transcription
  misc_feature: MA Experiment 108569 PARAMETER Experiment Name: At_0.001%_MeJA__cDNA_P Parameter: Timepoint (hr) Value: 6
  misc_feature: MA Experiment 108569 PARAMETER Experiment Name: At_0.001%_MeJA__cDNA_P Parameter: Tissue Value: Aerial
  misc_feature: MA Experiment 108569 PARAMETER Experiment Name: At_0.001%_MeJA__cDNA_P Parameter: Treatment Value: 0.001% MeJA vs. No Treatment
  misc_feature: MA Experiment ID: 108573 Result: Up-regulated in Transcription
  misc_feature: MA Experiment 108573 PARAMETER Experiment Name: At_Drought_cDNA_P Parameter: Timepoint (hr) Value: 6
  misc_feature: MA Experiment 108573 PARAMETER Experiment Name: At_Drought_cDNA_P Parameter: Tissue Value: Aerial
  misc_feature: MA Experiment 108573 PARAMETER Experiment Name: At_Drought_cDNA_P Parameter: Treatment Value: Drought vs. No Drought
  misc_feature: MA Experiment ID: 108585 Result: Up-regulated in Transcription
  misc_feature: MA Experiment 108585 PARAMETER Experiment Name: At_5mM_NaNP_cDNA_P Parameter: Timepoint (hr) Value: 6
  misc_feature: MA Experiment 108585 PARAMETER Experiment Name: At_5mM_NaNP_cDNA_P Parameter: Tissue Value: Aerial
  misc_feature: MA Experiment 108585 PARAMETER Experiment Name: At_5mM_NaNP_cDNA_P Parameter: Treatment Value: null
  misc_feature: MA Experiment ID: 108594 Result: Down-regulated in Transcription
  misc_feature: MA Experiment 108594 PARAMETER Experiment Name: At_Ler-rhl_Root_cDNA_P Parameter: Plant Line Value: null
  misc_feature: MA Experiment ID: 20000173 Result: Down-regulated in Transcription
  misc_feature: MA Experiment 20000173 PARAMETER Experiment Name: At_42deg_Heat_P Parameter: Age (day) Value: 14
  misc_feature: MA Experiment 20000173 PARAMETER Experiment Name: At_42deg_Heat_P Parameter: Organism Value: A. thaliana
  misc_feature: MA Experiment 20000173 PARAMETER Experiment Name: At_42deg_Heat_P Parameter: Plant Line Value: WS
  misc_feature: MA Experiment 20000173 PARAMETER Experiment Name: At_42deg_Heat_P Parameter: Temperature (deg C) Value: 42 vs. 22
  misc_feature: MA Experiment 20000173 PARAMETER Experiment Name: At_42deg_Heat_P Parameter: Timepoint (hr) Value: 6
  misc_feature: MA Experiment 20000173 PARAMETER Experiment Name: At_42deg_Heat_P Parameter: Tissue Value: Aerial
  misc_feature: MA Experiment ID: 20000495 Result: Down-regulated in Transcription
  misc_feature: MA Experiment 20000495 PARAMETER Experiment Name: At_Guard_Cells_P Parameter: Harvest Date Value: 8/2/2002
  misc_feature: MA Experiment 20000495 PARAMETER Experiment Name: At_Guard_Cells_P Parameter: Organism Value: A. thaliana
  misc_feature: MA Experiment 20000495 PARAMETER Experiment Name: At_Guard_Cells_P Parameter: Tissue Value: Guard Cells vs. Leaves
  misc_feature: MA Experiment ID: 20001451 Result: Down-regulated in Transcription
  misc_feature: MA Experiment 20001451 PARAMETER Experiment Name: At_Far-red-induction_P Parameter: Age (day) Value: 7
  misc_feature: MA Experiment 20001451 PARAMETER Experiment Name: At_Far-red-induction_P Parameter: Light Value: Far-red vs. White
  misc_feature: MA Experiment 20001451 PARAMETER Experiment Name: At_Far-red-induction_P Parameter: Organism Value: A. thaliana
  misc_feature: MA Experiment 20001451 PARAMETER Experiment Name: At_Far-red-induction_P Parameter: Plant Line Value: Columbia
  misc_feature: MA Experiment 20001451 PARAMETER Experiment Name: At_Far-red-induction_P Parameter: Timepoint (hr) Value: 24
  misc_feature: MA Experiment 20001451 PARAMETER Experiment Name: At_Far-red-induction_P Parameter: Tissue Value: Whole Plant

SEQ ID NO: 42448 - protein, 324 aa, Arabidopsis thaliana; identical to SEQ ID NO: 34889
  peptide (1)..(324): Ceres Seq. ID no. 12603202
  misc_feature (171)..(239): Pfam Name: RNA recognition motif. (a.k.a. RRM, RBD, or RNP domain) Pfam Description: RNA recognition motif. (a.k.a. RRM, RBD, or RNP
  misc_feature (171)..(239): Pfam Name: RNA recognition motif. (a.k.a. RRM, RBD, or RNP domain) Pfam Description: RNA recognition motif. (a.k.a. RRM, RBD, or RNP
  misc_feature (87)..(296): Homolog of NCBI NO: 34903832 NR Description: ATT4F9_7(AL049523|pid:g4539439) Arabidopsis
  misc_feature (94)..(323): Homolog of NCBI NO: 8671859 NR Description: Contains similarity to RNA-binding protein from thaliana gi|2129727 and contains RNA recognition PF|00076 domain.
  misc_feature (86)..(323): Homolog of NCBI NO: 15220902 NR Description: RNA-binding protein, putative; protein id:
  misc_feature (37)..(323): Homolog of NCBI NO: 15238531 NR Description: RNA-binding protein, putative; protein id:
  misc_feature (154)..(323): Homolog of NCBI NO: 14030687 NR Description: At1g32790 [Arabidopsis thaliana]
  misc_feature (87)..(296): Homolog of NCBI NO: 34903832 NR Description: ATT4F9_7(AL049523|pid:g4539439) Arabidopsis
  misc_feature (86)..(323): Homolog of NCBI NO: 15220902 NR Description: RNA-binding protein, putative; protein id:
  misc_feature (154)..(323): Homolog of NCBI NO: 14030687 NR Description: At1g32790 [Arabidopsis thaliana]
  misc_feature (1)..(323): Homolog of NCBI NO: 15229132 NR Description: RNA-binding protein, putative; protein id:
  misc_feature (1)..(323): Homolog of NCBI NO: 15223304 NR Description: RNA-binding protein, putative
  misc_feature (76)..(323): Homolog of NCBI NO: 15235177 NR Description: RNA-binding protein RBP37
  misc_feature (76)..(323): Homolog of NCBI NO: 1174153 NR Description: RNA-binding protein
  misc_feature (80)..(323): Homolog of NCBI NO: 15231858 NR Description: RNA-binding protein, putative; protein id:
  misc_feature (37)..(323): Homolog of NCBI NO: 15238531 NR Description: RNA-binding protein, putative; protein id:
  misc_feature (94)..(323): Homolog of NCBI NO: 8671859 NR Description: Contains similarity to RNA-binding protein from thaliana gi|2129727 and contains RNA recognition PF|00076 domain.
  misc_feature (80)..(323): Homolog of NCBI NO: 15231858 NR Description: RNA-binding protein, putative; protein id:
  misc_feature (76)..(323): Homolog of NCBI NO: 1174153 NR Description: RNA-binding protein
  misc_feature (76)..(323): Homolog of NCBI NO: 15235177 NR Description: RNA-binding protein RBP37
  misc_feature (1)..(323): Homolog of NCBI NO: 15223304 NR Description: RNA-binding protein, putative
  misc_feature (1)..(323): Homolog of NCBI NO: 15229132 NR Description: RNA-binding protein, putative; protein id:

SEQ ID NO: 42449 - protein, 225 aa, Arabidopsis thaliana; identical to SEQ ID NO: 34890
  peptide (1)..(225): Ceres Seq. ID no. 12603203
  misc_feature (72)..(140): Pfam Name: RNA recognition motif. (a.k.a. RRM, RBD, or RNP domain) Pfam Description: RNA recognition motif. (a.k.a. RRM, RBD, or RNP
  misc_feature (72)..(140): Pfam Name: RNA recognition motif. (a.k.a. RRM, RBD, or RNP domain) Pfam Description: RNA recognition motif. (a.k.a. RRM, RBD, or RNP
  misc_feature (1)..(197): Homolog of NCBI NO: 34903832 NR Description: ATT4F9_7(AL049523|pid:g4539439) Arabidopsis
  misc_feature (1)..(224): Homolog of NCBI NO: 8671859 NR Description: Contains similarity to RNA-binding protein from thaliana gi|2129727 and contains RNA recognition PF|00076 domain.
  misc_feature (1)..(224): Homolog of NCBI NO: 15220902 NR Description: RNA-binding protein, putative; protein id:
  misc_feature (1)..(224): Homolog of NCBI NO: 15238531 NR Description: RNA-binding protein, putative; protein id:
  misc_feature (55)..(224): Homolog of NCBI NO: 14030687 NR Description: At1g32790 [Arabidopsis thaliana]
  misc_feature (1)..(197): Homolog of NCBI NO: 34903832 NR Description: ATT4F9_7(AL049523|pid:g4539439) Arabidopsis
  misc_feature (1)..(224): Homolog of NCBI NO: 15220902 NR Description: RNA-binding protein, putative; protein id:
  misc_feature (55)..(224): Homolog of NCBI NO: 14030687 NR Description: At1g32790 [Arabidopsis thaliana]
  misc_feature (1)..(224): Homolog of NCBI NO: 15229132 NR Description: RNA-binding protein, putative; protein id:
  misc_feature (1)..(224): Homolog of NCBI NO: 15223304 NR Description: RNA-binding protein, putative
  misc_feature (1)..(224): Homolog of NCBI NO: 15235177 NR Description: RNA-binding protein RBP37
  misc_feature (1)..(224): Homolog of NCBI NO: 1174153 NR Description: RNA-binding protein
  misc_feature (1)..(224): Homolog of NCBI NO: 15231858 NR Description: RNA-binding protein, putative; protein id:
  misc_feature (1)..(224): Homolog of NCBI NO: 15238531 NR Description: RNA-binding protein, putative; protein id:
  misc_feature (1)..(224): Homolog of NCBI NO: 8671859 NR Description: Contains similarity to RNA-binding protein from thaliana gi|2129727 and contains RNA recognition PF|00076 domain.
  misc_feature (1)..(224): Homolog of NCBI NO: 15231858 NR Description: RNA-binding protein, putative; protein id:
  misc_feature (1)..(224): Homolog of NCBI NO: 1174153 NR Description: RNA-binding protein
  misc_feature (1)..(224): Homolog of NCBI NO: 15235177 NR Description: RNA-binding protein RBP37
  misc_feature (1)..(224): Homolog of NCBI NO: 15223304 NR Description: RNA-binding protein, putative
  misc_feature (1)..(224): Homolog of NCBI NO: 15229132 NR Description: RNA-binding protein, putative; protein id:

SEQ ID NO: 42450 - protein, 171 aa, Arabidopsis thaliana; identical to SEQ ID NO: 34891
  peptide (1)..(171): Ceres Seq. ID no. 12603204
  misc_feature (18)..(86): Pfam Name: RNA recognition motif. (a.k.a. RRM, RBD, or RNP domain) Pfam Description: RNA recognition motif. (a.k.a. RRM, RBD, or RNP
  misc_feature (18)..(86): Pfam Name: RNA recognition motif. (a.k.a. RRM, RBD, or RNP domain) Pfam Description: RNA recognition motif. (a.k.a. RRM, RBD, or RNP
  misc_feature (1)..(143): Homolog of NCBI NO: 34903832 NR Description: ATT4F9_7(AL049523|pid:g4539439) Arabidopsis
  misc_feature (1)..(170): Homolog of NCBI NO: 8671859 NR Description: Contains similarity to RNA-binding protein from thaliana gi|2129727 and contains RNA recognition PF|00076 domain.
  misc_feature (1)..(170): Homolog of NCBI NO: 15220902 NR Description: RNA-binding protein, putative; protein id:
  misc_feature (1)..(170): Homolog of NCBI NO: 15238531 NR Description: RNA-binding protein, putative; protein id:
  misc_feature (1)..(170): Homolog of NCBI NO: 14030687 NR Description: At1g32790 [Arabidopsis thaliana]
  misc_feature (1)..(143): Homolog of NCBI NO: 34903832 NR Description: ATT4F9_7(AL049523|pid:g4539439) Arabidopsis
  misc_feature (1)..(170): Homolog of NCBI NO: 15220902 NR Description: RNA-binding protein, putative; protein id:
  misc_feature (1)..(170): Homolog of NCBI NO: 14030687 NR Description: At1g32790 [Arabidopsis thaliana]
  misc_feature (1)..(170): Homolog of NCBI NO: 15229132 NR Description: RNA-binding protein, putative; protein id:
  misc_feature (1)..(170): Homolog of NCBI NO: 15223304 NR Description: RNA-binding protein, putative
  misc_feature (1)..(170): Homolog of NCBI NO: 15235177 NR Description: RNA-binding protein RBP37
  misc_feature (1)..(170): Homolog of NCBI NO: 1174153 NR Description: RNA-binding protein
  misc_feature (1)..(170): Homolog of NCBI NO: 15231858 NR Description: RNA-binding protein, putative; protein id:
  misc_feature (1)..(170): Homolog of NCBI NO: 15238531 NR Description: RNA-binding protein, putative; protein id:
  misc_feature (1)..(170): Homolog of NCBI NO: 8671859 NR Description: Contains similarity to RNA-binding protein from thaliana gi|2129727 and contains RNA recognition PF|00076 domain.
  misc_feature (1)..(170): Homolog of NCBI NO: 15231858 NR Description: RNA-binding protein, putative; protein id:
  misc_feature (1)..(170): Homolog of NCBI NO: 1174153 NR Description: RNA-binding protein
  misc_feature (1)..(170): Homolog of NCBI NO: 15235177 NR Description: RNA-binding protein RBP37
  misc_feature (1)..(170): Homolog of NCBI NO: 15223304 NR Description: RNA-binding protein, putative
  misc_feature (1)..(170): Homolog of NCBI NO: 15229132 NR Description: RNA-binding protein, putative; protein id:

SEQ ID NO: 42451 - DNA, 1128 bp, Arabidopsis thaliana
  misc_feature (1)..(1128): Ceres Seq. ID no. 12603152
  misc_feature: MA Experiment ID: 20000166 Result: Up-regulated in Transcription
  misc_feature: MA Experiment 20000166 PARAMETER Experiment Name: At_100uM_ABA_P Parameter: Age (day) Value: 14
  misc_feature: MA Experiment 20000166 PARAMETER Experiment Name: At_100uM_ABA_P Parameter: Organism Value: A. thaliana
  misc_feature: MA Experiment 20000166 PARAMETER Experiment Name: At_100uM_ABA_P Parameter: Plant Line Value: WS
  misc_feature: MA Experiment 20000166 PARAMETER Experiment Name: At_100uM_ABA_P Parameter: Timepoint (hr) Value: 1
  misc_feature: MA Experiment 20000166 PARAMETER Experiment Name: At_100uM_ABA_P Parameter: Tissue Value: Aerial
  misc_feature: MA Experiment 20000166 PARAMETER Experiment Name: At_100uM_ABA_P Parameter: Treatment Value: 100uM ABA vs. No Treatment
  misc_feature: MA Experiment ID: 20000169 Result: Up-regulated in Transcription
  misc_feature: MA Experiment 20000169 PARAMETER Experiment Name: At_100uM_ABA_P Parameter: Age (day) Value: 14
  misc_feature: MA Experiment 20000169 PARAMETER Experiment Name: At_100uM_ABA_P Parameter: Organism Value: A. thaliana
  misc_feature: MA Experiment 20000169 PARAMETER Experiment Name: At_100uM_ABA_P Parameter: Plant Line Value: WS
  misc_feature: MA Experiment 20000169 PARAMETER Experiment Name: At_100uM_ABA_P Parameter: Timepoint (hr) Value: 6
  misc_feature: MA Experiment 20000169 PARAMETER Experiment Name: At_100uM_ABA_P Parameter: Tissue Value: Aerial
  misc_feature: MA Experiment 20000169 PARAMETER Experiment Name: At_100uM_ABA_P Parameter: Treatment Value: 100uM ABA vs. No Treatment
  misc_feature: MA Experiment ID: 20000180 Result: Up-regulated in Transcription
  misc_feature: MA Experiment 20000180 PARAMETER Experiment Name: At_Germinating_Seeds_P Parameter: Age (hr) Value: 24 vs. 0
  misc_feature: MA Experiment 20000180 PARAMETER Experiment Name: At_Germinating_Seeds_P Parameter: Tissue Value: Germinating Seeds
  misc_feature: MA Experiment ID: 20000182 Result: Up-regulated in Transcription
  misc_feature: MA Experiment 20000182 PARAMETER Experiment Name: At_2mM_SA_P Parameter: Age (day) Value: 14
  misc_feature: MA Experiment 20000182 PARAMETER Experiment Name: At_2mM_SA_P Parameter: Organism Value: A. thaliana
  misc_feature: MA Experiment 20000182 PARAMETER Experiment Name: At_2mM_SA_P Parameter: Plant Line Value: WS
  misc_feature: MA Experiment 20000182 PARAMETER Experiment Name: At_2mM_SA_P Parameter: Timepoint (hr) Value: 6
  misc_feature: MA Experiment 20000182 PARAMETER Experiment Name: At_2mM_SA_P Parameter: Tissue Value: Aerial
  misc_feature: MA Experiment 20000182 PARAMETER Experiment Name: At_2mM_SA_P Parameter: Treatment Value: 2mM SA vs. No Treatment
  misc_feature: MA Experiment ID: 20000184 Result: Down-regulated in Transcription
  misc_feature: MA Experiment 20000184 PARAMETER Experiment Name: At_Shoots__P Parameter: Age (day) Value: 7
  misc_feature: MA Experiment 20000184 PARAMETER Experiment Name: At_Shoots__P Parameter: Tissue Value: Shoots vs. Whole Plant
  misc_feature: MA Experiment ID: 20000234 Result: Down-regulated in Transcription
  misc_feature: MA Experiment 20000234 PARAMETER Experiment Name: At_Siliques_P Parameter: Age (day) Value: 21
  misc_feature: MA Experiment 20000234 PARAMETER Experiment Name: At_Siliques_P Parameter: Organism Value: A. thaliana
  misc_feature: MA Experiment 20000234 PARAMETER Experiment Name: At_Siliques_P Parameter: Plant Line Value: WS
  misc_feature: MA Experiment 20000234 PARAMETER Experiment Name: At_Siliques_P Parameter: Tissue Value: Less Than 5mm Siliques vs. Whole Plant
  misc_feature: MA Experiment ID: 20000264 Result: Down-regulated in Transcription
  misc_feature: MA Experiment 20000264 PARAMETER Experiment Name: At_Open_Flower_P Parameter: Age (day) Value: 21
  misc_feature: MA Experiment 20000264 PARAMETER Experiment Name: At_Open_Flower_P Parameter: Plant Line Value: WS
  misc_feature: MA Experiment 20000264 PARAMETER Experiment Name: At_Open_Flower_P Parameter: Tissue Value: Open Flower vs. Whole Plant
  misc_feature: MA Experiment ID: 20000437 Result: Up-regulated in Transcription
  misc_feature: MA Experiment 20000437 PARAMETER Experiment Name: At_Drought_P Parameter: Age (day) Value: 8
  misc_feature: MA Experiment 20000437 PARAMETER Experiment Name: At_Drought_P Parameter: Organism Value: A. thaliana
  misc_feature: MA Experiment 20000437 PARAMETER Experiment Name: At_Drought_P Parameter: Plant Line Value: WS
  misc_feature: MA Experiment 20000437 PARAMETER Experiment Name: At_Drought_P Parameter: Timepoint (hr) Value: 24
  misc_feature: MA Experiment 20000437 PARAMETER Experiment Name: At_Drought_P Parameter: Tissue Value: Whole Plant
  misc_feature: MA Experiment 20000437 PARAMETER Experiment Name: At_Drought_P Parameter: Treatment Value: Drought vs. No Drought
  misc_feature: MA Experiment ID: 20000438 Result: Down-regulated in Transcription
  misc_feature: MA Experiment 20000438 PARAMETER Experiment Name: At_Shoots__P Parameter: Age (day) Value: 14
  misc_feature: MA Experiment 20000438 PARAMETER Experiment Name: At_Shoots__P Parameter: Tissue Value: Shoots vs. Whole Plant
  misc_feature: MA Experiment ID: 20000794 Result: Down-regulated in Transcription
  misc_feature: MA Experiment 20000794 PARAMETER Experiment Name: At_Petals_P Parameter: Age (day) Value: 23-25 days
  misc_feature: MA Experiment 20000794 PARAMETER Experiment Name: At_Petals_P Parameter: Plant Line Value: WS
  misc_feature: MA Experiment 20000794 PARAMETER Experiment Name: At_Petals_P Parameter: Tissue Value: Petals vs. Whole plant
  misc_feature: MA Experiment ID: 20001248 Result: Up-regulated in Transcription
  misc_feature: MA Experiment 20001248 PARAMETER Experiment Name: At_Far-red-induction_P Parameter: Age (day) Value: 7
  misc_feature: MA Experiment 20001248 PARAMETER Experiment Name: At_Far-red-induction_P Parameter: Light Value: Far-red vs. White
  misc_feature: MA Experiment 20001248 PARAMETER Experiment Name: At_Far-red-induction_P Parameter: Organism Value: A. thaliana
  misc_feature: MA Experiment 20001248 PARAMETER Experiment Name: At_Far-red-induction_P Parameter: Plant Line Value: Columbia
  misc_feature: MA Experiment 20001248 PARAMETER Experiment Name: At_Far-red-induction_P Parameter: Timepoint (hr) Value: 4
  misc_feature: MA Experiment 20001248 PARAMETER Experiment Name: At_Far-red-induction_P Parameter: Tissue Value: Whole Plant
  misc_feature: MA Experiment ID: 20001450 Result: Up-regulated in Transcription
  misc_feature: MA Experiment 20001450 PARAMETER Experiment Name: At_Far-red-induction_P Parameter: Age (day) Value: 7
  misc_feature: MA Experiment 20001450 PARAMETER Experiment Name: At_Far-red-induction_P Parameter: Light Value: Far-red vs. White
  misc_feature: MA Experiment 20001450 PARAMETER Experiment Name: At_Far-red-induction_P Parameter: Organism Value: A. thaliana
  misc_feature: MA Experiment 20001450 PARAMETER Experiment Name: At_Far-red-induction_P Parameter: Plant Line Value: Columbia
  misc_feature: MA Experiment 20001450 PARAMETER Experiment Name: At_Far-red-induction_P Parameter: Timepoint (hr) Value: 8
  misc_feature: MA Experiment 20001450 PARAMETER Experiment Name: At_Far-red-induction_P Parameter: Tissue Value: Whole Plant
  misc_feature: MA Experiment ID: 20001451 Result: Up-regulated in Transcription
  misc_feature: MA Experiment 20001451 PARAMETER Experiment Name: At_Far-red-induction_P Parameter: Age (day) Value: 7
  misc_feature: MA Experiment 20001451 PARAMETER Experiment Name: At_Far-red-induction_P Parameter: Light Value: Far-red vs. White
  misc_feature: MA Experiment 20001451 PARAMETER Experiment Name: At_Far-red-induction_P Parameter: Organism Value: A. thaliana
  misc_feature: MA Experiment 20001451 PARAMETER Experiment Name: At_Far-red-induction_P Parameter: Plant Line Value: Columbia
  misc_feature: MA Experiment 20001451 PARAMETER Experiment Name: At_Far-red-induction_P Parameter: Timepoint (hr) Value: 24
  misc_feature: MA Experiment 20001451 PARAMETER Experiment Name: At_Far-red-induction_P Parameter: Tissue Value: Whole Plant
  misc_feature: MA Experiment ID: 20001557 Result: Down-regulated in Transcription
  misc_feature: MA Experiment 20001557 PARAMETER Experiment Name: At_Drought_Soil_Dry_P Parameter: Age (day) Value: 27
  misc_feature: MA Experiment 20001557 PARAMETER Experiment Name: At_Drought_Soil_Dry_P Parameter: Organism Value: A. thaliana
  misc_feature: MA Experiment 20001557 PARAMETER Experiment Name: At_Drought_Soil_Dry_P Parameter: Plant Line Value: WS
  misc_feature: MA Experiment 20001557 PARAMETER Experiment Name: At_Drought_Soil_Dry_P Parameter: Post Timepoint (hr) Value: 3
  misc_feature: MA Experiment 20001557 PARAMETER Experiment Name: At_Drought_Soil_Dry_P Parameter: Post-Treatment Value: Re-Water vs. No Drought
  misc_feature: MA Experiment 20001557 PARAMETER Experiment Name: At_Drought_Soil_Dry_P Parameter: Timepoint (day) Value: 13
  misc_feature: MA Experiment 20001557 PARAMETER Experiment Name: At_Drought_Soil_Dry_P Parameter: Treatment Value: Drought vs. No Drought
  misc_feature: MA Experiment ID: 20001558 Result: Down-regulated in Transcription
  misc_feature: MA Experiment 20001558 PARAMETER Experiment Name: At_Drought_Soil_Dry_P Parameter: Age (day) Value: 27
  misc_feature: MA Experiment 20001558 PARAMETER Experiment Name: At_Drought_Soil_Dry_P Parameter: Organism Value: A. thaliana
  misc_feature: MA Experiment 20001558 PARAMETER Experiment Name: At_Drought_Soil_Dry_P Parameter: Plant Line Value: WS
  misc_feature: MA Experiment 20001558 PARAMETER Experiment Name: At_Drought_Soil_Dry_P Parameter: Post Timepoint (hr) Value: 6
  misc_feature: MA Experiment 20001558 PARAMETER Experiment Name: At_Drought_Soil_Dry_P Parameter: Post-Treatment Value: Re-Water vs. No Drought
  misc_feature: MA Experiment 20001558 PARAMETER Experiment Name: At_Drought_Soil_Dry_P Parameter: Timepoint (day) Value: 13
  misc_feature: MA Experiment 20001558 PARAMETER Experiment Name: At_Drought_Soil_Dry_P Parameter: Treatment Value: Drought vs. No Drought
ctctctctcacaactatcaccaacaagaatcatgacgagctctgttagagagaagaagatcaagaccaacgggatttggttaaacgttgctgagaaaggagacgaagaagggcctttggttctgttactccatggtttccctgagacatggtactcttggcgtcaccagatcgatttcttgtctagccatggttaccacgtggtcgctccagatctcagaggctacggtgactccgattctctaccgagccacgagtcttacactgtgagtcacctagtcgctgatgtcatcggtttactcgatcactacggcactactcaggcttttgtggctgggcatgactggggagcaatcataggttggtgtctatgcttgtttagaccagaccgagtcaaaggtttcataagtctctctgttccatatttcccaagagatccaaaactcaaaccttcagattttttcaaaatttttggagatggtttatacatcactcagtttcagaaacccggaagagctgaggctgcatttgccaagcatgattgtttatcggtaatgaagaagttcttgctaataacaagaacagactacttagtggctcctcctgacacagagatcatagatcatcttgagataccgtcgacgattccagattggataacagaagaagagattcaagtgtatgcggaaaagtttcaaagatctggattcactggccctttgaattactacagatccatggatatgaattgggagatattggcgccgtggcaagactccaaaatcgtcgttcctactaagtttatagcgggagacaaagatatcggatatgaaggacctaatggaacaatggagtatgtgaaaggagaggtgttcaagattgttgtgcctaatcttgagatagttgttattgaaggtggtcatcattttatccagcaggagaagtctgaacaagtctctcaagagattctctctttcttaaacaagttaagcaaaacagagtaaaatcataccgttctctgtggccttatagaagaaccatgatgctctagtcttaattaaactactaataatgtgtattcaagaacgaaacccgagtgtgatctcggcaataataatggttcttaaag

SEQ ID NO: 42452 - protein, 333 aa, Arabidopsis thaliana
  peptide (1)..(333): Ceres Seq. ID no. 12603153
  misc_feature (65)..(184): Pfam Name: alpha/beta hydrolase fold Pfam Description: alpha/beta hydrolase fold
  misc_feature (13)..(328): Homolog of NCBI NO: 34902880 NR Description: unnamed protein product [Oryza sativa (japonica
  misc_feature (11)..(333): Homolog of NCBI NO: 15230367 NR Description: epoxide hydrolase-like protein
SLSQLSPTRIMTSSVREKKIKTNGIWLNVAEKGDEEGPLVLLLHGFPETWYSWRHQIDFLSSHGYHVVAPDLRGYGDSDSLPSHESYTVSHLVADVIGLLDHYGTTQAFVAGHDWGAIIGWCLCLFRPDRVKGFISLSVPYFPRDPKLKPSDFFKIFGDGLYITQFQKPGRAEAAFAKHDCLSVMKKFLLITRTDYLVAPPDTEIIDHLEIPSTIPDWITEEEIQVYAEKFQRSGFTGPLNYYRSMDMNWEILAPWQDSKIVVPTKFIAGDKDIGYEGPNGTMEYVKGEVFKIVVPNLEIVVIEGGHHFIQQEKSEQVSQEILSFLNKLSKTE

SEQ ID NO: 42453 - protein, 323 aa, Arabidopsis thaliana
  peptide (1)..(323): Ceres Seq. ID no. 12603154
  misc_feature (55)..(174): Pfam Name: alpha/beta hydrolase fold Pfam Description: alpha/beta hydrolase fold
  misc_feature (3)..(318): Homolog of NCBI NO: 34902880 NR Description: unnamed protein product [Oryza sativa (japonica
  misc_feature (1)..(323): Homolog of NCBI NO: 15230367 NR Description: epoxide hydrolase-like protein
MTSSVREKKIKTNGIWLNVAEKGDEEGPLVLLLHGFPETWYSWRHQIDFLSSHGYHVVAPDLRGYGDSDSLPSHESYTVSHLVADVIGLLDHYGTTQAFVAGHDWGAIIGWCLCLFRPDRVKGFISLSVPYFPRDPKLKPSDFFKIFGDGLYITQFQKPGRAEAAFAKHDCLSVMKKFLLITRTDYLVAPPDTEIIDHLEIPSTIPDWITEEEIQVYAEKFQRSGFTGPLNYYRSMDMNWEILAPWQDSKIVVPTKFIAGDKDIGYEGPNGTMEYVKGEVFKIVVPNLEIVVIEGGHHFIQQEKSEQVSQEILSFLNKLSKTE

SEQ ID NO: 42454 - DNA, 1505 bp, Arabidopsis thaliana
  misc_feature (1)..(1505): Ceres Seq. ID no. 13580591
  misc_feature: MA Experiment ID: 20000180 Result: Up-regulated in Transcription
  misc_feature: MA Experiment 20000180 PARAMETER Experiment Name: At_Germinating_Seeds_P Parameter: Age (hr) Value: 24 vs. 0
  misc_feature: MA Experiment 20000180 PARAMETER Experiment Name: At_Germinating_Seeds_P Parameter: Tissue Value: Germinating Seeds
  misc_feature: MA Experiment ID: 20000184 Result: Up-regulated in Transcription
  misc_feature: MA Experiment 20000184 PARAMETER Experiment Name: At_Shoots__P Parameter: Age (day) Value: 7
  misc_feature: MA Experiment 20000184 PARAMETER Experiment Name: At_Shoots__P Parameter: Tissue Value: Shoots vs. Whole Plant
  misc_feature: MA Experiment ID: 20000234 Result: Up-regulated in Transcription
  misc_feature: MA Experiment 20000234 PARAMETER Experiment Name: At_Siliques_P Parameter: Age (day) Value: 21
  misc_feature: MA Experiment 20000234 PARAMETER Experiment Name: At_Siliques_P Parameter: Organism Value: A. thaliana
  misc_feature: MA Experiment 20000234 PARAMETER Experiment Name: At_Siliques_P Parameter: Plant Line Value: WS
  misc_feature: MA Experiment 20000234 PARAMETER Experiment Name: At_Siliques_P Parameter: Tissue Value: Less Than 5mm Siliques vs. Whole Plant
  misc_feature: MA Experiment ID: 20000235 Result: Up-regulated in Transcription
  misc_feature: MA Experiment 20000235 PARAMETER Experiment Name: At_Siliques_P Parameter: Age (day) Value: 21
  misc_feature: MA Experiment 20000235 PARAMETER Experiment Name: At_Siliques_P Parameter: Organism Value: A. thaliana
  misc_feature: MA Experiment 20000235 PARAMETER Experiment Name: At_Siliques_P Parameter: Plant Line Value: WS
  misc_feature: MA Experiment 20000235 PARAMETER Experiment Name: At_Siliques_P Parameter: Tissue Value: 5-10mm Siliques vs. Whole Plant
  misc_feature: MA Experiment ID: 20000264 Result: Up-regulated in Transcription
  misc_feature: MA Experiment 20000264 PARAMETER Experiment Name: At_Open_Flower_P Parameter: Age (day) Value: 21
  misc_feature: MA Experiment 20000264 PARAMETER Experiment Name: At_Open_Flower_P Parameter: Plant Line Value: WS
  misc_feature: MA Experiment 20000264 PARAMETER Experiment Name: At_Open_Flower_P Parameter: Tissue Value: Open Flower vs. Whole Plant
  misc_feature: MA Experiment ID: 20000265 Result: Up-regulated in Transcription
  misc_feature: MA Experiment 20000265 PARAMETER Experiment Name: At_Open_Flower_P Parameter: Age (day) Value: 21
  misc_feature: MA Experiment 20000265 PARAMETER Experiment Name: At_Open_Flower_P Parameter: Plant Line Value: WS
  misc_feature: MA Experiment 20000265 PARAMETER Experiment Name: At_Open_Flower_P Parameter: Tissue Value: Closed Flower vs. Whole Plant
  misc_feature: MA Experiment ID: 20000437 Result: Down-regulated in Transcription
  misc_feature: MA Experiment 20000437 PARAMETER Experiment Name: At_Drought_P Parameter: Age (day) Value: 8
  misc_feature: MA Experiment 20000437 PARAMETER Experiment Name: At_Drought_P Parameter: Organism Value: A. thaliana
  misc_feature: MA Experiment 20000437 PARAMETER Experiment Name: At_Drought_P Parameter: Plant Line Value: WS
  misc_feature: MA Experiment 20000437 PARAMETER Experiment Name: At_Drought_P Parameter: Timepoint (hr) Value: 24
  misc_feature: MA Experiment 20000437 PARAMETER Experiment Name: At_Drought_P Parameter: Tissue Value: Whole Plant
  misc_feature: MA Experiment 20000437 PARAMETER Experiment Name: At_Drought_P Parameter: Treatment Value: Drought vs. No Drought
  misc_feature: MA Experiment ID: 20000439 Result: Down-regulated in Transcription
  misc_feature: MA Experiment 20000439 PARAMETER Experiment Name: At_Roots__P Parameter: Age (day) Value: 14 vs. 21
  misc_feature: MA Experiment 20000439 PARAMETER Experiment Name: At_Roots__P Parameter: Organism Value: A. thaliana
  misc_feature: MA Experiment 20000439 PARAMETER Experiment Name: At_Roots__P Parameter: Tissue Value: Roots vs. Whole Plant
  misc_feature: MA Experiment ID: 20001911 Result: Down-regulated in Transcription
  misc_feature: MA Experiment 20001911 PARAMETER Experiment Name: At_Drought_Reproduction_P Parameter: Age (day) Value: 40
  misc_feature: MA Experiment 20001911 PARAMETER Experiment Name: At_Drought_Reproduction_P Parameter: Organism Value: A. thaliana
  misc_feature: MA Experiment 20001911 PARAMETER Experiment Name: At_Drought_Reproduction_P Parameter: Plant Line Value: WS
  misc_feature: MA Experiment 20001911 PARAMETER Experiment Name: At_Drought_Reproduction_P Parameter: Timepoint (day) Value: 10
  misc_feature: MA Experiment 20001911 PARAMETER Experiment Name: At_Drought_Reproduction_P Parameter: Tissue Value: Flowers
  misc_feature: MA Experiment 20001911 PARAMETER Experiment Name: At_Drought_Reproduction_P Parameter: Treatment Value: Drought vs. No Drought
attaatccactgaaacaatcactattcattctctttccttaagtgtcaaactcttgaaaaaactactttgaaggaaaaaatgtctaagaagaagaaaggcagcaacaactttaagcttctctgtttcttcctgtttttgggtggtttggttcagacagatgcttcttttggagtaggaggcggcgttggagtaggaatcggcggcggcggcggtggcggtggcggtggtgtttgggttggcggtggatacaacaacggtggaaatcgtaatgctgttccaggatcatcagctccaaacagggtagcttacaatgctcttcaagtttggaaatcagccatgagagaggatccatcaaatgttctcaaaacatgggttggatcagatgtttgttcttacaaaggtgtgttctgttctggtcaatctataacctctatagatcttaaccatgcaaatctcaaaggcacacttgtcaaagacctagctttactctcagacctcaatattctccatctcaacagtaacagattctcagggcaaatcccagattctttcaaatctttagcttctcttcaagaacttgatctaagcaacaataaactctcaggtcctttccctttagtcacactctacataccaaatctggtttacctcgatctccggtttaatagtttaaccggtttcatccctgaagagcttttcaacaaacggttagacgcgattctcctcaataacaatcaattcgtcggagaaatcccaagaaacctcggaaattctccggcttcggttattaatctcgcgaataacagattttccggcgaaattccgacgagttttggtctgacgggatcgagggttaaggaagttttgcttttgaataaccagttaaccggttgtataccggaatctgttggtatgttctctgaaattgaagtctttgacgttagctacaatgcattgatgggtcatgttccagatacgatctcttgcttgtcggcgattgaaattttgaatcttgctcacaataaattctctggggaggttcctgatttggtttgttcgttgaggaatcttattaatctcactgttgcgttcaatttcttctctgggtttagctctgaatgttcttccagggttagtttcgggtttgatttcgttgggaattgtattcccgggaggaattcgcagcggccgcagccggattgttccggttattccggcggagctatgagctgttttaggattccgacgcagcctttggcttgtgctgcgataagtgttggattgagagagagtaataatcaatactacacttcatctcctccatgaaagtttctaaagttagaagcttttttttattaatggttgatgctgaatgatctatcttttttgtaacttattaattagttgattagtgaccaaattaaacgttaattcctcttctgtgtaatccaatcgttgctaatgttgttttgtaagcagaagaattttgtaaaaatctaacgtt

SEQ ID NO: 42455 - protein, 415 aa, Arabidopsis thaliana
  peptide (1)..(415): Ceres Seq. ID no. 13580592
  misc_feature (306)..(329): Pfam Name: Leucine Rich Repeat Pfam Description: Leucine Rich Repeat
  misc_feature (33)..(396): Homolog of NCBI NO: 34906174 NR Description: putative extensin-like protein
  misc_feature (74)..(385): Homolog of NCBI NO: 15220780 NR Description: leucine-rich repeat extensin family [Arabidopsis
  misc_feature (74)..(385): Homolog of NCBI NO: 7484956 NR Description: extensin homolog F24O1.18 - Arabidopsis thaliana
  misc_feature (74)..(415): Homolog of NCBI NO: 15233976 NR Description: leucine-rich repeat extensin family [Arabidopsis
  misc_feature (74)..(385): Homolog of NCBI NO: 15235668 NR Description: leucine-rich repeat extensin family [Arabidopsis
  misc_feature (76)..(392): Homolog of NCBI NO: 15228861 NR Description: leucine-rich repeat extensin family [Arabidopsis
  misc_feature (74)..(385): Homolog of NCBI NO: 15230120 NR Description: leucine-rich repeat extensin family [Arabidopsis
  misc_feature (41)..(385): Homolog of NCBI NO: 34912294 NR Description: putative extensin-like protein
  misc_feature (1)..(407): Homolog of NCBI NO: 15224840 NR Description: leucine rich repeat protein family [Arabidopsis
  misc_feature (1)..(415): Homolog of NCBI NO: 15233499 NR Description: extensin-related protein [Arabidopsis thaliana]
MSKKKKGSNNFKLLCFFLFLGGLVQTDASFGVGGGVGVGIGGGGGGGGGGVWVGGGYNNGGNRNAVPGSSAPNRVAYNALQVWKSAMREDPSNVLKTWVGSDVCSYKGVFCSGQSITSIDLNHANLKGTLVKDLALLSDLNILHLNSNRFSGQIPDSFKSLASLQELDLSNNKLSGPFPLVTLYIPNLVYLDLRFNSLTGFIPEELFNKRLDAILLNNNQFVGEIPRNLGNSPASVINLANNRFSGEIPTSFGLTGSRVKEVLLLNNQLTGCIPESVGMFSEIEVFDVSYNALMGHVPDTISCLSAIEILNLAHNKFSGEVPDLVCSLRNLINLTVAFNFFSGFSSECSSRVSFGFDFVGNCIPGRNSQRPQPDCSGYSGGAMSCFRIPTQPLACAAISVGLRESNNQYYTSSPP

SEQ ID NO: 42456 - protein, 329 aa, Arabidopsis thaliana
  peptide (1)..(329): Ceres Seq. ID no. 13580593
  misc_feature (220)..(243): Pfam Name: Leucine Rich Repeat Pfam Description: Leucine Rich Repeat
  misc_feature (1)..(310): Homolog of NCBI NO: 34906174 NR Description: putative extensin-like protein
  misc_feature (1)..(299): Homolog of NCBI NO: 15220780 NR Description: leucine-rich repeat extensin family [Arabidopsis
  misc_feature (1)..(299): Homolog of NCBI NO: 7484956 NR Description: extensin homolog F24O1.18 - Arabidopsis thaliana
  misc_feature (1)..(329): Homolog of NCBI NO: 15233976 NR Description: leucine-rich repeat extensin family [Arabidopsis
  misc_feature (1)..(299): Homolog of NCBI NO: 15235668 NR Description: leucine-rich repeat extensin family [Arabidopsis
  misc_feature (1)..(306): Homolog of NCBI NO: 15228861 NR Description: leucine-rich repeat extensin family [Arabidopsis
  misc_feature (1)..(299): Homolog of NCBI NO: 15230120 NR Description: leucine-rich repeat extensin family [Arabidopsis
  misc_feature (1)..(299): Homolog of NCBI NO: 34912294 NR Description: putative extensin-like protein
  misc_feature (1)..(321): Homolog of NCBI NO: 15224840 NR Description: leucine rich repeat protein family [Arabidopsis
  misc_feature (1)..(329): Homolog of NCBI NO: 15233499 NR Description: extensin-related protein [Arabidopsis thaliana]
MREDPSNVLKTWVGSDVCSYKGVFCSGQSITSIDLNHANLKGTLVKDLALLSDLNILHLNSNRFSGQIPDSFKSLASLQELDLSNNKLSGPFPLVTLYIPNLVYLDLRFNSLTGFIPEELFNKRLDAILLNNNQFVGEIPRNLGNSPASVINLANNRFSGEIPTSFGLTGSRVKEVLLLNNQLTGCIPESVGMFSEIEVFDVSYNALMGHVPDTISCLSAIEILNLAHNKFSGEVPDLVCSLRNLINLTVAFNFFSGFSSECSSRVSFGFDFVGNCIPGRNSQRPQPDCSGYSGGAMSCFRIPTQPLACAAISVGLRESNNQYYTSSPP

SEQ ID NO: 42457 - DNA, 1234 bp, Arabidopsis thaliana
  misc_feature (1)..(1234): Ceres Seq. ID no. 12336238
  misc_feature: MA Experiment ID: 108595 Result: Up-regulated in Transcription
  misc_feature: MA Experiment 108595 PARAMETER Experiment Name: At_Ler-pi_Ovule_cDNA_P Parameter: Plant Line Value: null
  misc_feature: MA Experiment ID: 20000169 Result: Up-regulated in Transcription
  misc_feature: MA Experiment 20000169 PARAMETER Experiment Name: At_100uM_ABA_P Parameter: Age (day) Value: 14
  misc_feature: MA Experiment 20000169 PARAMETER Experiment Name: At_100uM_ABA_P Parameter: Organism Value: A. thaliana
  misc_feature: MA Experiment 20000169 PARAMETER Experiment Name: At_100uM_ABA_P Parameter: Plant Line Value: WS
  misc_feature: MA Experiment 20000169 PARAMETER Experiment Name: At_100uM_ABA_P Parameter: Timepoint (hr) Value: 6
  misc_feature: MA Experiment 20000169 PARAMETER Experiment Name: At_100uM_ABA_P Parameter: Tissue Value: Aerial
  misc_feature: MA Experiment 20000169 PARAMETER Experiment Name: At_100uM_ABA_P Parameter: Treatment Value: 100uM ABA vs. No Treatment
  misc_feature: MA Experiment ID: 20000173 Result: Down-regulated in Transcription
  misc_feature: MA Experiment 20000173 PARAMETER Experiment Name: At_42deg_Heat_P Parameter: Age (day) Value: 14
  misc_feature: MA Experiment 20000173 PARAMETER Experiment Name: At_42deg_Heat_P Parameter: Organism Value: A. thaliana
  misc_feature: MA Experiment 20000173 PARAMETER Experiment Name: At_42deg_Heat_P Parameter: Plant Line Value: WS
  misc_feature: MA Experiment 20000173 PARAMETER Experiment Name: At_42deg_Heat_P Parameter: Temperature (deg C) Value: 42 vs. 22
  misc_feature: MA Experiment 20000173 PARAMETER Experiment Name: At_42deg_Heat_P Parameter: Timepoint (hr) Value: 6
  misc_feature: MA Experiment 20000173 PARAMETER Experiment Name: At_42deg_Heat_P Parameter: Tissue Value: Aerial
  misc_feature: MA Experiment ID: 20000179 Result: Up-regulated in Transcription
  misc_feature: MA Experiment 20000179 PARAMETER Experiment Name: At_Germinating_Seeds_P Parameter: Age (hr) Value: 6 vs. 0
  misc_feature: MA Experiment 20000179 PARAMETER Experiment Name: At_Germinating_Seeds_P Parameter: Tissue Value: Germinating Seeds
  misc_feature: MA Experiment ID: 20000180 Result: Up-regulated in Transcription
  misc_feature: MA Experiment 20000180 PARAMETER Experiment Name: At_Germinating_Seeds_P Parameter: Age (hr) Value: 24 vs. 0
  misc_feature: MA Experiment 20000180 PARAMETER Experiment Name: At_Germinating_Seeds_P Parameter: Tissue Value: Germinating Seeds
  misc_feature: MA Experiment ID: 20000182 Result: Up-regulated in Transcription
  misc_feature: MA Experiment 20000182 PARAMETER Experiment Name: At_2mM_SA_P Parameter: Age (day) Value: 14
  misc_feature: MA Experiment 20000182 PARAMETER Experiment Name: At_2mM_SA_P Parameter: Organism Value: A. thaliana
  misc_feature: MA Experiment 20000182 PARAMETER Experiment Name: At_2mM_SA_P Parameter: Plant Line Value: WS
  misc_feature: MA Experiment 20000182 PARAMETER Experiment Name: At_2mM_SA_P Parameter: Timepoint (hr) Value: 6
  misc_feature: MA Experiment 20000182 PARAMETER Experiment Name: At_2mM_SA_P Parameter: Tissue Value: Aerial
  misc_feature: MA Experiment 20000182 PARAMETER Experiment Name: At_2mM_SA_P Parameter: Treatment Value: 2mM SA vs. No Treatment
  misc_feature: MA Experiment ID: 20000184 Result: Down-regulated in Transcription
  misc_feature: MA Experiment 20000184 PARAMETER Experiment Name: At_Shoots__P Parameter: Age (day) Value: 7
  misc_feature: MA Experiment 20000184 PARAMETER Experiment Name: At_Shoots__P Parameter: Tissue Value: Shoots vs. Whole Plant
  misc_feature: MA Experiment ID: 20000185 Result: Up-regulated in Transcription
  misc_feature: MA Experiment 20000185 PARAMETER Experiment Name: At_Roots__P Parameter: Age (day) Value: 7 vs. 21
  misc_feature: MA Experiment 20000185 PARAMETER Experiment Name: At_Roots__P Parameter: Organism Value: A. thaliana
  misc_feature: MA Experiment 20000185 PARAMETER Experiment Name: At_Roots__P Parameter: Tissue Value: Roots vs. Whole Plant
  misc_feature: MA Experiment ID: 20000264 Result: Up-regulated in Transcription
  misc_feature: MA Experiment 20000264 PARAMETER Experiment Name: At_Open_Flower_P Parameter: Age (day) Value: 21
  misc_feature: MA Experiment 20000264 PARAMETER Experiment Name: At_Open_Flower_P Parameter: Plant Line Value: WS
  misc_feature: MA Experiment 20000264 PARAMETER Experiment Name: At_Open_Flower_P Parameter: Tissue Value: Open Flower vs. Whole Plant
  misc_feature: MA Experiment ID: 20000438 Result: Down-regulated in Transcription
  misc_feature: MA Experiment 20000438 PARAMETER Experiment Name: At_Shoots__P Parameter: Age (day) Value: 14
  misc_feature: MA Experiment 20000438 PARAMETER Experiment Name: At_Shoots__P Parameter: Tissue Value: Shoots vs. Whole Plant
  misc_feature: MA Experiment ID: 20000495 Result: Up-regulated in Transcription
  misc_feature: MA Experiment 20000495 PARAMETER Experiment Name: At_Guard_Cells_P Parameter: Harvest Date Value: 8/2/2002
  misc_feature: MA Experiment 20000495 PARAMETER Experiment Name: At_Guard_Cells_P Parameter: Organism Value: A. thaliana
  misc_feature: MA Experiment 20000495 PARAMETER Experiment Name: At_Guard_Cells_P Parameter: Tissue Value: Guard Cells vs. Leaves
  misc_feature: MA Experiment ID: 20000794 Result: Up-regulated in Transcription
  misc_feature: MA Experiment 20000794 PARAMETER Experiment Name: At_Petals_P Parameter: Age (day) Value: 23-25 days
  misc_feature: MA Experiment 20000794 PARAMETER Experiment Name: At_Petals_P Parameter: Plant Line Value: WS
  misc_feature: MA Experiment 20000794 PARAMETER Experiment Name: At_Petals_P Parameter: Tissue Value: Petals vs. Whole plant
  misc_feature: MA Experiment ID: 20001757 Result: Down-regulated in Transcription
  misc_feature: MA Experiment 20001757 PARAMETER Experiment Name: At_50mM_NH4NO3_L-to-H_P Parameter: Timepoint (hr) Value: 6
  misc_feature: MA Experiment 20001757 PARAMETER Experiment Name: At_50mM_NH4NO3_L-to-H_P Parameter: Tissue Value: Leaf
  misc_feature: MA Experiment 20001757 PARAMETER Experiment Name: At_50mM_NH4NO3_L-to-H_P Parameter: Treatment Value: 50mM NH4NO3 vs 100mM Mannitol
  misc_feature: MA Experiment ID: 20001904 Result: Up-regulated in Transcription
  misc_feature: MA Experiment 20001904 PARAMETER Experiment Name: At_Drought_Reproduction_P Parameter: Age (day) Value: 37
  misc_feature: MA Experiment 20001904 PARAMETER Experiment Name: At_Drought_Reproduction_P Parameter: Organism Value: A. thaliana
  misc_feature: MA Experiment 20001904 PARAMETER Experiment Name: At_Drought_Reproduction_P Parameter: Plant Line Value: WS
  misc_feature: MA Experiment 20001904 PARAMETER Experiment Name: At_Drought_Reproduction_P Parameter: Timepoint (day) Value: 7
  misc_feature: MA Experiment 20001904 PARAMETER Experiment Name: At_Drought_Reproduction_P Parameter: Tissue Value: Rosettes
  misc_feature: MA Experiment 20001904 PARAMETER Experiment Name: At_Drought_Reproduction_P Parameter: Treatment Value: Drought vs. No Drought
  misc_feature: MA Experiment ID: 20001905 Result: Up-regulated in Transcription
  misc_feature: MA Experiment 20001905 PARAMETER Experiment Name: At_Drought_Reproduction_P Parameter: Age (day) Value: 40
  misc_feature: MA Experiment 20001905 PARAMETER Experiment Name: At_Drought_Reproduction_P Parameter: Organism Value: A. thaliana
  misc_feature: MA Experiment 20001905 PARAMETER Experiment Name: At_Drought_Reproduction_P Parameter: Plant Line Value: WS
  misc_feature: MA Experiment 20001905 PARAMETER Experiment Name: At_Drought_Reproduction_P Parameter: Timepoint (day) Value: 10
  misc_feature: MA Experiment 20001905 PARAMETER Experiment Name: At_Drought_Reproduction_P Parameter: Tissue Value: Rosettes
  misc_feature: MA Experiment 20001905 PARAMETER Experiment Name: At_Drought_Reproduction_P Parameter: Treatment Value: Drought vs. No Drought
  misc_feature: MA Experiment ID: 20001906 Result: Up-regulated in Transcription
  misc_feature: MA Experiment 20001906 PARAMETER Experiment Name: At_Drought_Reproduction_P Parameter: Age (day) Value: 35
  misc_feature: MA Experiment 20001906 PARAMETER Experiment Name: At_Drought_Reproduction_P Parameter: Organism Value: A. thaliana
  misc_feature: MA Experiment 20001906 PARAMETER Experiment Name: At_Drought_Reproduction_P Parameter: Plant Line Value: WS
  misc_feature: MA Experiment 20001906 PARAMETER Experiment Name: At_Drought_Reproduction_P Parameter: Timepoint (day) Value: 5
  misc_feature: MA Experiment 20001906 PARAMETER Experiment Name: At_Drought_Reproduction_P Parameter: Tissue Value: Siliques
  misc_feature: MA Experiment 20001906 PARAMETER Experiment Name: At_Drought_Reproduction_P Parameter: Treatment Value: Drought vs. No Drought
  misc_feature: MA Experiment ID: 20001908 Result: Up-regulated in Transcription
  misc_feature: MA Experiment 20001908 PARAMETER Experiment Name: At_Drought_Reproduction_P Parameter: Age (day) Value: 40
  misc_feature: MA Experiment 20001908 PARAMETER Experiment Name: At_Drought_Reproduction_P Parameter: Organism Value: A. thaliana
  misc_feature: MA Experiment 20001908 PARAMETER Experiment Name: At_Drought_Reproduction_P Parameter: Plant Line Value: WS
  misc_feature: MA Experiment 20001908 PARAMETER Experiment Name: At_Drought_Reproduction_P Parameter: Timepoint (day) Value: 10
  misc_feature: MA Experiment 20001908 PARAMETER Experiment Name: At_Drought_Reproduction_P Parameter: Tissue Value: Siliques
  misc_feature: MA Experiment 20001908 PARAMETER Experiment Name: At_Drought_Reproduction_P Parameter: Treatment Value: Drought vs. No Drought
  misc_feature: MA Experiment ID: 20001911 Result: Up-regulated in Transcription
  misc_feature: MA Experiment 20001911 PARAMETER Experiment Name: At_Drought_Reproduction_P Parameter: Age (day) Value: 40
  misc_feature: MA Experiment 20001911 PARAMETER Experiment Name: At_Drought_Reproduction_P Parameter: Organism Value: A. thaliana
  misc_feature: MA Experiment 20001911 PARAMETER Experiment Name: At_Drought_Reproduction_P Parameter: Plant Line Value: WS
  misc_feature: MA Experiment 20001911 PARAMETER Experiment Name: At_Drought_Reproduction_P Parameter: Timepoint (day) Value: 10
  misc_feature: MA Experiment 20001911 PARAMETER Experiment Name: At_Drought_Reproduction_P Parameter: Tissue Value: Flowers
  misc_feature: MA Experiment 20001911 PARAMETER Experiment Name: At_Drought_Reproduction_P Parameter: Treatment Value: Drought vs. No Drought
aaatttcgtaacaaaagaaaaaacagaacacagaatcttgttctcccaccgatcaccaccggagatatggaatcgccgattactcaaccccaaatgtttagattgcagtttcttcgtcttcttcatagtcgacgatcaccccaagttccattaatagccgattcttcaaatcctatcgagaatcctctctttcaagctgatgttccttctaccacagcaatagagtcttgtccaaaagaaaacattggtaagttaaaagatatgcttaaagaagaaaacattcatttgcacactgagagcaagggaaattacctttgcttattttaagcttgaaagagagaagtgaagaaaaaaggccagcgattgtgtttatgcatggcacaaacacaaacaaagaatggttaaggccatggcttgaagcatatgcttcgcggggatatgtagccatcggtttagactctcgttaccacggtgaacgtgctgattgcaaaactgcatatcgagatgctcttatatcatcttggagaaatggaaacactatgccttttatctttgatactgtatgggatttgatcaaactagctgaatatcttactcagagggatgatatagacccgaaaaagataggaatcaccggtatttcgctaggagggatgcatgcttggtttgctgctgcagctgacactcgctattccgtggttgtcccattaatcggtgttcagggttttagatgggcaatagagaatgatgagtgggaagcaagagtcaacagtatcaaacctttatttgaagaagcaaggattgatctcggaaagaacataatcgacaaagaactagtcgagaaggtgtggaacagaatagctcctggcctagcttcgaagtttgattcaccgtactcattaccagtgattgctccacggcctctttacatccttaacggcgcaaatgatcctcgatgtcctcttggcggactagaacttgcgttaaagagagctgaaaaggcgtataaggaaacagcttctcctggaaacttcaagttcaaagcagaagatggagttggacacgaagcgacgagtttcatgatcaaagaatcatcagactggtttgacaaattccttaaacaagaagatatgacaacttgacagattgtaatattgtgaactaataaagaagaatcatcttcttctcgttaataatgtattcactctcgcaaatcaatatcattacaaatttc

SEQ ID NO: 42458 - protein, 256 aa, Arabidopsis thaliana; identical to SEQ ID NO: 24153
  peptide (1)..(256): Ceres Seq. ID no. 12336239
  misc_feature (1)..(20): Homolog of NCBI NO: 34898368 NR Description: ESTs C19441(E10423),C99201(E10423) correspond to
  misc_feature (39)..(249): Homolog of NCBI NO: 34898368 NR Description: ESTs C19441(E10423),C99201(E10423) correspond to
  misc_feature (1)..(256): Homolog of NCBI NO: 30689997 NR Description: expressed protein [Arabidopsis thaliana]

SEQ ID NO: 42459 - protein, 200 aa, Arabidopsis thaliana; identical to SEQ ID NO: 36760
  peptide (1)..(200): Ceres Seq. ID no. 12336240
  misc_feature (1)..(193): Homolog of NCBI NO: 34898368 NR Description: ESTs C19441(E10423),C99201(E10423) correspond to
  misc_feature (1)..(200): Homolog of NCBI NO: 30689997 NR Description: expressed protein [Arabidopsis thaliana]

SEQ ID NO: 42460 - protein, 162 aa, Arabidopsis thaliana; identical to SEQ ID NO: 36761
  peptide (1)..(162): Ceres Seq. ID no. 12336241
  misc_feature (1)..(155): Homolog of NCBI NO: 34898368 NR Description: ESTs C19441(E10423),C99201(E10423) correspond to
  misc_feature (1)..(162): Homolog of NCBI NO: 30689997 NR Description: expressed protein [Arabidopsis thaliana]

SEQ ID NO: 42461 - DNA, 833 bp, Arabidopsis thaliana
  misc_feature (1)..(833): Ceres Seq. ID no. 12395705
  misc_feature: MA Experiment ID: 108576 Result: Up-regulated in Transcription
  misc_feature: MA Experiment 108576 PARAMETER Experiment Name: At_42deg_Heat_cDNA_P Parameter: Temperature (deg C) Value: 42 vs. 22
  misc_feature: MA Experiment 108576 PARAMETER Experiment Name: At_42deg_Heat_cDNA_P Parameter: Timepoint (hr) Value: 1
  misc_feature: MA Experiment 108576 PARAMETER Experiment Name: At_42deg_Heat_cDNA_P Parameter: Tissue Value: Aerial
  misc_feature: MA Experiment ID: 20000166 Result: Up-regulated in Transcription
  misc_feature: MA Experiment 20000166 PARAMETER Experiment Name: At_100uM_ABA_P Parameter: Age (day) Value: 14
  misc_feature: MA Experiment 20000166 PARAMETER Experiment Name: At_100uM_ABA_P Parameter: Organism Value: A. thaliana
  misc_feature: MA Experiment 20000166 PARAMETER Experiment Name: At_100uM_ABA_P Parameter: Plant Line Value: WS
  misc_feature: MA Experiment 20000166 PARAMETER Experiment Name: At_100uM_ABA_P Parameter: Timepoint (hr) Value: 1
  misc_feature: MA Experiment 20000166 PARAMETER Experiment Name: At_100uM_ABA_P Parameter: Tissue Value: Aerial
  misc_feature: MA Experiment 20000166 PARAMETER Experiment Name: At_100uM_ABA_P Parameter: Treatment Value: 100uM ABA vs. No Treatment
  misc_feature: MA Experiment ID: 20000169 Result: Up-regulated in Transcription
  misc_feature: MA Experiment 20000169 PARAMETER Experiment Name: At_100uM_ABA_P Parameter: Age (day) Value: 14
  misc_feature: MA Experiment 20000169 PARAMETER Experiment Name: At_100uM_ABA_P Parameter: Organism Value: A. thaliana
  misc_feature: MA Experiment 20000169 PARAMETER Experiment Name: At_100uM_ABA_P Parameter: Plant Line Value: WS
  misc_feature: MA Experiment 20000169 PARAMETER Experiment Name: At_100uM_ABA_P Parameter: Timepoint (hr) Value: 6
  misc_feature: MA Experiment 20000169 PARAMETER Experiment Name: At_100uM_ABA_P Parameter: Tissue Value: Aerial
  misc_feature: MA Experiment 20000169 PARAMETER Experiment Name: At_100uM_ABA_P Parameter: Treatment Value: 100uM ABA vs. No Treatment
  misc_feature: MA Experiment ID: 20000180 Result: Up-regulated in Transcription
  misc_feature: MA Experiment 20000180 PARAMETER Experiment Name: At_Germinating_Seeds_P Parameter: Age (hr) Value: 24 vs. 0
  misc_feature: MA Experiment 20000180 PARAMETER Experiment Name: At_Germinating_Seeds_P Parameter: Tissue Value: Germinating Seeds
  misc_feature: MA Experiment ID: 20000234 Result: Up-regulated in Transcription
  misc_feature: MA Experiment 20000234 PARAMETER Experiment Name: At_Siliques_P Parameter: Age (day) Value: 21
  misc_feature: MA Experiment 20000234 PARAMETER Experiment Name: At_Siliques_P Parameter: Organism Value: A. thaliana
  misc_feature: MA Experiment 20000234 PARAMETER Experiment Name: At_Siliques_P Parameter: Plant Line Value: WS
  misc_feature: MA Experiment 20000234 PARAMETER Experiment Name: At_Siliques_P Parameter: Tissue Value: Less Than 5mm Siliques vs. Whole Plant
  misc_feature: MA Experiment ID: 20000267 Result: Up-regulated in Transcription
  misc_feature: MA Experiment 20000267 PARAMETER Experiment Name: At_Drought_P Parameter: Age (day) Value: 7
  misc_feature: MA Experiment 20000267 PARAMETER Experiment Name: At_Drought_P Parameter: Organism Value: A. thaliana
  misc_feature: MA Experiment 20000267 PARAMETER Experiment Name: At_Drought_P Parameter: Plant Line Value: WS
  misc_feature: MA Experiment 20000267 PARAMETER Experiment Name: At_Drought_P Parameter: Timepoint (hr) Value: 6
  misc_feature: MA Experiment 20000267 PARAMETER Experiment Name: At_Drought_P Parameter: Tissue Value: Whole Plant
  misc_feature: MA Experiment 20000267 PARAMETER Experiment Name: At_Drought_P Parameter: Treatment Value: Drought vs. No Drought
  misc_feature: MA Experiment ID: 20000436 Result: Up-regulated in Transcription
  misc_feature: MA Experiment 20000436 PARAMETER Experiment Name: At_Drought_P Parameter: Age (day) Value: 7
  misc_feature: MA Experiment 20000436 PARAMETER Experiment Name: At_Drought_P Parameter: Organism Value: A. thaliana
  misc_feature: MA Experiment 20000436 PARAMETER Experiment Name: At_Drought_P Parameter: Plant Line Value: WS
  misc_feature: MA Experiment 20000436 PARAMETER Experiment Name: At_Drought_P Parameter: Timepoint (hr) Value: 12
  misc_feature: MA Experiment 20000436 PARAMETER Experiment Name: At_Drought_P Parameter: Tissue Value: Whole Plant
  misc_feature: MA Experiment 20000436 PARAMETER Experiment Name: At_Drought_P Parameter: Treatment Value: Drought vs. No Drought
  misc_feature: MA Experiment ID: 20000437 Result: Up-regulated in Transcription
  misc_feature: MA Experiment 20000437 PARAMETER Experiment Name: At_Drought_P Parameter: Age (day) Value: 8
  misc_feature: MA Experiment 20000437 PARAMETER Experiment Name: At_Drought_P Parameter: Organism Value: A. thaliana
  misc_feature: MA Experiment 20000437 PARAMETER Experiment Name: At_Drought_P Parameter: Plant Line Value: WS
  misc_feature: MA Experiment 20000437 PARAMETER Experiment Name: At_Drought_P Parameter: Timepoint (hr) Value: 24
  misc_feature: MA Experiment 20000437 PARAMETER Experiment Name: At_Drought_P Parameter: Tissue Value: Whole Plant
  misc_feature: MA Experiment 20000437 PARAMETER Experiment Name: At_Drought_P Parameter: Treatment Value: Drought vs. No Drought
  misc_feature: MA Experiment ID: 20000439 Result: Up-regulated in Transcription
  misc_feature: MA Experiment 20000439 PARAMETER Experiment Name: At_Roots__P Parameter: Age (day) Value: 14 vs. 21
  misc_feature: MA Experiment 20000439 PARAMETER Experiment Name: At_Roots__P Parameter: Organism Value: A. thaliana
  misc_feature: MA Experiment 20000439 PARAMETER Experiment Name: At_Roots__P Parameter: Tissue Value: Roots vs. Whole Plant
  misc_feature: MA Experiment ID: 20000441 Result: Down-regulated in Transcription
  misc_feature: MA Experiment 20000441 PARAMETER Experiment Name: At_1uM_BR-BRZ__P Parameter: Tissue Value: Shoot Apices
  misc_feature: MA Experiment 20000441 PARAMETER Experiment Name: At_1uM_BR-BRZ__P Parameter: Treatment Value: 1uM BR vs. No Treatment
  misc_feature: MA Experiment ID: 20000453 Result: Up-regulated in Transcription
  misc_feature: MA Experiment 20000453 PARAMETER Experiment Name: At_100uM_ABA_P Parameter: Age (day) Value: 15
  misc_feature: MA Experiment 20000453 PARAMETER Experiment Name: At_100uM_ABA_P Parameter: Organism Value: A. thaliana
  misc_feature: MA Experiment 20000453 PARAMETER Experiment Name: At_100uM_ABA_P Parameter: Plant Line Value: WS
  misc_feature: MA Experiment 20000453 PARAMETER Experiment Name: At_100uM_ABA_P Parameter: Timepoint (hr) Value: 24
  misc_feature: MA Experiment 20000453 PARAMETER Experiment Name: At_100uM_ABA_P Parameter: Tissue Value: Aerial
  misc_feature: MA Experiment 20000453 PARAMETER Experiment Name: At_100uM_ABA_P Parameter: Treatment Value: 100uM ABA vs. No Treatment
  misc_feature: MA Experiment ID: 20000794 Result: Down-regulated in Transcription
  misc_feature: MA Experiment 20000794 PARAMETER Experiment Name: At_Petals_P Parameter: Age (day) Value: 23-25 days
  misc_feature: MA Experiment 20000794 PARAMETER Experiment Name: At_Petals_P Parameter: Plant Line Value: WS
  misc_feature: MA Experiment 20000794 PARAMETER Experiment Name: At_Petals_P Parameter: Tissue Value: Petals vs. Whole plant
  misc_feature: MA Experiment ID: 20001247 Result: Up-regulated in Transcription
  misc_feature: MA Experiment 20001247 PARAMETER Experiment Name: At_Far-red-induction_P Parameter: Age (day) Value: 7
  misc_feature: MA Experiment 20001247 PARAMETER Experiment Name: At_Far-red-induction_P Parameter: Light Value: Far-red vs. White
  misc_feature: MA Experiment 20001247 PARAMETER Experiment Name: At_Far-red-induction_P Parameter: Organism Value: A. thaliana
  misc_feature: MA Experiment 20001247 PARAMETER Experiment Name: At_Far-red-induction_P Parameter: Plant Line Value: Columbia
  misc_feature: MA Experiment 20001247 PARAMETER Experiment Name: At_Far-red-induction_P Parameter: Timepoint (hr) Value: 1
  misc_feature: MA Experiment 20001247 PARAMETER Experiment Name: At_Far-red-induction_P Parameter: Tissue Value: Whole Plant
  misc_feature: MA Experiment ID: 20001554 Result: Up-regulated in Transcription
  misc_feature: MA Experiment 20001554 PARAMETER Experiment Name: At_Drought_Soil_Dry_P Parameter: Age (day) Value: 21
  misc_feature: MA Experiment 20001554 PARAMETER Experiment Name: At_Drought_Soil_Dry_P Parameter: Organism Value: A. thaliana
  misc_feature: MA Experiment 20001554 PARAMETER Experiment Name: At_Drought_Soil_Dry_P Parameter: Plant Line Value: WS
  misc_feature: MA Experiment 20001554 PARAMETER Experiment Name: At_Drought_Soil_Dry_P Parameter: Post Timepoint (hr) Value: None
  misc_feature: MA Experiment 20001554 PARAMETER Experiment Name: At_Drought_Soil_Dry_P Parameter: Post-Treatment Value: None
  misc_feature: MA Experiment 20001554 PARAMETER Experiment Name: At_Drought_Soil_Dry_P Parameter: Timepoint (day) Value: 7
  misc_feature: MA Experiment 20001554 PARAMETER Experiment Name: At_Drought_Soil_Dry_P Parameter: Treatment Value: Drought vs. No Drought
  misc_feature: MA Experiment ID: 20001555 Result: Up-regulated in Transcription
  misc_feature: MA Experiment 20001555 PARAMETER Experiment Name: At_Drought_Soil_Dry_P Parameter: Age (day) Value: 24
  misc_feature: MA Experiment 20001555 PARAMETER Experiment Name: At_Drought_Soil_Dry_P Parameter: Organism Value: A. thaliana
  misc_feature: MA Experiment 20001555 PARAMETER Experiment Name: At_Drought_Soil_Dry_P Parameter: Plant Line Value: WS
  misc_feature: MA Experiment 20001555 PARAMETER Experiment Name: At_Drought_Soil_Dry_P Parameter: Post Timepoint (hr) Value: None
  misc_feature: MA Experiment 20001555 PARAMETER Experiment Name: At_Drought_Soil_Dry_P Parameter: Post-Treatment Value: None
  misc_feature: MA Experiment 20001555 PARAMETER Experiment Name: At_Drought_Soil_Dry_P Parameter: Timepoint (day) Value: 10
  misc_feature: MA Experiment 20001555 PARAMETER Experiment Name: At_Drought_Soil_Dry_P Parameter: Treatment Value: Drought vs. No Drought
  misc_feature: MA Experiment ID: 20001557 Result: Up-regulated in Transcription
  misc_feature: MA Experiment 20001557 PARAMETER Experiment Name: At_Drought_Soil_Dry_P Parameter: Age (day) Value: 27
  misc_feature: MA Experiment 20001557 PARAMETER Experiment Name: At_Drought_Soil_Dry_P Parameter: Organism Value: A. thaliana
  misc_feature: MA Experiment 20001557 PARAMETER Experiment Name: At_Drought_Soil_Dry_P Parameter: Plant Line Value: WS
  misc_feature: MA Experiment 20001557 PARAMETER Experiment Name: At_Drought_Soil_Dry_P Parameter: Post Timepoint (hr) Value: 3
  misc_feature: MA Experiment 20001557 PARAMETER Experiment Name: At_Drought_Soil_Dry_P Parameter: Post-Treatment Value: Re-Water vs. No Drought
  misc_feature: MA Experiment 20001557 PARAMETER Experiment Name: At_Drought_Soil_Dry_P Parameter: Timepoint (day) Value: 13
  misc_feature: MA Experiment 20001557 PARAMETER Experiment Name: At_Drought_Soil_Dry_P Parameter: Treatment Value: Drought vs. No Drought
  misc_feature: MA Experiment ID: 20001560 Result: Up-regulated in Transcription
  misc_feature: MA Experiment 20001560 PARAMETER Experiment Name: At_Drought_Soil_Dry_P Parameter: Age (day) Value: 28
  misc_feature: MA Experiment 20001560 PARAMETER Experiment Name: At_Drought_Soil_Dry_P Parameter: Organism Value: A. thaliana
  misc_feature: MA Experiment 20001560 PARAMETER Experiment Name: At_Drought_Soil_Dry_P Parameter: Plant Line Value: WS
  misc_feature: MA Experiment 20001560 PARAMETER Experiment Name: At_Drought_Soil_Dry_P Parameter: Post Timepoint (hr) Value: None
  misc_feature: MA Experiment 20001560 PARAMETER Experiment Name: At_Drought_Soil_Dry_P Parameter: Post-Treatment Value: None
  misc_feature: MA Experiment 20001560 PARAMETER Experiment Name: At_Drought_Soil_Dry_P Parameter: Timepoint (day) Value: 14
  misc_feature: MA Experiment 20001560 PARAMETER Experiment Name: At_Drought_Soil_Dry_P Parameter: Treatment Value: Drought vs. No Drought
gcttcttcttcttcttcttcttctttcccactcctactctttctccctcctctgctctctcatctacttcctctgtatattcttcgcacaaaattaagttactaaatccagtttctgacaatggaaacaaaccatttatacactttgtctacacttgttgttatgctgctagtgtcagtgacaccgacagtgacatcaaaagacgaggttgtttcttgtacaatgtgttcttcatgcgacaatccatgtagtcctgtccaatcatctcctccgccaccttctcctccaccaccgtcaacccccacaaccgcatgtcctccccctccttctcctccaagctccggtggcggtagctcttactattaccctcctccttctcagtccggtggaggcagtaaataccctccaccatacggtggcggtggtcaaggttattactatcctccgccgtattcaggaaactatcctacgccgcctccgccgaatccgatcgtcccttatttcccgttttactatcatactccaccaccaggttctggctcagatcggtttatgagttcttactctattatntnngctctttttgctgtctttctctgtttagtgtgacggaaaatagtcggaaattcgccgggaaaaagacgaagaaaaagtcgaaataatgtggcagatccgtagatctataaatctttagatttctttgatcatggaaactaaatgatgttagatcttttactttcttcgatctgttttaactttttcttttgttgttgacaatttgtatttaattgttcttgattattaatatattaattactcgttattcagattcc

SEQ ID NO: 42462 - protein, 162 aa, Arabidopsis thaliana
  peptide (1)..(162): Ceres Seq. ID no. 12395706
  misc_feature (42)..(126): Pfam Name: 7 transmembrane receptor (rhodopsin family) Pfam Description: 7 transmembrane receptor (rhodopsin family)
  misc_feature (49)..(141): Homolog of NCBI NO: 7488998 NR Description: extensin class I (clone uG-18) - tomato
  misc_feature (49)..(141): Homolog of NCBI NO: 3204132 NR Description: extensin [Cicer arietinum]
  misc_feature (41)..(141): Homolog of NCBI NO: 791150 NR Description: extensin-like protein [Vigna unguiculata]
  misc_feature (45)..(135): Homolog of NCBI NO: 31792269 NR Description: Probable Proline-rich antigen homolog pra
  misc_feature (45)..(135): Homolog of NCBI NO: 15608218 NR Description: pra [Mycobacterium tuberculosis H37Rv]
  misc_feature (50)..(136): Homolog of NCBI NO: 34894212 NR Description: P0439B06.27 [Oryza sativa (japonica
  misc_feature (23)..(162): Homolog of NCBI NO: 34894480 NR Description: OJ1116_C07.3 [Oryza sativa (japonica
  misc_feature (1)..(158): Homolog of NCBI NO: 15234820 NR Description: extensin like protein; protein id: At4g16140.1
  misc_feature (1)..(162): Homolog of NCBI NO: 18397707 NR Description: expressed protein
  misc_feature (1)..(162): Homolog of NCBI NO: 18423010 NR Description: expressed protein
  misc_feature (151)..(151): Xaa is any aa, unknown or other
  misc_feature (152)..(152): Xaa is any aa, unknown or other
METNHLYTLSTLVVMLLVSVTPTVTSKDEVVSCTMCSSCDNPCSPVQSSPPPPSPPPPSTPTTACPPPPSPPSSGGGSSYYYPPPSQSGGGSKYPPPYGGGGQGYYYPPPYSGNYPTPPPPNPIVPYFPFYYHTPPPGSGSDRFMSSYSIXXALFAVFLCLV

SEQ ID NO: 42463 - protein, 148 aa, Arabidopsis thaliana
  peptide (1)..(148): Ceres Seq. ID no. 12395707
  misc_feature (28)..(112): Pfam Name: 7 transmembrane receptor (rhodopsin family) Pfam Description: 7 transmembrane receptor (rhodopsin family)
  misc_feature (35)..(127): Homolog of NCBI NO: 7488998 NR Description: extensin class I (clone uG-18) - tomato
  misc_feature (35)..(127): Homolog of NCBI NO: 3204132 NR Description: extensin [Cicer arietinum]
  misc_feature (27)..(127): Homolog of NCBI NO: 791150 NR Description: extensin-like protein [Vigna unguiculata]
  misc_feature (31)..(121): Homolog of NCBI NO: 31792269 NR Description: Probable Proline-rich antigen homolog pra
  misc_feature (31)..(121): Homolog of NCBI NO: 15608218 NR Description: pra [Mycobacterium tuberculosis H37Rv]
  misc_feature (36)..(122): Homolog of NCBI NO: 34894212 NR Description: P0439B06.27 [Oryza sativa (japonica
  misc_feature (9)..(148): Homolog of NCBI NO: 34894480 NR Description: OJ1116_C07.3 [Oryza sativa (japonica
  misc_feature (1)..(144): Homolog of NCBI NO: 15234820 NR Description: extensin like protein; protein id: At4g16140.1
  misc_feature (1)..(148): Homolog of NCBI NO: 18397707 NR Description: expressed protein
  misc_feature (1)..(148): Homolog of NCBI NO: 18423010 NR Description: expressed protein
  misc_feature (137)..(137): Xaa is any aa, unknown or other
  misc_feature (138)..(138): Xaa is any aa, unknown or other
MLLVSVTPTVTSKDEVVSCTMCSSCDNPCSPVQSSPPPPSPPPPSTPTTACPPPPSPPSSGGGSSYYYPPPSQSGGGSKYPPPYGGGGQGYYYPPPYSGNYPTPPPPNPIVPYFPFYYHTPPPGSGSDRFMSSYSIXXALFAVFLCLV

SEQ ID NO: 42464 - protein, 128 aa, Arabidopsis thaliana
  peptide (1)..(128): Ceres Seq. ID no. 12395708
  misc_feature (8)..(92): Pfam Name: 7 transmembrane receptor (rhodopsin family) Pfam Description: 7 transmembrane receptor (rhodopsin family)
  misc_feature (15)..(107): Homolog of NCBI NO: 7488998 NR Description: extensin class I (clone uG-18) - tomato
  misc_feature (15)..(107): Homolog of NCBI NO: 3204132 NR Description: extensin [Cicer arietinum]
  misc_feature (7)..(107): Homolog of NCBI NO: 791150 NR Description: extensin-like protein [Vigna unguiculata]
  misc_feature (11)..(101): Homolog of NCBI NO: 31792269 NR Description: Probable Proline-rich antigen homolog pra
  misc_feature (11)..(101): Homolog of NCBI NO: 15608218 NR Description: pra [Mycobacterium tuberculosis H37Rv]
  misc_feature (16)..(102): Homolog of NCBI NO: 34894212 NR Description: P0439B06.27 [Oryza sativa (japonica
  misc_feature (1)..(128): Homolog of NCBI NO: 34894480 NR Description: OJ1116_C07.3 [Oryza sativa (japonica
  misc_feature (1)..(124): Homolog of NCBI NO: 15234820 NR Description: extensin like protein; protein id: At4g16140.1
  misc_feature (1)..(128): Homolog of NCBI NO: 18397707 NR Description: expressed protein
  misc_feature (1)..(128): Homolog of NCBI NO: 18423010 NR Description: expressed protein
  misc_feature (117)..(117): Xaa is any aa, unknown or other
  misc_feature (118)..(118): Xaa is any aa, unknown or other
MCSSCDNPCSPVQSSPPPPSPPPPSTPTTACPPPPSPPSSGGGSSYYYPPPSQSGGGSKYPPPYGGGGQGYYYPPPYSGNYPTPPPPNPIVPYFPFYYHTPPPGSGSDRFMSSYSIXXALFAVFLCLV

SEQ ID NO: 42465 - DNA, 1369 bp, Arabidopsis thaliana; identical to SEQ ID NO: 21457
  misc_feature (1)..(1369): Ceres Seq. ID no. 13491211
  misc_feature: MA Experiment ID: 108569 Result: Up-regulated in Transcription
  misc_feature: MA Experiment 108569 PARAMETER Experiment Name: At_0.001%_MeJA__cDNA_P Parameter: Timepoint (hr) Value: 6
  misc_feature: MA Experiment 108569 PARAMETER Experiment Name: At_0.001%_MeJA__cDNA_P Parameter: Tissue Value: Aerial
  misc_feature: MA Experiment 108569 PARAMETER Experiment Name: At_0.001%_MeJA__cDNA_P Parameter: Treatment Value: 0.001% MeJA vs. No Treatment
  misc_feature: MA Experiment ID: 108573 Result: Up-regulated in Transcription
  misc_feature: MA Experiment 108573 PARAMETER Experiment Name: At_Drought_cDNA_P Parameter: Timepoint (hr) Value: 6
  misc_feature: MA Experiment 108573 PARAMETER Experiment Name: At_Drought_cDNA_P Parameter: Tissue Value: Aerial
  misc_feature: MA Experiment 108573 PARAMETER Experiment Name: At_Drought_cDNA_P Parameter: Treatment Value: Drought vs. No Drought
  misc_feature: MA Experiment ID: 20000070 Result: Up-regulated in Transcription
  misc_feature: MA Experiment 20000070 PARAMETER Experiment Name: At_100uM_ABA_Mutants_cDNA_P Parameter: Plant Line Value: CS24
  misc_feature: MA Experiment 20000070 PARAMETER Experiment Name: At_100uM_ABA_Mutants_cDNA_P Parameter: Timepoint (hr) Value: 6
  misc_feature: MA Experiment 20000070 PARAMETER Experiment Name: At_100uM_ABA_Mutants_cDNA_P Parameter: Tissue Value: Aerial
  misc_feature: MA Experiment 20000070 PARAMETER Experiment Name: At_100uM_ABA_Mutants_cDNA_P Parameter: Treatment Value: 100uM ABA vs. No Treatment
  misc_feature: MA Experiment ID: 20000071 Result: Up-regulated in Transcription
  misc_feature: MA Experiment 20000071 PARAMETER Experiment Name: At_100uM_ABA_Mutants_cDNA_P Parameter: Plant Line Value: CS8104
  misc_feature: MA Experiment 20000071 PARAMETER Experiment Name: At_100uM_ABA_Mutants_cDNA_P Parameter: Timepoint (hr) Value: 6
  misc_feature: MA Experiment 20000071 PARAMETER Experiment Name: At_100uM_ABA_Mutants_cDNA_P Parameter: Tissue Value: Aerial
  misc_feature: MA Experiment 20000071 PARAMETER Experiment Name: At_100uM_ABA_Mutants_cDNA_P Parameter: Treatment Value: 100uM ABA vs. No Treatment
  misc_feature: MA Experiment ID: 20000087 Result: Up-regulated in Transcription
  misc_feature: MA Experiment 20000087 PARAMETER Experiment Name: At_100uM_ABA_Mutants_cDNA_P Parameter: Plant Line Value: WS
  misc_feature: MA Experiment 20000087 PARAMETER Experiment Name: At_100uM_ABA_Mutants_cDNA_P Parameter: Timepoint (hr) Value: 6
  misc_feature: MA Experiment 20000087 PARAMETER Experiment Name: At_100uM_ABA_Mutants_cDNA_P Parameter: Tissue Value: Aerial
  misc_feature: MA Experiment 20000087 PARAMETER Experiment Name: At_100uM_ABA_Mutants_cDNA_P Parameter: Treatment Value: 100uM ABA vs. No Treatment
  misc_feature: MA Experiment ID: 20000093 Result: Down-regulated in Transcription
  misc_feature: MA Experiment 20000093 PARAMETER Experiment Name: At_42deg_Heat_cDNA_P Parameter: Temperature (deg C) Value: 42 vs. 22
  misc_feature: MA Experiment 20000093 PARAMETER Experiment Name: At_42deg_Heat_cDNA_P Parameter: Timepoint (hr) Value: 0.5
  misc_feature: MA Experiment 20000093 PARAMETER Experiment Name: At_42deg_Heat_cDNA_P Parameter: Tissue Value: Aerial
  misc_feature: MA Experiment ID: 20000111 Result: Down-regulated in Transcription
  misc_feature: MA Experiment 20000111 PARAMETER Experiment Name: At_42deg_Heat_cDNA_P Parameter: Temperature (deg C) Value: 42 vs. 22
  misc_feature: MA Experiment 20000111 PARAMETER Experiment Name: At_42deg_Heat_cDNA_P Parameter: Timepoint (hr) Value: 6
  misc_feature: MA Experiment 20000111 PARAMETER Experiment Name: At_42deg_Heat_cDNA_P Parameter: Tissue Value: Aerial
  misc_feature: MA Experiment ID: 20000112 Result: Down-regulated in Transcription
  misc_feature: MA Experiment 20000112 PARAMETER Experiment Name: At_42deg_Heat_cDNA_P Parameter: Temperature (deg C) Value: 42 vs. 22
  misc_feature: MA Experiment 20000112 PARAMETER Experiment Name: At_42deg_Heat_cDNA_P Parameter: Timepoint (hr) Value: 2
  misc_feature: MA Experiment 20000112 PARAMETER Experiment Name: At_42deg_Heat_cDNA_P Parameter: Tissue Value: Aerial
  misc_feature: MA Experiment ID: 20000117 Result: Up-regulated in Transcription
  misc_feature: MA Experiment 20000117 PARAMETER Experiment Name: At_100uM_ABA_Mutants_cDNA_P Parameter: Plant Line Value: Columbia
  misc_feature: MA Experiment 20000117 PARAMETER Experiment Name: At_100uM_ABA_Mutants_cDNA_P Parameter: Timepoint (hr) Value: 6
  misc_feature: MA Experiment 20000117 PARAMETER Experiment Name: At_100uM_ABA_Mutants_cDNA_P Parameter: Tissue Value: Aerial
  misc_feature: MA Experiment 20000117 PARAMETER Experiment Name: At_100uM_ABA_Mutants_cDNA_P Parameter: Treatment Value: 100uM ABA vs. No Treatment
  misc_feature: MA Experiment ID: 20000144 Result: Down-regulated in Transcription
  misc_feature: MA Experiment 20000144 PARAMETER Experiment Name: At_42deg_Heat_cDNA_P Parameter: Temperature (deg C) Value: 42 vs. 22
  misc_feature: MA Experiment 20000144 PARAMETER Experiment Name: At_42deg_Heat_cDNA_P Parameter: Timepoint (hr) Value: 1
  misc_feature: MA Experiment 20000144 PARAMETER Experiment Name: At_42deg_Heat_cDNA_P Parameter: Tissue Value: Aerial
  misc_feature: MA Experiment ID: 20000171 Result: Down-regulated in Transcription
  misc_feature: MA Experiment 20000171 PARAMETER Experiment Name: At_42deg_Heat_P Parameter: Age (day) Value: 14
  misc_feature: MA Experiment 20000171 PARAMETER Experiment Name: At_42deg_Heat_P Parameter: Organism Value: A. thaliana
  misc_feature: MA Experiment 20000171 PARAMETER Experiment Name: At_42deg_Heat_P Parameter: Plant Line Value: WS
  misc_feature: MA Experiment 20000171 PARAMETER Experiment Name: At_42deg_Heat_P Parameter: Temperature (deg C) Value: 42 vs. 22
  misc_feature: MA Experiment 20000171 PARAMETER Experiment Name: At_42deg_Heat_P Parameter: Timepoint (hr) Value: 1
  misc_feature: MA Experiment 20000171 PARAMETER Experiment Name: At_42deg_Heat_P Parameter: Tissue Value: Aerial
  misc_feature: MA Experiment ID: 20000173 Result: Down-regulated in Transcription
  misc_feature: MA Experiment 20000173 PARAMETER Experiment Name: At_42deg_Heat_P Parameter: Age (day) Value: 14
  misc_feature: MA Experiment 20000173 PARAMETER Experiment Name: At_42deg_Heat_P Parameter: Organism Value: A. thaliana
  misc_feature: MA Experiment 20000173 PARAMETER Experiment Name: At_42deg_Heat_P Parameter: Plant Line Value: WS
  misc_feature: MA Experiment 20000173 PARAMETER Experiment Name: At_42deg_Heat_P Parameter: Temperature (deg C) Value: 42 vs. 22
  misc_feature: MA Experiment 20000173 PARAMETER Experiment Name: At_42deg_Heat_P Parameter: Timepoint (hr) Value: 6
  misc_feature: MA Experiment 20000173 PARAMETER Experiment Name: At_42deg_Heat_P Parameter: Tissue Value: Aerial
  misc_feature: MA Experiment ID: 20000179 Result: Up-regulated in Transcription
  misc_feature: MA Experiment 20000179 PARAMETER Experiment Name: At_Germinating_Seeds_P Parameter: Age (hr) Value: 6 vs. 0
  misc_feature: MA Experiment 20000179 PARAMETER Experiment Name: At_Germinating_Seeds_P Parameter: Tissue Value: Germinating Seeds
  misc_feature: MA Experiment ID: 20000180 Result: Up-regulated in Transcription
  misc_feature: MA Experiment 20000180 PARAMETER Experiment Name: At_Germinating_Seeds_P Parameter: Age (hr) Value: 24 vs. 0
  misc_feature: MA Experiment 20000180 PARAMETER Experiment Name: At_Germinating_Seeds_P Parameter: Tissue Value: Germinating Seeds
  misc_feature: MA Experiment ID: 20000213 Result: Up-regulated in Transcription
  misc_feature: MA Experiment 20000213 PARAMETER Experiment Name: At_4deg_Cold_P Parameter: Timepoint (hr) Value: 2
  misc_feature: MA Experiment ID: 20000224 Result: Down-regulated in Transcription

SEQ ID NO: 42466 - protein, 289 aa, Arabidopsis thaliana; identical to SEQ ID NO: 21458
  peptide (1)..(289): Ceres Seq. ID no. 13491212
  misc_feature (42)..(289): Pfam Name: Protein of unknown function (DUF579) Pfam Description: Protein of unknown function (DUF579)
  misc_feature (42)..(289): Pfam Name: Protein of unknown function (DUF579) Pfam Description: Protein of unknown function (DUF579)
  misc_feature (42)..(289): Pfam Name: Protein of unknown function (DUF579) Pfam Description: Protein of unknown function (DUF579)
  misc_feature (43)..(289): Homolog of NCBI NO: 18397819 NR Description: expressed protein [Arabidopsis thaliana]
  misc_feature (1)..(278): Homolog of NCBI NO: 15234881 NR Description: expressed protein [Arabidopsis thaliana]
  misc_feature (48)..(289): Homolog of NCBI NO: 25402555 NR Description: hypothetical protein [imported] - Arabidopsis
  misc_feature (62)..(279): Homolog of NCBI NO: 18398986 NR Description: expressed protein [Arabidopsis thaliana]
  misc_feature (16)..(289): Homolog of NCBI NO: 15217566 NR Description: hypothetical protein [Arabidopsis thaliana]
  misc_feature (43)..(289): Homolog of NCBI NO: 18397819 NR Description: expressed protein [Arabidopsis thaliana]
  misc_feature (48)..(289): Homolog of NCBI NO: 25402555 NR Description: hypothetical protein [imported] - Arabidopsis
  misc_feature (16)..(289): Homolog of NCBI NO: 15217566 NR Description: hypothetical protein [Arabidopsis thaliana]
  misc_feature (62)..(279): Homolog of NCBI NO: 18398986 NR Description: expressed protein [Arabidopsis thaliana]
  misc_feature (48)..(289): Homolog of NCBI NO: 25402555 NR Description: hypothetical protein [imported] - Arabidopsis
  misc_feature (1)..(278): Homolog of NCBI NO: 15234881 NR Description: expressed protein [Arabidopsis thaliana]
  misc_feature (43)..(289): Homolog of NCBI NO: 18397819 NR Description: expressed protein [Arabidopsis thaliana]
  misc_feature (1)..(289): Homolog of NCBI NO: 18396558 NR Description: expressed protein [Arabidopsis thaliana]
  misc_feature (1)..(289): Homolog of NCBI NO: 21537399 NR Description: unknown [Arabidopsis thaliana]
  misc_feature (8)..(289): Homolog of NCBI NO: 15220402 NR Description: expressed protein [Arabidopsis thaliana]
  misc_feature (29)..(289): Homolog of NCBI NO: 18409879 NR Description: expressed protein [Arabidopsis thaliana]
  misc_feature (29)..(289): Homolog of NCBI NO: 25354648 NR Description: hypothetical protein F14O23.3 [imported] -
  misc_feature (1)..(289): Homolog of NCBI NO: 18396558 NR Description: expressed protein [Arabidopsis thaliana]
  misc_feature (1)..(289): Homolog of NCBI NO: 21537399 NR Description: unknown [Arabidopsis thaliana]
  misc_feature (8)..(289): Homolog of NCBI NO: 15220402 NR Description: expressed protein [Arabidopsis thaliana]
  misc_feature (29)..(289): Homolog of NCBI NO: 18409879 NR Description: expressed protein [Arabidopsis thaliana]
  misc_feature (29)..(289): Homolog of NCBI NO: 25354648 NR Description: hypothetical protein F14O23.3 [imported] -
  misc_feature (16)..(289): Homolog of NCBI NO: 15217566 NR Description: hypothetical protein [Arabidopsis thaliana]
  misc_feature (62)..(279): Homolog of NCBI NO: 18398986 NR Description: expressed protein [Arabidopsis thaliana]
  misc_feature (1)..(278): Homolog of NCBI NO: 15234881 NR Description: expressed protein [Arabidopsis thaliana]
  misc_feature (29)..(289): Homolog of NCBI NO: 25354648 NR Description: hypothetical protein F14O23.3 [imported] -
  misc_feature (29)..(289): Homolog of NCBI NO: 18409879 NR Description: expressed protein [Arabidopsis thaliana]
  misc_feature (8)..(289): Homolog of NCBI NO: 15220402 NR Description: expressed protein [Arabidopsis thaliana]
  misc_feature (1)..(289): Homolog of NCBI NO: 21537399 NR Description: unknown [Arabidopsis thaliana]
  misc_feature (1)..(289): Homolog of NCBI NO: 18396558 NR Description: expressed protein [Arabidopsis thaliana]

SEQ ID NO: 42467 - protein, 179 aa, Arabidopsis thaliana; identical to SEQ ID NO: 21459
  peptide (1)..(179): Ceres Seq. ID no. 13491213
  misc_feature (1)..(179): Pfam Name: Protein of unknown function (DUF579) Pfam Description: Protein of unknown function (DUF579)
  misc_feature (1)..(179): Pfam Name: Protein of unknown function (DUF579) Pfam Description: Protein of unknown function (DUF579)
  misc_feature (1)..(179): Pfam Name: Protein of unknown function (DUF579) Pfam Description: Protein of unknown function (DUF579)
  misc_feature (1)..(179): Homolog of NCBI NO: 18397819 NR Description: expressed protein [Arabidopsis thaliana]
  misc_feature (1)..(168): Homolog of NCBI NO: 15234881 NR Description: expressed protein [Arabidopsis thaliana]
  misc_feature (1)..(179): Homolog of NCBI NO: 25402555 NR Description: hypothetical protein [imported] - Arabidopsis
  misc_feature (1)..(169): Homolog of NCBI NO: 18398986 NR Description: expressed protein [Arabidopsis thaliana]
  misc_feature (1)..(179): Homolog of NCBI NO: 15217566 NR Description: hypothetical protein [Arabidopsis thaliana]
  misc_feature (1)..(168): Homolog of NCBI NO: 15234881 NR Description: expressed protein [Arabidopsis thaliana]
  misc_feature (1)..(169): Homolog of NCBI NO: 18398986 NR Description: expressed protein [Arabidopsis thaliana]
  misc_feature (1)..(179): Homolog of NCBI NO: 25402555 NR Description: hypothetical protein [imported] - Arabidopsis
  misc_feature (1)..(168): Homolog of NCBI NO: 15234881 NR Description: expressed protein [Arabidopsis thaliana]
  misc_feature (1)..(179): Homolog of NCBI NO: 18397819 NR Description: expressed protein [Arabidopsis thaliana]
  misc_feature (1)..(179): Homolog of NCBI NO: 18396558 NR Description: expressed protein [Arabidopsis thaliana]
  misc_feature (1)..(179): Homolog of NCBI NO: 21537399 NR Description: unknown [Arabidopsis thaliana]
  misc_feature (1)..(179): Homolog of NCBI NO: 15220402 NR Description: expressed protein [Arabidopsis thaliana]
  misc_feature (1)..(179): Homolog of NCBI NO: 18409879 NR Description: expressed protein [Arabidopsis thaliana]
  misc_feature (1)..(179): Homolog of NCBI NO: 25354648 NR Description: hypothetical protein F14O23.3 [imported] -
  misc_feature (1)..(179): Homolog of NCBI NO: 15217566 NR Description: hypothetical protein [Arabidopsis thaliana]
  misc_feature (1)..(179): Homolog of NCBI NO: 18396558 NR Description: expressed protein [Arabidopsis thaliana]
  misc_feature (1)..(179): Homolog of NCBI NO: 21537399 NR Description: unknown [Arabidopsis thaliana]
  misc_feature (1)..(179): Homolog of NCBI NO: 15220402 NR Description: expressed protein [Arabidopsis thaliana]
  misc_feature (1)..(179): Homolog of NCBI NO: 18409879 NR Description: expressed protein [Arabidopsis thaliana]
  misc_feature (1)..(179): Homolog of NCBI NO: 25354648 NR Description: hypothetical protein F14O23.3 [imported] -
  misc_feature (1)..(179): Homolog of NCBI NO: 15217566 NR Description: hypothetical protein [Arabidopsis thaliana]
  misc_feature (1)..(169): Homolog of NCBI NO: 18398986 NR Description: expressed protein [Arabidopsis thaliana]
  misc_feature (1)..(179): Homolog of NCBI NO: 25402555 NR Description: hypothetical protein [imported] - Arabidopsis
  misc_feature (1)..(179): Homolog of NCBI NO: 18397819 NR Description: expressed protein [Arabidopsis thaliana]
  misc_feature (1)..(179): Homolog of NCBI NO: 25354648 NR Description: hypothetical protein F14O23.3 [imported] -
  misc_feature (1)..(179): Homolog of NCBI NO: 18409879 NR Description: expressed protein [Arabidopsis thaliana]
  misc_feature (1)..(179): Homolog of NCBI NO: 15220402 NR Description: expressed protein [Arabidopsis thaliana]
  misc_feature (1)..(179): Homolog of NCBI NO: 21537399 NR Description: unknown [Arabidopsis thaliana]
  misc_feature (1)..(179): Homolog of NCBI NO: 18396558 NR Description: expressed protein [Arabidopsis thaliana]

SEQ ID NO: 42468 - DNA, 1738 bp, Arabidopsis thaliana
  misc_feature (1)..(1738): Ceres Seq. ID no. 12348511
  misc_feature: MA Experiment ID: 20000185 Result: Up-regulated in Transcription
  misc_feature: MA Experiment 20000185 PARAMETER Experiment Name: At_Roots__P Parameter: Age (day) Value: 7 vs. 21
  misc_feature: MA Experiment 20000185 PARAMETER Experiment Name: At_Roots__P Parameter: Organism Value: A. thaliana
  misc_feature: MA Experiment 20000185 PARAMETER Experiment Name: At_Roots__P Parameter: Tissue Value: Roots vs. Whole Plant
  misc_feature: MA Experiment ID: 20001451 Result: Down-regulated in Transcription
  misc_feature: MA Experiment 20001451 PARAMETER Experiment Name: At_Far-red-induction_P Parameter: Age (day) Value: 7
  misc_feature: MA Experiment 20001451 PARAMETER Experiment Name: At_Far-red-induction_P Parameter: Light Value: Far-red vs. White
  misc_feature: MA Experiment 20001451 PARAMETER Experiment Name: At_Far-red-induction_P Parameter: Organism Value: A. thaliana
  misc_feature: MA Experiment 20001451 PARAMETER Experiment Name: At_Far-red-induction_P Parameter: Plant Line Value: Columbia
  misc_feature: MA Experiment 20001451 PARAMETER Experiment Name: At_Far-red-induction_P Parameter: Timepoint (hr) Value: 24
  misc_feature: MA Experiment 20001451 PARAMETER Experiment Name: At_Far-red-induction_P Parameter: Tissue Value: Whole Plant
aatctcatgtctcatcttcctctttcactttgagcaattatggcagcaatgaacatcgttgactttcaaaactgcttcttttttgtcctcttaagcctcttctcacttctctgttactctctcttcttcaggaaaccaaaggaacctcgacttcactatgatttacctccgagccctccgactcttcccatcattggtcatcttcaccttcttctctctgttctagtccacagatctttacagacactctccaccaagtatgggtctattctctatcttcgcgtcttcagtttccctgtagccctcgtctcctcagcatctattgcttatgagatcttcagggaacacgacgtgaacatctcgtctcgtggtttccctcctaccgatgattccctttttgctggatctttcagcttcacctctgctccctatggagattactggaagttcatgaagaagctcctggtcacgaacttgcttggaccccaggcactcgagcggtcacgaggattccgtgcagatgagctagatctgttttacgagaacctgttggataaagcgatgaagaaggagagcgtggatatctgtgtggaggcgttgaagctcagtaacaacagcatctgcaagatgatcatggggaggagttgttcagaggagaatggtgaggcagagagagttagggctttggctacccagttagatggcttgacgaagaagatcttattggcgaacatgttgcgtgcggggtttaaaaagcttgttgtctcactgtttagaaaggaaatgatggatgtttccagcagatttgatgagctgctcgaaaggatccttgtggaacatgaagataaactggacatgcatcatcaaggtacagacttagtggacgcgttgttggcagcttgtcgggacaaaaatgcagagtataagatctctaggaaccatatcaagtcgtttttcgcggatctcttatttgcaagcactgacacctttgtgcaaacaacacagtggacagtggcggagatcattaataaccctaatgttcttgagagattgagaggagaaatcgattccgtggtcgggaaagcaaggttgattcaagaaactgatttgccaaacctcccttatttgcaagcggtggtcaaggaagggctaagactgcatccgccggggcctctctttgcaaggttctcccaagaagggtgtaggatcggagggttctatgtaccggagaaaacaacattaatgattaatgcttatgctgtgatgagagattctgattcttgggaagatcctgatgagtttaaaccagagaggtttctagcttcgtcaagatcagagcaggaaaaggagagaagagagcaagcaattaagtacattgctttcggaagcggacgaagaagctgtcctggagaaaatctagcatatatctttttaggaactgcaattggagtgatggtacagggatttgagtggagaatcaaagaagagaaagttaacatggaagaggctaatgtaggactgagcttgaccatggcttatcctcttaaggtcactcctgttcctcgaaccctagtccccttaactcagaatccactgaaccggagttcatgaatctttggtaagtaattaggtagccttgtttttacgttaccgtgtctgagtttactggtttagtttggctaatgtgtgaaaccgtaaacaattgtgttgttattcggatttatttgtggattggttc

SEQ ID NO: 42469 - protein, 523 aa, Arabidopsis thaliana
  peptide (1)..(523): Ceres Seq. ID no. 12348512
  misc_feature (1)..(523): Homolog of NCBI NO: 9294003 NR Description: cytochrome P450-like protein [Arabidopsis
  misc_feature (1)..(513): Homolog of NCBI NO: 15231053 NR Description: cytochrome p450 family; protein id: At3g20140.1
  misc_feature (15)..(511): Homolog of NCBI NO: 15233774 NR Description: cytochrome p450 family; protein id: At4g15350.1
  misc_feature (1)..(510): Homolog of NCBI NO: 15231047 NR Description: cytochrome P450, putative; protein id:
  misc_feature (41)..(479): Homolog of NCBI NO: 7430615 NR Description: cytochrome P450 - Arabidopsis thaliana
  misc_feature (41)..(517): Homolog of NCBI NO: 25282582 NR Description: cytochrome P450 like protein [imported] -
  misc_feature (1)..(517): Homolog of NCBI NO: 15233799 NR Description: cytochrome p450 family; protein id: At4g15380.1
  misc_feature (4)..(523): Homolog of NCBI NO: 21553493 NR Description: cytochrome P450, putative [Arabidopsis thaliana]
  misc_feature (1)..(523): Homolog of NCBI NO: 19699361 NR Description: AT3g20080/MAL21_9 [Arabidopsis thaliana]
  misc_feature (1)..(523): Homolog of NCBI NO: 18402480 NR Description: cytochrome P450, putative
MAAMNIVDFQNCFFFVLLSLFSLLCYSLFFRKPKEPRLHYDLPPSPPTLPIIGHLHLLLSVLVHRSLQTLSTKYGSILYLRVFSFPVALVSSASIAYEIFREHDVNISSRGFPPTDDSLFAGSFSFTSAPYGDYWKFMKKLLVTNLLGPQALERSRGFRADELDLFYENLLDKAMKKESVDICVEALKLSNNSICKMIMGRSCSEENGEAERVRALATQLDGLTKKILLANMLRAGFKKLVVSLFRKEMMDVSSRFDELLERILVEHEDKLDMHHQGTDLVDALLAACRDKNAEYKISRNHIKSFFADLLFASTDTFVQTTQWTVAEIINNPNVLERLRGEIDSVVGKARLIQETDLPNLPYLQAVVKEGLRLHPPGPLFARFSQEGCRIGGFYVPEKTTLMINAYAVMRDSDSWEDPDEFKPERFLASSRSEQEKERREQAIKYIAFGSGRRSCPGENLAYIFLGTAIGVMVQGFEWRIKEEKVNMEEANVGLSLTMAYPLKVTPVPRTLVPLTQNPLNRSS

SEQ ID NO: 42470 - protein, 520 aa, Arabidopsis thaliana
  peptide (1)..(520): Ceres Seq. ID no. 12348513
  misc_feature (1)..(520): Homolog of NCBI NO: 9294003 NR Description: cytochrome P450-like protein [Arabidopsis
  misc_feature (1)..(510): Homolog of NCBI NO: 15231053 NR Description: cytochrome p450 family; protein id: At3g20140.1
  misc_feature (12)..(508): Homolog of NCBI NO: 15233774 NR Description: cytochrome p450 family; protein id: At4g15350.1
  misc_feature (1)..(507): Homolog of NCBI NO: 15231047 NR Description: cytochrome P450, putative; protein id:
  misc_feature (38)..(476): Homolog of NCBI NO: 7430615 NR Description: cytochrome P450 - Arabidopsis thaliana
  misc_feature (38)..(514): Homolog of NCBI NO: 25282582 NR Description: cytochrome P450 like protein [imported] -
  misc_feature (1)..(514): Homolog of NCBI NO: 15233799 NR Description: cytochrome p450 family; protein id: At4g15380.1
  misc_feature (1)..(520): Homolog of NCBI NO: 21553493 NR Description: cytochrome P450, putative [Arabidopsis thaliana]
  misc_feature (1)..(520): Homolog of NCBI NO: 19699361 NR Description: AT3g20080/MAL21_9 [Arabidopsis thaliana]
  misc_feature (1)..(520): Homolog of NCBI NO: 18402480 NR Description: cytochrome P450, putative
MNIVDFQNCFFFVLLSLFSLLCYSLFFRKPKEPRLHYDLPPSPPTLPIIGHLHLLLSVLVHRSLQTLSTKYGSILYLRVFSFPVALVSSASIAYEIFREHDVNISSRGFPPTDDSLFAGSFSFTSAPYGDYWKFMKKLLVTNLLGPQALERSRGFRADELDLFYENLLDKAMKKESVDICVEALKLSNNSICKMIMGRSCSEENGEAERVRALATQLDGLTKKILLANMLRAGFKKLVVSLFRKEMMDVSSRFDELLERILVEHEDKLDMHHQGTDLVDALLAACRDKNAEYKISRNHIKSFFADLLFASTDTFVQTTQWTVAEIINNPNVLERLRGEIDSVVGKARLIQETDLPNLPYLQAVVKEGLRLHPPGPLFARFSQEGCRIGGFYVPEKTTLMINAYAVMRDSDSWEDPDEFKPERFLASSRSEQEKERREQAIKYIAFGSGRRSCPGENLAYIFLGTAIGVMVQGFEWRIKEEKVNMEEANVGLSLTMAYPLKVTPVPRTLVPLTQNPLNRSS

SEQ ID NO: 42471 - protein, 386 aa, Arabidopsis thaliana
  peptide (1)..(386): Ceres Seq. ID no. 12348514
  misc_feature (1)..(386): Homolog of NCBI NO: 9294003 NR Description: cytochrome P450-like protein [Arabidopsis
  misc_feature (1)..(376): Homolog of NCBI NO: 15231053 NR Description: cytochrome p450 family; protein id: At3g20140.1
  misc_feature (1)..(374): Homolog of NCBI NO: 15233774 NR Description: cytochrome p450 family; protein id: At4g15350.1
  misc_feature (1)..(373): Homolog of NCBI NO: 15231047 NR Description: cytochrome P450, putative; protein id:
  misc_feature (1)..(342): Homolog of NCBI NO: 7430615 NR Description: cytochrome P450 - Arabidopsis thaliana
  misc_feature (1)..(380): Homolog of NCBI NO: 25282582 NR Description: cytochrome P450 like protein [imported] -
  misc_feature (1)..(380): Homolog of NCBI NO: 15233799 NR Description: cytochrome p450 family; protein id: At4g15380.1
  misc_feature (1)..(386): Homolog of NCBI NO: 21553493 NR Description: cytochrome P450, putative [Arabidopsis thaliana]
  misc_feature (1)..(386): Homolog of NCBI NO: 19699361 NR Description: AT3g20080/MAL21_9 [Arabidopsis thaliana]
  misc_feature (1)..(386): Homolog of NCBI NO: 18402480 NR Description: cytochrome P450, putative
MKKLLVTNLLGPQALERSRGFRADELDLFYENLLDKAMKKESVDICVEALKLSNNSICKMIMGRSCSEENGEAERVRALATQLDGLTKKILLANMLRAGFKKLVVSLFRKEMMDVSSRFDELLERILVEHEDKLDMHHQGTDLVDALLAACRDKNAEYKISRNHIKSFFADLLFASTDTFVQTTQWTVAEIINNPNVLERLRGEIDSVVGKARLIQETDLPNLPYLQAVVKEGLRLHPPGPLFARFSQEGCRIGGFYVPEKTTLMINAYAVMRDSDSWEDPDEFKPERFLASSRSEQEKERREQAIKYIAFGSGRRSCPGENLAYIFLGTAIGVMVQGFEWRIKEEKVNMEEANVGLSLTMAYPLKVTPVPRTLVPLTQNPLNRSS

SEQ ID NO: 42472 - DNA, 1460 bp, Arabidopsis thaliana
  misc_feature (1)..(1460): Ceres Seq. ID no. 12337046
  misc_feature: MA Experiment ID: 108488 Result: Down-regulated in Transcription
  misc_feature: MA Experiment ID: 108574 Result: Up-regulated in Transcription
  misc_feature: MA Experiment 108574 PARAMETER Experiment Name: At_Wounding__cDNA_P Parameter: Timepoint (hr) Value: 1
  misc_feature: MA Experiment 108574 PARAMETER Experiment Name: At_Wounding__cDNA_P Parameter: Tissue Value: Aerial
  misc_feature: MA Experiment 108574 PARAMETER Experiment Name: At_Wounding__cDNA_P Parameter: Treatment Value: Wounding vs. No Wounding
  misc_feature: MA Experiment ID: 108594 Result: Up-regulated in Transcription
  misc_feature: MA Experiment 108594 PARAMETER Experiment Name: At_Ler-rhl_Root_cDNA_P Parameter: Plant Line Value: null
  misc_feature: MA Experiment ID: 20000069 Result: Up-regulated in Transcription
  misc_feature: MA Experiment 20000069 PARAMETER Experiment Name: At_100uM_ABA_Mutants_cDNA_P Parameter: Plant Line Value: CS23
  misc_feature: MA Experiment 20000069 PARAMETER Experiment Name: At_100uM_ABA_Mutants_cDNA_P Parameter: Timepoint (hr) Value: 6
  misc_feature: MA Experiment 20000069 PARAMETER Experiment Name: At_100uM_ABA_Mutants_cDNA_P Parameter: Tissue Value: Aerial
  misc_feature: MA Experiment 20000069 PARAMETER Experiment Name: At_100uM_ABA_Mutants_cDNA_P Parameter: Treatment Value: 100uM ABA vs. No Treatment
  misc_feature: MA Experiment ID: 20000171 Result: Down-regulated in Transcription
  misc_feature: MA Experiment 20000171 PARAMETER Experiment Name: At_42deg_Heat_P Parameter: Age (day) Value: 14
  misc_feature: MA Experiment 20000171 PARAMETER Experiment Name: At_42deg_Heat_P Parameter: Organism Value: A. thaliana
  misc_feature: MA Experiment 20000171 PARAMETER Experiment Name: At_42deg_Heat_P Parameter: Plant Line Value: WS
  misc_feature: MA Experiment 20000171 PARAMETER Experiment Name: At_42deg_Heat_P Parameter: Temperature (deg C) Value: 42 vs. 22
  misc_feature: MA Experiment 20000171 PARAMETER Experiment Name: At_42deg_Heat_P Parameter: Timepoint (hr) Value: 1
  misc_feature: MA Experiment 20000171 PARAMETER Experiment Name: At_42deg_Heat_P Parameter: Tissue Value: Aerial
  misc_feature: MA Experiment ID: 20000184 Result: Down-regulated in Transcription
  misc_feature: MA Experiment 20000184 PARAMETER Experiment Name: At_Shoots__P Parameter: Age (day) Value: 7
  misc_feature: MA Experiment 20000184 PARAMETER Experiment Name: At_Shoots__P Parameter: Tissue Value: Shoots vs. Whole Plant
  misc_feature: MA Experiment ID: 20000234 Result: Down-regulated in Transcription
  misc_feature: MA Experiment 20000234 PARAMETER Experiment Name: At_Siliques_P Parameter: Age (day) Value: 21
  misc_feature: MA Experiment 20000234 PARAMETER Experiment Name: At_Siliques_P Parameter: Organism Value: A. thaliana
  misc_feature: MA Experiment 20000234 PARAMETER Experiment Name: At_Siliques_P Parameter: Plant Line Value: WS
  misc_feature: MA Experiment 20000234 PARAMETER Experiment Name: At_Siliques_P Parameter: Tissue Value: Less Than 5mm Siliques vs. Whole Plant
  misc_feature: MA Experiment ID: 20000235 Result: Down-regulated in Transcription
  misc_feature: MA Experiment 20000235 PARAMETER Experiment Name: At_Siliques_P Parameter: Age (day) Value: 21
  misc_feature: MA Experiment 20000235 PARAMETER Experiment Name: At_Siliques_P Parameter: Organism Value: A. thaliana
  misc_feature: MA Experiment 20000235 PARAMETER Experiment Name: At_Siliques_P Parameter: Plant Line Value: WS
  misc_feature: MA Experiment 20000235 PARAMETER Experiment Name: At_Siliques_P Parameter: Tissue Value: 5-10mm Siliques vs. Whole Plant
  misc_feature: MA Experiment ID: 20000264 Result: Down-regulated in Transcription
  misc_feature: MA Experiment 20000264 PARAMETER Experiment Name: At_Open_Flower_P Parameter: Age (day) Value: 21
  misc_feature: MA Experiment 20000264 PARAMETER Experiment Name: At_Open_Flower_P Parameter: Plant Line Value: WS
  misc_feature: MA Experiment 20000264 PARAMETER Experiment Name: At_Open_Flower_P Parameter: Tissue Value: Open Flower vs. Whole Plant
  misc_feature: MA Experiment ID: 20000265 Result: Down-regulated in Transcription
  misc_feature: MA Experiment 20000265 PARAMETER Experiment Name: At_Open_Flower_P Parameter: Age (day) Value: 21
  misc_feature: MA Experiment 20000265 PARAMETER Experiment Name: At_Open_Flower_P Parameter: Plant Line Value: WS
  misc_feature: MA Experiment 20000265 PARAMETER Experiment Name: At_Open_Flower_P Parameter: Tissue Value: Closed Flower vs. Whole Plant
  misc_feature: MA Experiment ID: 20000286 Result: Down-regulated in Transcription
  misc_feature: MA Experiment 20000286 PARAMETER Experiment Name: At_Open_Flower_P Parameter: Age (day) Value: 21
  misc_feature: MA Experiment 20000286 PARAMETER Experiment Name: At_Open_Flower_P Parameter: Plant Line Value: WS
  misc_feature: MA Experiment 20000286 PARAMETER Experiment Name: At_Open_Flower_P Parameter: Tissue Value: Half Open vs. Whole Plant
  misc_feature: MA Experiment ID: 20000436 Result: Up-regulated in Transcription
  misc_feature: MA Experiment 20000436 PARAMETER Experiment Name: At_Drought_P Parameter: Age (day) Value: 7
  misc_feature: MA Experiment 20000436 PARAMETER Experiment Name: At_Drought_P Parameter: Organism Value: A. thaliana
  misc_feature: MA Experiment 20000436 PARAMETER Experiment Name: At_Drought_P Parameter: Plant Line Value: WS
  misc_feature: MA Experiment 20000436 PARAMETER Experiment Name: At_Drought_P Parameter: Timepoint (hr) Value: 12
  misc_feature: MA Experiment 20000436 PARAMETER Experiment Name: At_Drought_P Parameter: Tissue Value: Whole Plant
  misc_feature: MA Experiment 20000436 PARAMETER Experiment Name: At_Drought_P Parameter: Treatment Value: Drought vs. No Drought
  misc_feature: MA Experiment ID: 20000437 Result: Up-regulated in Transcription
  misc_feature: MA Experiment 20000437 PARAMETER Experiment Name: At_Drought_P Parameter: Age (day) Value: 8
  misc_feature: MA Experiment 20000437 PARAMETER Experiment Name: At_Drought_P Parameter: Organism Value: A. thaliana
  misc_feature: MA Experiment 20000437 PARAMETER Experiment Name: At_Drought_P Parameter: Plant Line Value: WS
  misc_feature: MA Experiment 20000437 PARAMETER Experiment Name: At_Drought_P Parameter: Timepoint (hr) Value: 24
  misc_feature: MA Experiment 20000437 PARAMETER Experiment Name: At_Drought_P Parameter: Tissue Value: Whole Plant
  misc_feature: MA Experiment 20000437 PARAMETER Experiment Name: At_Drought_P Parameter: Treatment Value: Drought vs. No Drought
  misc_feature: MA Experiment ID: 20000438 Result: Down-regulated in Transcription
  misc_feature: MA Experiment 20000438 PARAMETER Experiment Name: At_Shoots__P Parameter: Age (day) Value: 14
  misc_feature: MA Experiment 20000438 PARAMETER Experiment Name: At_Shoots__P Parameter: Tissue Value: Shoots vs. Whole Plant
  misc_feature: MA Experiment ID: 20000439 Result: Down-regulated in Transcription
  misc_feature: MA Experiment 20000439 PARAMETER Experiment Name: At_Roots__P Parameter: Age (day) Value: 14 vs. 21
  misc_feature: MA Experiment 20000439 PARAMETER Experiment Name: At_Roots__P Parameter: Organism Value: A. thaliana
  misc_feature: MA Experiment 20000439 PARAMETER Experiment Name: At_Roots__P Parameter: Tissue Value: Roots vs. Whole Plant
  misc_feature: MA Experiment ID: 20000453 Result: Up-regulated in Transcription
  misc_feature: MA Experiment 20000453 PARAMETER Experiment Name: At_100uM_ABA_P Parameter: Age (day) Value: 15
  misc_feature: MA Experiment 20000453 PARAMETER Experiment Name: At_100uM_ABA_P Parameter: Organism Value: A. thaliana
  misc_feature: MA Experiment 20000453 PARAMETER Experiment Name: At_100uM_ABA_P Parameter: Plant Line Value: WS
  misc_feature: MA Experiment 20000453 PARAMETER Experiment Name: At_100uM_ABA_P Parameter: Timepoint (hr) Value: 24
  misc_feature: MA Experiment 20000453 PARAMETER Experiment Name: At_100uM_ABA_P Parameter: Tissue Value: Aerial
  misc_feature: MA Experiment 20000453 PARAMETER Experiment Name: At_100uM_ABA_P Parameter: Treatment Value: 100uM ABA vs. No Treatment
  misc_feature: MA Experiment ID: 20001247 Result: Up-regulated in Transcription
  misc_feature: MA Experiment 20001247 PARAMETER Experiment Name: At_Far-red-induction_P Parameter: Age (day) Value: 7
  misc_feature: MA Experiment 20001247 PARAMETER Experiment Name: At_Far-red-induction_P Parameter: Light Value: Far-red vs. White
  misc_feature: MA Experiment 20001247 PARAMETER Experiment Name: At_Far-red-induction_P Parameter: Organism Value: A. thaliana
  misc_feature: MA Experiment 20001247 PARAMETER Experiment Name: At_Far-red-induction_P Parameter: Plant Line Value: Columbia
  misc_feature: MA Experiment 20001247 PARAMETER Experiment Name: At_Far-red-induction_P Parameter: Timepoint (hr) Value: 1
  misc_feature: MA Experiment 20001247 PARAMETER Experiment Name: At_Far-red-induction_P Parameter: Tissue Value: Whole Plant
  misc_feature: MA Experiment ID: 20001757 Result: Down-regulated in Transcription
  misc_feature: MA Experiment 20001757 PARAMETER Experiment Name: At_50mM_NH4NO3_L-to-H_P Parameter: Timepoint (hr) Value: 6
  misc_feature: MA Experiment 20001757 PARAMETER Experiment Name: At_50mM_NH4NO3_L-to-H_P Parameter: Tissue Value: Leaf
  misc_feature: MA Experiment 20001757 PARAMETER Experiment Name: At_50mM_NH4NO3_L-to-H_P Parameter: Treatment Value: 50mM NH4NO3 vs 100mM Mannitol
  misc_feature: MA Experiment ID: 20001911 Result: Up-regulated in Transcription
  misc_feature: MA Experiment 20001911 PARAMETER Experiment Name: At_Drought_Reproduction_P Parameter: Age (day) Value: 40
  misc_feature: MA Experiment 20001911 PARAMETER Experiment Name: At_Drought_Reproduction_P Parameter: Organism Value: A. thaliana
  misc_feature: MA Experiment 20001911 PARAMETER Experiment Name: At_Drought_Reproduction_P Parameter: Plant Line Value: WS
  misc_feature: MA Experiment 20001911 PARAMETER Experiment Name: At_Drought_Reproduction_P Parameter: Timepoint (day) Value: 10
  misc_feature: MA Experiment 20001911 PARAMETER Experiment Name: At_Drought_Reproduction_P Parameter: Tissue Value: Flowers
  misc_feature: MA Experiment 20001911 PARAMETER Experiment Name: At_Drought_Reproduction_P Parameter: Treatment Value: Drought vs. No Drought
gtgttagcttcctttacgtgtttctttcctttctctctcctctgtcacgcaagaacaataaatactatgatcacttgattttctccgacgaaattttccccagaaacaacaacagttcgagcaacaaaaccctgaactctctgtttctgttaaactcattcacaattttatgagaaattggacaaaaccctgatgtcggattccgtcaaaacgacggtggatccgcttttgaaagatttggatgggaaaaaagagagtttcaggcggaacgttgtgtctatggcagctgagttaaagcaagtgagaggtcgtttggtttctcaagaacaattctttgttaaagaaagcttttgtagaaaagaagcagagaagaaagctaagaacatggaaatggagatctgtaaattgcagaagaagttggaagatagaaattgtgaacttgtagcttcaacttctgctgctgaaaagtttctagaagaagtggacgatctgagatcacagctagctttaacaaaggacattgcagaaacaagtgctgcttctgctcaatccgcacagcttcaatgctcagtgctaacagaacaacttgacgacaaaacacgttctctaagaaacacgaagaccgtgtaactcatctcggtcaccagcttgataatcttcagagagatttgaagacaagagaatgttctcaaaaacagctgagagaggaagttatgagaatcgagcgtgagataactgaagctgttgcaaagtctgggaaaggcacagaatgtgagctcaggaaacttcttgaagaggtttctccaaagaactttgagagaatgaacatgttattggcggtaaaagacgaagagattgcaaagttaaaagatgatgtgaagttaatgtcagctcattggaaactcaaaactaaggaacttgaatctcagttggagagacaaagaagagcagatcaagagttgaagaagaaggtactgaaactagagttttgcctgcaagaagctcgtagtcagacaagaaagctacagagggcgggggagagacgagacaaggcaatcaaagagctaagtgatcagattactggaaaacagttgaatgaatcggtttcaggggagaaacaaaacttctgggatacttcagggttcaagatcgttgtgtcaatgtcgatgttgatattagttattatctccaaaagatgagttcttttgtcttgaactctctttctttttgttggtgtgtaaatgcagtagttgcagatagtagtcagataatggtgcatattattactccttgaggtttagcgaagagaaatcttgcttccctttgttaagttataagtttgttcatgtgtatttgaatcatttctcaaaaagaaaatgggaaaaatgtcattcaaataatcagtttaccattttcgttggttttaaacataaattttggacctggtgatttaaatcctc

SEQ ID NO: 42473 - protein, 161 aa, Arabidopsis thaliana
  peptide (1)..(161): Ceres Seq. ID no. 12337047
  misc_feature (1)..(145): Pfam Name: Myosin tail Pfam Description: Myosin tail
  misc_feature (1)..(136): Homolog of NCBI NO: 1335313 NR Description: translated region (partial) [Homo sapiens]
  misc_feature (1)..(136): Homolog of NCBI NO: 29464 NR Description: embryonic myosin heavy chain (1085 AA) [Homo
  misc_feature (1)..(161): Homolog of NCBI NO: 34894370 NR Description: unnamed protein product [Oryza sativa (japonica
  misc_feature (58)..(151): Homolog of NCBI NO: 22329441 NR Description: similar to contains similarity to myosin heavy
  misc_feature (1)..(106): Homolog of NCBI NO: 25402551 NR Description: hypothetical protein [imported] - Arabidopsis
  misc_feature (1)..(161): Homolog of NCBI NO: 22329439 NR Description: hypothetical protein; protein id: At1g09470.1
  misc_feature (1)..(161): Homolog of NCBI NO: 4097950 NR Description: plant IF-like protein [Arabidopsis thaliana]
  misc_feature (1)..(161): Homolog of NCBI NO: 18397379 NR Description: expressed protein
  misc_feature (1)..(152): Homolog of NCBI NO: 7485248 NR Description: hypothetical protein A_IG002P16.20 - Arabidopsis
  misc_feature (1)..(161): Homolog of NCBI NO: 18421042 NR Description: putative protein
MRIEREITEAVAKSGKGTECELRKLLEEVSPKNFERMNMLLAVKDEEIAKLKDDVKLMSAHWKLKTKELESQLERQRRADQELKKKVLKLEFCLQEARSQTRKLQRAGERRDKAIKELSDQITGKQLNESVSGEKQNFWDTSGFKIVVSMSMLILVIISKR

SEQ ID NO: 42474 - protein, 145 aa, Arabidopsis thaliana
  peptide (1)..(145): Ceres Seq. ID no. 12337048
  misc_feature (5)..(135): Pfam Name: Myosin tail Pfam Description: Myosin tail
  misc_feature (1)..(139): Homolog of NCBI NO: 4505301 NR Description: myosin, heavy polypeptide 8, skeletal muscle,
  misc_feature (1)..(139): Homolog of NCBI NO: 31144 NR Description: myosin heavy chain (1167 AA) [Homo sapiens]
  misc_feature (1)..(139): Homolog of NCBI NO: 1335313 NR Description: translated region (partial) [Homo sapiens]
  misc_feature (1)..(139): Homolog of NCBI NO: 29464 NR Description: embryonic myosin heavy chain (1085 AA) [Homo
  misc_feature (10)..(140): Homolog of NCBI NO: 25402551 NR Description: hypothetical protein [imported] - Arabidopsis
  misc_feature (10)..(140): Homolog of NCBI NO: 22329439 NR Description: hypothetical protein; protein id: At1g09470.1
  misc_feature (4)..(140): Homolog of NCBI NO: 4097950 NR Description: plant IF-like protein [Arabidopsis thaliana]
  misc_feature (1)..(140): Homolog of NCBI NO: 18397379 NR Description: expressed protein
  misc_feature (1)..(140): Homolog of NCBI NO: 7485248 NR Description: hypothetical protein A_IG002P16.20 - Arabidopsis
  misc_feature (1)..(140): Homolog of NCBI NO: 18421042 NR Description: putative protein
MSDSVKTTVDPLLKDLDGKKESFRRNVVSMAAELKQVRGRLVSQEQFFVKESFCRKEAEKKAKNMEMEICKLQKKLEDRNCELVASTSAAEKFLEEVDDLRSQLALTKDIAETSAASAQSAQLQCSVLTEQLDDKTRSLRNTKTV

SEQ ID NO: 42475 - protein, 125 aa, Arabidopsis thaliana
  peptide (1)..(125): Ceres Seq. ID no. 12337049
  misc_feature (1)..(109): Pfam Name: Myosin tail Pfam Description: Myosin tail
  misc_feature (1)..(100): Homolog of NCBI NO: 1335313 NR Description: translated region (partial) [Homo sapiens]
  misc_feature (1)..(100): Homolog of NCBI NO: 29464 NR Description: embryonic myosin heavy chain (1085 AA) [Homo
  misc_feature (1)..(125): Homolog of NCBI NO: 34894370 NR Description: unnamed protein product [Oryza sativa (japonica
  misc_feature (22)..(115): Homolog of NCBI NO: 22329441 NR Description: similar to contains similarity to myosin heavy
  misc_feature (1)..(70): Homolog of NCBI NO: 25402551 NR Description: hypothetical protein [imported] - Arabidopsis
  misc_feature (1)..(125): Homolog of NCBI NO: 22329439 NR Description: hypothetical protein; protein id: At1g09470.1
  misc_feature (1)..(125): Homolog of NCBI NO: 4097950 NR Description: plant IF-like protein [Arabidopsis thaliana]
  misc_feature (1)..(125): Homolog of NCBI NO: 18397379 NR Description: expressed protein
  misc_feature (1)..(116): Homolog of NCBI NO: 7485248 NR Description: hypothetical protein A_IG002P16.20 - Arabidopsis
  misc_feature (1)..(125): Homolog of NCBI NO: 18421042 NR Description: putative protein
MNMLLAVKDEEIAKLKDDVKLMSAHWKLKTKELESQLERQRRADQELKKKVLKLEFCLQEARSQTRKLQRAGERRDKAIKELSDQITGKQLNESVSGEKQNFWDTSGFKIVVSMSMLILVIISKR

SEQ ID NO: 42476 - DNA, 1263 bp, Arabidopsis thaliana; identical to SEQ ID NO: 29293
  misc_feature (1)..(1263): Ceres Seq. ID no. 12324797
  misc_feature: MA Experiment ID: 108461 Result: Down-regulated in Transcription
  misc_feature: MA Experiment 108461 PARAMETER Experiment Name: At_Germinating_Seeds_cDNA_P Parameter: Age (day) Value: 1 vs. 0
  misc_feature: MA Experiment 108461 PARAMETER Experiment Name: At_Germinating_Seeds_cDNA_P Parameter: Tissue Value: Germinating Seeds
  misc_feature: MA Experiment ID: 108462 Result: Down-regulated in Transcription
  misc_feature: MA Experiment 108462 PARAMETER Experiment Name: At_Germinating_Seeds_cDNA_P Parameter: Age (day) Value: 2 vs. 0
  misc_feature: MA Experiment 108462 PARAMETER Experiment Name: At_Germinating_Seeds_cDNA_P Parameter: Tissue Value: Germinating Seeds
  misc_feature: MA Experiment ID: 108594 Result: Down-regulated in Transcription
  misc_feature: MA Experiment 108594 PARAMETER Experiment Name: At_Ler-rhl_Root_cDNA_P Parameter: Plant Line Value: null
  misc_feature: MA Experiment ID: 20000117 Result: Down-regulated in Transcription
  misc_feature: MA Experiment 20000117 PARAMETER Experiment Name: At_100uM_ABA_Mutants_cDNA_P Parameter: Plant Line Value: Columbia
  misc_feature: MA Experiment 20000117 PARAMETER Experiment Name: At_100uM_ABA_Mutants_cDNA_P Parameter: Timepoint (hr) Value: 6
  misc_feature: MA Experiment 20000117 PARAMETER Experiment Name: At_100uM_ABA_Mutants_cDNA_P Parameter: Tissue Value: Aerial
  misc_feature: MA Experiment 20000117 PARAMETER Experiment Name: At_100uM_ABA_Mutants_cDNA_P Parameter: Treatment Value: 100uM ABA vs. No Treatment
  misc_feature: MA Experiment ID: 20000179 Result: Down-regulated in Transcription
  misc_feature: MA Experiment 20000179 PARAMETER Experiment Name: At_Germinating_Seeds_P Parameter: Age (hr) Value: 6 vs. 0
  misc_feature: MA Experiment 20000179 PARAMETER Experiment Name: At_Germinating_Seeds_P Parameter: Tissue Value: Germinating Seeds
  misc_feature: MA Experiment ID: 20000180 Result: Down-regulated in Transcription
  misc_feature: MA Experiment 20000180 PARAMETER Experiment Name: At_Germinating_Seeds_P Parameter: Age (hr) Value: 24 vs. 0
  misc_feature: MA Experiment 20000180 PARAMETER Experiment Name: At_Germinating_Seeds_P Parameter: Tissue Value: Germinating Seeds
  misc_feature: MA Experiment ID: 20000227 Result: Down-regulated in Transcription
  misc_feature: MA Experiment 20000227 PARAMETER Experiment Name: At_Root-Tips-vs-Tops_P Parameter: Tissue Value: Root Tips vs. Root Tops
  misc_feature: MA Experiment ID: 20000234 Result: Down-regulated in Transcription
  misc_feature: MA Experiment 20000234 PARAMETER Experiment Name: At_Siliques_P Parameter: Age (day) Value: 21
  misc_feature: MA Experiment 20000234 PARAMETER Experiment Name: At_Siliques_P Parameter: Organism Value: A. thaliana
  misc_feature: MA Experiment 20000234 PARAMETER Experiment Name: At_Siliques_P Parameter: Plant Line Value: WS
  misc_feature: MA Experiment 20000234 PARAMETER Experiment Name: At_Siliques_P Parameter: Tissue Value: Less Than 5mm Siliques vs. Whole Plant
  misc_feature: MA Experiment ID: 20000264 Result: Down-regulated in Transcription
  misc_feature: MA Experiment 20000264 PARAMETER Experiment Name: At_Open_Flower_P Parameter: Age (day) Value: 21
  misc_feature: MA Experiment 20000264 PARAMETER Experiment Name: At_Open_Flower_P Parameter: Plant Line Value: WS
  misc_feature: MA Experiment 20000264 PARAMETER Experiment Name: At_Open_Flower_P Parameter: Tissue Value: Open Flower vs. Whole Plant
  misc_feature: MA Experiment ID: 20000265 Result: Down-regulated in Transcription
  misc_feature: MA Experiment 20000265 PARAMETER Experiment Name: At_Open_Flower_P Parameter: Age (day) Value: 21
  misc_feature: MA Experiment 20000265 PARAMETER Experiment Name: At_Open_Flower_P Parameter: Plant Line Value: WS
  misc_feature: MA Experiment 20000265 PARAMETER Experiment Name: At_Open_Flower_P Parameter: Tissue Value: Closed Flower vs. Whole Plant
  misc_feature: MA Experiment ID: 20000286 Result: Down-regulated in Transcription
  misc_feature: MA Experiment 20000286 PARAMETER Experiment Name: At_Open_Flower_P Parameter: Age (day) Value: 21
  misc_feature: MA Experiment 20000286 PARAMETER Experiment Name: At_Open_Flower_P Parameter: Plant Line Value: WS
  misc_feature: MA Experiment 20000286 PARAMETER Experiment Name: At_Open_Flower_P Parameter: Tissue Value: Half Open vs. Whole Plant
  misc_feature: MA Experiment ID: 20000438 Result: Down-regulated in Transcription
  misc_feature: MA Experiment 20000438 PARAMETER Experiment Name: At_Shoots__P Parameter: Age (day) Value: 14
  misc_feature: MA Experiment 20000438 PARAMETER Experiment Name: At_Shoots__P Parameter: Tissue Value: Shoots vs. Whole Plant
  misc_feature: MA Experiment ID: 20000794 Result: Down-regulated in Transcription
  misc_feature: MA Experiment 20000794 PARAMETER Experiment Name: At_Petals_P Parameter: Age (day) Value: 23-25 days
  misc_feature: MA Experiment 20000794 PARAMETER Experiment Name: At_Petals_P Parameter: Plant Line Value: WS
  misc_feature: MA Experiment 20000794 PARAMETER Experiment Name: At_Petals_P Parameter: Tissue Value: Petals vs. Whole plant

SEQ ID NO: 42477 - protein, 246 aa, Arabidopsis thaliana; identical to SEQ ID NO: 29294
  peptide (1)..(246): Ceres Seq. ID no. 12324798
  misc_feature (15)..(234): Pfam Name: AUX/IAA family Pfam Description: AUX/IAA family
  misc_feature (15)..(234): Pfam Name: AUX/IAA family Pfam Description: AUX/IAA family
  misc_feature (56)..(243): Homolog of NCBI NO: 21594025 NR Description: auxin regulated protein IAA18, putative
  misc_feature (11)..(230): Homolog of NCBI NO: 15219646 NR Description: putative IAA1 protein
  misc_feature (12)..(231): Homolog of NCBI NO: 20466408 NR Description: early auxin-inducible protein 11 [Arabidopsis
  misc_feature (12)..(231): Homolog of NCBI NO: 15235385 NR Description: early auxin-inducible protein 11 (IAA11)
  misc_feature (53)..(230): Homolog of NCBI NO: 20269057 NR Description: aux/IAA protein [Populus tremula x Populus
  misc_feature (56)..(243): Homolog of NCBI NO: 21594025 NR Description: auxin regulated protein IAA18, putative
  misc_feature (12)..(231): Homolog of NCBI NO: 20466408 NR Description: early auxin-inducible protein 11 [Arabidopsis
  misc_feature (53)..(230): Homolog of NCBI NO: 20269057 NR Description: aux/IAA protein [Populus tremula x Populus
  misc_feature (1)..(246): Homolog of NCBI NO: 15225833 NR Description: auxin regulated protein (IAA13)
  misc_feature (1)..(246): Homolog of NCBI NO: 30685642 NR Description: auxin-responsive protein IAA13 (Indoleacetic
  misc_feature (2)..(246): Homolog of NCBI NO: 21593621 NR Description: putative auxin-induced protein, IAA12
  misc_feature (2)..(246): Homolog of NCBI NO: 15219761 NR Description: putative auxin-induced protein, IAA12
  misc_feature (2)..(164): Homolog of NCBI NO: 30678907 NR Description: auxin-responsive protein IAA12 (Indoleacetic
  misc_feature (12)..(231): Homolog of NCBI NO: 15235385 NR Description: early auxin-inducible protein 11 (IAA11)
  misc_feature (11)..(230): Homolog of NCBI NO: 15219646 NR Description: putative IAA1 protein
  misc_feature (2)..(164): Homolog of NCBI NO: 30678907 NR Description: auxin-responsive protein IAA12 (Indoleacetic
  misc_feature (2)..(246): Homolog of NCBI NO: 15219761 NR Description: putative auxin-induced protein, IAA12
  misc_feature (2)..(246): Homolog of NCBI NO: 21593621 NR Description: putative auxin-induced protein, IAA12
  misc_feature (1)..(246): Homolog of NCBI NO: 30685642 NR Description: auxin-responsive protein IAA13 (Indoleacetic
  misc_feature (1)..(246): Homolog of NCBI NO: 15225833 NR Description: auxin regulated protein (IAA13)

SEQ ID NO: 42478 - protein, 240 aa, Arabidopsis thaliana; identical to SEQ ID NO: 29295
  peptide (1)..(240): Ceres Seq. ID no. 12324799
  misc_feature (9)..(228): Pfam Name: AUX/IAA family Pfam Description: AUX/IAA family
  misc_feature (9)..(228): Pfam Name: AUX/IAA family Pfam Description: AUX/IAA family
  misc_feature (50)..(237): Homolog of NCBI NO: 21594025 NR Description: auxin regulated protein IAA18, putative
  misc_feature (5)..(224): Homolog of NCBI NO: 15219646 NR Description: putative IAA1 protein
  misc_feature (6)..(225): Homolog of NCBI NO: 20466408 NR Description: early auxin-inducible protein 11 [Arabidopsis
  misc_feature (6)..(225): Homolog of NCBI NO: 15235385 NR Description: early auxin-inducible protein 11 (IAA11)
  misc_feature (47)..(224): Homolog of NCBI NO: 20269057 NR Description: aux/IAA protein [Populus tremula x Populus
  misc_feature (50)..(237): Homolog of NCBI NO: 21594025 NR Description: auxin regulated protein IAA18, putative
  misc_feature (6)..(225): Homolog of NCBI NO: 20466408 NR Description: early auxin-inducible protein 11 [Arabidopsis
  misc_feature (47)..(224): Homolog of NCBI NO: 20269057 NR Description: aux/IAA protein [Populus tremula x Populus
  misc_feature (1)..(240): Homolog of NCBI NO: 15225833 NR Description: auxin regulated protein (IAA13)
  misc_feature (1)..(240): Homolog of NCBI NO: 30685642 NR Description: auxin-responsive protein IAA13 (Indoleacetic
  misc_feature (1)..(240): Homolog of NCBI NO: 21593621 NR Description: putative auxin-induced protein, IAA12
  misc_feature (1)..(240): Homolog of NCBI NO: 15219761 NR Description: putative auxin-induced protein, IAA12
  misc_feature (1)..(158): Homolog of NCBI NO: 30678907 NR Description: auxin-responsive protein IAA12 (Indoleacetic
  misc_feature (6)..(225): Homolog of NCBI NO: 15235385 NR Description: early auxin-inducible protein 11 (IAA11)
  misc_feature (5)..(224): Homolog of NCBI NO: 15219646 NR Description: putative IAA1 protein
  misc_feature (1)..(158): Homolog of NCBI NO: 30678907 NR Description: auxin-responsive protein IAA12 (Indoleacetic
  misc_feature (1)..(240): Homolog of NCBI NO: 15219761 NR Description: putative auxin-induced protein, IAA12
  misc_feature (1)..(240): Homolog of NCBI NO: 21593621 NR Description: putative auxin-induced protein, IAA12
  misc_feature (1)..(240): Homolog of NCBI NO: 30685642 NR Description: auxin-responsive protein IAA13 (Indoleacetic
  misc_feature (1)..(240): Homolog of NCBI NO: 15225833 NR Description: auxin regulated protein (IAA13)

SEQ ID NO: 42479 - protein, 160 aa, Arabidopsis thaliana; identical to SEQ ID NO: 29296
  peptide (1)..(160): Ceres Seq. ID no. 12324800
  misc_feature (1)..(148): Pfam Name: AUX/IAA family Pfam Description: AUX/IAA family
  misc_feature (1)..(148): Pfam Name: AUX/IAA family Pfam Description: AUX/IAA family
  misc_feature (1)..(157): Homolog of NCBI NO: 21594025 NR Description: auxin regulated protein IAA18, putative
  misc_feature (1)..(144): Homolog of NCBI NO: 15219646 NR Description: putative IAA1 protein
  misc_feature (1)..(145): Homolog of NCBI NO: 20466408 NR Description: early auxin-inducible protein 11 [Arabidopsis
  misc_feature (1)..(145): Homolog of NCBI NO: 15235385 NR Description: early auxin-inducible protein 11 (IAA11)
  misc_feature (1)..(144): Homolog of NCBI NO: 20269057 NR Description: aux/IAA protein [Populus tremula x Populus
  misc_feature (1)..(157): Homolog of NCBI NO: 21594025 NR Description: auxin regulated protein IAA18, putative
  misc_feature (1)..(145): Homolog of NCBI NO: 20466408 NR Description: early auxin-inducible protein 11 [Arabidopsis
  misc_feature (1)..(144): Homolog of NCBI NO: 20269057 NR Description: aux/IAA protein [Populus tremula x Populus
  misc_feature (1)..(160): Homolog of NCBI NO: 15225833 NR Description: auxin regulated protein (IAA13)
  misc_feature (1)..(160): Homolog of NCBI NO: 30685642 NR Description: auxin-responsive protein IAA13 (Indoleacetic
  misc_feature (1)..(160): Homolog of NCBI NO: 21593621 NR Description: putative auxin-induced protein, IAA12
  misc_feature (1)..(160): Homolog of NCBI NO: 15219761 NR Description: putative auxin-induced protein, IAA12
  misc_feature (1)..(78): Homolog of NCBI NO: 30678907 NR Description: auxin-responsive protein IAA12 (Indoleacetic
  misc_feature (1)..(145): Homolog of NCBI NO: 15235385 NR Description: early auxin-inducible protein 11 (IAA11)
  misc_feature (1)..(144): Homolog of NCBI NO: 15219646 NR Description: putative IAA1 protein
  misc_feature (1)..(78): Homolog of NCBI NO: 30678907 NR Description: auxin-responsive protein IAA12 (Indoleacetic
  misc_feature (1)..(160): Homolog of NCBI NO: 15219761 NR Description: putative auxin-induced protein, IAA12
  misc_feature (1)..(160): Homolog of NCBI NO: 21593621 NR Description: putative auxin-induced protein, IAA12
  misc_feature (1)..(160): Homolog of NCBI NO: 30685642 NR Description: auxin-responsive protein IAA13 (Indoleacetic
  misc_feature (1)..(160): Homolog of NCBI NO: 15225833 NR Description: auxin regulated protein (IAA13)

SEQ ID NO: 42480 - DNA, 1329 bp, Arabidopsis thaliana
  misc_feature (1)..(1329): Ceres Seq. ID no. 12377456
  misc_feature: MA Experiment ID: 20000315 Result: Down-regulated in Transcription
  misc_feature: MA Experiment 20000315 PARAMETER Experiment Name: At_14day_Shoots-Roots_Sub_P Parameter: Age (day) Value: 14
  misc_feature: MA Experiment 20000315 PARAMETER Experiment Name: At_14day_Shoots-Roots_Sub_P Parameter: Organism Value: A. thaliana
  misc_feature: MA Experiment 20000315 PARAMETER Experiment Name: At_14day_Shoots-Roots_Sub_P Parameter: Plant Line Value: WS
  misc_feature: MA Experiment 20000315 PARAMETER Experiment Name: At_14day_Shoots-Roots_Sub_P Parameter: Tissue Value: Shoots vs. Whole Plant
  misc_feature: MA Experiment ID: 20000327 Result: Down-regulated in Transcription
  misc_feature: MA Experiment 20000327 PARAMETER Experiment Name: At_42deg_Heat_Sub_P Parameter: Age (day) Value: 14
  misc_feature: MA Experiment 20000327 PARAMETER Experiment Name: At_42deg_Heat_Sub_P Parameter: Organism Value: A. thaliana
  misc_feature: MA Experiment 20000327 PARAMETER Experiment Name: At_42deg_Heat_Sub_P Parameter: Plant Line Value: WS
  misc_feature: MA Experiment 20000327 PARAMETER Experiment Name: At_42deg_Heat_Sub_P Parameter: Temperature (deg C) Value: 42 vs. 22
  misc_feature: MA Experiment 20000327 PARAMETER Experiment Name: At_42deg_Heat_Sub_P Parameter: Timepoint (hr) Value: 1
  misc_feature: MA Experiment 20000327 PARAMETER Experiment Name: At_42deg_Heat_Sub_P Parameter: Tissue Value: Aerial
  misc_feature: MA Experiment ID: 20000328 Result: Down-regulated in Transcription
  misc_feature: MA Experiment 20000328 PARAMETER Experiment Name: At_42deg_Heat_Sub_P Parameter: Age (day) Value: 14
  misc_feature: MA Experiment 20000328 PARAMETER Experiment Name: At_42deg_Heat_Sub_P Parameter: Organism Value: A. thaliana
  misc_feature: MA Experiment 20000328 PARAMETER Experiment Name: At_42deg_Heat_Sub_P Parameter: Plant Line Value: WS
  misc_feature: MA Experiment 20000328 PARAMETER Experiment Name: At_42deg_Heat_Sub_P Parameter: Temperature (deg C) Value: 42 vs. 22
  misc_feature: MA Experiment 20000328 PARAMETER Experiment Name: At_42deg_Heat_Sub_P Parameter: Timepoint (hr) Value: 6
  misc_feature: MA Experiment 20000328 PARAMETER Experiment Name: At_42deg_Heat_Sub_P Parameter: Tissue Value: Aerial
  misc_feature: MA Experiment ID: 20000348 Result: Up-regulated in Transcription
  misc_feature: MA Experiment 20000348 PARAMETER Experiment Name: At_100uM_ABA_Sub_P Parameter: Age (day) Value: 14
  misc_feature: MA Experiment 20000348 PARAMETER Experiment Name: At_100uM_ABA_Sub_P Parameter: Organism Value: A. thaliana
  misc_feature: MA Experiment 20000348 PARAMETER Experiment Name: At_100uM_ABA_Sub_P Parameter: Plant Line Value: WS
  misc_feature: MA Experiment 20000348 PARAMETER Experiment Name: At_100uM_ABA_Sub_P Parameter: Timepoint (hr) Value: 1
  misc_feature: MA Experiment 20000348 PARAMETER Experiment Name: At_100uM_ABA_Sub_P Parameter: Tissue Value: Aerial
  misc_feature: MA Experiment 20000348 PARAMETER Experiment Name: At_100uM_ABA_Sub_P Parameter: Treatment Value: 100uM ABA vs. No Treatment
  misc_feature: MA Experiment ID: 20000349 Result: Up-regulated in Transcription
  misc_feature: MA Experiment 20000349 PARAMETER Experiment Name: At_100uM_ABA_Sub_P Parameter: Age (day) Value: 14
  misc_feature: MA Experiment 20000349 PARAMETER Experiment Name: At_100uM_ABA_Sub_P Parameter: Organism Value: A. thaliana
  misc_feature: MA Experiment 20000349 PARAMETER Experiment Name: At_100uM_ABA_Sub_P Parameter: Plant Line Value: WS
  misc_feature: MA Experiment 20000349 PARAMETER Experiment Name: At_100uM_ABA_Sub_P Parameter: Timepoint (hr) Value: 6
  misc_feature: MA Experiment 20000349 PARAMETER Experiment Name: At_100uM_ABA_Sub_P Parameter: Tissue Value: Aerial
  misc_feature: MA Experiment 20000349 PARAMETER Experiment Name: At_100uM_ABA_Sub_P Parameter: Treatment Value: 100uM ABA vs. No Treatment
  misc_feature: MA Experiment ID: 20000355 Result: Up-regulated in Transcription
  misc_feature: MA Experiment 20000355 PARAMETER Experiment Name: At_Siliques_Sub_P Parameter: Age (day) Value: 21
  misc_feature: MA Experiment 20000355 PARAMETER Experiment Name: At_Siliques_Sub_P Parameter: Organism Value: A. thaliana
  misc_feature: MA Experiment 20000355 PARAMETER Experiment Name: At_Siliques_Sub_P Parameter: Plant Line Value: WS
  misc_feature: MA Experiment 20000355 PARAMETER Experiment Name: At_Siliques_Sub_P Parameter: Tissue Value: Less Than 5mm Siliques vs. Whole Plant
  misc_feature: MA Experiment ID: 20001807 Result: Down-regulated in Transcription
  misc_feature: MA Experiment 20001807 PARAMETER Experiment Name: At_50mM_NH4NO3_L-to-H_Sub_P Parameter: Timepoint (hr) Value: 6
  misc_feature: MA Experiment 20001807 PARAMETER Experiment Name: At_50mM_NH4NO3_L-to-H_Sub_P Parameter: Tissue Value: Leaf
  misc_feature: MA Experiment 20001807 PARAMETER Experiment Name: At_50mM_NH4NO3_L-to-H_Sub_P Parameter: Treatment Value: 50mM NH4NO3 vs 100mM Mannitol
atggagccaaagtttcatgcttttatgtttccatggtttgcttttggtcatatgattccatttctacatcttgcaaacaaactagctgaaaaaggtcaccgagttactttcttgctacctaagaaagcacaaaaacagttggaacatcacaacttgttcccagacagtattgtctttcaccctctcacagttcctcctgtcaatggcctccctgctggtgccgagacaacctcggatatccccatctcgttggacaacctcttgtccaaagccttggatctcactcgcgatcaggttgaagctgcggttcgtgctttgagacctgacttgatctttttcgattttgctcaatggattccagatatggctaaagaacatatgatcaagagtgtgagttacatcattgtatctgcgacaacaatagctcatacacatgtccctggaggtaaattaggtgttcgcccaccgggttatccgtcatcaaaggtgatgttccgtgaaaacgatgttcatgccttagcaaccttatcgatattttacaagagactgtatcatcagatcactacaggtcttaagagctgtgatgtcattgcattgaggacttgcaaagaagtcgaaggtatgttctgcgactttatatcgcgtcaataccataagaaggttctcttgactggtccaatgttccctgagccagacacaagtaaaccactagaagaacgctggaatcattttctaagcgggttcgcgccgaagtcagtagtgttttgttcacctggcagccaagtaattcttgagaaagatcaattccaagaactctgtttagggatggagctaacaggtttaccatttcttttagcggtaaagccaccaagaggatcatcaacggtccaagaagggttaccagaagggttcgaggagcgggtgaaagatcgtggtgttgtttggggaggatgggtgcaacaacctttgatattggctcatccatcaataggttgctttgtgaaccattgtggtcccggaacaatatgggagtctttggtgagtgattgccaaatggttttgattccatttttaagtgatcaagttctcttcacaagattgatgaccgaggaattcgaggtctctgtagaagtgccgagggaaaaaacaggatggttttcaaaggagagcttgagcaatgctatcaaatctgtgatggataaagacagtgacattgggaagttagtgaggagtaaccacaccaaattgaaggagattttagttagtcctggattattgactggttacgttgatcactttgtagagggattgcaagagaatttgatttga

SEQ ID NO: 42481 - protein, 442 aa, Arabidopsis thaliana
  peptide (1)..(442): Ceres Seq. ID no. 12377457
  misc_feature (1)..(439): Homolog of NCBI NO: 15239525 NR Description: flavonol 3-O-glucosyltransferase-like protein
  misc_feature (4)..(439): Homolog of NCBI NO: 15234195 NR Description: UDP rhamnose-anthocyanidin-3-glucoside
  misc_feature (4)..(439): Homolog of NCBI NO: 15234196 NR Description: UDP rhamnose--anthocyanidin-3-glucoside
  misc_feature (1)..(442): Homolog of NCBI NO: 15217773 NR Description: rhamnosyltransferase, putative; protein id:
  misc_feature (1)..(442): Homolog of NCBI NO: 15217796 NR Description: anthocyanidin-3-glucoside rhamnosyltransferase,
  misc_feature (1)..(442): Homolog of NCBI NO: 15239523 NR Description: flavonol 3-O-glucosyltransferase-like protein
  misc_feature (1)..(442): Homolog of NCBI NO: 15227766 NR Description: putative flavonol 3-O-glucosyltransferase
  misc_feature (1)..(206): Homolog of NCBI NO: 28393204 NR Description: unknown protein [Arabidopsis thaliana]
  misc_feature (232)..(442): Homolog of NCBI NO: 28393204 NR Description: unknown protein [Arabidopsis thaliana]
  misc_feature (1)..(442): Homolog of NCBI NO: 15233903 NR Description: putative protein; protein id: At4g09500.1
MEPKFHAFMFPWFAFGHMIPFLHLANKLAEKGHRVTFLLPKKAQKQLEHHNLFPDSIVFHPLTVPPVNGLPAGAETTSDIPISLDNLLSKALDLTRDQVEAAVRALRPDLIFFDFAQWIPDMAKEHMIKSVSYIIVSATTIAHTHVPGGKLGVRPPGYPSSKVMFRENDVHALATLSIFYKRLYHQITTGLKSCDVIALRTCKEVEGMFCDFISRQYHKKVLLTGPMFPEPDTSKPLEERWNHFLSGFAPKSVVFCSPGSQVILEKDQFQELCLGMELTGLPFLLAVKPPRGSSTVQEGLPEGFEERVKDRGVVWGGWVQQPLILAHPSIGCFVNHCGPGTIWESLVSDCQMVLIPFLSDQVLFTRLMTEEFEVSVEVPREKTGWFSKESLSNAIKSVMDKDSDIGKLVRSNHTKLKEILVSPGLLTGYVDHFVEGLQENLI

SEQ ID NO: 42482 - protein, 434 aa, Arabidopsis thaliana
  peptide (1)..(434): Ceres Seq. ID no. 12377458
  misc_feature (1)..(431): Homolog of NCBI NO: 15239525 NR Description: flavonol 3-O-glucosyltransferase-like protein
  misc_feature (1)..(431): Homolog of NCBI NO: 15234195 NR Description: UDP rhamnose-anthocyanidin-3-glucoside
  misc_feature (1)..(431): Homolog of NCBI NO: 15234196 NR Description: UDP rhamnose--anthocyanidin-3-glucoside
  misc_feature (1)..(434): Homolog of NCBI NO: 15217773 NR Description: rhamnosyltransferase, putative; protein id:
  misc_feature (1)..(434): Homolog of NCBI NO: 15217796 NR Description: anthocyanidin-3-glucoside rhamnosyltransferase,
  misc_feature (1)..(434): Homolog of NCBI NO: 15239523 NR Description: flavonol 3-O-glucosyltransferase-like protein
  misc_feature (1)..(434): Homolog of NCBI NO: 15227766 NR Description: putative flavonol 3-O-glucosyltransferase
  misc_feature (1)..(198): Homolog of NCBI NO: 28393204 NR Description: unknown protein [Arabidopsis thaliana]
  misc_feature (224)..(434): Homolog of NCBI NO: 28393204 NR Description: unknown protein [Arabidopsis thaliana]
  misc_feature (1)..(434): Homolog of NCBI NO: 15233903 NR Description: putative protein; protein id: At4g09500.1
MFPWFAFGHMIPFLHLANKLAEKGHRVTFLLPKKAQKQLEHHNLFPDSIVFHPLTVPPVNGLPAGAETTSDIPISLDNLLSKALDLTRDQVEAAVRALRPDLIFFDFAQWIPDMAKEHMIKSVSYIIVSATTIAHTHVPGGKLGVRPPGYPSSKVMFRENDVHALATLSIFYKRLYHQITTGLKSCDVIALRTCKEVEGMFCDFISRQYHKKVLLTGPMFPEPDTSKPLEERWNHFLSGFAPKSVVFCSPGSQVILEKDQFQELCLGMELTGLPFLLAVKPPRGSSTVQEGLPEGFEERVKDRGVVWGGWVQQPLILAHPSIGCFVNHCGPGTIWESLVSDCQMVLIPFLSDQVLFTRLMTEEFEVSVEVPREKTGWFSKESLSNAIKSVMDKDSDIGKLVRSNHTKLKEILVSPGLLTGYVDHFVEGLQENLI

SEQ ID NO: 42483 - protein, 425 aa, Arabidopsis thaliana
  peptide (1)..(425): Ceres Seq. ID no. 12377459
  misc_feature (1)..(422): Homolog of NCBI NO: 15239525 NR Description: flavonol 3-O-glucosyltransferase-like protein
  misc_feature (1)..(422): Homolog of NCBI NO: 15234195 NR Description: UDP rhamnose-anthocyanidin-3-glucoside
  misc_feature (1)..(422): Homolog of NCBI NO: 15234196 NR Description: UDP rhamnose--anthocyanidin-3-glucoside
  misc_feature (1)..(425): Homolog of NCBI NO: 15217773 NR Description: rhamnosyltransferase, putative; protein id:
  misc_feature (1)..(425): Homolog of NCBI NO: 15217796 NR Description: anthocyanidin-3-glucoside rhamnosyltransferase,
  misc_feature (1)..(425): Homolog of NCBI NO: 15239523 NR Description: flavonol 3-O-glucosyltransferase-like protein
  misc_feature (1)..(425): Homolog of NCBI NO: 15227766 NR Description: putative flavonol 3-O-glucosyltransferase
  misc_feature (1)..(189): Homolog of NCBI NO: 28393204 NR Description: unknown protein [Arabidopsis thaliana]
  misc_feature (215)..(425): Homolog of NCBI NO: 28393204 NR Description: unknown protein [Arabidopsis thaliana]
  misc_feature (1)..(425): Homolog of NCBI NO: 15233903 NR Description: putative protein; protein id: At4g09500.1
MIPFLHLANKLAEKGHRVTFLLPKKAQKQLEHHNLFPDSIVFHPLTVPPVNGLPAGAETTSDIPISLDNLLSKALDLTRDQVEAAVRALRPDLIFFDFAQWIPDMAKEHMIKSVSYIIVSATTIAHTHVPGGKLGVRPPGYPSSKVMFRENDVHALATLSIFYKRLYHQITTGLKSCDVIALRTCKEVEGMFCDFISRQYHKKVLLTGPMFPEPDTSKPLEERWNHFLSGFAPKSVVFCSPGSQVILEKDQFQELCLGMELTGLPFLLAVKPPRGSSTVQEGLPEGFEERVKDRGVVWGGWVQQPLILAHPSIGCFVNHCGPGTIWESLVSDCQMVLIPFLSDQVLFTRLMTEEFEVSVEVPREKTGWFSKESLSNAIKSVMDKDSDIGKLVRSNHTKLKEILVSPGLLTGYVDHFVEGLQENLI

SEQ ID NO: 42484 - DNA, 1611 bp, Arabidopsis thaliana
  misc_feature (1)..(1611): Ceres Seq. ID no. 12385024
  misc_feature: MA Experiment ID: 108434 Result: Down-regulated in Transcription
  misc_feature: MA Experiment 108434 PARAMETER Experiment Name: At_Root_Tips_cDNA_P Parameter: Tissue Value: Root Tips
  misc_feature: MA Experiment ID: 108579 Result: Up-regulated in Transcription
  misc_feature: MA Experiment 108579 PARAMETER Experiment Name: At_4deg_Cold_cDNA_P Parameter: Temperature (deg C) Value: 4 vs. 22
  misc_feature: MA Experiment 108579 PARAMETER Experiment Name: At_4deg_Cold_cDNA_P Parameter: Timepoint (hr) Value: 6
  misc_feature: MA Experiment 108579 PARAMETER Experiment Name: At_4deg_Cold_cDNA_P Parameter: Tissue Value: Aerial
  misc_feature: MA Experiment ID: 108595 Result: Down-regulated in Transcription
  misc_feature: MA Experiment 108595 PARAMETER Experiment Name: At_Ler-pi_Ovule_cDNA_P Parameter: Plant Line Value: null
  misc_feature: MA Experiment ID: 20000185 Result: Up-regulated in Transcription
  misc_feature: MA Experiment 20000185 PARAMETER Experiment Name: At_Roots__P Parameter: Age (day) Value: 7 vs. 21
  misc_feature: MA Experiment 20000185 PARAMETER Experiment Name: At_Roots__P Parameter: Organism Value: A. thaliana
  misc_feature: MA Experiment 20000185 PARAMETER Experiment Name: At_Roots__P Parameter: Tissue Value: Roots vs. Whole Plant
  misc_feature: MA Experiment ID: 20000224 Result: Up-regulated in Transcription
  misc_feature: MA Experiment ID: 20000439 Result: Up-regulated in Transcription
  misc_feature: MA Experiment 20000439 PARAMETER Experiment Name: At_Roots__P Parameter: Age (day) Value: 14 vs. 21
  misc_feature: MA Experiment 20000439 PARAMETER Experiment Name: At_Roots__P Parameter: Organism Value: A. thaliana
  misc_feature: MA Experiment 20000439 PARAMETER Experiment Name: At_Roots__P Parameter: Tissue Value: Roots vs. Whole Plant
  misc_feature: MA Experiment ID: 20000451 Result: Up-regulated in Transcription
  misc_feature: MA Experiment 20000451 PARAMETER Experiment Name: At_CS6879_Shoots-Roots_P Parameter: Age (day) Value: 14
  misc_feature: MA Experiment 20000451 PARAMETER Experiment Name: At_CS6879_Shoots-Roots_P Parameter: Organism Value: A. thaliana
  misc_feature: MA Experiment 20000451 PARAMETER Experiment Name: At_CS6879_Shoots-Roots_P Parameter: Plant Line Value: CS6879 vs. WS
  misc_feature: MA Experiment 20000451 PARAMETER Experiment Name: At_CS6879_Shoots-Roots_P Parameter: Tissue Value: Roots
  misc_feature: MA Experiment ID: 20001451 Result: Down-regulated in Transcription
  misc_feature: MA Experiment 20001451 PARAMETER Experiment Name: At_Far-red-induction_P Parameter: Age (day) Value: 7
  misc_feature: MA Experiment 20001451 PARAMETER Experiment Name: At_Far-red-induction_P Parameter: Light Value: Far-red vs. White
  misc_feature: MA Experiment 20001451 PARAMETER Experiment Name: At_Far-red-induction_P Parameter: Organism Value: A. thaliana
  misc_feature: MA Experiment 20001451 PARAMETER Experiment Name: At_Far-red-induction_P Parameter: Plant Line Value: Columbia
  misc_feature: MA Experiment 20001451 PARAMETER Experiment Name: At_Far-red-induction_P Parameter: Timepoint (hr) Value: 24
  misc_feature: MA Experiment 20001451 PARAMETER Experiment Name: At_Far-red-induction_P Parameter: Tissue Value: Whole Plant
acaagagccatttgcaattaggcataatatatgtcctaactcaccaaccccctcaaaattgccaccaacttcaaatttctctcctttaaacctttctcaatcatctttcttctgccttggaatcctgatcatggcgtcgtcttctctcacttcgaaatccattctcggatccaccaaactcggttcttcttctcttccctcggagctccgtcgtctctcttctcccgccgttcagatctctctccgtacccaaaccaggaagaacttccagatacaagctactggaagttcatatgggactcattttcgagtttcaacttttggagaatcacatggaggaggagttggttgtatcattgatggttgtcctcctcgtattccacttactgaatctgatttgcaattcgatctcgatagaaggaggcctggtcagagcaggatcacaactcctagaaaagagactgatacttgccggatatcgtctggagtctctgaaggaatgacgacaggaacacctatccatgtgtttgtaccaaacacagatcagagaggacttgattacagtgaaatgtcggttgcctatagaccatcgcatgctgatgcaacttatgacatgaagtatggtgtcagatcagtgcagggtggaggaagatcttcagctagagagaccattggaagagttgctcctggagctttggccaagaaaattttgaagcaatttgcaggaactgagattcttgcctatgtctcgcaagttcaccatgttgtacttccagaagaattggtagaccacgagaatttaacactcgaacagatagaaaataacattgtcagatgccctaatcccgagtatgcggaaaagatgatagctgcgattgatgctgtcaggacaaaagggaactctgttggtggtgttgtgacctgcattgttcggaatgctccacgtgggcttggtacaccggttttcgataaacttgaagcagaactggcaaaagcttgtatgtcgctacctgcaactaagggatttgagtttggaagcggctttgcaggtacctttttgactggtcttgaacacaatgatgagttctataccgatgaaaatggaagaatacgtaccagaaccaaccgatctggtggaattcagggagggatctcaaatggtgaaataataaacatgagagtagccttcaagccaacatcaacaattggaaggaagcaaaatacggtaaccagagacaaggtagaaaccgaaatgattgcgcgtggtcgtcatgatccttgtgttgttccacgagctgtgccaatggtggaagcaatggtggctctagttcttgtggatcaattgatggcgcaatacgcacaatgccatttgtttccaataaatccagagttgcaggaacctctccagatagagcagccgcaaaatgctactgctttgtaagcaaatctcgagaagataaagagtcatagagagtgagagttcgcttttgttgtgtgattattatgctgaataaaaaaatgttaattttgtgcccaccagaaaaacaaagaacatgattttttataagaggatttgcttctatatcattcagctaaatgtgattttaccac

SEQ ID NO: 42485 - protein, 479 aa, Arabidopsis thaliana
  peptide (1)..(479): Ceres Seq. ID no. 12385025
  misc_feature (102)..(452): Pfam Name: Chorismate synthase Pfam Description: Chorismate synthase
  misc_feature (95)..(455): Homolog of NCBI NO: 23126882 NR Description: hypothetical protein [Nostoc punctiforme]
  misc_feature (95)..(456): Homolog of NCBI NO: 23039390 NR Description: hypothetical protein [Trichodesmium erythraeum
  misc_feature (95)..(455): Homolog of NCBI NO: 16330007 NR Description: chorismate synthase [Synechocystis sp. PCC 6803]
  misc_feature (95)..(457): Homolog of NCBI NO: 22298006 NR Description: chorismate synthase [Thermosynechococcus
  misc_feature (44)..(349): Homolog of NCBI NO: 11094811 NR Description: chorismate synthase precursor, putative, 3'
  misc_feature (44)..(476): Homolog of NCBI NO: 2492953 NR Description: Chorismate synthase 2, chloroplast precursor
  misc_feature (46)..(478): Homolog of NCBI NO: 114182 NR Description: Chorismate synthase, chloroplast precursor
  misc_feature (50)..(476): Homolog of NCBI NO: 2492952 NR Description: Chorismate synthase 1, chloroplast precursor
  misc_feature (44)..(479): Homolog of NCBI NO: 12229700 NR Description: Chorismate synthase, chloroplast precursor
  misc_feature (44)..(479): Homolog of NCBI NO: 18402389 NR Description: chorismate synthase, putative
QEPFAIRHNICPNSPTPSKLPPTSNFSPLNLSQSSFFCLGILIMASSSLTSKSILGSTKLGSSSLPSELRRLSSPAVQISLRTQTRKNFQIQATGSSYGTHFRVSTFGESHGGGVGCIIDGCPPRIPLTESDLQFDLDRRRPGQSRITTPRKETDTCRISSGVSEGMTTGTPIHVFVPNTDQRGLDYSEMSVAYRPSHADATYDMKYGVRSVQGGGRSSARETIGRVAPGALAKKILKQFAGTEILAYVSQVHHVVLPEELVDHENLTLEQIENNIVRCPNPEYAEKMIAAIDAVRTKGNSVGGVVTCIVRNAPRGLGTPVFDKLEAELAKACMSLPATKGFEFGSGFAGTFLTGLEHNDEFYTDENGRIRTRTNRSGGIQGGISNGEIINMRVAFKPTSTIGRKQNTVTRDKVETEMIARGRHDPCVVPRAVPMVEAMVALVLVDQLMAQYAQCHLFPINPELQEPLQIEQPQNATAL

SEQ ID NO: 42486 - protein, 436 aa, Arabidopsis thaliana
  peptide (1)..(436): Ceres Seq. ID no. 12385026
  misc_feature (59)..(409): Pfam Name: Chorismate synthase Pfam Description: Chorismate synthase
  misc_feature (52)..(412): Homolog of NCBI NO: 23126882 NR Description: hypothetical protein [Nostoc punctiforme]
  misc_feature (52)..(413): Homolog of NCBI NO: 23039390 NR Description: hypothetical protein [Trichodesmium erythraeum
  misc_feature (52)..(412): Homolog of NCBI NO: 16330007 NR Description: chorismate synthase [Synechocystis sp. PCC 6803]
  misc_feature (52)..(414): Homolog of NCBI NO: 22298006 NR Description: chorismate synthase [Thermosynechococcus
  misc_feature (1)..(306): Homolog of NCBI NO: 11094811 NR Description: chorismate synthase precursor, putative, 3'
  misc_feature (1)..(433): Homolog of NCBI NO: 2492953 NR Description: Chorismate synthase 2, chloroplast precursor
  misc_feature (3)..(435): Homolog of NCBI NO: 114182 NR Description: Chorismate synthase, chloroplast precursor
  misc_feature (7)..(433): Homolog of NCBI NO: 2492952 NR Description: Chorismate synthase 1, chloroplast precursor
  misc_feature (1)..(436): Homolog of NCBI NO: 12229700 NR Description: Chorismate synthase, chloroplast precursor
  misc_feature (1)..(436): Homolog of NCBI NO: 18402389 NR Description: chorismate synthase, putative
MASSSLTSKSILGSTKLGSSSLPSELRRLSSPAVQISLRTQTRKNFQIQATGSSYGTHFRVSTFGESHGGGVGCIIDGCPPRIPLTESDLQFDLDRRRPGQSRITTPRKETDTCRISSGVSEGMTTGTPIHVFVPNTDQRGLDYSEMSVAYRPSHADATYDMKYGVRSVQGGGRSSARETIGRVAPGALAKKILKQFAGTEILAYVSQVHHVVLPEELVDHENLTLEQIENNIVRCPNPEYAEKMIAAIDAVRTKGNSVGGVVTCIVRNAPRGLGTPVFDKLEAELAKACMSLPATKGFEFGSGFAGTFLTGLEHNDEFYTDENGRIRTRTNRSGGIQGGISNGEIINMRVAFKPTSTIGRKQNTVTRDKVETEMIARGRHDPCVVPRAVPMVEAMVALVLVDQLMAQYAQCHLFPINPELQEPLQIEQPQNATAL

SEQ ID NO: 42487 - protein, 313 aa, Arabidopsis thaliana
  peptide (1)..(313): Ceres Seq. ID no. 12385027
  misc_feature (1)..(286): Pfam Name: Chorismate synthase Pfam Description: Chorismate synthase
  misc_feature (1)..(289): Homolog of NCBI NO: 23126882 NR Description: hypothetical protein [Nostoc punctiforme]
  misc_feature (1)..(290): Homolog of NCBI NO: 23039390 NR Description: hypothetical protein [Trichodesmium erythraeum
  misc_feature (1)..(289): Homolog of NCBI NO: 16330007 NR Description: chorismate synthase [Synechocystis sp. PCC 6803]
  misc_feature (1)..(291): Homolog of NCBI NO: 22298006 NR Description: chorismate synthase [Thermosynechococcus
  misc_feature (1)..(183): Homolog of NCBI NO: 11094811 NR Description: chorismate synthase precursor, putative, 3'
  misc_feature (1)..(310): Homolog of NCBI NO: 2492953 NR Description: Chorismate synthase 2, chloroplast precursor
  misc_feature (1)..(312): Homolog of NCBI NO: 114182 NR Description: Chorismate synthase, chloroplast precursor
  misc_feature (1)..(310): Homolog of NCBI NO: 2492952 NR Description: Chorismate synthase 1, chloroplast precursor
  misc_feature (1)..(313): Homolog of NCBI NO: 12229700 NR Description: Chorismate synthase, chloroplast precursor
  misc_feature (1)..(313): Homolog of NCBI NO: 18402389 NR Description: chorismate synthase, putative
MTTGTPIHVFVPNTDQRGLDYSEMSVAYRPSHADATYDMKYGVRSVQGGGRSSARETIGRVAPGALAKKILKQFAGTEILAYVSQVHHVVLPEELVDHENLTLEQIENNIVRCPNPEYAEKMIAAIDAVRTKGNSVGGVVTCIVRNAPRGLGTPVFDKLEAELAKACMSLPATKGFEFGSGFAGTFLTGLEHNDEFYTDENGRIRTRTNRSGGIQGGISNGEIINMRVAFKPTSTIGRKQNTVTRDKVETEMIARGRHDPCVVPRAVPMVEAMVALVLVDQLMAQYAQCHLFPINPELQEPLQIEQPQNATAL

SEQ ID NO: 42488 - DNA, 1596 bp, Arabidopsis thaliana
  misc_feature (1)..(1596): Ceres Seq. ID no. 12331061
  misc_feature: MA Experiment ID: 108434 Result: Up-regulated in Transcription
  misc_feature: MA Experiment 108434 PARAMETER Experiment Name: At_Root_Tips_cDNA_P Parameter: Tissue Value: Root Tips
  misc_feature: MA Experiment ID: 108577 Result: Up-regulated in Transcription
  misc_feature: MA Experiment 108577 PARAMETER Experiment Name: At_42deg_Heat_cDNA_P Parameter: Temperature (deg C) Value: 42 vs. 22
  misc_feature: MA Experiment 108577 PARAMETER Experiment Name: At_42deg_Heat_cDNA_P Parameter: Timepoint (hr) Value: 6
  misc_feature: MA Experiment 108577 PARAMETER Experiment Name: At_42deg_Heat_cDNA_P Parameter: Tissue Value: Aerial
  misc_feature: MA Experiment ID: 108579 Result: Up-regulated in Transcription
  misc_feature: MA Experiment 108579 PARAMETER Experiment Name: At_4deg_Cold_cDNA_P Parameter: Temperature (deg C) Value: 4 vs. 22
  misc_feature: MA Experiment 108579 PARAMETER Experiment Name: At_4deg_Cold_cDNA_P Parameter: Timepoint (hr) Value: 6
  misc_feature: MA Experiment 108579 PARAMETER Experiment Name: At_4deg_Cold_cDNA_P Parameter: Tissue Value: Aerial
  misc_feature: MA Experiment ID: 20000089 Result: Down-regulated in Transcription
  misc_feature: MA Experiment ID: 20000090 Result: Down-regulated in Transcription
  misc_feature: MA Experiment ID: 20000093 Result: Up-regulated in Transcription
  misc_feature: MA Experiment 20000093 PARAMETER Experiment Name: At_42deg_Heat_cDNA_P Parameter: Temperature (deg C) Value: 42 vs. 22
  misc_feature: MA Experiment 20000093 PARAMETER Experiment Name: At_42deg_Heat_cDNA_P Parameter: Timepoint (hr) Value: 0.5
  misc_feature: MA Experiment 20000093 PARAMETER Experiment Name: At_42deg_Heat_cDNA_P Parameter: Tissue Value: Aerial
  misc_feature: MA Experiment ID: 20000144 Result: Up-regulated in Transcription
  misc_feature: MA Experiment 20000144 PARAMETER Experiment Name: At_42deg_Heat_cDNA_P Parameter: Temperature (deg C) Value: 42 vs. 22
  misc_feature: MA Experiment 20000144 PARAMETER Experiment Name: At_42deg_Heat_cDNA_P Parameter: Timepoint (hr) Value: 1
  misc_feature: MA Experiment 20000144 PARAMETER Experiment Name: At_42deg_Heat_cDNA_P Parameter: Tissue Value: Aerial
  misc_feature: MA Experiment ID: 20000171 Result: Up-regulated in Transcription
  misc_feature: MA Experiment 20000171 PARAMETER Experiment Name: At_42deg_Heat_P Parameter: Age (day) Value: 14
  misc_feature: MA Experiment 20000171 PARAMETER Experiment Name: At_42deg_Heat_P Parameter: Organism Value: A. thaliana
  misc_feature: MA Experiment 20000171 PARAMETER Experiment Name: At_42deg_Heat_P Parameter: Plant Line Value: WS
  misc_feature: MA Experiment 20000171 PARAMETER Experiment Name: At_42deg_Heat_P Parameter: Temperature (deg C) Value: 42 vs. 22
  misc_feature: MA Experiment 20000171 PARAMETER Experiment Name: At_42deg_Heat_P Parameter: Timepoint (hr) Value: 1
  misc_feature: MA Experiment 20000171 PARAMETER Experiment Name: At_42deg_Heat_P Parameter: Tissue Value: Aerial
  misc_feature: MA Experiment ID: 20000173 Result: Up-regulated in Transcription
  misc_feature: MA Experiment 20000173 PARAMETER Experiment Name: At_42deg_Heat_P Parameter: Age (day) Value: 14
  misc_feature: MA Experiment 20000173 PARAMETER Experiment Name: At_42deg_Heat_P Parameter: Organism Value: A. thaliana
  misc_feature: MA Experiment 20000173 PARAMETER Experiment Name: At_42deg_Heat_P Parameter: Plant Line Value: WS
  misc_feature: MA Experiment 20000173 PARAMETER Experiment Name: At_42deg_Heat_P Parameter: Temperature (deg C) Value: 42 vs. 22
  misc_feature: MA Experiment 20000173 PARAMETER Experiment Name: At_42deg_Heat_P Parameter: Timepoint (hr) Value: 6
  misc_feature: MA Experiment 20000173 PARAMETER Experiment Name: At_42deg_Heat_P Parameter: Tissue Value: Aerial
  misc_feature: MA Experiment ID: 20000179 Result: Down-regulated in Transcription
  misc_feature: MA Experiment 20000179 PARAMETER Experiment Name: At_Germinating_Seeds_P Parameter: Age (hr) Value: 6 vs. 0
  misc_feature: MA Experiment 20000179 PARAMETER Experiment Name: At_Germinating_Seeds_P Parameter: Tissue Value: Germinating Seeds
  misc_feature: MA Experiment ID: 20000180 Result: Down-regulated in Transcription
  misc_feature: MA Experiment 20000180 PARAMETER Experiment Name: At_Germinating_Seeds_P Parameter: Age (hr) Value: 24 vs. 0
  misc_feature: MA Experiment 20000180 PARAMETER Experiment Name: At_Germinating_Seeds_P Parameter: Tissue Value: Germinating Seeds
  misc_feature: MA Experiment ID: 20000184 Result: Up-regulated in Transcription
  misc_feature: MA Experiment 20000184 PARAMETER Experiment Name: At_Shoots__P Parameter: Age (day) Value: 7
  misc_feature: MA Experiment 20000184 PARAMETER Experiment Name: At_Shoots__P Parameter: Tissue Value: Shoots vs. Whole Plant
  misc_feature: MA Experiment ID: 20000185 Result: Up-regulated in Transcription
  misc_feature: MA Experiment 20000185 PARAMETER Experiment Name: At_Roots__P Parameter: Age (day) Value: 7 vs. 21
  misc_feature: MA Experiment 20000185 PARAMETER Experiment Name: At_Roots__P Parameter: Organism Value: A. thaliana
  misc_feature: MA Experiment 20000185 PARAMETER Experiment Name: At_Roots__P Parameter: Tissue Value: Roots vs. Whole Plant
  misc_feature: MA Experiment ID: 20000436 Result: Up-regulated in Transcription
  misc_feature: MA Experiment 20000436 PARAMETER Experiment Name: At_Drought_P Parameter: Age (day) Value: 7
  misc_feature: MA Experiment 20000436 PARAMETER Experiment Name: At_Drought_P Parameter: Organism Value: A. thaliana
  misc_feature: MA Experiment 20000436 PARAMETER Experiment Name: At_Drought_P Parameter: Plant Line Value: WS
  misc_feature: MA Experiment 20000436 PARAMETER Experiment Name: At_Drought_P Parameter: Timepoint (hr) Value: 12
  misc_feature: MA Experiment 20000436 PARAMETER Experiment Name: At_Drought_P Parameter: Tissue Value: Whole Plant
  misc_feature: MA Experiment 20000436 PARAMETER Experiment Name: At_Drought_P Parameter: Treatment Value: Drought vs. No Drought
  misc_feature: MA Experiment ID: 20000438 Result: Up-regulated in Transcription
  misc_feature: MA Experiment 20000438 PARAMETER Experiment Name: At_Shoots__P Parameter: Age (day) Value: 14
  misc_feature: MA Experiment 20000438 PARAMETER Experiment Name: At_Shoots__P Parameter: Tissue Value: Shoots vs. Whole Plant
  misc_feature: MA Experiment ID: 20000439 Result: Up-regulated in Transcription
  misc_feature: MA Experiment 20000439 PARAMETER Experiment Name: At_Roots__P Parameter: Age (day) Value: 14 vs. 21
  misc_feature: MA Experiment 20000439 PARAMETER Experiment Name: At_Roots__P Parameter: Organism Value: A. thaliana
  misc_feature: MA Experiment 20000439 PARAMETER Experiment Name: At_Roots__P Parameter: Tissue Value: Roots vs. Whole Plant
ctcttgttttctttttccctcttctccaaggaatctggaaaaaattaaaccttttttctaaatccctggaaatcagaaaacttcctattgagaaaccatagattcgatccaagcctttgattgtatcaaaatctctgcttcaccaagaatttgggttgatacagaagaaaaaagttaaatggttgaggcagagcgcgcggagaatagttggattgcttcggaaacgtctccgtcgtcgtctccggtggtaatagaaagcagtgatttttcgataactgatggaatgagagatgtgagcggatttggtatagcttctcgacctcagttggacaagggtttgtcggaaaacaatatagggttcacggaaagagttttctctgccgccggagctgcggttttgtccgccgttactctaaatcctcttgacgttgtcaagactcgattgcaagctcaagccgccggaatgtcgtactctcacccactcagtaactccattggacgcatggcattttttggcccaaacatgatgtttgcagacttgagatgttctccttcatgtgcacgcgctggtgttgaaggtactgtttctatttgcccaccggattgtttccagtacaaaggaacatttgatgtcttcaccaagatcatacgacaggagggtctgggacgcctttggagagggactaatgctggtcttgccctagctgtgcccatggttgggatatatctcccattctatgatatgttccgcaaccggttggaagaattatctcgggagaaagctcctgctatgacattttgtgtgcctactgtggcagggtctttagcgcggtccttagcttgtacagtctgctatcctattgatcttgcaagaacgcgtatgcaggcattcaaagaagcaaaagccggtgtgaagcctccgggagtttttaaaactctagttggtgttttctctgaagtcaggacagcaaataaccttgaaagtagcttgcacaactatcgtggtctctggagaggcttgggtgcacagcttgcccgtgatgttccattctcagcaatctgctggtcgaccctcgagccaataaaaaagaggctccttggagttgcgggcaatgatacaaatcttgttggtgttttcggtgcaaccttttctgctggatttatagctggaagtatcgctgctgctgctacttgtcctcttgacgttgcaagaacaagaagacagatagagaaggaccctggtagggcattgatgatgacgacacgacagacactaatagaggtttggagggatggagggatgagaggactgttcatgggaatgggtccacgagtggcacgtgcaggaccatcggtagggatagtggtttccttctacgaagtggtcaagtatgttctgcatcgccatgcttcatcatgaccctgcaaagtcactaatctcctaaacatggatctgtggatacggctttaggttgtagcttcttttttcaagttaacagaataagttaaacaggctcaatgctccagaaacccgagtttcctctgtttatgagccttaattttgtccagttattaaataccggctgtttttaatgt

SEQ ID NO: 42489 - protein, 413 aa, Arabidopsis thaliana
  peptide (1)..(413): Ceres Seq. ID no. 12331062
  misc_feature (210)..(409): Homolog of NCBI NO: 11359936 NR Description: hypothetical protein DKFZp434C119.1 - human
  misc_feature (159)..(408): Homolog of NCBI NO: 30690327 NR Description: mitochondrial carrier protein family [Arabidopsis
  misc_feature (139)..(411): Homolog of NCBI NO: 34904154 NR Description: P0417G05.20 [Oryza sativa (japonica
  misc_feature (49)..(408): Homolog of NCBI NO: 25408981 NR Description: hypothetical protein At2g46320 [imported] -
  misc_feature (49)..(408): Homolog of NCBI NO: 19310377 NR Description: At2g46320/F11C10.1 [Arabidopsis thaliana]
  misc_feature (49)..(408): Homolog of NCBI NO: 30690323 NR Description: mitochondrial carrier protein family [Arabidopsis
  misc_feature (55)..(412): Homolog of NCBI NO: 40253478 NR Description: putative mitochondrial carrier protein
  misc_feature (36)..(162): Homolog of NCBI NO: 7486963 NR Description: hypothetical protein T13J8.50 - Arabidopsis
  misc_feature (166)..(351): Homolog of NCBI NO: 7486963 NR Description: hypothetical protein T13J8.50 - Arabidopsis
  misc_feature (1)..(413): Homolog of NCBI NO: 18417093 NR Description: putative protein
MVEAERAENSWIASETSPSSSPVVIESSDFSITDGMRDVSGFGIASRPQLDKGLSENNIGFTERVFSAAGAAVLSAVTLNPLDVVKTRLQAQAAGMSYSHPLSNSIGRMAFFGPNMMFADLRCSPSCARAGVEGTVSICPPDCFQYKGTFDVFTKIIRQEGLGRLWRGTNAGLALAVPMVGIYLPFYDMFRNRLEELSREKAPAMTFCVPTVAGSLARSLACTVCYPIDLARTRMQAFKEAKAGVKPPGVFKTLVGVFSEVRTANNLESSLHNYRGLWRGLGAQLARDVPFSAICWSTLEPIKKRLLGVAGNDTNLVGVFGATFSAGFIAGSIAAAATCPLDVARTRRQIEKDPGRALMMTTRQTLIEVWRDGGMRGLFMGMGPRVARAGPSVGIVVSFYEVVKYVLHRHASS

SEQ ID NO: 42490 - protein, 378 aa, Arabidopsis thaliana
  peptide (1)..(378): Ceres Seq. ID no. 12331063
  misc_feature (175)..(374): Homolog of NCBI NO: 11359936 NR Description: hypothetical protein DKFZp434C119.1 - human
  misc_feature (124)..(373): Homolog of NCBI NO: 30690327 NR Description: mitochondrial carrier protein family [Arabidopsis
  misc_feature (104)..(376): Homolog of NCBI NO: 34904154 NR Description: P0417G05.20 [Oryza sativa (japonica
  misc_feature (14)..(373): Homolog of NCBI NO: 25408981 NR Description: hypothetical protein At2g46320 [imported] -
  misc_feature (14)..(373): Homolog of NCBI NO: 19310377 NR Description: At2g46320/F11C10.1 [Arabidopsis thaliana]
  misc_feature (14)..(373): Homolog of NCBI NO: 30690323 NR Description: mitochondrial carrier protein family [Arabidopsis
  misc_feature (20)..(377): Homolog of NCBI NO: 40253478 NR Description: putative mitochondrial carrier protein
  misc_feature (1)..(127): Homolog of NCBI NO: 7486963 NR Description: hypothetical protein T13J8.50 - Arabidopsis
  misc_feature (131)..(316): Homolog of NCBI NO: 7486963 NR Description: hypothetical protein T13J8.50 - Arabidopsis
  misc_feature (1)..(378): Homolog of NCBI NO: 18417093 NR Description: putative protein
MRDVSGFGIASRPQLDKGLSENNIGFTERVFSAAGAAVLSAVTLNPLDVVKTRLQAQAAGMSYSHPLSNSIGRMAFFGPNMMFADLRCSPSCARAGVEGTVSICPPDCFQYKGTFDVFTKIIRQEGLGRLWRGTNAGLALAVPMVGIYLPFYDMFRNRLEELSREKAPAMTFCVPTVAGSLARSLACTVCYPIDLARTRMQAFKEAKAGVKPPGVFKTLVGVFSEVRTANNLESSLHNYRGLWRGLGAQLARDVPFSAICWSTLEPIKKRLLGVAGNDTNLVGVFGATFSAGFIAGSIAAAATCPLDVARTRRQIEKDPGRALMMTTRQTLIEVWRDGGMRGLFMGMGPRVARAGPSVGIVVSFYEVVKYVLHRHASS

SEQ ID NO: 42491 - protein, 318 aa, Arabidopsis thaliana
  peptide (1)..(318): Ceres Seq. ID no. 12331064
  misc_feature (115)..(314): Homolog of NCBI NO: 11359936 NR Description: hypothetical protein DKFZp434C119.1 - human
  misc_feature (64)..(313): Homolog of NCBI NO: 30690327 NR Description: mitochondrial carrier protein family [Arabidopsis
  misc_feature (44)..(316): Homolog of NCBI NO: 34904154 NR Description: P0417G05.20 [Oryza sativa (japonica
  misc_feature (1)..(313): Homolog of NCBI NO: 25408981 NR Description: hypothetical protein At2g46320 [imported] -
  misc_feature (1)..(313): Homolog of NCBI NO: 19310377 NR Description: At2g46320/F11C10.1 [Arabidopsis thaliana]
  misc_feature (1)..(313): Homolog of NCBI NO: 30690323 NR Description: mitochondrial carrier protein family [Arabidopsis
  misc_feature (1)..(317): Homolog of NCBI NO: 40253478 NR Description: putative mitochondrial carrier protein
  misc_feature (1)..(67): Homolog of NCBI NO: 7486963 NR Description: hypothetical protein T13J8.50 - Arabidopsis
  misc_feature (71)..(256): Homolog of NCBI NO: 7486963 NR Description: hypothetical protein T13J8.50 - Arabidopsis
  misc_feature (1)..(318): Homolog of NCBI NO: 18417093 NR Description: putative protein
MSYSHPLSNSIGRMAFFGPNMMFADLRCSPSCARAGVEGTVSICPPDCFQYKGTFDVFTKIIRQEGLGRLWRGTNAGLALAVPMVGIYLPFYDMFRNRLEELSREKAPAMTFCVPTVAGSLARSLACTVCYPIDLARTRMQAFKEAKAGVKPPGVFKTLVGVFSEVRTANNLESSLHNYRGLWRGLGAQLARDVPFSAICWSTLEPIKKRLLGVAGNDTNLVGVFGATFSAGFIAGSIAAAATCPLDVARTRRQIEKDPGRALMMTTRQTLIEVWRDGGMRGLFMGMGPRVARAGPSVGIVVSFYEVVKYVLHRHASS

SEQ ID NO: 42492 - DNA, 1145 bp, Arabidopsis thaliana
  misc_feature (1)..(1145): Ceres Seq. ID no. 13592814
  misc_feature: MA Experiment ID: 20000184 Result: Down-regulated in Transcription
  misc_feature: MA Experiment 20000184 PARAMETER Experiment Name: At_Shoots__P Parameter: Age (day) Value: 7
  misc_feature: MA Experiment 20000184 PARAMETER Experiment Name: At_Shoots__P Parameter: Tissue Value: Shoots vs. Whole Plant
agaacatcctaatcgaaaaaattttgggtggaatgtttacaaaaacttcttcgatcgaacacatactagagagattcaaagctctccttcgtagattcgtgtattgtacagatttgtagagaacgagagagagaggagaacaaaatggtaggcgaagaggagacgaagaagagagtagtcactgaatcgctaggatggttaacggaatcttcgattatgccaaagaagcatcgcgccatcgaaggtgttggtccttcctcaatcatggagcttaaagctcagctctataagtctcaggaagaagctaaacagacgaaggattttacgggatccgatgctcaataccatcgcgccaaggaaaggattgccgccaaagattctttcgccgcgaaaaactccggcgtcgagagtcgcaatttaaaggacaagcttgagcacaaagctgtaaaagatggagcagttagttatgccgcattggagaaaaaggctcagttgtatgataaacttgctagaggagagctttctgatgaagaaggtgaagagaagtactgtgttgacttctttaggaaaggaattcaacatgaagatccaaaaccatcaagcacttacaacagttccatttcagcaccacctgaagatttcaagcaagatggtgaagatgatggttctctttttagcaccaaatttgctggacttggacatgcaattgggacagctgatgtaggtcaacacgtgcgcatggtcagggaggttcatgaggaagtcaatcaagcgagagaaaaggcaaccgagttaaagcaaaggagacaagagcaagcaacaaatcgtcgggagaaactcaaacaagcttatcttcggaagcagctcgagaaactaaaggctcaacaacaacaacaagaagatgaacaaaaaacttgattttcgctccccaagctattgcattttgagttgcggcctgaacgcagagaagacaatgacagagttgtccaccgaacccgaatgagtaatatggctgcaacaagaacacgtaagccatcattaagggatgaagctgtatccatatgctcttaaaagcgatttatgtactgtggattgttgtcaatcaacagattctatacaaagttaccaatatatagataatcctt

SEQ ID NO: 42493 - protein, 257 aa, Arabidopsis thaliana
  peptide (1)..(257): Ceres Seq. ID no. 13592815
  misc_feature (25)..(257): Homolog of NCBI NO: 34857683 NR Description: similar to RIKEN cDNA C130022K22 gene [Rattus
  misc_feature (25)..(257): Homolog of NCBI NO: 29835270 NR Description: RIKEN cDNA C130022K22 gene [Mus musculus]
  misc_feature (25)..(257): Homolog of NCBI NO: 26333485 NR Description: unnamed protein product [Mus musculus]
  misc_feature (145)..(249): Homolog of NCBI NO: 34910918 NR Description: OSJNBb0063G05.4 [Oryza sativa (japonica
  misc_feature (1)..(153): Homolog of NCBI NO: 34910918 NR Description: OSJNBb0063G05.4 [Oryza sativa (japonica
  misc_feature (1)..(257): Homolog of NCBI NO: 26452652 NR Description: unknown protein [Arabidopsis thaliana]
  misc_feature (1)..(257): Homolog of NCBI NO: 15236824 NR Description: cytochrome b561-related [Arabidopsis thaliana]
MVGEEETKKRVVTESLGWLTESSIMPKKHRAIEGVGPSSIMELKAQLYKSQEEAKQTKDFTGSDAQYHRAKERIAAKDSFAAKNSGVESRNLKDKLEHKAVKDGAVSYAALEKKAQLYDKLARGELSDEEGEEKYCVDFFRKGIQHEDPKPSSTYNSSISAPPEDFKQDGEDDGSLFSTKFAGLGHAIGTADVGQHVRMVREVHEEVNQAREKATELKQRRQEQATNRREKLKQAYLRKQLEKLKAQQQQQEDEQKT

SEQ ID NO: 42494 - protein, 233 aa, Arabidopsis thaliana
  peptide (1)..(233): Ceres Seq. ID no. 13592816
  misc_feature (1)..(233): Homolog of NCBI NO: 34857683 NR Description: similar to RIKEN cDNA C130022K22 gene [Rattus
  misc_feature (1)..(233): Homolog of NCBI NO: 29835270 NR Description: RIKEN cDNA C130022K22 gene [Mus musculus]
  misc_feature (1)..(233): Homolog of NCBI NO: 26333485 NR Description: unnamed protein product [Mus musculus]
  misc_feature (121)..(225): Homolog of NCBI NO: 34910918 NR Description: OSJNBb0063G05.4 [Oryza sativa (japonica
  misc_feature (1)..(129): Homolog of NCBI NO: 34910918 NR Description: OSJNBb0063G05.4 [Oryza sativa (japonica
  misc_feature (1)..(233): Homolog of NCBI NO: 26452652 NR Description: unknown protein [Arabidopsis thaliana]
  misc_feature (1)..(233): Homolog of NCBI NO: 15236824 NR Description: cytochrome b561-related [Arabidopsis thaliana]
MPKKHRAIEGVGPSSIMELKAQLYKSQEEAKQTKDFTGSDAQYHRAKERIAAKDSFAAKNSGVESRNLKDKLEHKAVKDGAVSYAALEKKAQLYDKLARGELSDEEGEEKYCVDFFRKGIQHEDPKPSSTYNSSISAPPEDFKQDGEDDGSLFSTKFAGLGHAIGTADVGQHVRMVREVHEEVNQAREKATELKQRRQEQATNRREKLKQAYLRKQLEKLKAQQQQQEDEQKT

SEQ ID NO: 42495 - protein, 217 aa, Arabidopsis thaliana
  peptide (1)..(217): Ceres Seq. ID no. 13592817
  misc_feature (1)..(217): Homolog of NCBI NO: 34857683 NR Description: similar to RIKEN cDNA C130022K22 gene [Rattus
  misc_feature (1)..(217): Homolog of NCBI NO: 29835270 NR Description: RIKEN cDNA C130022K22 gene [Mus musculus]
  misc_feature (1)..(217): Homolog of NCBI NO: 26333485 NR Description: unnamed protein product [Mus musculus]
  misc_feature (105)..(209): Homolog of NCBI NO: 34910918 NR Description: OSJNBb0063G05.4 [Oryza sativa (japonica
  misc_feature (1)..(113): Homolog of NCBI NO: 34910918 NR Description: OSJNBb0063G05.4 [Oryza sativa (japonica
  misc_feature (1)..(217): Homolog of NCBI NO: 26452652 NR Description: unknown protein [Arabidopsis thaliana]
  misc_feature (1)..(217): Homolog of NCBI NO: 15236824 NR Description: cytochrome b561-related [Arabidopsis thaliana]
MELKAQLYKSQEEAKQTKDFTGSDAQYHRAKERIAAKDSFAAKNSGVESRNLKDKLEHKAVKDGAVSYAALEKKAQLYDKLARGELSDEEGEEKYCVDFFRKGIQHEDPKPSSTYNSSISAPPEDFKQDGEDDGSLFSTKFAGLGHAIGTADVGQHVRMVREVHEEVNQAREKATELKQRRQEQATNRREKLKQAYLRKQLEKLKAQQQQQEDEQKT

SEQ ID NO: 42496 - DNA, 888 bp, Arabidopsis thaliana
  misc_feature (1)..(888): Ceres Seq. ID no. 13645955
  misc_feature: MA Experiment ID: 108434 Result: Up-regulated in Transcription
  misc_feature: MA Experiment 108434 PARAMETER Experiment Name: At_Root_Tips_cDNA_P Parameter: Tissue Value: Root Tips
  misc_feature: MA Experiment ID: 108595 Result: Down-regulated in Transcription
  misc_feature: MA Experiment 108595 PARAMETER Experiment Name: At_Ler-pi_Ovule_cDNA_P Parameter: Plant Line Value: null
aaaccggttctgttctcgctggctcggccaccgcttttcaacagaacaatctgtctctttctctgcctcactctctcactcactcaccggagcaaagtgatgtcggtgtgttcttcgtcttcttcttctcagaaaacatggattgttaacgggatcttggccggaacagcgattgcagccgcaatcggcgcacgtgcttatctgggtcgatccaagaaattccggagccgggtcgtcggaatcattcccgcacgttacgcttcctctcgattcgagggtaagcctctcgtgcaaatcctcggcaaacccatgatccagagaacttgggagaggtcgaagttagctactacgcttgatcatattgttgtagccactgatgatgaaagaatcgcggagtgttgtcgtggatttggtgccgatgttatcatgacttcagagtcttgcagaaatggcactgagaggtgcaacgaagcgctagaaaagctggagaagaagtatgatgtcgttgttaacattcaaggagatgaaccacttattgagcctgagattatagacggtgtagtcaaagcacttcaggtaacaccggatgcagtgtttagcacagcggtgacatcattgaaaccagaagacgggcttgatcctaaccgagttaaatgtgtggtggacaatcgtggctatgctatctatttctcaaggggtttgattccttataacaagagtggtaaagtcaatccagattttccgtacatgcttcatcttggaattcagagctttgattcgaagtttctgaaggtatattcagagcttcaaccaacgccattgcagcaagaagaggatctagaacagctcaaagttcttgagaatggctacaaaatgaaggtaatgtaa

SEQ ID NO: 42497 - protein, 295 aa, Arabidopsis thaliana
  peptide (1)..(295): Ceres Seq. ID no. 13645956
  misc_feature (79)..(294): Pfam Name: Cytidylyltransferase Pfam Description: Cytidylyltransferase
  misc_feature (70)..(294): Homolog of NCBI NO: 29840354 NR Description: 3-deoxy-D-manno-octulosonate cytidylyltransferase
  misc_feature (77)..(295): Homolog of NCBI NO: 34762436 NR Description: 3-deoxy-manno-octulosonate cytidylyltransferase
  misc_feature (77)..(295): Homolog of NCBI NO: 19704142 NR Description: 3-deoxy-manno-octulosonate cytidylyltransferase
  misc_feature (76)..(294): Homolog of NCBI NO: 15604902 NR Description: CMP-2-keto-3-deoxyoctulosonic acid synthetase
  misc_feature (76)..(294): Homolog of NCBI NO: 1361311 NR Description: CMP-2-keto-3-deoxyoctulosonic acid synthetase
  misc_feature (76)..(294): Homolog of NCBI NO: 15835072 NR Description: 3-deoxy-manno-octulosonate cytidylyltransferase
  misc_feature (76)..(294): Homolog of NCBI NO: 14194887 NR Description: 3-DEOXY-MANNO-OCTULOSONATE CYTIDYLYLTRANSFERASE
  misc_feature (82)..(295): Homolog of NCBI NO: 7688437 NR Description: CMP-KDO synthetase [Zea mays]
  misc_feature (35)..(295): Homolog of NCBI NO: 7688435 NR Description: CMP-KDO synthetase [Zea mays]
  misc_feature (34)..(295): Homolog of NCBI NO: 30695393 NR Description: CMP-KDO synthetase -related [Arabidopsis
KPVLFSLARPPLFNRTICLFLCLTLSLTHRSKVMSVCSSSSSSQKTWIVNGILAGTAIAAAIGARAYLGRSKKFRSRVVGIIPARYASSRFEGKPLVQILGKPMIQRTWERSKLATTLDHIVVATDDERIAECCRGFGADVIMTSESCRNGTERCNEALEKLEKKYDVVVNIQGDEPLIEPEIIDGVVKALQVTPDAVFSTAVTSLKPEDGLDPNRVKCVVDNRGYAIYFSRGLIPYNKSGKVNPDFPYMLHLGIQSFDSKFLKVYSELQPTPLQQEEDLEQLKVLENGYKMKVM

SEQ ID NO: 42498 - protein, 262 aa, Arabidopsis thaliana
  peptide (1)..(262): Ceres Seq. ID no. 13645957
  misc_feature (46)..(261): Pfam Name: Cytidylyltransferase Pfam Description: Cytidylyltransferase
  misc_feature (37)..(261): Homolog of NCBI NO: 29840354 NR Description: 3-deoxy-D-manno-octulosonate cytidylyltransferase
  misc_feature (44)..(262): Homolog of NCBI NO: 34762436 NR Description: 3-deoxy-manno-octulosonate cytidylyltransferase
  misc_feature (44)..(262): Homolog of NCBI NO: 19704142 NR Description: 3-deoxy-manno-octulosonate cytidylyltransferase
  misc_feature (43)..(261): Homolog of NCBI NO: 15604902 NR Description: CMP-2-keto-3-deoxyoctulosonic acid synthetase
  misc_feature (43)..(261): Homolog of NCBI NO: 1361311 NR Description: CMP-2-keto-3-deoxyoctulosonic acid synthetase
  misc_feature (43)..(261): Homolog of NCBI NO: 15835072 NR Description: 3-deoxy-manno-octulosonate cytidylyltransferase
  misc_feature (43)..(261): Homolog of NCBI NO: 14194887 NR Description: 3-DEOXY-MANNO-OCTULOSONATE CYTIDYLYLTRANSFERASE
  misc_feature (49)..(262): Homolog of NCBI NO: 7688437 NR Description: CMP-KDO synthetase [Zea mays]
  misc_feature (2)..(262): Homolog of NCBI NO: 7688435 NR Description: CMP-KDO synthetase [Zea mays]
  misc_feature (1)..(262): Homolog of NCBI NO: 30695393 NR Description: CMP-KDO synthetase -related [Arabidopsis
MSVCSSSSSSQKTWIVNGILAGTAIAAAIGARAYLGRSKKFRSRVVGIIPARYASSRFEGKPLVQILGKPMIQRTWERSKLATTLDHIVVATDDERIAECCRGFGADVIMTSESCRNGTERCNEALEKLEKKYDVVVNIQGDEPLIEPEIIDGVVKALQVTPDAVFSTAVTSLKPEDGLDPNRVKCVVDNRGYAIYFSRGLIPYNKSGKVNPDFPYMLHLGIQSFDSKFLKVYSELQPTPLQQEEDLEQLKVLENGYKMKVM

SEQ ID NO: 42499 - protein, 192 aa, Arabidopsis thaliana
  peptide (1)..(192): Ceres Seq. ID no. 13645958
  misc_feature (1)..(191): Pfam Name: Cytidylyltransferase Pfam Description: Cytidylyltransferase
  misc_feature (1)..(191): Homolog of NCBI NO: 29840354 NR Description: 3-deoxy-D-manno-octulosonate cytidylyltransferase
  misc_feature (1)..(192): Homolog of NCBI NO: 34762436 NR Description: 3-deoxy-manno-octulosonate cytidylyltransferase
  misc_feature (1)..(192): Homolog of NCBI NO: 19704142 NR Description: 3-deoxy-manno-octulosonate cytidylyltransferase
  misc_feature (1)..(191): Homolog of NCBI NO: 15604902 NR Description: CMP-2-keto-3-deoxyoctulosonic acid synthetase
  misc_feature (1)..(191): Homolog of NCBI NO: 1361311 NR Description: CMP-2-keto-3-deoxyoctulosonic acid synthetase
  misc_feature (1)..(191): Homolog of NCBI NO: 15835072 NR Description: 3-deoxy-manno-octulosonate cytidylyltransferase
  misc_feature (1)..(191): Homolog of NCBI NO: 14194887 NR Description: 3-DEOXY-MANNO-OCTULOSONATE CYTIDYLYLTRANSFERASE
  misc_feature (1)..(192): Homolog of NCBI NO: 7688437 NR Description: CMP-KDO synthetase [Zea mays]
  misc_feature (1)..(192): Homolog of NCBI NO: 7688435 NR Description: CMP-KDO synthetase [Zea mays]
  misc_feature (1)..(192): Homolog of NCBI NO: 30695393 NR Description: CMP-KDO synthetase -related [Arabidopsis
MIQRTWERSKLATTLDHIVVATDDERIAECCRGFGADVIMTSESCRNGTERCNEALEKLEKKYDVVVNIQGDEPLIEPEIIDGVVKALQVTPDAVFSTAVTSLKPEDGLDPNRVKCVVDNRGYAIYFSRGLIPYNKSGKVNPDFPYMLHLGIQSFDSKFLKVYSELQPTPLQQEEDLEQLKVLENGYKMKVM

SEQ ID NO: 42500 - DNA, 1333 bp, Arabidopsis thaliana
  misc_feature (1)..(1333): Ceres Seq. ID no. 13489617
  misc_feature: MA Experiment ID: 108488 Result: Down-regulated in Transcription
  misc_feature: MA Experiment ID: 108501 Result: Down-regulated in Transcription
  misc_feature: MA Experiment 108501 PARAMETER Experiment Name: At_ap2_floral_buds_cDNA_P Parameter: Plant Line Value: ap2 (Ler.)
  misc_feature: MA Experiment 108501 PARAMETER Experiment Name: At_ap2_floral_buds_cDNA_P Parameter: Tissue Value: Closed Flower
  misc_feature: MA Experiment ID: 108577 Result: Down-regulated in Transcription
  misc_feature: MA Experiment 108577 PARAMETER Experiment Name: At_42deg_Heat_cDNA_P Parameter: Temperature (deg C) Value: 42 vs. 22
  misc_feature: MA Experiment 108577 PARAMETER Experiment Name: At_42deg_Heat_cDNA_P Parameter: Timepoint (hr) Value: 6
  misc_feature: MA Experiment 108577 PARAMETER Experiment Name: At_42deg_Heat_cDNA_P Parameter: Tissue Value: Aerial
ggttagtttagtttccactgagcttgctttcttccatggcgatgataaataattcttcttcttcctcacacacaatttcactttccgattttataaaattgattcttctcttcttcttaaacccatgaagagttcatgatttcttaagctcgcagcataatcgatggcgaatttgagtttgagcttgtatctaatcctccggatttacgctcttttgttgctgttcaatgtctccttcgctaaaacacttaaacgagacatgaaagctttgaatgagataaagaaattggtgggatggagattggtatactcttgggttggagatgatccttgtggcgatggagttttgcctccgtggtctggagttacttgctctaaagttggcgattatcgtgtcgtcgtcaagctagaagtgtattcaatgtcgatagttgggaatttcccaaaggctataacgaagctcttagatctcactgttttggatatgcataataacaaattaacaggtcctattcctccagaaattgggcggcttaagcggcttatcacactgaatttgaggtggaacaaacttcaacaggcactgcctcctgaaattggtggattgaagagtctaacttatctgtacctgagttttaacaatttcaaaggagaaatccccaaagaacttgcaaatctccatgagctccagtacttacatattcaggagaatcattttactgggcgaattccagcagagctgggaacattacaaaaacttcgccacttggatgctggcaacaataacttagtggggagtataagcgatctttttcgcattgaaggatgctttccagctcttagaaacctgtttttaaacaataattacttgactggaggactcccaaacaagcttgcaaatctaacaaacctggagatcttgtacttatctttcaacaaaatgactggagcaatacccgctgcacttgccagtataccaagactaactaacttgcacttggaccacaatctattcaatggaagtatacctgaagccttctacaagcatccaaacctaaaagatatgtacatagaagggaatgctttcaaatcagacgtgaaggcgattggtgcacataaggtcctcgaactttctgacacagacttccttgtttagttatgtatagcacaactttgtttcatttacagataggaatttggcagtgttaactggttatttaagattcattttctctgttaaagcgagattgtagttgatgtgttttctgaatgtaaaaggttccttatccatgtatgaaaattgaatataaagggaatctggtttgttctttcc

SEQ ID NO: 42501 - protein, 330 aa, Arabidopsis thaliana
  peptide (1)..(330): Ceres Seq. ID no. 13489618
  misc_feature (273)..(296): Pfam Name: Leucine Rich Repeat Pfam Description: Leucine Rich Repeat
  misc_feature (66)..(317): Homolog of NCBI NO: 25403209 NR Description: probable Protein kinase [imported] - Arabidopsis
  misc_feature (66)..(317): Homolog of NCBI NO: 30692999 NR Description: leucine-rich repeat transmembrane protein kinase,
  misc_feature (66)..(316): Homolog of NCBI NO: 7488988 NR Description: disease resistance protein Hcr2-5D - tomato
  misc_feature (66)..(329): Homolog of NCBI NO: 3894383 NR Description: disease resistance protein [Lycopersicon
  misc_feature (10)..(318): Homolog of NCBI NO: 15240186 NR Description: leucine rich repeat protein family [Arabidopsis
  misc_feature (127)..(330): Homolog of NCBI NO: 15240186 NR Description: leucine rich repeat protein family [Arabidopsis
  misc_feature (10)..(330): Homolog of NCBI NO: 9757845 NR Description: leucine-rich repeat disease resistance
  misc_feature (7)..(330): Homolog of NCBI NO: 14626935 NR Description: leucine-rich repeat resistance protein-like
  misc_feature (8)..(330): Homolog of NCBI NO: 25402771 NR Description: protein F16A14.12 [imported] - Arabidopsis
  misc_feature (1)..(330): Homolog of NCBI NO: 15222979 NR Description: leucine rich repeat protein family [Arabidopsis
MANLSLSLYLILRIYALLLLFNVSFAKTLKRDMKALNEIKKLVGWRLVYSWVGDDPCGDGVLPPWSGVTCSKVGDYRVVVKLEVYSMSIVGNFPKAITKLLDLTVLDMHNNKLTGPIPPEIGRLKRLITLNLRWNKLQQALPPEIGGLKSLTYLYLSFNNFKGEIPKELANLHELQYLHIQENHFTGRIPAELGTLQKLRHLDAGNNNLVGSISDLFRIEGCFPALRNLFLNNNYLTGGLPNKLANLTNLEILYLSFNKMTGAIPAALASIPRLTNLHLDHNLFNGSIPEAFYKHPNLKDMYIEGNAFKSDVKAIGAHKVLELSDTDFLV

SEQ ID NO: 42502 - protein, 298 aa, Arabidopsis thaliana
  peptide (1)..(298): Ceres Seq. ID no. 13489619
  misc_feature (241)..(264): Pfam Name: Leucine Rich Repeat Pfam Description: Leucine Rich Repeat
  misc_feature (34)..(285): Homolog of NCBI NO: 25403209 NR Description: probable Protein kinase [imported] - Arabidopsis
  misc_feature (34)..(285): Homolog of NCBI NO: 30692999 NR Description: leucine-rich repeat transmembrane protein kinase,
  misc_feature (34)..(284): Homolog of NCBI NO: 7488988 NR Description: disease resistance protein Hcr2-5D - tomato
  misc_feature (34)..(297): Homolog of NCBI NO: 3894383 NR Description: disease resistance protein [Lycopersicon
  misc_feature (1)..(286): Homolog of NCBI NO: 15240186 NR Description: leucine rich repeat protein family [Arabidopsis
  misc_feature (95)..(298): Homolog of NCBI NO: 15240186 NR Description: leucine rich repeat protein family [Arabidopsis
  misc_feature (1)..(298): Homolog of NCBI NO: 9757845 NR Description: leucine-rich repeat disease resistance
  misc_feature (1)..(298): Homolog of NCBI NO: 14626935 NR Description: leucine-rich repeat resistance protein-like
  misc_feature (1)..(298): Homolog of NCBI NO: 25402771 NR Description: protein F16A14.12 [imported] - Arabidopsis
  misc_feature (1)..(298): Homolog of NCBI NO: 15222979 NR Description: leucine rich repeat protein family [Arabidopsis
MKALNEIKKLVGWRLVYSWVGDDPCGDGVLPPWSGVTCSKVGDYRVVVKLEVYSMSIVGNFPKAITKLLDLTVLDMHNNKLTGPIPPEIGRLKRLITLNLRWNKLQQALPPEIGGLKSLTYLYLSFNNFKGEIPKELANLHELQYLHIQENHFTGRIPAELGTLQKLRHLDAGNNNLVGSISDLFRIEGCFPALRNLFLNNNYLTGGLPNKLANLTNLEILYLSFNKMTGAIPAALASIPRLTNLHLDHNLFNGSIPEAFYKHPNLKDMYIEGNAFKSDVKAIGAHKVLELSDTDFLV

SEQ ID NO: 42503 - protein, 244 aa, Arabidopsis thaliana
  peptide (1)..(244): Ceres Seq. ID no. 13489620
  misc_feature (187)..(210): Pfam Name: Leucine Rich Repeat Pfam Description: Leucine Rich Repeat
  misc_feature (1)..(231): Homolog of NCBI NO: 25403209 NR Description: probable Protein kinase [imported] - Arabidopsis
  misc_feature (1)..(231): Homolog of NCBI NO: 30692999 NR Description: leucine-rich repeat transmembrane protein kinase,
  misc_feature (1)..(230): Homolog of NCBI NO: 7488988 NR Description: disease resistance protein Hcr2-5D - tomato
  misc_feature (1)..(243): Homolog of NCBI NO: 3894383 NR Description: disease resistance protein [Lycopersicon
  misc_feature (1)..(232): Homolog of NCBI NO: 15240186 NR Description: leucine rich repeat protein family [Arabidopsis
  misc_feature (41)..(244): Homolog of NCBI NO: 15240186 NR Description: leucine rich repeat protein family [Arabidopsis
  misc_feature (1)..(244): Homolog of NCBI NO: 9757845 NR Description: leucine-rich repeat disease resistance
  misc_feature (1)..(244): Homolog of NCBI NO: 14626935 NR Description: leucine-rich repeat resistance protein-like
  misc_feature (1)..(244): Homolog of NCBI NO: 25402771 NR Description: protein F16A14.12 [imported] - Arabidopsis
  misc_feature (1)..(244): Homolog of NCBI NO: 15222979 NR Description: leucine rich repeat protein family [Arabidopsis
MSIVGNFPKAITKLLDLTVLDMHNNKLTGPIPPEIGRLKRLITLNLRWNKLQQALPPEIGGLKSLTYLYLSFNNFKGEIPKELANLHELQYLHIQENHFTGRIPAELGTLQKLRHLDAGNNNLVGSISDLFRIEGCFPALRNLFLNNNYLTGGLPNKLANLTNLEILYLSFNKMTGAIPAALASIPRLTNLHLDHNLFNGSIPEAFYKHPNLKDMYIEGNAFKSDVKAIGAHKVLELSDTDFLV

SEQ ID NO: 42504 - DNA, 911 bp, Arabidopsis thaliana
  misc_feature (1)..(911): Ceres Seq. ID no. 12650587
  misc_feature: MA Experiment ID: 20000184 Result: Down-regulated in Transcription
  misc_feature: MA Experiment 20000184 PARAMETER Experiment Name: At_Shoots__P Parameter: Age (day) Value: 7
  misc_feature: MA Experiment 20000184 PARAMETER Experiment Name: At_Shoots__P Parameter: Tissue Value: Shoots vs. Whole Plant
  misc_feature: MA Experiment ID: 20000264 Result: Up-regulated in Transcription
  misc_feature: MA Experiment 20000264 PARAMETER Experiment Name: At_Open_Flower_P Parameter: Age (day) Value: 21
  misc_feature: MA Experiment 20000264 PARAMETER Experiment Name: At_Open_Flower_P Parameter: Plant Line Value: WS
  misc_feature: MA Experiment 20000264 PARAMETER Experiment Name: At_Open_Flower_P Parameter: Tissue Value: Open Flower vs. Whole Plant
  misc_feature: MA Experiment ID: 20000794 Result: Up-regulated in Transcription
  misc_feature: MA Experiment 20000794 PARAMETER Experiment Name: At_Petals_P Parameter: Age (day) Value: 23-25 days
  misc_feature: MA Experiment 20000794 PARAMETER Experiment Name: At_Petals_P Parameter: Plant Line Value: WS
  misc_feature: MA Experiment 20000794 PARAMETER Experiment Name: At_Petals_P Parameter: Tissue Value: Petals vs. Whole plant
  misc_feature: MA Experiment ID: 20001560 Result: Up-regulated in Transcription
  misc_feature: MA Experiment 20001560 PARAMETER Experiment Name: At_Drought_Soil_Dry_P Parameter: Age (day) Value: 28
  misc_feature: MA Experiment 20001560 PARAMETER Experiment Name: At_Drought_Soil_Dry_P Parameter: Organism Value: A. thaliana
  misc_feature: MA Experiment 20001560 PARAMETER Experiment Name: At_Drought_Soil_Dry_P Parameter: Plant Line Value: WS
  misc_feature: MA Experiment 20001560 PARAMETER Experiment Name: At_Drought_Soil_Dry_P Parameter: Post Timepoint (hr) Value: None
  misc_feature: MA Experiment 20001560 PARAMETER Experiment Name: At_Drought_Soil_Dry_P Parameter: Post-Treatment Value: None
  misc_feature: MA Experiment 20001560 PARAMETER Experiment Name: At_Drought_Soil_Dry_P Parameter: Timepoint (day) Value: 14
  misc_feature: MA Experiment 20001560 PARAMETER Experiment Name: At_Drought_Soil_Dry_P Parameter: Treatment Value: Drought vs. No Drought
aggcaaaaagggtttttgtgttcttcgatattatctcttattactattaggctattatcatcgccttattggggaaaaagcttcaaacttttatataaagtctcttcctttttctttctttctcggtggaatttgcagcaatggaagataaaccattagggattctcagggttcatgtcaaaagagggattaatcttgctattcgtgatgccaccaccagtgatccttatgttgttatcacattggctaatcagaaactgaagacgcgtgtgattaataataactgtaatccagtgtggaacgaacaactgaccctttccatcaaagatgtgaatgatcctatccgtctgacggtgtttgataaagatagattctcgggagatgacaaaatgggtgatgcagaaatagactttaggccgttcctagaagcgcatcaaatggagttagatttccagaagctccccaatggttgtgcaatcaagaggatccgtccaggcaggaccaactgtttagctgaagagagcagcatcacttggagcaatgggaagatcatgcaagagatgattcttagactaaagaatgtggagtgtggggaagtagagctcatgcttgagtggactgatggtccaggctgcaagggtctgggacgcgaaggatccaagaagacaccatggatgccgacaaaacgattggactaagatgcagaaatgttaaaacagagaccgtgaagatgtgatggtattttttcgttatgttcatggaaagacgagtttgtctttgtctcatcagagtttaaattgacaaaaaaggctctgctttggtctttagttgtacatgtcgaataactcaacccttatatatattgtatctgtttctactaattgaagaaataaagcaaaccctgaatttct

SEQ ID NO: 42505 - protein, 185 aa, Arabidopsis thaliana
  peptide (1)..(185): Ceres Seq. ID no. 12650588
  misc_feature (9)..(88): Pfam Name: C2 domain Pfam Description: C2 domain
  misc_feature (3)..(164): Homolog of NCBI NO: 33146442 NR Description: zinc finger and C2 domain protein-like
  misc_feature (6)..(168): Homolog of NCBI NO: 15240322 NR Description: putative protein
  misc_feature (1)..(168): Homolog of NCBI NO: 25405940 NR Description: protein T1N15.21 [imported] - Arabidopsis
  misc_feature (1)..(168): Homolog of NCBI NO: 15221907 NR Description: unknown protein; protein id: At1g48590.1
  misc_feature (1)..(168): Homolog of NCBI NO: 15223248 NR Description: unknown protein; protein id: At1g70800.1
  misc_feature (1)..(168): Homolog of NCBI NO: 30684739 NR Description: C2 domain-containing protein [Arabidopsis
  misc_feature (1)..(168): Homolog of NCBI NO: 13430460 NR Description: unknown protein [Arabidopsis thaliana]
  misc_feature (1)..(168): Homolog of NCBI NO: 18409682 NR Description: expressed protein
  misc_feature (1)..(168): Homolog of NCBI NO: 15226306 NR Description: hypothetical protein
  misc_feature (1)..(185): Homolog of NCBI NO: 18409675 NR Description: zinc finger and C2 domain protein, putative
MEDKPLGILRVHVKRGINLAIRDATTSDPYVVITLANQKLKTRVINNNCNPVWNEQLTLSIKDVNDPIRLTVFDKDRFSGDDKMGDAEIDFRPFLEAHQMELDFQKLPNGCAIKRIRPGRTNCLAEESSITWSNGKIMQEMILRLKNVECGEVELMLEWTDGPGCKGLGREGSKKTPWMPTKRLD

SEQ ID NO: 42506 - protein, 102 aa, Arabidopsis thaliana; identical to SEQ ID NO: 25753
  peptide (1)..(102): Ceres Seq. ID no. 12650589
  misc_feature (1)..(81): Homolog of NCBI NO: 33146442 NR Description: zinc finger and C2 domain protein-like
  misc_feature (1)..(85): Homolog of NCBI NO: 15240322 NR Description: putative protein
  misc_feature (1)..(85): Homolog of NCBI NO: 25405940 NR Description: protein T1N15.21 [imported] - Arabidopsis
  misc_feature (1)..(85): Homolog of NCBI NO: 15221907 NR Description: unknown protein; protein id: At1g48590.1
  misc_feature (1)..(85): Homolog of NCBI NO: 15223248 NR Description: unknown protein; protein id: At1g70800.1
  misc_feature (1)..(85): Homolog of NCBI NO: 30684739 NR Description: C2 domain-containing protein [Arabidopsis
  misc_feature (1)..(85): Homolog of NCBI NO: 13430460 NR Description: unknown protein [Arabidopsis thaliana]
  misc_feature (1)..(85): Homolog of NCBI NO: 18409682 NR Description: expressed protein
  misc_feature (1)..(85): Homolog of NCBI NO: 15226306 NR Description: hypothetical protein
  misc_feature (1)..(102): Homolog of NCBI NO: 18409675 NR Description: zinc finger and C2 domain protein, putative

SEQ ID NO: 42507 - DNA, 1605 bp, Arabidopsis thaliana
  misc_feature (1)..(1605): Ceres Seq. ID no. 12331179
  misc_feature: MA Experiment ID: 20000184 Result: Down-regulated in Transcription
  misc_feature: MA Experiment 20000184 PARAMETER Experiment Name: At_Shoots__P Parameter: Age (day) Value: 7
  misc_feature: MA Experiment 20000184 PARAMETER Experiment Name: At_Shoots__P Parameter: Tissue Value: Shoots vs. Whole Plant
  misc_feature: MA Experiment ID: 20000227 Result: Down-regulated in Transcription
  misc_feature: MA Experiment 20000227 PARAMETER Experiment Name: At_Root-Tips-vs-Tops_P Parameter: Tissue Value: Root Tips vs. Root Tops
  misc_feature: MA Experiment ID: 20000495 Result: Up-regulated in Transcription
  misc_feature: MA Experiment 20000495 PARAMETER Experiment Name: At_Guard_Cells_P Parameter: Harvest Date Value: 8/2/2002
  misc_feature: MA Experiment 20000495 PARAMETER Experiment Name: At_Guard_Cells_P Parameter: Organism Value: A. thaliana
  misc_feature: MA Experiment 20000495 PARAMETER Experiment Name: At_Guard_Cells_P Parameter: Tissue Value: Guard Cells vs. Leaves
  misc_feature: MA Experiment ID: 20001248 Result: Up-regulated in Transcription
  misc_feature: MA Experiment 20001248 PARAMETER Experiment Name: At_Far-red-induction_P Parameter: Age (day) Value: 7
  misc_feature: MA Experiment 20001248 PARAMETER Experiment Name: At_Far-red-induction_P Parameter: Light Value: Far-red vs. White
  misc_feature: MA Experiment 20001248 PARAMETER Experiment Name: At_Far-red-induction_P Parameter: Organism Value: A. thaliana
  misc_feature: MA Experiment 20001248 PARAMETER Experiment Name: At_Far-red-induction_P Parameter: Plant Line Value: Columbia
  misc_feature: MA Experiment 20001248 PARAMETER Experiment Name: At_Far-red-induction_P Parameter: Timepoint (hr) Value: 4
  misc_feature: MA Experiment 20001248 PARAMETER Experiment Name: At_Far-red-induction_P Parameter: Tissue Value: Whole Plant
  misc_feature: MA Experiment ID: 20001450 Result: Up-regulated in Transcription
  misc_feature: MA Experiment 20001450 PARAMETER Experiment Name: At_Far-red-induction_P Parameter: Age (day) Value: 7
  misc_feature: MA Experiment 20001450 PARAMETER Experiment Name: At_Far-red-induction_P Parameter: Light Value: Far-red vs. White
  misc_feature: MA Experiment 20001450 PARAMETER Experiment Name: At_Far-red-induction_P Parameter: Organism Value: A. thaliana
  misc_feature: MA Experiment 20001450 PARAMETER Experiment Name: At_Far-red-induction_P Parameter: Plant Line Value: Columbia
  misc_feature: MA Experiment 20001450 PARAMETER Experiment Name: At_Far-red-induction_P Parameter: Timepoint (hr) Value: 8
  misc_feature: MA Experiment 20001450 PARAMETER Experiment Name: At_Far-red-induction_P Parameter: Tissue Value: Whole Plant
gacaacgatcatccaggtcccactctgcttcttaaccattctttaccaaaaatcaattgctctctccctctcagcttccaaagtcttcatctttctcgacaatatctaaaccttgtctgagaatcatttgaataagatctttcatcatcaccgatccactttctgatttaggtcaatggaacagacaaaggatgattctgattttgaggatgattttgaaacgaagaagatggagactgatacatcagctcaagaggcaaggaatggtaaagacatacaagggattcagtgggaagggtttaagtatactagagacgagtttcgtgacactaggttgaaacattatgataactttgttaatatcttaaggcctagctctcgagaaaagcttgataaggaacatgggcaagtagttgagaaaggaaagaacttttatgacttccaattcaatacaaggcttgtcacttccactattgtgcattttcagcttcggaatttggtatgggcgacatctaagcatgatgtatatctaatgcaaaattattcactcatgcactggtcatctctactccagagagggaaagaagtagttaatgtcgccagatcagttacccccactcagaaactacctggattgttttctgagccactctctagggtgcaagttagcagcatggcagtcaaagaaaatctgatccttttaggagggttcgacggggagcttctctgcaagtgtgtaaatcagcctggggttgctttttgcacaagattatcaacggaagataatgccatcacaaacacagttgatatataccgagacccaagtggctcccttaggcttataaccgcaaataacgactgtaaaatccgggtattcgatgctcagagctttacacgtgtcagtgaatttacttttgattggtctgtcaataatacctcagttagcccggatgggaagctactcgctgtactcggggacagtacagaatgcttgatctctgattcccgttctgaaaaagttatttcaagcctcagaggccacaaagactactcatttgcatctgcttggcacccgaatggtctaatcttagcaacgggaaaccaagacacgacatgccgtctctgggacattcgtaacccgtcagaatcattcgctgtcctgaaaggaaacatgggagccatcagaggactgaagttcacaccagaagggcggtttcttgcaatggctgagcctgcagactttgttcacatcttcgacacgcagtccgggtttctacagtcccaagagattgatctgtttggagaaatagccgggatctccttcagccccgactcagaggcactatatgttggggtcgcagaccgcacttatggaagcttgatggagtataagaggagtaaggataatcactatatggactccttttactgagaaaaggtaaatggaaagtaaaaagcatctaatatgttgtcacaagttgggttttaccctattagtgtgtatatgtagacagaattggtagtttctttggttatgtatgttgtatgtaacccataatatatcttgccaaactttaagtatgttttgttaattgtgattgtttt

SEQ ID NO: 42508 - protein, 418 aa, Arabidopsis thaliana
  peptide (1)..(418): Ceres Seq. ID no. 12331180
  misc_feature (1)..(104): Homolog of NCBI NO: 25405023 NR Description: protein F28K19.28 [imported] - Arabidopsis
  misc_feature (104)..(216): Homolog of NCBI NO: 25405023 NR Description: protein F28K19.28 [imported] - Arabidopsis
  misc_feature (201)..(418): Homolog of NCBI NO: 25405023 NR Description: protein F28K19.28 [imported] - Arabidopsis
  misc_feature (1)..(418): Homolog of NCBI NO: 13937195 NR Description: At1g78070/F28K19_28 [Arabidopsis thaliana]
  misc_feature (1)..(110): Homolog of NCBI NO: 6598592 NR Description: F5J5.6 [Arabidopsis thaliana]
  misc_feature (105)..(218): Homolog of NCBI NO: 6598592 NR Description: F5J5.6 [Arabidopsis thaliana]
  misc_feature (251)..(418): Homolog of NCBI NO: 6598592 NR Description: F5J5.6 [Arabidopsis thaliana]
  misc_feature (1)..(418): Homolog of NCBI NO: 12324715 NR Description: unknown protein; 4584-7806 [Arabidopsis thaliana]
  misc_feature (19)..(418): Homolog of NCBI NO: 21553502 NR Description: unknown [Arabidopsis thaliana]
  misc_feature (1)..(418): Homolog of NCBI NO: 18400003 NR Description: expressed protein
MEQTKDDSDFEDDFETKKMETDTSAQEARNGKDIQGIQWEGFKYTRDEFRDTRLKHYDNFVNILRPSSREKLDKEHGQVVEKGKNFYDFQFNTRLVTSTIVHFQLRNLVWATSKHDVYLMQNYSLMHWSSLLQRGKEVVNVARSVTPTQKLPGLFSEPLSRVQVSSMAVKENLILLGGFDGELLCKCVNQPGVAFCTRLSTEDNAITNTVDIYRDPSGSLRLITANNDCKIRVFDAQSFTRVSEFTFDWSVNNTSVSPDGKLLAVLGDSTECLISDSRSEKVISSLRGHKDYSFASAWHPNGLILATGNQDTTCRLWDIRNPSESFAVLKGNMGAIRGLKFTPEGRFLAMAEPADFVHIFDTQSGFLQSQEIDLFGEIAGISFSPDSEALYVGVADRTYGSLMEYKRSKDNHYMDSFY

SEQ ID NO: 42509 - protein, 400 aa, Arabidopsis thaliana
  peptide (1)..(400): Ceres Seq. ID no. 12331181
  misc_feature (1)..(86): Homolog of NCBI NO: 25405023 NR Description: protein F28K19.28 [imported] - Arabidopsis
  misc_feature (86)..(198): Homolog of NCBI NO: 25405023 NR Description: protein F28K19.28 [imported] - Arabidopsis
  misc_feature (183)..(400): Homolog of NCBI NO: 25405023 NR Description: protein F28K19.28 [imported] - Arabidopsis
  misc_feature (1)..(400): Homolog of NCBI NO: 13937195 NR Description: At1g78070/F28K19_28 [Arabidopsis thaliana]
  misc_feature (1)..(92): Homolog of NCBI NO: 6598592 NR Description: F5J5.6 [Arabidopsis thaliana]
  misc_feature (87)..(200): Homolog of NCBI NO: 6598592 NR Description: F5J5.6 [Arabidopsis thaliana]
  misc_feature (233)..(400): Homolog of NCBI NO: 6598592 NR Description: F5J5.6 [Arabidopsis thaliana]
  misc_feature (1)..(400): Homolog of NCBI NO: 12324715 NR Description: unknown protein; 4584-7806 [Arabidopsis thaliana]
  misc_feature (1)..(400): Homolog of NCBI NO: 21553502 NR Description: unknown [Arabidopsis thaliana]
  misc_feature (1)..(400): Homolog of NCBI NO: 18400003 NR Description: expressed protein
METDTSAQEARNGKDIQGIQWEGFKYTRDEFRDTRLKHYDNFVNILRPSSREKLDKEHGQVVEKGKNFYDFQFNTRLVTSTIVHFQLRNLVWATSKHDVYLMQNYSLMHWSSLLQRGKEVVNVARSVTPTQKLPGLFSEPLSRVQVSSMAVKENLILLGGFDGELLCKCVNQPGVAFCTRLSTEDNAITNTVDIYRDPSGSLRLITANNDCKIRVFDAQSFTRVSEFTFDWSVNNTSVSPDGKLLAVLGDSTECLISDSRSEKVISSLRGHKDYSFASAWHPNGLILATGNQDTTCRLWDIRNPSESFAVLKGNMGAIRGLKFTPEGRFLAMAEPADFVHIFDTQSGFLQSQEIDLFGEIAGISFSPDSEALYVGVADRTYGSLMEYKRSKDNHYMDSFY

SEQ ID NO: 42510 - protein, 299 aa, Arabidopsis thaliana
  peptide (1)..(299): Ceres Seq. ID no. 12331182
  misc_feature (1)..(297): Homolog of NCBI NO: 18423837 NR Description: WD-repeat protein-like
  misc_feature (98)..(271): Homolog of NCBI NO: 6598592 NR Description: F5J5.6 [Arabidopsis thaliana]
  misc_feature (1)..(97): Homolog of NCBI NO: 25405023 NR Description: protein F28K19.28 [imported] - Arabidopsis
  misc_feature (82)..(299): Homolog of NCBI NO: 25405023 NR Description: protein F28K19.28 [imported] - Arabidopsis
  misc_feature (1)..(299): Homolog of NCBI NO: 13937195 NR Description: At1g78070/F28K19_28 [Arabidopsis thaliana]
  misc_feature (1)..(99): Homolog of NCBI NO: 6598592 NR Description: F5J5.6 [Arabidopsis thaliana]
  misc_feature (132)..(299): Homolog of NCBI NO: 6598592 NR Description: F5J5.6 [Arabidopsis thaliana]
  misc_feature (1)..(299): Homolog of NCBI NO: 12324715 NR Description: unknown protein; 4584-7806 [Arabidopsis thaliana]
  misc_feature (1)..(299): Homolog of NCBI NO: 21553502 NR Description: unknown [Arabidopsis thaliana]
  misc_feature (1)..(299): Homolog of NCBI NO: 18400003 NR Description: expressed protein
MQNYSLMHWSSLLQRGKEVVNVARSVTPTQKLPGLFSEPLSRVQVSSMAVKENLILLGGFDGELLCKCVNQPGVAFCTRLSTEDNAITNTVDIYRDPSGSLRLITANNDCKIRVFDAQSFTRVSEFTFDWSVNNTSVSPDGKLLAVLGDSTECLISDSRSEKVISSLRGHKDYSFASAWHPNGLILATGNQDTTCRLWDIRNPSESFAVLKGNMGAIRGLKFTPEGRFLAMAEPADFVHIFDTQSGFLQSQEIDLFGEIAGISFSPDSEALYVGVADRTYGSLMEYKRSKDNHYMDSFY

SEQ ID NO: 42511 - DNA, 1392 bp, Arabidopsis thaliana
  misc_feature (1)..(1392): Ceres Seq. ID no. 12336242
  misc_feature: MA Experiment ID: 20000180 Result: Up-regulated in Transcription
  misc_feature: MA Experiment 20000180 PARAMETER Experiment Name: At_Germinating_Seeds_P Parameter: Age (hr) Value: 24 vs. 0
  misc_feature: MA Experiment 20000180 PARAMETER Experiment Name: At_Germinating_Seeds_P Parameter: Tissue Value: Germinating Seeds
  misc_feature: MA Experiment ID: 20000184 Result: Up-regulated in Transcription
  misc_feature: MA Experiment 20000184 PARAMETER Experiment Name: At_Shoots__P Parameter: Age (day) Value: 7
  misc_feature: MA Experiment 20000184 PARAMETER Experiment Name: At_Shoots__P Parameter: Tissue Value: Shoots vs. Whole Plant
  misc_feature: MA Experiment ID: 20000185 Result: Up-regulated in Transcription
  misc_feature: MA Experiment 20000185 PARAMETER Experiment Name: At_Roots__P Parameter: Age (day) Value: 7 vs. 21
  misc_feature: MA Experiment 20000185 PARAMETER Experiment Name: At_Roots__P Parameter: Organism Value: A. thaliana
  misc_feature: MA Experiment 20000185 PARAMETER Experiment Name: At_Roots__P Parameter: Tissue Value: Roots vs. Whole Plant
  misc_feature: MA Experiment ID: 20000439 Result: Up-regulated in Transcription
  misc_feature: MA Experiment 20000439 PARAMETER Experiment Name: At_Roots__P Parameter: Age (day) Value: 14 vs. 21
  misc_feature: MA Experiment 20000439 PARAMETER Experiment Name: At_Roots__P Parameter: Organism Value: A. thaliana
  misc_feature: MA Experiment 20000439 PARAMETER Experiment Name: At_Roots__P Parameter: Tissue Value: Roots vs. Whole Plant
  misc_feature: MA Experiment ID: 20000527 Result: Down-regulated in Transcription
  misc_feature: MA Experiment 20000527 PARAMETER Experiment Name: At_10percent_PEG_P Parameter: Age (day) Value: 20
  misc_feature: MA Experiment 20000527 PARAMETER Experiment Name: At_10percent_PEG_P Parameter: Organism Value: A. thaliana
  misc_feature: MA Experiment 20000527 PARAMETER Experiment Name: At_10percent_PEG_P Parameter: Plant Line Value: WS
  misc_feature: MA Experiment 20000527 PARAMETER Experiment Name: At_10percent_PEG_P Parameter: Timepoint (day) Value: 20
  misc_feature: MA Experiment 20000527 PARAMETER Experiment Name: At_10percent_PEG_P Parameter: Tissue Value: Whole Plant
  misc_feature: MA Experiment 20000527 PARAMETER Experiment Name: At_10percent_PEG_P Parameter: Treatment Value: 10percent PEG vs. No Treatment
attacactcttcctccattttttgattacttccatttcctcaaaagtcaaagctctctttcttctctctcgagatttgctaacttgtcaatggcggatgttgagaatctgaactctgttccggcgtcggaagacacagagtatggatttaaacggccggagatgtacagcacaaacatagccaattccataacttcctacgctcgtcatgtttttgttctttacaaaactcctgaagcttggctctctcacgtcgaagaagaaggtttacctcaacgtttcgctacgttgcttaaagatcgcaaatctgatcttcttgttcagacgaagctcaatgtatgtgaaggtggtggatctgacggtgatgttttgatttttcccgatatgatcagatacaagggggttaaggatacggatgtggaaggtttctttgaagatgttcttgtgaatgggaagccatggagttctgggatacaagaagagatatctggaacatttgtatttgtgtgtactcatgctagtcgtgacaagagatgtggtgtttgtggaccagtgatcttggagaggtttaagcaagagattggttctcgaggactgtcggaccagattacactgaaacgttgttctcatgttggacagcacaagtatgctggtaatttgatcatcttctgtcctgattcagctggaaagattactggcaattggtatggctatgtaacacctgatgatgtacctgaattgcttgatcaacatattgcaaaaggagaaatcatacaaaggatttggagggggcaaatgggtctacctggaggtgaagctgagaaagtgcatgaacagaaagttataccaaatggtcacggtgtagtgaaagaggagagcaaaggattcacaggaggatgttgtcagggatcaaacggtgtttcgtgttgccaagacgaaactccaaagccagagccaatcaagaaagaagtaaaaaagtgtaccatatggttccagcctcttgacaaagaagagctttacattggagctgctgtggttggagccattgcaactatagccatggctttcacctttttcaagaggtcaggttaagaacctaaccttacttacttaccaatagaagtttttccttggagattgccatgagacaatagaaaaagaaaacctccattgattcgaccacaaaacagaagcgaagaattatgtttttgtctttgattttaccattaaagaaacatataaactttttggtttctgtgagcgtttttttgccttgctatcttctcacattatgtgtttttgttgtaatggccataacttctgtgattggtctaaactctctcactttggtgcattaacaaaactttgatttggtttggtttggcttatgttc

SEQ ID NO: 42512 - protein, 362 aa, Arabidopsis thaliana
  peptide (1)..(362): Ceres Seq. ID no. 12336243
  misc_feature (59)..(311): Homolog of NCBI NO: 15241075 NR Description: sucrose cleavage protein-like
  misc_feature (44)..(316): Homolog of NCBI NO: 18416788 NR Description: sucrase-like protein
  misc_feature (44)..(316): Homolog of NCBI NO: 16604384 NR Description: AT4g26620/T15N24_70 [Arabidopsis thaliana]
  misc_feature (54)..(361): Homolog of NCBI NO: 1086252 NR Description: sucrose cleavage protein - potato
  misc_feature (54)..(362): Homolog of NCBI NO: 11994184 NR Description: sucrose cleavage protein-like [Arabidopsis
  misc_feature (34)..(362): Homolog of NCBI NO: 16604338 NR Description: AT3g27570/MMJ24_12 [Arabidopsis thaliana]
  misc_feature (1)..(362): Homolog of NCBI NO: 30688845 NR Description: sucrose cleavage protein -related [Arabidopsis
  misc_feature (54)..(362): Homolog of NCBI NO: 9758077 NR Description: sucrose cleavage protein-like [Arabidopsis
  misc_feature (30)..(362): Homolog of NCBI NO: 21553503 NR Description: sucrose cleavage protein-like [Arabidopsis
  misc_feature (30)..(362): Homolog of NCBI NO: 15237439 NR Description: sucrose cleavage protein -like
YTLPPFFDYFHFLKSQSSLSSLSRFANLSMADVENLNSVPASEDTEYGFKRPEMYSTNIANSITSYARHVFVLYKTPEAWLSHVEEEGLPQRFATLLKDRKSDLLVQTKLNVCEGGGSDGDVLIFPDMIRYKGVKDTDVEGFFEDVLVNGKPWSSGIQEEISGTFVFVCTHASRDKRCGVCGPVILERFKQEIGSRGLSDQITLKRCSHVGQHKYAGNLIIFCPDSAGKITGNWYGYVTPDDVPELLDQHIAKGEIIQRIWRGQMGLPGGEAEKVHEQKVIPNGHGVVKEESKGFTGGCCQGSNGVSCCQDETPKPEPIKKEVKKCTIWFQPLDKEELYIGAAVVGAIATIAMAFTFFKRSG

SEQ ID NO: 42513 - protein, 333 aa, Arabidopsis thaliana
  peptide (1)..(333): Ceres Seq. ID no. 12336244
  misc_feature (30)..(282): Homolog of NCBI NO: 15241075 NR Description: sucrose cleavage protein-like
  misc_feature (15)..(287): Homolog of NCBI NO: 18416788 NR Description: sucrase-like protein
  misc_feature (15)..(287): Homolog of NCBI NO: 16604384 NR Description: AT4g26620/T15N24_70 [Arabidopsis thaliana]
  misc_feature (25)..(332): Homolog of NCBI NO: 1086252 NR Description: sucrose cleavage protein - potato
  misc_feature (25)..(333): Homolog of NCBI NO: 11994184 NR Description: sucrose cleavage protein-like [Arabidopsis
  misc_feature (5)..(333): Homolog of NCBI NO: 16604338 NR Description: AT3g27570/MMJ24_12 [Arabidopsis thaliana]
  misc_feature (1)..(333): Homolog of NCBI NO: 30688845 NR Description: sucrose cleavage protein -related [Arabidopsis
  misc_feature (25)..(333): Homolog of NCBI NO: 9758077 NR Description: sucrose cleavage protein-like [Arabidopsis
  misc_feature (1)..(333): Homolog of NCBI NO: 21553503 NR Description: sucrose cleavage protein-like [Arabidopsis
  misc_feature (1)..(333): Homolog of NCBI NO: 15237439 NR Description: sucrose cleavage protein -like
MADVENLNSVPASEDTEYGFKRPEMYSTNIANSITSYARHVFVLYKTPEAWLSHVEEEGLPQRFATLLKDRKSDLLVQTKLNVCEGGGSDGDVLIFPDMIRYKGVKDTDVEGFFEDVLVNGKPWSSGIQEEISGTFVFVCTHASRDKRCGVCGPVILERFKQEIGSRGLSDQITLKRCSHVGQHKYAGNLIIFCPDSAGKITGNWYGYVTPDDVPELLDQHIAKGEIIQRIWRGQMGLPGGEAEKVHEQKVIPNGHGVVKEESKGFTGGCCQGSNGVSCCQDETPKPEPIKKEVKKCTIWFQPLDKEELYIGAAVVGAIATIAMAFTFFKRSG

SEQ ID NO: 42514 - protein, 309 aa, Arabidopsis thaliana
  peptide (1)..(309): Ceres Seq. ID no. 12336245
  misc_feature (6)..(258): Homolog of NCBI NO: 15241075 NR Description: sucrose cleavage protein-like
  misc_feature (1)..(263): Homolog of NCBI NO: 18416788 NR Description: sucrase-like protein
  misc_feature (1)..(263): Homolog of NCBI NO: 16604384 NR Description: AT4g26620/T15N24_70 [Arabidopsis thaliana]
  misc_feature (1)..(308): Homolog of NCBI NO: 1086252 NR Description: sucrose cleavage protein - potato
  misc_feature (1)..(309): Homolog of NCBI NO: 11994184 NR Description: sucrose cleavage protein-like [Arabidopsis
  misc_feature (1)..(309): Homolog of NCBI NO: 16604338 NR Description: AT3g27570/MMJ24_12 [Arabidopsis thaliana]
  misc_feature (1)..(309): Homolog of NCBI NO: 30688845 NR Description: sucrose cleavage protein -related [Arabidopsis
  misc_feature (1)..(309): Homolog of NCBI NO: 9758077 NR Description: sucrose cleavage protein-like [Arabidopsis
  misc_feature (1)..(309): Homolog of NCBI NO: 21553503 NR Description: sucrose cleavage protein-like [Arabidopsis
  misc_feature (1)..(309): Homolog of NCBI NO: 15237439 NR Description: sucrose cleavage protein -like
MYSTNIANSITSYARHVFVLYKTPEAWLSHVEEEGLPQRFATLLKDRKSDLLVQTKLNVCEGGGSDGDVLIFPDMIRYKGVKDTDVEGFFEDVLVNGKPWSSGIQEEISGTFVFVCTHASRDKRCGVCGPVILERFKQEIGSRGLSDQITLKRCSHVGQHKYAGNLIIFCPDSAGKITGNWYGYVTPDDVPELLDQHIAKGEIIQRIWRGQMGLPGGEAEKVHEQKVIPNGHGVVKEESKGFTGGCCQGSNGVSCCQDETPKPEPIKKEVKKCTIWFQPLDKEELYIGAAVVGAIATIAMAFTFFKRSG

SEQ ID NO: 42515 - DNA, 870 bp, Arabidopsis thaliana
  misc_feature (1)..(870): Ceres Seq. ID no. 12326712
  misc_feature: MA Experiment ID: 108573 Result: Up-regulated in Transcription
  misc_feature: MA Experiment 108573 PARAMETER Experiment Name: At_Drought_cDNA_P Parameter: Timepoint (hr) Value: 6
  misc_feature: MA Experiment 108573 PARAMETER Experiment Name: At_Drought_cDNA_P Parameter: Tissue Value: Aerial
  misc_feature: MA Experiment 108573 PARAMETER Experiment Name: At_Drought_cDNA_P Parameter: Treatment Value: Drought vs. No Drought
  misc_feature: MA Experiment ID: 108577 Result: Down-regulated in Transcription
  misc_feature: MA Experiment 108577 PARAMETER Experiment Name: At_42deg_Heat_cDNA_P Parameter: Temperature (deg C) Value: 42 vs. 22
  misc_feature: MA Experiment 108577 PARAMETER Experiment Name: At_42deg_Heat_cDNA_P Parameter: Timepoint (hr) Value: 6
  misc_feature: MA Experiment 108577 PARAMETER Experiment Name: At_42deg_Heat_cDNA_P Parameter: Tissue Value: Aerial
  misc_feature: MA Experiment ID: 108668 Result: Up-regulated in Transcription
  misc_feature: MA Experiment 108668 PARAMETER Experiment Name: At_2mM_SA_cDNA_P Parameter: Plant Line Value: WS
  misc_feature: MA Experiment 108668 PARAMETER Experiment Name: At_2mM_SA_cDNA_P Parameter: Timepoint (hr) Value: 6
  misc_feature: MA Experiment 108668 PARAMETER Experiment Name: At_2mM_SA_cDNA_P Parameter: Treatment Value: 2mM SA vs. No Treatment
  misc_feature: MA Experiment ID: 20000087 Result: Up-regulated in Transcription
  misc_feature: MA Experiment 20000087 PARAMETER Experiment Name: At_100uM_ABA_Mutants_cDNA_P Parameter: Plant Line Value: WS
  misc_feature: MA Experiment 20000087 PARAMETER Experiment Name: At_100uM_ABA_Mutants_cDNA_P Parameter: Timepoint (hr) Value: 6
  misc_feature: MA Experiment 20000087 PARAMETER Experiment Name: At_100uM_ABA_Mutants_cDNA_P Parameter: Tissue Value: Aerial
  misc_feature: MA Experiment 20000087 PARAMETER Experiment Name: At_100uM_ABA_Mutants_cDNA_P Parameter: Treatment Value: 100uM ABA vs. No Treatment
  misc_feature: MA Experiment ID: 20000182 Result: Up-regulated in Transcription
  misc_feature: MA Experiment 20000182 PARAMETER Experiment Name: At_2mM_SA_P Parameter: Age (day) Value: 14
  misc_feature: MA Experiment 20000182 PARAMETER Experiment Name: At_2mM_SA_P Parameter: Organism Value: A. thaliana
  misc_feature: MA Experiment 20000182 PARAMETER Experiment Name: At_2mM_SA_P Parameter: Plant Line Value: WS
  misc_feature: MA Experiment 20000182 PARAMETER Experiment Name: At_2mM_SA_P Parameter: Timepoint (hr) Value: 6
  misc_feature: MA Experiment 20000182 PARAMETER Experiment Name: At_2mM_SA_P Parameter: Tissue Value: Aerial
  misc_feature: MA Experiment 20000182 PARAMETER Experiment Name: At_2mM_SA_P Parameter: Treatment Value: 2mM SA vs. No Treatment
  misc_feature: MA Experiment ID: 20000437 Result: Up-regulated in Transcription
  misc_feature: MA Experiment 20000437 PARAMETER Experiment Name: At_Drought_P Parameter: Age (day) Value: 8
  misc_feature: MA Experiment 20000437 PARAMETER Experiment Name: At_Drought_P Parameter: Organism Value: A. thaliana
  misc_feature: MA Experiment 20000437 PARAMETER Experiment Name: At_Drought_P Parameter: Plant Line Value: WS
  misc_feature: MA Experiment 20000437 PARAMETER Experiment Name: At_Drought_P Parameter: Timepoint (hr) Value: 24
  misc_feature: MA Experiment 20000437 PARAMETER Experiment Name: At_Drought_P Parameter: Tissue Value: Whole Plant
  misc_feature: MA Experiment 20000437 PARAMETER Experiment Name: At_Drought_P Parameter: Treatment Value: Drought vs. No Drought
  misc_feature: MA Experiment ID: 20001905 Result: Up-regulated in Transcription
  misc_feature: MA Experiment 20001905 PARAMETER Experiment Name: At_Drought_Reproduction_P Parameter: Age (day) Value: 40
  misc_feature: MA Experiment 20001905 PARAMETER Experiment Name: At_Drought_Reproduction_P Parameter: Organism Value: A. thaliana
  misc_feature: MA Experiment 20001905 PARAMETER Experiment Name: At_Drought_Reproduction_P Parameter: Plant Line Value: WS
  misc_feature: MA Experiment 20001905 PARAMETER Experiment Name: At_Drought_Reproduction_P Parameter: Timepoint (day) Value: 10
  misc_feature: MA Experiment 20001905 PARAMETER Experiment Name: At_Drought_Reproduction_P Parameter: Tissue Value: Rosettes
  misc_feature: MA Experiment 20001905 PARAMETER Experiment Name: At_Drought_Reproduction_P Parameter: Treatment Value: Drought vs. No Drought
attttattttcttaaaatagtatatgattttttcattttaaactttctttgtgttttcttcttctcttcctttatttggtgaagaaaaaggaaagaaaaatctcaactttgattctctctccctctatatatactttatttattctccactcataatagtttcatcatctctttcggtctatgaaaaacattggaaaaaccctaattcctagtgttgcgaatcacttttcattgcagctttgaacttcagtctgtgaatttccaacagcaatgacaactccagcaaaaaagagactgatgtgggatttcaagagactgcagaaagatcctcctgtgggaataagtggagctccacaagataacaatatcatgcattggaatgctctcatctttggacctgaggacactccatgggatggaggtactttcaagttgactcttcacttcaccgaggattatccgaacaaacccccgattgttcggtttgtttcacggatgtttcatccaaacatttatgctgatggaagcatttgcttggatatcttgcaaaaccagtggagccccatctacgacgttgctgcagttctcacatcaattcagtctttgctctgtgacccaaaccctgactcaccagcgaacgcagaggctgcaaggttgttcagtgagaataaaagagaatataacaggaaagtaatcgagatcgtggagcagagctatgtataaatatgattcattttgttgtattgactaatgagtaattggatgttgaatagtatttattatctgccttgagtttattttacatggatgtttaaatttcggaaatgagatttcttgctaatataatatcataatatattttgtataact

SEQ ID NO: 42516 - protein, 150 aa, Arabidopsis thaliana
  peptide (1)..(150): Ceres Seq. ID no. 12326713
  misc_feature (1)..(149): Homolog of NCBI NO: 13516453 NR Description: ubiquitin-conjugating enzyme (E2) [Nicotiana
  misc_feature (1)..(149): Homolog of NCBI NO: 136640 NR Description: Ubiquitin-conjugating enzyme E2-17 kDa
  misc_feature (1)..(149): Homolog of NCBI NO: 464980 NR Description: Ubiquitin-conjugating enzyme E2-17 kDa
  misc_feature (1)..(149): Homolog of NCBI NO: 13516451 NR Description: ubiquitin-conjugating enzyme (E2) [Nicotiana
  misc_feature (1)..(149): Homolog of NCBI NO: 8118527 NR Description: ubiquitin conjugating protein [Avicennia marina]
  misc_feature (1)..(149): Homolog of NCBI NO: 33146810 NR Description: OsRad6 [Oryza sativa (japonica cultivar-group)]
  misc_feature (1)..(149): Homolog of NCBI NO: 18844990 NR Description: Rad6 [Oryza sativa (japonica cultivar-group)]
  misc_feature (1)..(146): Homolog of NCBI NO: 15081749 NR Description: AT5g62540/K19B1_15 [Arabidopsis thaliana]
  misc_feature (1)..(146): Homolog of NCBI NO: 23505769 NR Description: At5g62540/K19B1_15 [Arabidopsis thaliana]
  misc_feature (1)..(150): Homolog of NCBI NO: 18424601 NR Description: E2, ubiquitin-conjugating enzyme 3 (UBC3)
MTTPAKKRLMWDFKRLQKDPPVGISGAPQDNNIMHWNALIFGPEDTPWDGGTFKLTLHFTEDYPNKPPIVRFVSRMFHPNIYADGSICLDILQNQWSPIYDVAAVLTSIQSLLCDPNPDSPANAEAARLFSENKREYNRKVIEIVEQSYV

SEQ ID NO: 42517 - protein, 141 aa, Arabidopsis thaliana
  peptide (1)..(141): Ceres Seq. ID no. 12326714
  misc_feature (1)..(140): Homolog of NCBI NO: 13516453 NR Description: ubiquitin-conjugating enzyme (E2) [Nicotiana
  misc_feature (1)..(140): Homolog of NCBI NO: 136640 NR Description: Ubiquitin-conjugating enzyme E2-17 kDa
  misc_feature (1)..(140): Homolog of NCBI NO: 464980 NR Description: Ubiquitin-conjugating enzyme E2-17 kDa
  misc_feature (1)..(140): Homolog of NCBI NO: 13516451 NR Description: ubiquitin-conjugating enzyme (E2) [Nicotiana
  misc_feature (1)..(140): Homolog of NCBI NO: 8118527 NR Description: ubiquitin conjugating protein [Avicennia marina]
  misc_feature (1)..(140): Homolog of NCBI NO: 33146810 NR Description: OsRad6 [Oryza sativa (japonica cultivar-group)]
  misc_feature (1)..(140): Homolog of NCBI NO: 18844990 NR Description: Rad6 [Oryza sativa (japonica cultivar-group)]
  misc_feature (1)..(137): Homolog of NCBI NO: 15081749 NR Description: AT5g62540/K19B1_15 [Arabidopsis thaliana]
  misc_feature (1)..(137): Homolog of NCBI NO: 23505769 NR Description: At5g62540/K19B1_15 [Arabidopsis thaliana]
  misc_feature (1)..(141): Homolog of NCBI NO: 18424601 NR Description: E2, ubiquitin-conjugating enzyme 3 (UBC3)
MWDFKRLQKDPPVGISGAPQDNNIMHWNALIFGPEDTPWDGGTFKLTLHFTEDYPNKPPIVRFVSRMFHPNIYADGSICLDILQNQWSPIYDVAAVLTSIQSLLCDPNPDSPANAEAARLFSENKREYNRKVIEIVEQSYV

SEQ ID NO: 42518 - protein, 117 aa, Arabidopsis thaliana
  peptide (1)..(117): Ceres Seq. ID no. 12326715
  misc_feature (1)..(116): Homolog of NCBI NO: 13516453 NR Description: ubiquitin-conjugating enzyme (E2) [Nicotiana
  misc_feature (1)..(116): Homolog of NCBI NO: 136640 NR Description: Ubiquitin-conjugating enzyme E2-17 kDa
  misc_feature (1)..(116): Homolog of NCBI NO: 464980 NR Description: Ubiquitin-conjugating enzyme E2-17 kDa
  misc_feature (1)..(116): Homolog of NCBI NO: 13516451 NR Description: ubiquitin-conjugating enzyme (E2) [Nicotiana
  misc_feature (1)..(116): Homolog of NCBI NO: 8118527 NR Description: ubiquitin conjugating protein [Avicennia marina]
  misc_feature (1)..(116): Homolog of NCBI NO: 33146810 NR Description: OsRad6 [Oryza sativa (japonica cultivar-group)]
  misc_feature (1)..(116): Homolog of NCBI NO: 18844990 NR Description: Rad6 [Oryza sativa (japonica cultivar-group)]
  misc_feature (1)..(113): Homolog of NCBI NO: 15081749 NR Description: AT5g62540/K19B1_15 [Arabidopsis thaliana]
  misc_feature (1)..(113): Homolog of NCBI NO: 23505769 NR Description: At5g62540/K19B1_15 [Arabidopsis thaliana]
  misc_feature (1)..(117): Homolog of NCBI NO: 18424601 NR Description: E2, ubiquitin-conjugating enzyme 3 (UBC3)
MHWNALIFGPEDTPWDGGTFKLTLHFTEDYPNKPPIVRFVSRMFHPNIYADGSICLDILQNQWSPIYDVAAVLTSIQSLLCDPNPDSPANAEAARLFSENKREYNRKVIEIVEQSYV

SEQ ID NO: 42519 - DNA, 1192 bp, Arabidopsis thaliana
  misc_feature (1)..(1192): Ceres Seq. ID no. 12331041
  misc_feature: MA Experiment ID: 108435 Result: Down-regulated in Transcription
  misc_feature: MA Experiment 108435 PARAMETER Experiment Name: At_stm_Mutants_cDNA_P Parameter: Plant Line Value: wt Landsburg vs stm
  misc_feature: MA Experiment 108435 PARAMETER Experiment Name: At_stm_Mutants_cDNA_P Parameter: Tissue Value: Shoot Apical Meristem Region
  misc_feature: MA Experiment ID: 108462 Result: Up-regulated in Transcription
  misc_feature: MA Experiment 108462 PARAMETER Experiment Name: At_Germinating_Seeds_cDNA_P Parameter: Age (day) Value: 2 vs. 0
  misc_feature: MA Experiment 108462 PARAMETER Experiment Name: At_Germinating_Seeds_cDNA_P Parameter: Tissue Value: Germinating Seeds
  misc_feature: MA Experiment ID: 108463 Result: Up-regulated in Transcription
  misc_feature: MA Experiment 108463 PARAMETER Experiment Name: At_Germinating_Seeds_cDNA_P Parameter: Age (day) Value: 3 vs. 0
  misc_feature: MA Experiment 108463 PARAMETER Experiment Name: At_Germinating_Seeds_cDNA_P Parameter: Tissue Value: Germinating Seeds
  misc_feature: MA Experiment ID: 108464 Result: Up-regulated in Transcription
  misc_feature: MA Experiment 108464 PARAMETER Experiment Name: At_Germinating_Seeds_cDNA_P Parameter: Age (day) Value: 4 vs. 0
  misc_feature: MA Experiment 108464 PARAMETER Experiment Name: At_Germinating_Seeds_cDNA_P Parameter: Tissue Value: Germinating Seeds
  misc_feature: MA Experiment ID: 108501 Result: Down-regulated in Transcription
  misc_feature: MA Experiment 108501 PARAMETER Experiment Name: At_ap2_floral_buds_cDNA_P Parameter: Plant Line Value: ap2 (Ler.)
  misc_feature: MA Experiment 108501 PARAMETER Experiment Name: At_ap2_floral_buds_cDNA_P Parameter: Tissue Value: Closed Flower
  misc_feature: MA Experiment ID: 108579 Result: Down-regulated in Transcription
  misc_feature: MA Experiment 108579 PARAMETER Experiment Name: At_4deg_Cold_cDNA_P Parameter: Temperature (deg C) Value: 4 vs. 22
  misc_feature: MA Experiment 108579 PARAMETER Experiment Name: At_4deg_Cold_cDNA_P Parameter: Timepoint (hr) Value: 6
  misc_feature: MA Experiment 108579 PARAMETER Experiment Name: At_4deg_Cold_cDNA_P Parameter: Tissue Value: Aerial
  misc_feature: MA Experiment ID: 108595 Result: Down-regulated in Transcription
  misc_feature: MA Experiment 108595 PARAMETER Experiment Name: At_Ler-pi_Ovule_cDNA_P Parameter: Plant Line Value: null
  misc_feature: MA Experiment ID: 108608 Result: Down-regulated in Transcription
  misc_feature: MA Experiment 108608 PARAMETER Experiment Name: At_100uM_ABA_cDNA_P Parameter: Timepoint (hr) Value: 1
  misc_feature: MA Experiment 108608 PARAMETER Experiment Name: At_100uM_ABA_cDNA_P Parameter: Tissue Value: Aerial
  misc_feature: MA Experiment 108608 PARAMETER Experiment Name: At_100uM_ABA_cDNA_P Parameter: Treatment Value: 100uM ABA vs. No Treatment
  misc_feature: MA Experiment ID: 20000069 Result: Down-regulated in Transcription
  misc_feature: MA Experiment 20000069 PARAMETER Experiment Name: At_100uM_ABA_Mutants_cDNA_P Parameter: Plant Line Value: CS23
  misc_feature: MA Experiment 20000069 PARAMETER Experiment Name: At_100uM_ABA_Mutants_cDNA_P Parameter: Timepoint (hr) Value: 6
  misc_feature: MA Experiment 20000069 PARAMETER Experiment Name: At_100uM_ABA_Mutants_cDNA_P Parameter: Tissue Value: Aerial
  misc_feature: MA Experiment 20000069 PARAMETER Experiment Name: At_100uM_ABA_Mutants_cDNA_P Parameter: Treatment Value: 100uM ABA vs. No Treatment
  misc_feature: MA Experiment ID: 20000070 Result: Down-regulated in Transcription
  misc_feature: MA Experiment 20000070 PARAMETER Experiment Name: At_100uM_ABA_Mutants_cDNA_P Parameter: Plant Line Value: CS24
  misc_feature: MA Experiment 20000070 PARAMETER Experiment Name: At_100uM_ABA_Mutants_cDNA_P Parameter: Timepoint (hr) Value: 6
  misc_feature: MA Experiment 20000070 PARAMETER Experiment Name: At_100uM_ABA_Mutants_cDNA_P Parameter: Tissue Value: Aerial
  misc_feature: MA Experiment 20000070 PARAMETER Experiment Name: At_100uM_ABA_Mutants_cDNA_P Parameter: Treatment Value: 100uM ABA vs. No Treatment
  misc_feature: MA Experiment ID: 20000071 Result: Down-regulated in Transcription
  misc_feature: MA Experiment 20000071 PARAMETER Experiment Name: At_100uM_ABA_Mutants_cDNA_P Parameter: Plant Line Value: CS8104
  misc_feature: MA Experiment 20000071 PARAMETER Experiment Name: At_100uM_ABA_Mutants_cDNA_P Parameter: Timepoint (hr) Value: 6
  misc_feature: MA Experiment 20000071 PARAMETER Experiment Name: At_100uM_ABA_Mutants_cDNA_P Parameter: Tissue Value: Aerial
  misc_feature: MA Experiment 20000071 PARAMETER Experiment Name: At_100uM_ABA_Mutants_cDNA_P Parameter: Treatment Value: 100uM ABA vs. No Treatment
  misc_feature: MA Experiment ID: 20000072 Result: Down-regulated in Transcription
  misc_feature: MA Experiment 20000072 PARAMETER Experiment Name: At_100uM_ABA_Mutants_cDNA_P Parameter: Plant Line Value: CS8105
  misc_feature: MA Experiment 20000072 PARAMETER Experiment Name: At_100uM_ABA_Mutants_cDNA_P Parameter: Timepoint (hr) Value: 6
  misc_feature: MA Experiment 20000072 PARAMETER Experiment Name: At_100uM_ABA_Mutants_cDNA_P Parameter: Tissue Value: Aerial
  misc_feature: MA Experiment 20000072 PARAMETER Experiment Name: At_100uM_ABA_Mutants_cDNA_P Parameter: Treatment Value: 100uM ABA vs. No Treatment
  misc_feature: MA Experiment ID: 20000086 Result: Down-regulated in Transcription
  misc_feature: MA Experiment 20000086 PARAMETER Experiment Name: At_100uM_ABA_Mutants_cDNA_P Parameter: Plant Line Value: CS22
  misc_feature: MA Experiment 20000086 PARAMETER Experiment Name: At_100uM_ABA_Mutants_cDNA_P Parameter: Timepoint (hr) Value: 6
  misc_feature: MA Experiment 20000086 PARAMETER Experiment Name: At_100uM_ABA_Mutants_cDNA_P Parameter: Tissue Value: Aerial
  misc_feature: MA Experiment 20000086 PARAMETER Experiment Name: At_100uM_ABA_Mutants_cDNA_P Parameter: Treatment Value: 100uM ABA vs. No Treatment
  misc_feature: MA Experiment ID: 20000087 Result: Down-regulated in Transcription
  misc_feature: MA Experiment 20000087 PARAMETER Experiment Name: At_100uM_ABA_Mutants_cDNA_P Parameter: Plant Line Value: WS
  misc_feature: MA Experiment 20000087 PARAMETER Experiment Name: At_100uM_ABA_Mutants_cDNA_P Parameter: Timepoint (hr) Value: 6
  misc_feature: MA Experiment 20000087 PARAMETER Experiment Name: At_100uM_ABA_Mutants_cDNA_P Parameter: Tissue Value: Aerial
  misc_feature: MA Experiment 20000087 PARAMETER Experiment Name: At_100uM_ABA_Mutants_cDNA_P Parameter: Treatment Value: 100uM ABA vs. No Treatment
  misc_feature: MA Experiment ID: 20000088 Result: Down-regulated in Transcription
  misc_feature: MA Experiment 20000088 PARAMETER Experiment Name: At_100uM_ABA_Mutants_cDNA_P Parameter: Plant Line Value: Landsberg
  misc_feature: MA Experiment 20000088 PARAMETER Experiment Name: At_100uM_ABA_Mutants_cDNA_P Parameter: Timepoint (hr) Value: 6
  misc_feature: MA Experiment 20000088 PARAMETER Experiment Name: At_100uM_ABA_Mutants_cDNA_P Parameter: Tissue Value: Aerial
  misc_feature: MA Experiment 20000088 PARAMETER Experiment Name: At_100uM_ABA_Mutants_cDNA_P Parameter: Treatment Value: 100uM ABA vs. No Treatment
  misc_feature: MA Experiment ID: 20000113 Result: Up-regulated in Transcription
  misc_feature: MA Experiment 20000113 PARAMETER Experiment Name: At_42deg_Heat_cDNA_P Parameter: Temperature (deg C) Value: 42 vs. 22
  misc_feature: MA Experiment 20000113 PARAMETER Experiment Name: At_42deg_Heat_cDNA_P Parameter: Timepoint (hr) Value: 8
  misc_feature: MA Experiment 20000113 PARAMETER Experiment Name: At_42deg_Heat_cDNA_P Parameter: Tissue Value: Aerial
  misc_feature: MA Experiment ID: 20000117 Result: Down-regulated in Transcription
  misc_feature: MA Experiment 20000117 PARAMETER Experiment Name: At_100uM_ABA_Mutants_cDNA_P Parameter: Plant Line Value: Columbia
  misc_feature: MA Experiment 20000117 PARAMETER Experiment Name: At_100uM_ABA_Mutants_cDNA_P Parameter: Timepoint (hr) Value: 6
  misc_feature: MA Experiment 20000117 PARAMETER Experiment Name: At_100uM_ABA_Mutants_cDNA_P Parameter: Tissue Value: Aerial
  misc_feature: MA Experiment 20000117 PARAMETER Experiment Name: At_100uM_ABA_Mutants_cDNA_P Parameter: Treatment Value: 100uM ABA vs. No Treatment
  misc_feature: MA Experiment ID: 20000166 Result: Down-regulated in Transcription
  misc_feature: MA Experiment 20000166 PARAMETER Experiment Name: At_100uM_ABA_P Parameter: Age (day) Value: 14
  misc_feature: MA Experiment 20000166 PARAMETER Experiment Name: At_100uM_ABA_P Parameter: Organism Value: A. thaliana
  misc_feature: MA Experiment 20000166 PARAMETER Experiment Name: At_100uM_ABA_P Parameter: Plant Line Value: WS
  misc_feature: MA Experiment 20000166 PARAMETER Experiment Name: At_100uM_ABA_P Parameter: Timepoint (hr) Value: 1
  misc_feature: MA Experiment 20000166 PARAMETER Experiment Name: At_100uM_ABA_P Parameter: Tissue Value: Aerial
  misc_feature: MA Experiment 20000166 PARAMETER Experiment Name: At_100uM_ABA_P Parameter: Treatment Value: 100uM ABA vs. No Treatment
  misc_feature: MA Experiment ID: 20000171 Result: Down-regulated in Transcription
  misc_feature: MA Experiment 20000171 PARAMETER Experiment Name: At_42deg_Heat_P Parameter: Age (day) Value: 14
  misc_feature: MA Experiment 20000171 PARAMETER Experiment Name: At_42deg_Heat_P Parameter: Organism Value: A. thaliana
  misc_feature: MA Experiment 20000171 PARAMETER Experiment Name: At_42deg_Heat_P Parameter: Plant Line Value: WS
  misc_feature: MA Experiment 20000171 PARAMETER Experiment Name: At_42deg_Heat_P Parameter: Temperature (deg C) Value: 42 vs. 22
  misc_feature: MA Experiment 20000171 PARAMETER Experiment Name: At_42deg_Heat_P Parameter: Timepoint (hr) Value: 1
  misc_feature: MA Experiment 20000171 PARAMETER Experiment Name: At_42deg_Heat_P Parameter: Tissue Value: Aerial
  misc_feature: MA Experiment ID: 20000179 Result: Up-regulated in Transcription
  misc_feature: MA Experiment 20000179 PARAMETER Experiment Name: At_Germinating_Seeds_P Parameter: Age (hr) Value: 6 vs. 0
  misc_feature: MA Experiment 20000179 PARAMETER Experiment Name: At_Germinating_Seeds_P Parameter: Tissue Value: Germinating Seeds
  misc_feature: MA Experiment ID: 20000180 Result: Up-regulated in Transcription
  misc_feature: MA Experiment 20000180 PARAMETER Experiment Name: At_Germinating_Seeds_P Parameter: Age (hr) Value: 24 vs. 0
  misc_feature: MA Experiment 20000180 PARAMETER Experiment Name: At_Germinating_Seeds_P Parameter: Tissue Value: Germinating Seeds
  misc_feature: MA Experiment ID: 20000185 Result: Down-regulated in Transcription
  misc_feature: MA Experiment 20000185 PARAMETER Experiment Name: At_Roots__P Parameter: Age (day) Value: 7 vs. 21
  misc_feature: MA Experiment 20000185 PARAMETER Experiment Name: At_Roots__P Parameter: Organism Value: A. thaliana
  misc_feature: MA Experiment 20000185 PARAMETER Experiment Name: At_Roots__P Parameter: Tissue Value: Roots vs. Whole Plant
  misc_feature: MA Experiment ID: 20000234 Result: Down-regulated in Transcription
  misc_feature: MA Experiment 20000234 PARAMETER Experiment Name: At_Siliques_P Parameter: Age (day) Value: 21
  misc_feature: MA Experiment 20000234 PARAMETER Experiment Name: At_Siliques_P Parameter: Organism Value: A. thaliana
  misc_feature: MA Experiment 20000234 PARAMETER Experiment Name: At_Siliques_P Parameter: Plant Line Value: WS
  misc_feature: MA Experiment 20000234 PARAMETER Experiment Name: At_Siliques_P Parameter: Tissue Value: Less Than 5mm Siliques vs. Whole Plant
  misc_feature: MA Experiment ID: 20000235 Result: Down-regulated in Transcription
  misc_feature: MA Experiment 20000235 PARAMETER Experiment Name: At_Siliques_P Parameter: Age (day) Value: 21
  misc_feature: MA Experiment 20000235 PARAMETER Experiment Name: At_Siliques_P Parameter: Organism Value: A. thaliana
  misc_feature: MA Experiment 20000235 PARAMETER Experiment Name: At_Siliques_P Parameter: Plant Line Value: WS
  misc_feature: MA Experiment 20000235 PARAMETER Experiment Name: At_Siliques_P Parameter: Tissue Value: 5-10mm Siliques vs. Whole Plant
  misc_feature: MA Experiment ID: 20000264 Result: Down-regulated in Transcription
  misc_feature: MA Experiment 20000264 PARAMETER Experiment Name: At_Open_Flower_P Parameter: Age (day) Value: 21
  misc_feature: MA Experiment 20000264 PARAMETER Experiment Name: At_Open_Flower_P Parameter: Plant Line Value: WS
  misc_feature: MA Experiment 20000264 PARAMETER Experiment Name: At_Open_Flower_P Parameter: Tissue Value: Open Flower vs. Whole Plant
  misc_feature: MA Experiment ID: 20000265 Result: Down-regulated in Transcription
  misc_feature: MA Experiment 20000265 PARAMETER Experiment Name: At_Open_Flower_P Parameter: Age (day) Value: 21
  misc_feature: MA Experiment 20000265 PARAMETER Experiment Name: At_Open_Flower_P Parameter: Plant Line Value: WS
  misc_feature: MA Experiment 20000265 PARAMETER Experiment Name: At_Open_Flower_P Parameter: Tissue Value: Closed Flower vs. Whole Plant
  misc_feature: MA Experiment ID: 20000286 Result: Down-regulated in Transcription
  misc_feature: MA Experiment 20000286 PARAMETER Experiment Name: At_Open_Flower_P Parameter: Age (day) Value: 21
  misc_feature: MA Experiment 20000286 PARAMETER Experiment Name: At_Open_Flower_P Parameter: Plant Line Value: WS
  misc_feature: MA Experiment 20000286 PARAMETER Experiment Name: At_Open_Flower_P Parameter: Tissue Value: Half Open vs. Whole Plant
  misc_feature: MA Experiment ID: 20000308 Result: Down-regulated in Transcription
  misc_feature: MA Experiment 20000308 PARAMETER Experiment Name: At_100mM_NaCl__P Parameter: Age (day) Value: 17
  misc_feature: MA Experiment 20000308 PARAMETER Experiment Name: At_100mM_NaCl__P Parameter: Organism Value: A. thaliana
  misc_feature: MA Experiment 20000308 PARAMETER Experiment Name: At_100mM_NaCl__P Parameter: Plant Line Value: WS
  misc_feature: MA Experiment 20000308 PARAMETER Experiment Name: At_100mM_NaCl__P Parameter: Timepoint (hr) Value: 72
  misc_feature: MA Experiment 20000308 PARAMETER Experiment Name: At_100mM_NaCl__P Parameter: Tissue Value: Whole Plant
  misc_feature: MA Experiment 20000308 PARAMETER Experiment Name: At_100mM_NaCl__P Parameter: Treatment Value: 100mM NaCl vs. No Treatment
  misc_feature: MA Experiment ID: 20000436 Result: Down-regulated in Transcription
  misc_feature: MA Experiment 20000436 PARAMETER Experiment Name: At_Drought_P Parameter: Age (day) Value: 7
  misc_feature: MA Experiment 20000436 PARAMETER Experiment Name: At_Drought_P Parameter: Organism Value: A. thaliana
  misc_feature: MA Experiment 20000436 PARAMETER Experiment Name: At_Drought_P Parameter: Plant Line Value: WS
  misc_feature: MA Experiment 20000436 PARAMETER Experiment Name: At_Drought_P Parameter: Timepoint (hr) Value: 12
  misc_feature: MA Experiment 20000436 PARAMETER Experiment Name: At_Drought_P Parameter: Tissue Value: Whole Plant
  misc_feature: MA Experiment 20000436 PARAMETER Experiment Name: At_Drought_P Parameter: Treatment Value: Drought vs. No Drought
  misc_feature: MA Experiment ID: 20000437 Result: Down-regulated in Transcription
  misc_feature: MA Experiment 20000437 PARAMETER Experiment Name: At_Drought_P Parameter: Age (day) Value: 8
  misc_feature: MA Experiment 20000437 PARAMETER Experiment Name: At_Drought_P Parameter: Organism Value: A. thaliana
  misc_feature: MA Experiment 20000437 PARAMETER Experiment Name: At_Drought_P Parameter: Plant Line Value: WS
  misc_feature: MA Experiment 20000437 PARAMETER Experiment Name: At_Drought_P Parameter: Timepoint (hr) Value: 24
  misc_feature: MA Experiment 20000437 PARAMETER Experiment Name: At_Drought_P Parameter: Tissue Value: Whole Plant
  misc_feature: MA Experiment 20000437 PARAMETER Experiment Name: At_Drought_P Parameter: Treatment Value: Drought vs. No Drought
  misc_feature: MA Experiment ID: 20000439 Result: Down-regulated in Transcription
  misc_feature: MA Experiment 20000439 PARAMETER Experiment Name: At_Roots__P Parameter: Age (day) Value: 14 vs. 21
  misc_feature: MA Experiment 20000439 PARAMETER Experiment Name: At_Roots__P Parameter: Organism Value: A. thaliana
  misc_feature: MA Experiment 20000439 PARAMETER Experiment Name: At_Roots__P Parameter: Tissue Value: Roots vs. Whole Plant
  misc_feature: MA Experiment ID: 20000441 Result: Up-regulated in Transcription
  misc_feature: MA Experiment 20000441 PARAMETER Experiment Name: At_1uM_BR-BRZ__P Parameter: Tissue Value: Shoot Apices
  misc_feature: MA Experiment 20000441 PARAMETER Experiment Name: At_1uM_BR-BRZ__P Parameter: Treatment Value: 1uM BR vs. No Treatment
  misc_feature: MA Experiment ID: 20000444 Result: Up-regulated in Transcription
  misc_feature: MA Experiment 20000444 PARAMETER Experiment Name: At_100uM_NAA__P Parameter: Age (day) Value: 14
  misc_feature: MA Experiment 20000444 PARAMETER Experiment Name: At_100uM_NAA__P Parameter: Organism Value: A. thaliana
  misc_feature: MA Experiment 20000444 PARAMETER Experiment Name: At_100uM_NAA__P Parameter: Plant Line Value: WS
  misc_feature: MA Experiment 20000444 PARAMETER Experiment Name: At_100uM_NAA__P Parameter: Timepoint (hr) Value: 1
  misc_feature: MA Experiment 20000444 PARAMETER Experiment Name: At_100uM_NAA__P Parameter: Tissue Value: Aerial
  misc_feature: MA Experiment 20000444 PARAMETER Experiment Name: At_100uM_NAA__P Parameter: Treatment Value: 100uM NAA vs. No Treatment
  misc_feature: MA Experiment ID: 20000445 Result: Up-regulated in Transcription
  misc_feature: MA Experiment 20000445 PARAMETER Experiment Name: At_100uM_NAA__P Parameter: Age (day) Value: 14
  misc_feature: MA Experiment 20000445 PARAMETER Experiment Name: At_100uM_NAA__P Parameter: Organism Value: A. thaliana
  misc_feature: MA Experiment 20000445 PARAMETER Experiment Name: At_100uM_NAA__P Parameter: Plant Line Value: WS
  misc_feature: MA Experiment 20000445 PARAMETER Experiment Name: At_100uM_NAA__P Parameter: Timepoint (hr) Value: 6
  misc_feature: MA Experiment 20000445 PARAMETER Experiment Name: At_100uM_NAA__P Parameter: Tissue Value: Aerial
  misc_feature: MA Experiment 20000445 PARAMETER Experiment Name: At_100uM_NAA__P Parameter: Treatment Value: 100uM NAA vs. No Treatment
  misc_feature: MA Experiment ID: 20000452 Result: Down-regulated in Transcription
  misc_feature: MA Experiment 20000452 PARAMETER Experiment Name: At_CS6879_Shoots-Roots_P Parameter: Age (day) Value: 14
  misc_feature: MA Experiment 20000452 PARAMETER Experiment Name: At_CS6879_Shoots-Roots_P Parameter: Organism Value: A. thaliana
  misc_feature: MA Experiment 20000452 PARAMETER Experiment Name: At_CS6879_Shoots-Roots_P Parameter: Plant Line Value: CS6879 vs. WS
  misc_feature: MA Experiment 20000452 PARAMETER Experiment Name: At_CS6879_Shoots-Roots_P Parameter: Tissue Value: Shoots
  misc_feature: MA Experiment ID: 20000794 Result: Down-regulated in Transcription
  misc_feature: MA Experiment 20000794 PARAMETER Experiment Name: At_Petals_P Parameter: Age (day) Value: 23-25 days
  misc_feature: MA Experiment 20000794 PARAMETER Experiment Name: At_Petals_P Parameter: Plant Line Value: WS
  misc_feature: MA Experiment 20000794 PARAMETER Experiment Name: At_Petals_P Parameter: Tissue Value: Petals vs. Whole plant
  misc_feature: MA Experiment ID: 20001247 Result: Up-regulated in Transcription
  misc_feature: MA Experiment 20001247 PARAMETER Experiment Name: At_Far-red-induction_P Parameter: Age (day) Value: 7
  misc_feature: MA Experiment 20001247 PARAMETER Experiment Name: At_Far-red-induction_P Parameter: Light Value: Far-red vs. White
  misc_feature: MA Experiment 20001247 PARAMETER Experiment Name: At_Far-red-induction_P Parameter: Organism Value: A. thaliana
  misc_feature: MA Experiment 20001247 PARAMETER Experiment Name: At_Far-red-induction_P Parameter: Plant Line Value: Columbia
  misc_feature: MA Experiment 20001247 PARAMETER Experiment Name: At_Far-red-induction_P Parameter: Timepoint (hr) Value: 1
  misc_feature: MA Experiment 20001247 PARAMETER Experiment Name: At_Far-red-induction_P Parameter: Tissue Value: Whole Plant
  misc_feature: MA Experiment ID: 20001248 Result: Up-regulated in Transcription
  misc_feature: MA Experiment 20001248 PARAMETER Experiment Name: At_Far-red-induction_P Parameter: Age (day) Value: 7
  misc_feature: MA Experiment 20001248 PARAMETER Experiment Name: At_Far-red-induction_P Parameter: Light Value: Far-red vs. White
  misc_feature: MA Experiment 20001248 PARAMETER Experiment Name: At_Far-red-induction_P Parameter: Organism Value: A. thaliana
  misc_feature: MA Experiment 20001248 PARAMETER Experiment Name: At_Far-red-induction_P Parameter: Plant Line Value: Columbia
  misc_feature: MA Experiment 20001248 PARAMETER Experiment Name: At_Far-red-induction_P Parameter: Timepoint (hr) Value: 4
  misc_feature: MA Experiment 20001248 PARAMETER Experiment Name: At_Far-red-induction_P Parameter: Tissue Value: Whole Plant
  misc_feature: MA Experiment ID: 20001450 Result: Up-regulated in Transcription
  misc_feature: MA Experiment 20001450 PARAMETER Experiment Name: At_Far-red-induction_P Parameter: Age (day) Value: 7
  misc_feature: MA Experiment 20001450 PARAMETER Experiment Name: At_Far-red-induction_P Parameter: Light Value: Far-red vs. White
  misc_feature: MA Experiment 20001450 PARAMETER Experiment Name: At_Far-red-induction_P Parameter: Organism Value: A. thaliana
  misc_feature: MA Experiment 20001450 PARAMETER Experiment Name: At_Far-red-induction_P Parameter: Plant Line Value: Columbia
  misc_feature: MA Experiment 20001450 PARAMETER Experiment Name: At_Far-red-induction_P Parameter: Timepoint (hr) Value: 8
  misc_feature: MA Experiment 20001450 PARAMETER Experiment Name: At_Far-red-induction_P Parameter: Tissue Value: Whole Plant
  misc_feature: MA Experiment ID: 20001451 Result: Up-regulated in Transcription
  misc_feature: MA Experiment 20001451 PARAMETER Experiment Name: At_Far-red-induction_P Parameter: Age (day) Value: 7
  misc_feature: MA Experiment 20001451 PARAMETER Experiment Name: At_Far-red-induction_P Parameter: Light Value: Far-red vs. White
  misc_feature: MA Experiment 20001451 PARAMETER Experiment Name: At_Far-red-induction_P Parameter: Organism Value: A. thaliana
  misc_feature: MA Experiment 20001451 PARAMETER Experiment Name: At_Far-red-induction_P Parameter: Plant Line Value: Columbia
  misc_feature: MA Experiment 20001451 PARAMETER Experiment Name: At_Far-red-induction_P Parameter: Timepoint (hr) Value: 24
  misc_feature: MA Experiment 20001451 PARAMETER Experiment Name: At_Far-red-induction_P Parameter: Tissue Value: Whole Plant
  misc_feature: MA Experiment ID: 20001757 Result: Up-regulated in Transcription
  misc_feature: MA Experiment 20001757 PARAMETER Experiment Name: At_50mM_NH4NO3_L-to-H_P Parameter: Timepoint (hr) Value: 6
  misc_feature: MA Experiment 20001757 PARAMETER Experiment Name: At_50mM_NH4NO3_L-to-H_P Parameter: Tissue Value: Leaf
  misc_feature: MA Experiment 20001757 PARAMETER Experiment Name: At_50mM_NH4NO3_L-to-H_P Parameter: Treatment Value: 50mM NH4NO3 vs 100mM Mannitol
  misc_feature: MA Experiment ID: 20001768 Result: Up-regulated in Transcription
  misc_feature: MA Experiment 20001768 PARAMETER Experiment Name: At_Far-red-enriched-adult_P Parameter: Age (day) Value: 28
  misc_feature: MA Experiment 20001768 PARAMETER Experiment Name: At_Far-red-enriched-adult_P Parameter: Light Value: Far-red enriched vs. White
  misc_feature: MA Experiment 20001768 PARAMETER Experiment Name: At_Far-red-enriched-adult_P Parameter: Organism Value: A. thaliana
  misc_feature: MA Experiment 20001768 PARAMETER Experiment Name: At_Far-red-enriched-adult_P Parameter: Plant Line Value: Columbia
  misc_feature: MA Experiment 20001768 PARAMETER Experiment Name: At_Far-red-enriched-adult_P Parameter: Timepoint (hr) Value: 1
  misc_feature: MA Experiment 20001768 PARAMETER Experiment Name: At_Far-red-enriched-adult_P Parameter: Tissue Value: Aerial
  misc_feature: MA Experiment ID: 20001769 Result: Up-regulated in Transcription
  misc_feature: MA Experiment 20001769 PARAMETER Experiment Name: At_Far-red-enriched-adult_P Parameter: Age (day) Value: 28
  misc_feature: MA Experiment 20001769 PARAMETER Experiment Name: At_Far-red-enriched-adult_P Parameter: Light Value: Far-red enriched vs. White
  misc_feature: MA Experiment 20001769 PARAMETER Experiment Name: At_Far-red-enriched-adult_P Parameter: Organism Value: A. thaliana
  misc_feature: MA Experiment 20001769 PARAMETER Experiment Name: At_Far-red-enriched-adult_P Parameter: Plant Line Value: Columbia
  misc_feature: MA Experiment 20001769 PARAMETER Experiment Name: At_Far-red-enriched-adult_P Parameter: Timepoint (hr) Value: 4
  misc_feature: MA Experiment 20001769 PARAMETER Experiment Name: At_Far-red-enriched-adult_P Parameter: Tissue Value: Aerial
  misc_feature: MA Experiment ID: 20001770 Result: Up-regulated in Transcription
  misc_feature: MA Experiment 20001770 PARAMETER Experiment Name: At_Far-red-enriched-adult_P Parameter: Age (day) Value: 28
  misc_feature: MA Experiment 20001770 PARAMETER Experiment Name: At_Far-red-enriched-adult_P Parameter: Light Value: Far-red enriched vs. White
  misc_feature: MA Experiment 20001770 PARAMETER Experiment Name: At_Far-red-enriched-adult_P Parameter: Organism Value: A. thaliana
  misc_feature: MA Experiment 20001770 PARAMETER Experiment Name: At_Far-red-enriched-adult_P Parameter: Plant Line Value: Columbia
  misc_feature: MA Experiment 20001770 PARAMETER Experiment Name: At_Far-red-enriched-adult_P Parameter: Timepoint (hr) Value: 8
  misc_feature: MA Experiment 20001770 PARAMETER Experiment Name: At_Far-red-enriched-adult_P Parameter: Tissue Value: Aerial
aaaccttgttttgtctcaaacaaatttctctgaacacactcaacaacatatcccataacaaaaaaaagctattaaaaaaaaaagagaagcagccatggaagaagataagcaagaagcttcaatgccactagttccaattgacagcttctcttacagttggttagttaactttccttctttagaagctaccattgatgatcatcatcaaacattcgaagattcatcttcttcttcttccttcattgagatggatccaagattgcctccttctagaagattcttcatcaaaacatctcatgaaagtagcttcaagttcgataacttcgtctctttctccgacgaagatcactctttagttcacgccgacgagctcttccgtgacggctacgttatgccttatcgattaaagcccacgtccgcggctaccgaggaagaatctgagccgttggatacaacaacatcggagaagattgatacacgtggccttaacagcaagccttctcctacttcttcaagaaagctgaggagagtgtccaaatgggttttgctgaagtatcttgatttcttgacgccattgtgtaagagattaaggagatgtagatccgctgtaacaacgggaagtatcggtatggattcgaggatccgtgtaacgacttcgtgtaggagcagagtttattctgatgaaatgacgtcgtcgccaagaataagtgttgctgatgattattattggagaaggtcttgtgactccgagagctctatatacgaagccgttcttcattgcaagaaatcattcgagaaatgagaagaataatccatggaagaggagcagttagaagtagagatggagaatattaagcttgagagaataagcaaattgcattaacacgttacacatggagtgggagagaaagagagggagcaacttgtgatgtgtctttttgttgattctctctcttgaattaaagagattgatgtgaatgatccatgtgaatgtgtcatctgatgtggatcaagaatgtttttgtttttttacatgagtgggcacatttatagaaatatatatggggctgcaagcagaatcaagaaaatattttcagattttcttggctatttttttttctccatatgtgtatattccaatcatgtaagttaaatagtttctttttatatatggggtaaaaactataagtgc

SEQ ID NO: 42520 - protein, 235 aa, Arabidopsis thaliana
  peptide (1)..(235): Ceres Seq. ID no. 12331042
  misc_feature (1)..(233): Homolog of NCBI NO: 10177104 NR Description: gene_id:MXC20.13~unknown protein [Arabidopsis
  misc_feature (1)..(235): Homolog of NCBI NO: 18423445 NR Description: expressed protein
  misc_feature (1)..(235): Homolog of NCBI NO: 21553508 NR Description: unknown [Arabidopsis thaliana]
MEEDKQEASMPLVPIDSFSYSWLVNFPSLEATIDDHHQTFEDSSSSSSFIEMDPRLPPSRRFFIKTSHESSFKFDNFVSFSDEDHSLVHADELFRDGYVMPYRLKPTSAATEEESEPLDTTTSEKIDTRGLNSKPSPTSSRKLRRVSKWVLLKYLDFLTPLCKRLRRCRSAVTTGSIGMDSRIRVTTSCRSRVYSDEMTSSPRISVADDYYWRRSCDSESSIYEAVLHCKKSFEK

SEQ ID NO: 42521 - protein, 226 aa, Arabidopsis thaliana
  peptide (1)..(226): Ceres Seq. ID no. 12331043
  misc_feature (1)..(224): Homolog of NCBI NO: 10177104 NR Description: gene_id:MXC20.13~unknown protein [Arabidopsis
  misc_feature (1)..(226): Homolog of NCBI NO: 18423445 NR Description: expressed protein
  misc_feature (1)..(226): Homolog of NCBI NO: 21553508 NR Description: unknown [Arabidopsis thaliana]
MPLVPIDSFSYSWLVNFPSLEATIDDHHQTFEDSSSSSSFIEMDPRLPPSRRFFIKTSHESSFKFDNFVSFSDEDHSLVHADELFRDGYVMPYRLKPTSAATEEESEPLDTTTSEKIDTRGLNSKPSPTSSRKLRRVSKWVLLKYLDFLTPLCKRLRRCRSAVTTGSIGMDSRIRVTTSCRSRVYSDEMTSSPRISVADDYYWRRSCDSESSIYEAVLHCKKSFEK

SEQ ID NO: 42522 - protein, 184 aa, Arabidopsis thaliana
  peptide (1)..(184): Ceres Seq. ID no. 12331044
  misc_feature (1)..(182): Homolog of NCBI NO: 10177104 NR Description: gene_id:MXC20.13~unknown protein [Arabidopsis
  misc_feature (1)..(184): Homolog of NCBI NO: 18423445 NR Description: expressed protein
  misc_feature (1)..(184): Homolog of NCBI NO: 21553508 NR Description: unknown [Arabidopsis thaliana]
MDPRLPPSRRFFIKTSHESSFKFDNFVSFSDEDHSLVHADELFRDGYVMPYRLKPTSAATEEESEPLDTTTSEKIDTRGLNSKPSPTSSRKLRRVSKWVLLKYLDFLTPLCKRLRRCRSAVTTGSIGMDSRIRVTTSCRSRVYSDEMTSSPRISVADDYYWRRSCDSESSIYEAVLHCKKSFEK

SEQ ID NO: 42523 - DNA, 1546 bp, Arabidopsis thaliana
  misc_feature (1)..(1546): Ceres Seq. ID no. 12370788
  misc_feature: MA Experiment ID: 108462 Result: Down-regulated in Transcription
  misc_feature: MA Experiment 108462 PARAMETER Experiment Name: At_Germinating_Seeds_cDNA_P Parameter: Age (day) Value: 2 vs. 0
  misc_feature: MA Experiment 108462 PARAMETER Experiment Name: At_Germinating_Seeds_cDNA_P Parameter: Tissue Value: Germinating Seeds
  misc_feature: MA Experiment ID: 108463 Result: Down-regulated in Transcription
  misc_feature: MA Experiment 108463 PARAMETER Experiment Name: At_Germinating_Seeds_cDNA_P Parameter: Age (day) Value: 3 vs. 0
  misc_feature: MA Experiment 108463 PARAMETER Experiment Name: At_Germinating_Seeds_cDNA_P Parameter: Tissue Value: Germinating Seeds
  misc_feature: MA Experiment ID: 108464 Result: Down-regulated in Transcription
  misc_feature: MA Experiment 108464 PARAMETER Experiment Name: At_Germinating_Seeds_cDNA_P Parameter: Age (day) Value: 4 vs. 0
  misc_feature: MA Experiment 108464 PARAMETER Experiment Name: At_Germinating_Seeds_cDNA_P Parameter: Tissue Value: Germinating Seeds
  misc_feature: MA Experiment ID: 20000265 Result: Up-regulated in Transcription
  misc_feature: MA Experiment 20000265 PARAMETER Experiment Name: At_Open_Flower_P Parameter: Age (day) Value: 21
  misc_feature: MA Experiment 20000265 PARAMETER Experiment Name: At_Open_Flower_P Parameter: Plant Line Value: WS
  misc_feature: MA Experiment 20000265 PARAMETER Experiment Name: At_Open_Flower_P Parameter: Tissue Value: Closed Flower vs. Whole Plant
  misc_feature: MA Experiment ID: 20000495 Result: Up-regulated in Transcription
  misc_feature: MA Experiment 20000495 PARAMETER Experiment Name: At_Guard_Cells_P Parameter: Harvest Date Value: 8/2/2002
  misc_feature: MA Experiment 20000495 PARAMETER Experiment Name: At_Guard_Cells_P Parameter: Organism Value: A. thaliana
  misc_feature: MA Experiment 20000495 PARAMETER Experiment Name: At_Guard_Cells_P Parameter: Tissue Value: Guard Cells vs. Leaves
  misc_feature: MA Experiment ID: 20000794 Result: Up-regulated in Transcription
  misc_feature: MA Experiment 20000794 PARAMETER Experiment Name: At_Petals_P Parameter: Age (day) Value: 23-25 days
  misc_feature: MA Experiment 20000794 PARAMETER Experiment Name: At_Petals_P Parameter: Plant Line Value: WS
  misc_feature: MA Experiment 20000794 PARAMETER Experiment Name: At_Petals_P Parameter: Tissue Value: Petals vs. Whole plant
acaaaagaaaattgtcaatttcgaaaaatgttgagcacaagctctgatcttcatggccgtcttctccggtgagtgacatctctctctggcctctgtttttttgccctttaagtgcttttttcttgaagaaccctaattttgatttgttttgaggattcagattatcagaaccaatagcagagattcttagacgtacacagtacacaccgcaagagagcagcaaagtatccaccaaagatatactcttgtccttgttaccaaacacttcgtcttctcgtctcgccaatgaagaatcgatcaaaagtctcgcgcttgcttgtgcccttctcgcttcttcacgttcatccactcacgaacttctctcatggattccagaaaacctctctgtcatgggggaatctacattttgggagatttcaagggattgtttcagtgatttttctagcaacagtaatgctgagaagcttgtggaattggtagaggatagtgagaagatcgaaatgttgccgatagttttgccggagttaaaagatggaatcgaaaagagttcacttggtaaaggcagtgatgcagaggatgtttcagctgcaatggctagaacacctgttggttatatacttgctgctcaccagctcaggtggtttgttactcaggttaaaaaaccgaatttggtgaaattttgtaacttggtggttccttgtgctttgacagcacttgatcattggtctcctgaagtcaaagggcagggtatgataacctttgttcatcttgctaaaaatgtgagttccggtgatcttggtttgtatggagatgtggttcttgatgcgtgttgccagaatatagcttccgatgatgagatttggatacatgtggtagagttatctgtgcttcttgttactaaaatccacccaaataatcctcgaagcccgtggtatgagaagatcatgaatgagatgctcgggcatttggaacgccaaccaagaaataaggagcgacgtatcacttggctaagatttgttgagccactcttgaactctctagggcttttcttacttgctcattttcgacgtatcttccctcttttctttcagtggatgcattcagacgacccgaaacagttctgttggttcttgagagactggagacagttgtgaggttgacgtggattagacactcacctgtgttcccaagattggtggatgagcttgtttccttgtacaaagagtcatcgatgcgtaaggatcgcgatgatattagacctcttatcctccgtatcttgatgctactccgccagtgcaaaggtctacggtttgagtcagcgtggagtcaataccaggaggatccaaatctgagtactgttagtcaacatatatggactagttcaagttgatctcaagagcgtatgtttgactaaaacagccattttttttctaattttcgatattagtttggtctaggcctagtgatgcaagtaattactggcgaatcctcgaatttttgtaagcatttggctcttgactcttcttaagctaatctgatttgatac

SEQ ID NO: 42524 - protein, 254 aa, Arabidopsis thaliana
  peptide (1)..(254): Ceres Seq. ID no. 12370789
  misc_feature (1)..(181): Homolog of NCBI NO: 25370807 NR Description: hypothetical protein At2g39910 [imported] -
  misc_feature (1)..(240): Homolog of NCBI NO: 20198306 NR Description: expressed protein [Arabidopsis thaliana]
  misc_feature (1)..(240): Homolog of NCBI NO: 26451294 NR Description: unknown protein [Arabidopsis thaliana]
  misc_feature (1)..(240): Homolog of NCBI NO: 30688076 NR Description: expressed protein [Arabidopsis thaliana]
MGESTFWEISRDCFSDFSSNSNAEKLVELVEDSEKIEMLPIVLPELKDGIEKSSLGKGSDAEDVSAAMARTPVGYILAAHQLRWFVTQVKKPNLVKFCNLVVPCALTALDHWSPEVKGQGMITFVHLAKNVSSGDLGLYGDVVLDACCQNIASDDEIWIHVVELSVLLVTKIHPNNPRSPWYEKIMNEMLGHLERQPRNKERRITWLRFVEPLLNSLGLFLLAHFRRIFPLFFQWMHSDDPKQFCWFLRDWRQL

SEQ ID NO: 42525 - protein, 217 aa, Arabidopsis thaliana
  peptide (1)..(217): Ceres Seq. ID no. 12370790
  misc_feature (1)..(144): Homolog of NCBI NO: 25370807 NR Description: hypothetical protein At2g39910 [imported] -
  misc_feature (1)..(203): Homolog of NCBI NO: 20198306 NR Description: expressed protein [Arabidopsis thaliana]
  misc_feature (1)..(203): Homolog of NCBI NO: 26451294 NR Description: unknown protein [Arabidopsis thaliana]
  misc_feature (1)..(203): Homolog of NCBI NO: 30688076 NR Description: expressed protein [Arabidopsis thaliana]
MLPIVLPELKDGIEKSSLGKGSDAEDVSAAMARTPVGYILAAHQLRWFVTQVKKPNLVKFCNLVVPCALTALDHWSPEVKGQGMITFVHLAKNVSSGDLGLYGDVVLDACCQNIASDDEIWIHVVELSVLLVTKIHPNNPRSPWYEKIMNEMLGHLERQPRNKERRITWLRFVEPLLNSLGLFLLAHFRRIFPLFFQWMHSDDPKQFCWFLRDWRQL

SEQ ID NO: 42526 - protein, 187 aa, Arabidopsis thaliana
  peptide (1)..(187): Ceres Seq. ID no. 12370791
  misc_feature (1)..(114): Homolog of NCBI NO: 25370807 NR Description: hypothetical protein At2g39910 [imported] -
  misc_feature (1)..(173): Homolog of NCBI NO: 20198306 NR Description: expressed protein [Arabidopsis thaliana]
  misc_feature (1)..(173): Homolog of NCBI NO: 26451294 NR Description: unknown protein [Arabidopsis thaliana]
  misc_feature (1)..(173): Homolog of NCBI NO: 30688076 NR Description: expressed protein [Arabidopsis thaliana]
MARTPVGYILAAHQLRWFVTQVKKPNLVKFCNLVVPCALTALDHWSPEVKGQGMITFVHLAKNVSSGDLGLYGDVVLDACCQNIASDDEIWIHVVELSVLLVTKIHPNNPRSPWYEKIMNEMLGHLERQPRNKERRITWLRFVEPLLNSLGLFLLAHFRRIFPLFFQWMHSDDPKQFCWFLRDWRQL

SEQ ID NO: 42527 - DNA, 1184 bp, Arabidopsis thaliana
  misc_feature (1)..(1184): Ceres Seq. ID no. 13575138
  misc_feature: MA Experiment ID: 20000173 Result: Down-regulated in Transcription
  misc_feature: MA Experiment 20000173 PARAMETER Experiment Name: At_42deg_Heat_P Parameter: Age (day) Value: 14
  misc_feature: MA Experiment 20000173 PARAMETER Experiment Name: At_42deg_Heat_P Parameter: Organism Value: A. thaliana
  misc_feature: MA Experiment 20000173 PARAMETER Experiment Name: At_42deg_Heat_P Parameter: Plant Line Value: WS
  misc_feature: MA Experiment 20000173 PARAMETER Experiment Name: At_42deg_Heat_P Parameter: Temperature (deg C) Value: 42 vs. 22
  misc_feature: MA Experiment 20000173 PARAMETER Experiment Name: At_42deg_Heat_P Parameter: Timepoint (hr) Value: 6
  misc_feature: MA Experiment 20000173 PARAMETER Experiment Name: At_42deg_Heat_P Parameter: Tissue Value: Aerial
  misc_feature: MA Experiment ID: 20000182 Result: Down-regulated in Transcription
  misc_feature: MA Experiment 20000182 PARAMETER Experiment Name: At_2mM_SA_P Parameter: Age (day) Value: 14
  misc_feature: MA Experiment 20000182 PARAMETER Experiment Name: At_2mM_SA_P Parameter: Organism Value: A. thaliana
  misc_feature: MA Experiment 20000182 PARAMETER Experiment Name: At_2mM_SA_P Parameter: Plant Line Value: WS
  misc_feature: MA Experiment 20000182 PARAMETER Experiment Name: At_2mM_SA_P Parameter: Timepoint (hr) Value: 6
  misc_feature: MA Experiment 20000182 PARAMETER Experiment Name: At_2mM_SA_P Parameter: Tissue Value: Aerial
  misc_feature: MA Experiment 20000182 PARAMETER Experiment Name: At_2mM_SA_P Parameter: Treatment Value: 2mM SA vs. No Treatment
  misc_feature: MA Experiment ID: 20000184 Result: Down-regulated in Transcription
  misc_feature: MA Experiment 20000184 PARAMETER Experiment Name: At_Shoots__P Parameter: Age (day) Value: 7
  misc_feature: MA Experiment 20000184 PARAMETER Experiment Name: At_Shoots__P Parameter: Tissue Value: Shoots vs. Whole Plant
  misc_feature: MA Experiment ID: 20000185 Result: Down-regulated in Transcription
  misc_feature: MA Experiment 20000185 PARAMETER Experiment Name: At_Roots__P Parameter: Age (day) Value: 7 vs. 21
  misc_feature: MA Experiment 20000185 PARAMETER Experiment Name: At_Roots__P Parameter: Organism Value: A. thaliana
  misc_feature: MA Experiment 20000185 PARAMETER Experiment Name: At_Roots__P Parameter: Tissue Value: Roots vs. Whole Plant
  misc_feature: MA Experiment ID: 20000439 Result: Down-regulated in Transcription
  misc_feature: MA Experiment 20000439 PARAMETER Experiment Name: At_Roots__P Parameter: Age (day) Value: 14 vs. 21
  misc_feature: MA Experiment 20000439 PARAMETER Experiment Name: At_Roots__P Parameter: Organism Value: A. thaliana
  misc_feature: MA Experiment 20000439 PARAMETER Experiment Name: At_Roots__P Parameter: Tissue Value: Roots vs. Whole Plant
  misc_feature: MA Experiment ID: 20000573 Result: Down-regulated in Transcription
  misc_feature: MA Experiment 20000573 PARAMETER Experiment Name: At_100uM_ABA_Mutants__P Parameter: Organism Value: A. thaliana
  misc_feature: MA Experiment 20000573 PARAMETER Experiment Name: At_100uM_ABA_Mutants__P Parameter: Plant Line Value: CS22 vs. Ler wt
  misc_feature: MA Experiment 20000573 PARAMETER Experiment Name: At_100uM_ABA_Mutants__P Parameter: Timepoint (hr) Value: N/A
  misc_feature: MA Experiment 20000573 PARAMETER Experiment Name: At_100uM_ABA_Mutants__P Parameter: Tissue Value: Whole Plant
  misc_feature: MA Experiment 20000573 PARAMETER Experiment Name: At_100uM_ABA_Mutants__P Parameter: Treatment Value: None
  misc_feature: MA Experiment ID: 20000794 Result: Down-regulated in Transcription
  misc_feature: MA Experiment 20000794 PARAMETER Experiment Name: At_Petals_P Parameter: Age (day) Value: 23-25 days
  misc_feature: MA Experiment 20000794 PARAMETER Experiment Name: At_Petals_P Parameter: Plant Line Value: WS
  misc_feature: MA Experiment 20000794 PARAMETER Experiment Name: At_Petals_P Parameter: Tissue Value: Petals vs. Whole plant
  misc_feature: MA Experiment ID: 20001247 Result: Down-regulated in Transcription
  misc_feature: MA Experiment 20001247 PARAMETER Experiment Name: At_Far-red-induction_P Parameter: Age (day) Value: 7
  misc_feature: MA Experiment 20001247 PARAMETER Experiment Name: At_Far-red-induction_P Parameter: Light Value: Far-red vs. White
  misc_feature: MA Experiment 20001247 PARAMETER Experiment Name: At_Far-red-induction_P Parameter: Organism Value: A. thaliana
  misc_feature: MA Experiment 20001247 PARAMETER Experiment Name: At_Far-red-induction_P Parameter: Plant Line Value: Columbia
  misc_feature: MA Experiment 20001247 PARAMETER Experiment Name: At_Far-red-induction_P Parameter: Timepoint (hr) Value: 1
  misc_feature: MA Experiment 20001247 PARAMETER Experiment Name: At_Far-red-induction_P Parameter: Tissue Value: Whole Plant
  misc_feature: MA Experiment ID: 20001905 Result: Up-regulated in Transcription
  misc_feature: MA Experiment 20001905 PARAMETER Experiment Name: At_Drought_Reproduction_P Parameter: Age (day) Value: 40
  misc_feature: MA Experiment 20001905 PARAMETER Experiment Name: At_Drought_Reproduction_P Parameter: Organism Value: A. thaliana
  misc_feature: MA Experiment 20001905 PARAMETER Experiment Name: At_Drought_Reproduction_P Parameter: Plant Line Value: WS
  misc_feature: MA Experiment 20001905 PARAMETER Experiment Name: At_Drought_Reproduction_P Parameter: Timepoint (day) Value: 10
  misc_feature: MA Experiment 20001905 PARAMETER Experiment Name: At_Drought_Reproduction_P Parameter: Tissue Value: Rosettes
  misc_feature: MA Experiment 20001905 PARAMETER Experiment Name: At_Drought_Reproduction_P Parameter: Treatment Value: Drought vs. No Drought
atacaaacacacattttgttcacacagagatagacatggcttccgatataaacagaagaagatcgttctctcttctagtcttgattattgtgatgctttatgggcataaaggtgattcaaaatgtgatttcgaagcaattttcaacttcggagactcgaattcggacactggcggattttgggctgcttttcctgcccaatctggtccatggggaatgacttatttcaagaaaccagccggtcgtgcttcagacggtcgtcttatcattgattttctagccaaatctcttggaatgcctttcctaagcccatatttgcaatctattggatcggattttcgacatggcgcaaactttgcgacgttagcgtccacggttctcttgccaaacacgtctttatttgtctccggaatcagccctttctcactcgctattcagctgaatcagatgaaacaattcaaggttaatgtcgacgagtcacattctttggaccgaccaggattgaagatcttaccgtctaaaattgttttcggaaaatcgctatacacgttttatattggtcaaaacgatttcacatccaatttagccagtattggagttgagagagtgaaactatatcttccacaagtcataggccaaattgctggaacgattaaggagatatatggaataggtggtcggacatttttggtattgaatttagcaccggttggatgttacccggcgattttaaccggttacactcataccgatgctgatttagacaagtatggatgtctcattcctgtaaacaaagcagtcaaatattacaacacgttattgaataagacattatctcagaccagaaccgaactaaaaaacgctaccgtaatttatttagacacgcacaagatattgcttgatctctttcaacaccccaaatcctacggtatgaaacacggtattaaagcttgttgtggatatggtggacgtccatacaatttcaatcagaagttattttgtggcaacaccaaagtgattggaaatttttctacgacggccaaagcttgccatgatcctcacaactacgtgagttgggatggaattcatgcgacggaggccgcaaatcaccacatttccatggccattctcgacggttcgatatcatatcctccgttcatactcaataacctatgttcgccttag

SEQ ID NO: 42528 - protein, 393 aa, Arabidopsis thaliana
  peptide (1)..(393): Ceres Seq. ID no. 13575139
  misc_feature (46)..(375): Pfam Name: GDSL-like Lipase/Acylhydrolase Pfam Description: GDSL-like Lipase/Acylhydrolase
  misc_feature (15)..(391): Homolog of NCBI NO: 30909057 NR Description: ENSP-like protein [Hevea brasiliensis]
  misc_feature (23)..(391): Homolog of NCBI NO: 33147016 NR Description: putative early nodulin 8 precursor
  misc_feature (309)..(391): Homolog of NCBI NO: 34901120 NR Description: contains ESTs
  misc_feature (24)..(309): Homolog of NCBI NO: 34901120 NR Description: contains ESTs
  misc_feature (24)..(391): Homolog of NCBI NO: 33147015 NR Description: putative early nodulin 8 precursor
  misc_feature (25)..(392): Homolog of NCBI NO: 15231558 NR Description: GDSL-motif lipase/hydrolase protein [Arabidopsis
  misc_feature (39)..(391): Homolog of NCBI NO: 34898314 NR Description: ESTs AU075322(C11109),D22430(C11109) correspond a region of the predicted gene.~Similar to Medicago sativa early
  misc_feature (20)..(391): Homolog of NCBI NO: 3688284 NR Description: lanatoside 15'-O-acetylesterase [Digitalis lanata]
  misc_feature (12)..(393): Homolog of NCBI NO: 7485222 NR Description: hypothetical protein A_IG002N01.17 - Arabidopsis
  misc_feature (12)..(393): Homolog of NCBI NO: 15234074 NR Description: acetylesterase, putative [Arabidopsis thaliana]
TNTHFVHTEIDMASDINRRRSFSLLVLIIVMLYGHKGDSKCDFEAIFNFGDSNSDTGGFWAAFPAQSGPWGMTYFKKPAGRASDGRLIIDFLAKSLGMPFLSPYLQSIGSDFRHGANFATLASTVLLPNTSLFVSGISPFSLAIQLNQMKQFKVNVDESHSLDRPGLKILPSKIVFGKSLYTFYIGQNDFTSNLASIGVERVKLYLPQVIGQIAGTIKEIYGIGGRTFLVLNLAPVGCYPAILTGYTHTDADLDKYGCLIPVNKAVKYYNTLLNKTLSQTRTELKNATVIYLDTHKILLDLFQHPKSYGMKHGIKACCGYGGRPYNFNQKLFCGNTKVIGNFSTTAKACHDPHNYVSWDGIHATEAANHHISMAILDGSISYPPFILNNLCSP

SEQ ID NO: 42529 - protein, 382 aa, Arabidopsis thaliana
  peptide (1)..(382): Ceres Seq. ID no. 13575140
  misc_feature (35)..(364): Pfam Name: GDSL-like Lipase/Acylhydrolase Pfam Description: GDSL-like Lipase/Acylhydrolase
  misc_feature (4)..(380): Homolog of NCBI NO: 30909057 NR Description: ENSP-like protein [Hevea brasiliensis]
  misc_feature (12)..(380): Homolog of NCBI NO: 33147016 NR Description: putative early nodulin 8 precursor
  misc_feature (298)..(380): Homolog of NCBI NO: 34901120 NR Description: contains ESTs
  misc_feature (13)..(298): Homolog of NCBI NO: 34901120 NR Description: contains ESTs
  misc_feature (13)..(380): Homolog of NCBI NO: 33147015 NR Description: putative early nodulin 8 precursor
  misc_feature (14)..(381): Homolog of NCBI NO: 15231558 NR Description: GDSL-motif lipase/hydrolase protein [Arabidopsis
  misc_feature (28)..(380): Homolog of NCBI NO: 34898314 NR Description: ESTs AU075322(C11109),D22430(C11109) correspond a region of the predicted gene.~Similar to Medicago sativa early
  misc_feature (9)..(380): Homolog of NCBI NO: 3688284 NR Description: lanatoside 15'-O-acetylesterase [Digitalis lanata]
  misc_feature (1)..(382): Homolog of NCBI NO: 7485222 NR Description: hypothetical protein A_IG002N01.17 - Arabidopsis
  misc_feature (1)..(382): Homolog of NCBI NO: 15234074 NR Description: acetylesterase, putative [Arabidopsis thaliana]
MASDINRRRSFSLLVLIIVMLYGHKGDSKCDFEAIFNFGDSNSDTGGFWAAFPAQSGPWGMTYFKKPAGRASDGRLIIDFLAKSLGMPFLSPYLQSIGSDFRHGANFATLASTVLLPNTSLFVSGISPFSLAIQLNQMKQFKVNVDESHSLDRPGLKILPSKIVFGKSLYTFYIGQNDFTSNLASIGVERVKLYLPQVIGQIAGTIKEIYGIGGRTFLVLNLAPVGCYPAILTGYTHTDADLDKYGCLIPVNKAVKYYNTLLNKTLSQTRTELKNATVIYLDTHKILLDLFQHPKSYGMKHGIKACCGYGGRPYNFNQKLFCGNTKVIGNFSTTAKACHDPHNYVSWDGIHATEAANHHISMAILDGSISYPPFILNNLCSP

SEQ ID NO: 42530 - protein, 363 aa, Arabidopsis thaliana
  peptide (1)..(363): Ceres Seq. ID no. 13575141
  misc_feature (16)..(345): Pfam Name: GDSL-like Lipase/Acylhydrolase Pfam Description: GDSL-like Lipase/Acylhydrolase
  misc_feature (1)..(361): Homolog of NCBI NO: 30909057 NR Description: ENSP-like protein [Hevea brasiliensis]
  misc_feature (1)..(361): Homolog of NCBI NO: 33147016 NR Description: putative early nodulin 8 precursor
  misc_feature (279)..(361): Homolog of NCBI NO: 34901120 NR Description: contains ESTs
  misc_feature (1)..(279): Homolog of NCBI NO: 34901120 NR Description: contains ESTs
  misc_feature (1)..(361): Homolog of NCBI NO: 33147015 NR Description: putative early nodulin 8 precursor
  misc_feature (1)..(362): Homolog of NCBI NO: 15231558 NR Description: GDSL-motif lipase/hydrolase protein [Arabidopsis
  misc_feature (9)..(361): Homolog of NCBI NO: 34898314 NR Description: ESTs AU075322(C11109),D22430(C11109) correspond a region of the predicted gene.~Similar to Medicago sativa early
  misc_feature (1)..(361): Homolog of NCBI NO: 3688284 NR Description: lanatoside 15'-O-acetylesterase [Digitalis lanata]
  misc_feature (1)..(363): Homolog of NCBI NO: 7485222 NR Description: hypothetical protein A_IG002N01.17 - Arabidopsis
  misc_feature (1)..(363): Homolog of NCBI NO: 15234074 NR Description: acetylesterase, putative [Arabidopsis thaliana]
MLYGHKGDSKCDFEAIFNFGDSNSDTGGFWAAFPAQSGPWGMTYFKKPAGRASDGRLIIDFLAKSLGMPFLSPYLQSIGSDFRHGANFATLASTVLLPNTSLFVSGISPFSLAIQLNQMKQFKVNVDESHSLDRPGLKILPSKIVFGKSLYTFYIGQNDFTSNLASIGVERVKLYLPQVIGQIAGTIKEIYGIGGRTFLVLNLAPVGCYPAILTGYTHTDADLDKYGCLIPVNKAVKYYNTLLNKTLSQTRTELKNATVIYLDTHKILLDLFQHPKSYGMKHGIKACCGYGGRPYNFNQKLFCGNTKVIGNFSTTAKACHDPHNYVSWDGIHATEAANHHISMAILDGSISYPPFILNNLCSP

SEQ ID NO: 42531 - DNA, 1433 bp, Arabidopsis thaliana
  misc_feature (1)..(1433): Ceres Seq. ID no. 12604850
  misc_feature: MA Experiment ID: 20000234 Result: Up-regulated in Transcription
  misc_feature: MA Experiment 20000234 PARAMETER Experiment Name: At_Siliques_P Parameter: Age (day) Value: 21
  misc_feature: MA Experiment 20000234 PARAMETER Experiment Name: At_Siliques_P Parameter: Organism Value: A. thaliana
  misc_feature: MA Experiment 20000234 PARAMETER Experiment Name: At_Siliques_P Parameter: Plant Line Value: WS
  misc_feature: MA Experiment 20000234 PARAMETER Experiment Name: At_Siliques_P Parameter: Tissue Value: Less Than 5mm Siliques vs. Whole Plant
acgattacacgcgtttccgaaacgttgggctttgcttagctgcgacattttcagtgaacgaagaaaaccacggtagtagactagtagttgtagaaaaaaacaaaacgaaatcgaagaagaagagaggaaggatgaagaagatcccggtgcttctcatgggctgcggaggcgttggccgccaccttcttcaacacatcgtctcttgccgatcgcttcacgccaaaatgggagttcatatacgggtgattggagtatgtgatagtaaatccttagttgctccaatggatgtgctcaaagaggaactgaatgatgaactcttgtcagaagtttgccttatcaaatcaactggttctgcattatcgaagttgggtgctttggaaaaaggtggatatcgagtcgtccatgattccgagttaagcacggaaacagaagagattgcaaaacttcttggtaaatctacaggcttagctgtggtggattgctcagccagcatggagacgattgaaatattgatgaaggcagttgacttgggttgctgtattgtccttgcaaataagaagcctgttacttcaacgctggaacattacgacaaattggctttgcatccgcgattcatccgccatgaatctactgttggtgctggtcttcctgtcatcgcatccttgaaccgcataatttcgtctggagatcctgttcataggattgtcggtagtttgagcggtaccttgggatatgtaatgagtgagcttgaagatggcaagcctctaagccaagttgttcaagctgccaaaaagctggggtacactgaaccagatccacgtgacgacctcggtggcatggatgttgctagaaagggtttgattcttgctcgacttcttgggaagaggataattatggacagcattaagatagagagcttgtatccagaagagatgggacctggactcatgtctgtggatgatttcctccataatggaatagtaaaacttgatcagaatatagaggagagagttaaaaaagcttcatcaaaagggtgtgtgcttcgttatgtctgtgtgattgagggttcaagcgttcaagttggcattcgagaagtttcaaaagattcaccattgggacggctaagaggcagtgacaatatagtagagatatatagccgttgctacaaggagcagcctttggtgattcaaggtgccggagccgggaacgacacaactgcagccggtgttcttgcagacatcatcgacttgcaggatctttttcactgagaggaggctgtggtatttagtttttatcaaaataataataacacaattcataattgatctcttctctgatcttgtcaaggcagaaaattagccaacaagaacgtggcctctccttaacattaccaaaaagagatttttttttttaaaaaaaaaaaaaaaaaaaaa

SEQ ID NO: 42532 - protein, 421 aa, Arabidopsis thaliana
  peptide (1)..(421): Ceres Seq. ID no. 12604851
  misc_feature (216)..(414): Pfam Name: Homoserine dehydrogenase Pfam Description: Homoserine dehydrogenase
  misc_feature (47)..(105): Homolog of NCBI NO: 16127996 NR Description: aspartokinase I, homoserine dehydrogenase I
  misc_feature (157)..(414): Homolog of NCBI NO: 19548975 NR Description: aspartokinase I-homoserine dehydrogenase I
  misc_feature (157)..(414): Homolog of NCBI NO: 16127996 NR Description: aspartokinase I, homoserine dehydrogenase I
  misc_feature (47)..(105): Homolog of NCBI NO: 26245920 NR Description: Aspartokinase I; Homoserine dehydrogenase I
  misc_feature (157)..(414): Homolog of NCBI NO: 26245920 NR Description: Aspartokinase I; Homoserine dehydrogenase I
  misc_feature (152)..(414): Homolog of NCBI NO: 22971485 NR Description: hypothetical protein [Chloroflexus aurantiacus]
  misc_feature (30)..(100): Homolog of NCBI NO: 15601978 NR Description: ThrA [Pasteurella multocida]
  misc_feature (109)..(414): Homolog of NCBI NO: 15601978 NR Description: ThrA [Pasteurella multocida]
  misc_feature (44)..(421): Homolog of NCBI NO: 21537197 NR Description: homoserine dehydrogenase-like protein
  misc_feature (44)..(421): Homolog of NCBI NO: 15242147 NR Description: homoserine dehydrogenase-like protein
DYTRFRNVGLCLAATFSVNEENHGSRLVVVEKNKTKSKKKRGRMKKIPVLLMGCGGVGRHLLQHIVSCRSLHAKMGVHIRVIGVCDSKSLVAPMDVLKEELNDELLSEVCLIKSTGSALSKLGALEKGGYRVVHDSELSTETEEIAKLLGKSTGLAVVDCSASMETIEILMKAVDLGCCIVLANKKPVTSTLEHYDKLALHPRFIRHESTVGAGLPVIASLNRIISSGDPVHRIVGSLSGTLGYVMSELEDGKPLSQVVQAAKKLGYTEPDPRDDLGGMDVARKGLILARLLGKRIIMDSIKIESLYPEEMGPGLMSVDDFLHNGIVKLDQNIEERVKKASSKGCVLRYVCVIEGSSVQVGIREVSKDSPLGRLRGSDNIVEIYSRCYKEQPLVIQGAGAGNDTTAAGVLADIIDLQDLFH

SEQ ID NO: 42533 - protein, 378 aa, Arabidopsis thaliana
  peptide (1)..(378): Ceres Seq. ID no. 12604852
  misc_feature (173)..(371): Pfam Name: Homoserine dehydrogenase Pfam Description: Homoserine dehydrogenase
  misc_feature (4)..(62): Homolog of NCBI NO: 16127996 NR Description: aspartokinase I, homoserine dehydrogenase I
  misc_feature (114)..(371): Homolog of NCBI NO: 19548975 NR Description: aspartokinase I-homoserine dehydrogenase I
  misc_feature (114)..(371): Homolog of NCBI NO: 16127996 NR Description: aspartokinase I, homoserine dehydrogenase I
  misc_feature (4)..(62): Homolog of NCBI NO: 26245920 NR Description: Aspartokinase I; Homoserine dehydrogenase I
  misc_feature (114)..(371): Homolog of NCBI NO: 26245920 NR Description: Aspartokinase I; Homoserine dehydrogenase I
  misc_feature (109)..(371): Homolog of NCBI NO: 22971485 NR Description: hypothetical protein [Chloroflexus aurantiacus]
  misc_feature (1)..(57): Homolog of NCBI NO: 15601978 NR Description: ThrA [Pasteurella multocida]
  misc_feature (66)..(371): Homolog of NCBI NO: 15601978 NR Description: ThrA [Pasteurella multocida]
  misc_feature (1)..(378): Homolog of NCBI NO: 21537197 NR Description: homoserine dehydrogenase-like protein
  misc_feature (1)..(378): Homolog of NCBI NO: 15242147 NR Description: homoserine dehydrogenase-like protein
MKKIPVLLMGCGGVGRHLLQHIVSCRSLHAKMGVHIRVIGVCDSKSLVAPMDVLKEELNDELLSEVCLIKSTGSALSKLGALEKGGYRVVHDSELSTETEEIAKLLGKSTGLAVVDCSASMETIEILMKAVDLGCCIVLANKKPVTSTLEHYDKLALHPRFIRHESTVGAGLPVIASLNRIISSGDPVHRIVGSLSGTLGYVMSELEDGKPLSQVVQAAKKLGYTEPDPRDDLGGMDVARKGLILARLLGKRIIMDSIKIESLYPEEMGPGLMSVDDFLHNGIVKLDQNIEERVKKASSKGCVLRYVCVIEGSSVQVGIREVSKDSPLGRLRGSDNIVEIYSRCYKEQPLVIQGAGAGNDTTAAGVLADIIDLQDLFH

SEQ ID NO: 42534 - protein, 370 aa, Arabidopsis thaliana
  peptide (1)..(370): Ceres Seq. ID no. 12604853
  misc_feature (165)..(363): Pfam Name: Homoserine dehydrogenase Pfam Description: Homoserine dehydrogenase
  misc_feature (1)..(54): Homolog of NCBI NO: 16127996 NR Description: aspartokinase I, homoserine dehydrogenase I
  misc_feature (106)..(363): Homolog of NCBI NO: 19548975 NR Description: aspartokinase I-homoserine dehydrogenase I
  misc_feature (106)..(363): Homolog of NCBI NO: 16127996 NR Description: aspartokinase I, homoserine dehydrogenase I
  misc_feature (1)..(54): Homolog of NCBI NO: 26245920 NR Description: Aspartokinase I; Homoserine dehydrogenase I
  misc_feature (106)..(363): Homolog of NCBI NO: 26245920 NR Description: Aspartokinase I; Homoserine dehydrogenase I
  misc_feature (101)..(363): Homolog of NCBI NO: 22971485 NR Description: hypothetical protein [Chloroflexus aurantiacus]
  misc_feature (1)..(49): Homolog of NCBI NO: 15601978 NR Description: ThrA [Pasteurella multocida]
  misc_feature (58)..(363): Homolog of NCBI NO: 15601978 NR Description: ThrA [Pasteurella multocida]
  misc_feature (1)..(370): Homolog of NCBI NO: 21537197 NR Description: homoserine dehydrogenase-like protein
  misc_feature (1)..(370): Homolog of NCBI NO: 15242147 NR Description: homoserine dehydrogenase-like protein
MGCGGVGRHLLQHIVSCRSLHAKMGVHIRVIGVCDSKSLVAPMDVLKEELNDELLSEVCLIKSTGSALSKLGALEKGGYRVVHDSELSTETEEIAKLLGKSTGLAVVDCSASMETIEILMKAVDLGCCIVLANKKPVTSTLEHYDKLALHPRFIRHESTVGAGLPVIASLNRIISSGDPVHRIVGSLSGTLGYVMSELEDGKPLSQVVQAAKKLGYTEPDPRDDLGGMDVARKGLILARLLGKRIIMDSIKIESLYPEEMGPGLMSVDDFLHNGIVKLDQNIEERVKKASSKGCVLRYVCVIEGSSVQVGIREVSKDSPLGRLRGSDNIVEIYSRCYKEQPLVIQGAGAGNDTTAAGVLADIIDLQDLFH

SEQ ID NO: 42535 - DNA, 1451 bp, Arabidopsis thaliana
  misc_feature (1)..(1451): Ceres Seq. ID no. 12337750
  misc_feature: MA Experiment ID: 108434 Result: Up-regulated in Transcription
  misc_feature: MA Experiment 108434 PARAMETER Experiment Name: At_Root_Tips_cDNA_P Parameter: Tissue Value: Root Tips
  misc_feature: MA Experiment ID: 108488 Result: Up-regulated in Transcription
  misc_feature: MA Experiment ID: 108501 Result: Up-regulated in Transcription
  misc_feature: MA Experiment 108501 PARAMETER Experiment Name: At_ap2_floral_buds_cDNA_P Parameter: Plant Line Value: ap2 (Ler.)
  misc_feature: MA Experiment 108501 PARAMETER Experiment Name: At_ap2_floral_buds_cDNA_P Parameter: Tissue Value: Closed Flower
  misc_feature: MA Experiment ID: 108573 Result: Up-regulated in Transcription
  misc_feature: MA Experiment 108573 PARAMETER Experiment Name: At_Drought_cDNA_P Parameter: Timepoint (hr) Value: 6
  misc_feature: MA Experiment 108573 PARAMETER Experiment Name: At_Drought_cDNA_P Parameter: Tissue Value: Aerial
  misc_feature: MA Experiment 108573 PARAMETER Experiment Name: At_Drought_cDNA_P Parameter: Treatment Value: Drought vs. No Drought
  misc_feature: MA Experiment ID: 108577 Result: Down-regulated in Transcription
  misc_feature: MA Experiment 108577 PARAMETER Experiment Name: At_42deg_Heat_cDNA_P Parameter: Temperature (deg C) Value: 42 vs. 22
  misc_feature: MA Experiment 108577 PARAMETER Experiment Name: At_42deg_Heat_cDNA_P Parameter: Timepoint (hr) Value: 6
  misc_feature: MA Experiment 108577 PARAMETER Experiment Name: At_42deg_Heat_cDNA_P Parameter: Tissue Value: Aerial
  misc_feature: MA Experiment ID: 108585 Result: Up-regulated in Transcription
  misc_feature: MA Experiment 108585 PARAMETER Experiment Name: At_5mM_NaNP_cDNA_P Parameter: Timepoint (hr) Value: 6
  misc_feature: MA Experiment 108585 PARAMETER Experiment Name: At_5mM_NaNP_cDNA_P Parameter: Tissue Value: Aerial
  misc_feature: MA Experiment 108585 PARAMETER Experiment Name: At_5mM_NaNP_cDNA_P Parameter: Treatment Value: null
  misc_feature: MA Experiment ID: 20000436 Result: Up-regulated in Transcription
  misc_feature: MA Experiment 20000436 PARAMETER Experiment Name: At_Drought_P Parameter: Age (day) Value: 7
  misc_feature: MA Experiment 20000436 PARAMETER Experiment Name: At_Drought_P Parameter: Organism Value: A. thaliana
  misc_feature: MA Experiment 20000436 PARAMETER Experiment Name: At_Drought_P Parameter: Plant Line Value: WS
  misc_feature: MA Experiment 20000436 PARAMETER Experiment Name: At_Drought_P Parameter: Timepoint (hr) Value: 12
  misc_feature: MA Experiment 20000436 PARAMETER Experiment Name: At_Drought_P Parameter: Tissue Value: Whole Plant
  misc_feature: MA Experiment 20000436 PARAMETER Experiment Name: At_Drought_P Parameter: Treatment Value: Drought vs. No Drought
  misc_feature: MA Experiment ID: 20000439 Result: Down-regulated in Transcription
  misc_feature: MA Experiment 20000439 PARAMETER Experiment Name: At_Roots__P Parameter: Age (day) Value: 14 vs. 21
  misc_feature: MA Experiment 20000439 PARAMETER Experiment Name: At_Roots__P Parameter: Organism Value: A. thaliana
  misc_feature: MA Experiment 20000439 PARAMETER Experiment Name: At_Roots__P Parameter: Tissue Value: Roots vs. Whole Plant
  misc_feature: MA Experiment ID: 20000495 Result: Up-regulated in Transcription
  misc_feature: MA Experiment 20000495 PARAMETER Experiment Name: At_Guard_Cells_P Parameter: Harvest Date Value: 8/2/2002
  misc_feature: MA Experiment 20000495 PARAMETER Experiment Name: At_Guard_Cells_P Parameter: Organism Value: A. thaliana
  misc_feature: MA Experiment 20000495 PARAMETER Experiment Name: At_Guard_Cells_P Parameter: Tissue Value: Guard Cells vs. Leaves
  misc_feature: MA Experiment ID: 20000574 Result: Down-regulated in Transcription
  misc_feature: MA Experiment 20000574 PARAMETER Experiment Name: At_100uM_ABA_Mutants__P Parameter: Organism Value: A. thaliana
  misc_feature: MA Experiment 20000574 PARAMETER Experiment Name: At_100uM_ABA_Mutants__P Parameter: Plant Line Value: CS23 vs. Ler wt
  misc_feature: MA Experiment 20000574 PARAMETER Experiment Name: At_100uM_ABA_Mutants__P Parameter: Timepoint (hr) Value: N/A
  misc_feature: MA Experiment 20000574 PARAMETER Experiment Name: At_100uM_ABA_Mutants__P Parameter: Tissue Value: Whole Plant
  misc_feature: MA Experiment 20000574 PARAMETER Experiment Name: At_100uM_ABA_Mutants__P Parameter: Treatment Value: None
  misc_feature: MA Experiment ID: 20001554 Result: Up-regulated in Transcription
  misc_feature: MA Experiment 20001554 PARAMETER Experiment Name: At_Drought_Soil_Dry_P Parameter: Age (day) Value: 21
  misc_feature: MA Experiment 20001554 PARAMETER Experiment Name: At_Drought_Soil_Dry_P Parameter: Organism Value: A. thaliana
  misc_feature: MA Experiment 20001554 PARAMETER Experiment Name: At_Drought_Soil_Dry_P Parameter: Plant Line Value: WS
  misc_feature: MA Experiment 20001554 PARAMETER Experiment Name: At_Drought_Soil_Dry_P Parameter: Post Timepoint (hr) Value: None
  misc_feature: MA Experiment 20001554 PARAMETER Experiment Name: At_Drought_Soil_Dry_P Parameter: Post-Treatment Value: None
  misc_feature: MA Experiment 20001554 PARAMETER Experiment Name: At_Drought_Soil_Dry_P Parameter: Timepoint (day) Value: 7
  misc_feature: MA Experiment 20001554 PARAMETER Experiment Name: At_Drought_Soil_Dry_P Parameter: Treatment Value: Drought vs. No Drought
  misc_feature: MA Experiment ID: 20001555 Result: Up-regulated in Transcription
  misc_feature: MA Experiment 20001555 PARAMETER Experiment Name: At_Drought_Soil_Dry_P Parameter: Age (day) Value: 24
  misc_feature: MA Experiment 20001555 PARAMETER Experiment Name: At_Drought_Soil_Dry_P Parameter: Organism Value: A. thaliana
  misc_feature: MA Experiment 20001555 PARAMETER Experiment Name: At_Drought_Soil_Dry_P Parameter: Plant Line Value: WS
  misc_feature: MA Experiment 20001555 PARAMETER Experiment Name: At_Drought_Soil_Dry_P Parameter: Post Timepoint (hr) Value: None
  misc_feature: MA Experiment 20001555 PARAMETER Experiment Name: At_Drought_Soil_Dry_P Parameter: Post-Treatment Value: None
  misc_feature: MA Experiment 20001555 PARAMETER Experiment Name: At_Drought_Soil_Dry_P Parameter: Timepoint (day) Value: 10
  misc_feature: MA Experiment 20001555 PARAMETER Experiment Name: At_Drought_Soil_Dry_P Parameter: Treatment Value: Drought vs. No Drought
  misc_feature: MA Experiment ID: 20001556 Result: Up-regulated in Transcription
  misc_feature: MA Experiment 20001556 PARAMETER Experiment Name: At_Drought_Soil_Dry_P Parameter: Age (day) Value: 26
  misc_feature: MA Experiment 20001556 PARAMETER Experiment Name: At_Drought_Soil_Dry_P Parameter: Organism Value: A. thaliana
  misc_feature: MA Experiment 20001556 PARAMETER Experiment Name: At_Drought_Soil_Dry_P Parameter: Plant Line Value: WS
  misc_feature: MA Experiment 20001556 PARAMETER Experiment Name: At_Drought_Soil_Dry_P Parameter: Post Timepoint (hr) Value: None
  misc_feature: MA Experiment 20001556 PARAMETER Experiment Name: At_Drought_Soil_Dry_P Parameter: Post-Treatment Value: None
  misc_feature: MA Experiment 20001556 PARAMETER Experiment Name: At_Drought_Soil_Dry_P Parameter: Timepoint (day) Value: 12
  misc_feature: MA Experiment 20001556 PARAMETER Experiment Name: At_Drought_Soil_Dry_P Parameter: Treatment Value: Drought vs. No Drought
accagaagaagagccacacactcacaaattaaaaagagagagagagagagagagacagagagagagagagattctgcggaggagcttcttcttcgtagggtgttcatcgttattaacgttatcgcccctacgtcagctccatctccagaaacatgggtgcaggtggaagaatgccggttcctacttcttccaagaaatcggaaaccgacaccacaaagcgtgtgccgtgcgagaaaccgcctttctcggtgggagatctgaagaaagcaatcccgccgcattgtttcaaacgctcaatccctcgctctttctcctaccttatcagtgacatcattatagcctcatgcttctactacgtcgccaccaattacttctctctcctccctcagcctctctcttacttggcttggccactctattgggcctgtcaaggctgtgtcctaactggtatctgggtcatagcccacgaatgcggtcaccacgcattcagcgactaccaatggctggatgacacagttggtcttatcttccattccttcctcctcgtcccttacttctcctggaagtatagtcatcgccgtcaccattccaacactggatccctcgaaagagatgaagtatttgtcccaaagcagaaatcagcaatcaagtggtacgggaaatacctcaacaaccctcttggacgcatcatgatgttaaccgtccagtttgtcctcgggtggcccttgtacttagcctttaacgtctctggcagaccgtatgacgggttcgcttgccatttcttccccaacgctcccatctacaatgaccgagaacgcctccagatatacctctctgatgcgggtattctagccgtctgttttggtctttaccgttacgctgctgcacaagggatggcctcgatgatctgcctctacggagtaccgcttctgatagtgaatgcgttcctcgtcttgatcacttacttgcagcacactcatccctcgttgcctcactacgattcatcagagtgggactggctcaggggagctttggctaccgtagacagagactacggaatcttgaacaaggtgttccacaacattacagacacacacgtggctcatcacctgttctcgacaatgccgcattataacgcaatggaagctacaaaggcgataaagccaattctgggagactattaccagttcgatggaacaccgtggtatgtggcgatgtatagggaggcaaaggagtgtatctatgtagaaccggacagggaaggtgacaagaaaggtgtgtactggtacaacaataagttatgaggatgatggtgaagaaattgtcgacttttctcttgtctgtttgtcttttgttaaagaagctatgcttcgttttaataatcttattgtccattttgttgtgttatgacattttggctgctcattatgttatgtgggaagttagtgttc

SEQ ID NO: 42536 - protein, 383 aa, Arabidopsis thaliana; identical to SEQ ID NO: 39928
  peptide (1)..(383): Ceres Seq. ID no. 12337751
  misc_feature (89)..(340): Pfam Name: Fatty acid desaturase Pfam Description: Fatty acid desaturase
  misc_feature (1)..(383): Homolog of NCBI NO: 3417601 NR Description: delta-12 fatty acid desaturase [Borago
  misc_feature (1)..(383): Homolog of NCBI NO: 17225582 NR Description: delta-12 fatty acid desaturase [Gossypium
  misc_feature (1)..(382): Homolog of NCBI NO: 27261181 NR Description: delta 12 oleic acid desaturase FAD2 [Vernicia
  misc_feature (1)..(383): Homolog of NCBI NO: 3452129 NR Description: bifunctional oleate 12-hydroxylase:desaturase
  misc_feature (1)..(383): Homolog of NCBI NO: 8705229 NR Description: delta-12 oleate desaturase [Brassica napus]
  misc_feature (1)..(383): Homolog of NCBI NO: 20520624 NR Description: fatty acid desaturase 2 [Brassica rapa]
  misc_feature (1)..(383): Homolog of NCBI NO: 3334184 NR Description: Omega-6 fatty acid desaturase, endoplasmic
  misc_feature (1)..(383): Homolog of NCBI NO: 4378875 NR Description: delta-12 desaturase [Brassica carinata]
  misc_feature (1)..(383): Homolog of NCBI NO: 21536781 NR Description: omega-6 fatty acid desaturase, endoplasmic
  misc_feature (1)..(383): Homolog of NCBI NO: 15229956 NR Description: omega-6 fatty acid desaturase, endoplasmic

SEQ ID NO: 42537 - protein, 377 aa, Arabidopsis thaliana; identical to SEQ ID NO: 39929
  peptide (1)..(377): Ceres Seq. ID no. 12337752
  misc_feature (83)..(334): Pfam Name: Fatty acid desaturase Pfam Description: Fatty acid desaturase
  misc_feature (1)..(377): Homolog of NCBI NO: 3417601 NR Description: delta-12 fatty acid desaturase [Borago
  misc_feature (1)..(377): Homolog of NCBI NO: 17225582 NR Description: delta-12 fatty acid desaturase [Gossypium
  misc_feature (1)..(376): Homolog of NCBI NO: 27261181 NR Description: delta 12 oleic acid desaturase FAD2 [Vernicia
  misc_feature (1)..(377): Homolog of NCBI NO: 3452129 NR Description: bifunctional oleate 12-hydroxylase:desaturase
  misc_feature (1)..(377): Homolog of NCBI NO: 8705229 NR Description: delta-12 oleate desaturase [Brassica napus]
  misc_feature (1)..(377): Homolog of NCBI NO: 20520624 NR Description: fatty acid desaturase 2 [Brassica rapa]
  misc_feature (1)..(377): Homolog of NCBI NO: 3334184 NR Description: Omega-6 fatty acid desaturase, endoplasmic
  misc_feature (1)..(377): Homolog of NCBI NO: 4378875 NR Description: delta-12 desaturase [Brassica carinata]
  misc_feature (1)..(377): Homolog of NCBI NO: 21536781 NR Description: omega-6 fatty acid desaturase, endoplasmic
  misc_feature (1)..(377): Homolog of NCBI NO: 15229956 NR Description: omega-6 fatty acid desaturase, endoplasmic

SEQ ID NO: 42538 - protein, 204 aa, Arabidopsis thaliana; identical to SEQ ID NO: 39930
  peptide (1)..(204): Ceres Seq. ID no. 12337753
  misc_feature (1)..(161): Pfam Name: Fatty acid desaturase Pfam Description: Fatty acid desaturase
  misc_feature (1)..(204): Homolog of NCBI NO: 3417601 NR Description: delta-12 fatty acid desaturase [Borago
  misc_feature (1)..(204): Homolog of NCBI NO: 17225582 NR Description: delta-12 fatty acid desaturase [Gossypium
  misc_feature (1)..(203): Homolog of NCBI NO: 27261181 NR Description: delta 12 oleic acid desaturase FAD2 [Vernicia
  misc_feature (1)..(204): Homolog of NCBI NO: 3452129 NR Description: bifunctional oleate 12-hydroxylase:desaturase
  misc_feature (1)..(204): Homolog of NCBI NO: 8705229 NR Description: delta-12 oleate desaturase [Brassica napus]
  misc_feature (1)..(204): Homolog of NCBI NO: 20520624 NR Description: fatty acid desaturase 2 [Brassica rapa]
  misc_feature (1)..(204): Homolog of NCBI NO: 3334184 NR Description: Omega-6 fatty acid desaturase, endoplasmic
  misc_feature (1)..(204): Homolog of NCBI NO: 4378875 NR Description: delta-12 desaturase [Brassica carinata]
  misc_feature (1)..(204): Homolog of NCBI NO: 21536781 NR Description: omega-6 fatty acid desaturase, endoplasmic
  misc_feature (1)..(204): Homolog of NCBI NO: 15229956 NR Description: omega-6 fatty acid desaturase, endoplasmic

SEQ ID NO: 42539 - DNA, 1251 bp, Arabidopsis thaliana
  misc_feature (1)..(1251): Ceres Seq. ID no. 12334113
  misc_feature: MA Experiment ID: 108434 Result: Down-regulated in Transcription
  misc_feature: MA Experiment 108434 PARAMETER Experiment Name: At_Root_Tips_cDNA_P Parameter: Tissue Value: Root Tips
  misc_feature: MA Experiment ID: 108469 Result: Up-regulated in Transcription
  misc_feature: MA Experiment ID: 108577 Result: Down-regulated in Transcription
  misc_feature: MA Experiment 108577 PARAMETER Experiment Name: At_42deg_Heat_cDNA_P Parameter: Temperature (deg C) Value: 42 vs. 22
  misc_feature: MA Experiment 108577 PARAMETER Experiment Name: At_42deg_Heat_cDNA_P Parameter: Timepoint (hr) Value: 6
  misc_feature: MA Experiment 108577 PARAMETER Experiment Name: At_42deg_Heat_cDNA_P Parameter: Tissue Value: Aerial
  misc_feature: MA Experiment ID: 108585 Result: Up-regulated in Transcription
  misc_feature: MA Experiment 108585 PARAMETER Experiment Name: At_5mM_NaNP_cDNA_P Parameter: Timepoint (hr) Value: 6
  misc_feature: MA Experiment 108585 PARAMETER Experiment Name: At_5mM_NaNP_cDNA_P Parameter: Tissue Value: Aerial
  misc_feature: MA Experiment 108585 PARAMETER Experiment Name: At_5mM_NaNP_cDNA_P Parameter: Treatment Value: null
  misc_feature: MA Experiment ID: 108594 Result: Up-regulated in Transcription
  misc_feature: MA Experiment 108594 PARAMETER Experiment Name: At_Ler-rhl_Root_cDNA_P Parameter: Plant Line Value: null
  misc_feature: MA Experiment ID: 108595 Result: Up-regulated in Transcription
  misc_feature: MA Experiment 108595 PARAMETER Experiment Name: At_Ler-pi_Ovule_cDNA_P Parameter: Plant Line Value: null
  misc_feature: MA Experiment ID: 108667 Result: Up-regulated in Transcription
  misc_feature: MA Experiment 108667 PARAMETER Experiment Name: At_2mM_SA_cDNA_P Parameter: Plant Line Value: WS
  misc_feature: MA Experiment 108667 PARAMETER Experiment Name: At_2mM_SA_cDNA_P Parameter: Timepoint (hr) Value: 1
  misc_feature: MA Experiment 108667 PARAMETER Experiment Name: At_2mM_SA_cDNA_P Parameter: Treatment Value: 2mM SA vs. No Treatment
  misc_feature: MA Experiment ID: 108668 Result: Up-regulated in Transcription
  misc_feature: MA Experiment 108668 PARAMETER Experiment Name: At_2mM_SA_cDNA_P Parameter: Plant Line Value: WS
  misc_feature: MA Experiment 108668 PARAMETER Experiment Name: At_2mM_SA_cDNA_P Parameter: Timepoint (hr) Value: 6
  misc_feature: MA Experiment 108668 PARAMETER Experiment Name: At_2mM_SA_cDNA_P Parameter: Treatment Value: 2mM SA vs. No Treatment
  misc_feature: MA Experiment ID: 20000111 Result: Down-regulated in Transcription
  misc_feature: MA Experiment 20000111 PARAMETER Experiment Name: At_42deg_Heat_cDNA_P Parameter: Temperature (deg C) Value: 42 vs. 22
  misc_feature: MA Experiment 20000111 PARAMETER Experiment Name: At_42deg_Heat_cDNA_P Parameter: Timepoint (hr) Value: 6
  misc_feature: MA Experiment 20000111 PARAMETER Experiment Name: At_42deg_Heat_cDNA_P Parameter: Tissue Value: Aerial
  misc_feature: MA Experiment ID: 20000113 Result: Down-regulated in Transcription
  misc_feature: MA Experiment 20000113 PARAMETER Experiment Name: At_42deg_Heat_cDNA_P Parameter: Temperature (deg C) Value: 42 vs. 22
  misc_feature: MA Experiment 20000113 PARAMETER Experiment Name: At_42deg_Heat_cDNA_P Parameter: Timepoint (hr) Value: 8
  misc_feature: MA Experiment 20000113 PARAMETER Experiment Name: At_42deg_Heat_cDNA_P Parameter: Tissue Value: Aerial
  misc_feature: MA Experiment ID: 20000173 Result: Down-regulated in Transcription
  misc_feature: MA Experiment 20000173 PARAMETER Experiment Name: At_42deg_Heat_P Parameter: Age (day) Value: 14
  misc_feature: MA Experiment 20000173 PARAMETER Experiment Name: At_42deg_Heat_P Parameter: Organism Value: A. thaliana
  misc_feature: MA Experiment 20000173 PARAMETER Experiment Name: At_42deg_Heat_P Parameter: Plant Line Value: WS
  misc_feature: MA Experiment 20000173 PARAMETER Experiment Name: At_42deg_Heat_P Parameter: Temperature (deg C) Value: 42 vs. 22
  misc_feature: MA Experiment 20000173 PARAMETER Experiment Name: At_42deg_Heat_P Parameter: Timepoint (hr) Value: 6
  misc_feature: MA Experiment 20000173 PARAMETER Experiment Name: At_42deg_Heat_P Parameter: Tissue Value: Aerial
  misc_feature: MA Experiment ID: 20000182 Result: Up-regulated in Transcription
  misc_feature: MA Experiment 20000182 PARAMETER Experiment Name: At_2mM_SA_P Parameter: Age (day) Value: 14
  misc_feature: MA Experiment 20000182 PARAMETER Experiment Name: At_2mM_SA_P Parameter: Organism Value: A. thaliana
  misc_feature: MA Experiment 20000182 PARAMETER Experiment Name: At_2mM_SA_P Parameter: Plant Line Value: WS
  misc_feature: MA Experiment 20000182 PARAMETER Experiment Name: At_2mM_SA_P Parameter: Timepoint (hr) Value: 6
  misc_feature: MA Experiment 20000182 PARAMETER Experiment Name: At_2mM_SA_P Parameter: Tissue Value: Aerial
  misc_feature: MA Experiment 20000182 PARAMETER Experiment Name: At_2mM_SA_P Parameter: Treatment Value: 2mM SA vs. No Treatment
  misc_feature: MA Experiment ID: 20000184 Result: Down-regulated in Transcription
  misc_feature: MA Experiment 20000184 PARAMETER Experiment Name: At_Shoots__P Parameter: Age (day) Value: 7
  misc_feature: MA Experiment 20000184 PARAMETER Experiment Name: At_Shoots__P Parameter: Tissue Value: Shoots vs. Whole Plant
  misc_feature: MA Experiment ID: 20000185 Result: Down-regulated in Transcription
  misc_feature: MA Experiment 20000185 PARAMETER Experiment Name: At_Roots__P Parameter: Age (day) Value: 7 vs. 21
  misc_feature: MA Experiment 20000185 PARAMETER Experiment Name: At_Roots__P Parameter: Organism Value: A. thaliana
  misc_feature: MA Experiment 20000185 PARAMETER Experiment Name: At_Roots__P Parameter: Tissue Value: Roots vs. Whole Plant
  misc_feature: MA Experiment ID: 20000213 Result: Up-regulated in Transcription
  misc_feature: MA Experiment 20000213 PARAMETER Experiment Name: At_4deg_Cold_P Parameter: Timepoint (hr) Value: 2
  misc_feature: MA Experiment ID: 20000234 Result: Down-regulated in Transcription
  misc_feature: MA Experiment 20000234 PARAMETER Experiment Name: At_Siliques_P Parameter: Age (day) Value: 21
  misc_feature: MA Experiment 20000234 PARAMETER Experiment Name: At_Siliques_P Parameter: Organism Value: A. thaliana
  misc_feature: MA Experiment 20000234 PARAMETER Experiment Name: At_Siliques_P Parameter: Plant Line Value: WS
  misc_feature: MA Experiment 20000234 PARAMETER Experiment Name: At_Siliques_P Parameter: Tissue Value: Less Than 5mm Siliques vs. Whole Plant
  misc_feature: MA Experiment ID: 20000235 Result: Down-regulated in Transcription
  misc_feature: MA Experiment 20000235 PARAMETER Experiment Name: At_Siliques_P Parameter: Age (day) Value: 21
  misc_feature: MA Experiment 20000235 PARAMETER Experiment Name: At_Siliques_P Parameter: Organism Value: A. thaliana
  misc_feature: MA Experiment 20000235 PARAMETER Experiment Name: At_Siliques_P Parameter: Plant Line Value: WS
  misc_feature: MA Experiment 20000235 PARAMETER Experiment Name: At_Siliques_P Parameter: Tissue Value: 5-10mm Siliques vs. Whole Plant
  misc_feature: MA Experiment ID: 20000264 Result: Down-regulated in Transcription
  misc_feature: MA Experiment 20000264 PARAMETER Experiment Name: At_Open_Flower_P Parameter: Age (day) Value: 21
  misc_feature: MA Experiment 20000264 PARAMETER Experiment Name: At_Open_Flower_P Parameter: Plant Line Value: WS
  misc_feature: MA Experiment 20000264 PARAMETER Experiment Name: At_Open_Flower_P Parameter: Tissue Value: Open Flower vs. Whole Plant
  misc_feature: MA Experiment ID: 20000265 Result: Down-regulated in Transcription
  misc_feature: MA Experiment 20000265 PARAMETER Experiment Name: At_Open_Flower_P Parameter: Age (day) Value: 21
  misc_feature: MA Experiment 20000265 PARAMETER Experiment Name: At_Open_Flower_P Parameter: Plant Line Value: WS
  misc_feature: MA Experiment 20000265 PARAMETER Experiment Name: At_Open_Flower_P Parameter: Tissue Value: Closed Flower vs. Whole Plant
  misc_feature: MA Experiment ID: 20000268 Result: Down-regulated in Transcription
  misc_feature: MA Experiment 20000268 PARAMETER Experiment Name: At_100mM_NaCl__P Parameter: Age (day) Value: 14
  misc_feature: MA Experiment 20000268 PARAMETER Experiment Name: At_100mM_NaCl__P Parameter: Organism Value: A. thaliana
  misc_feature: MA Experiment 20000268 PARAMETER Experiment Name: At_100mM_NaCl__P Parameter: Plant Line Value: WS
  misc_feature: MA Experiment 20000268 PARAMETER Experiment Name: At_100mM_NaCl__P Parameter: Timepoint (hr) Value: 6
  misc_feature: MA Experiment 20000268 PARAMETER Experiment Name: At_100mM_NaCl__P Parameter: Tissue Value: Whole Plant
  misc_feature: MA Experiment 20000268 PARAMETER Experiment Name: At_100mM_NaCl__P Parameter: Treatment Value: 100mM NaCl vs. No Treatment
  misc_feature: MA Experiment ID: 20000286 Result: Down-regulated in Transcription
  misc_feature: MA Experiment 20000286 PARAMETER Experiment Name: At_Open_Flower_P Parameter: Age (day) Value: 21
  misc_feature: MA Experiment 20000286 PARAMETER Experiment Name: At_Open_Flower_P Parameter: Plant Line Value: WS
  misc_feature: MA Experiment 20000286 PARAMETER Experiment Name: At_Open_Flower_P Parameter: Tissue Value: Half Open vs. Whole Plant
  misc_feature: MA Experiment ID: 20000438 Result: Down-regulated in Transcription
  misc_feature: MA Experiment 20000438 PARAMETER Experiment Name: At_Shoots__P Parameter: Age (day) Value: 14
  misc_feature: MA Experiment 20000438 PARAMETER Experiment Name: At_Shoots__P Parameter: Tissue Value: Shoots vs. Whole Plant
  misc_feature: MA Experiment ID: 20000439 Result: Down-regulated in Transcription
  misc_feature: MA Experiment 20000439 PARAMETER Experiment Name: At_Roots__P Parameter: Age (day) Value: 14 vs. 21
  misc_feature: MA Experiment 20000439 PARAMETER Experiment Name: At_Roots__P Parameter: Organism Value: A. thaliana
  misc_feature: MA Experiment 20000439 PARAMETER Experiment Name: At_Roots__P Parameter: Tissue Value: Roots vs. Whole Plant
  misc_feature: MA Experiment ID: 20000441 Result: Up-regulated in Transcription
  misc_feature: MA Experiment 20000441 PARAMETER Experiment Name: At_1uM_BR-BRZ__P Parameter: Tissue Value: Shoot Apices
  misc_feature: MA Experiment 20000441 PARAMETER Experiment Name: At_1uM_BR-BRZ__P Parameter: Treatment Value: 1uM BR vs. No Treatment
  misc_feature: MA Experiment ID: 20000460 Result: Up-regulated in Transcription
  misc_feature: MA Experiment 20000460 PARAMETER Experiment Name: At_10percent_PEG_P Parameter: Age (day) Value: 12
  misc_feature: MA Experiment 20000460 PARAMETER Experiment Name: At_10percent_PEG_P Parameter: Organism Value: A. thaliana
  misc_feature: MA Experiment 20000460 PARAMETER Experiment Name: At_10percent_PEG_P Parameter: Plant Line Value: WS
  misc_feature: MA Experiment 20000460 PARAMETER Experiment Name: At_10percent_PEG_P Parameter: Timepoint (day) Value: 12
  misc_feature: MA Experiment 20000460 PARAMETER Experiment Name: At_10percent_PEG_P Parameter: Tissue Value: Whole Plant
  misc_feature: MA Experiment 20000460 PARAMETER Experiment Name: At_10percent_PEG_P Parameter: Treatment Value: 10percent PEG vs. No Treatment
  misc_feature: MA Experiment ID: 20000573 Result: Down-regulated in Transcription
  misc_feature: MA Experiment 20000573 PARAMETER Experiment Name: At_100uM_ABA_Mutants__P Parameter: Organism Value: A. thaliana
  misc_feature: MA Experiment 20000573 PARAMETER Experiment Name: At_100uM_ABA_Mutants__P Parameter: Plant Line Value: CS22 vs. Ler wt
  misc_feature: MA Experiment 20000573 PARAMETER Experiment Name: At_100uM_ABA_Mutants__P Parameter: Timepoint (hr) Value: N/A
  misc_feature: MA Experiment 20000573 PARAMETER Experiment Name: At_100uM_ABA_Mutants__P Parameter: Tissue Value: Whole Plant
  misc_feature: MA Experiment 20000573 PARAMETER Experiment Name: At_100uM_ABA_Mutants__P Parameter: Treatment Value: None
  misc_feature: MA Experiment ID: 20000794 Result: Down-regulated in Transcription
  misc_feature: MA Experiment 20000794 PARAMETER Experiment Name: At_Petals_P Parameter: Age (day) Value: 23-25 days
  misc_feature: MA Experiment 20000794 PARAMETER Experiment Name: At_Petals_P Parameter: Plant Line Value: WS
  misc_feature: MA Experiment 20000794 PARAMETER Experiment Name: At_Petals_P Parameter: Tissue Value: Petals vs. Whole plant
  misc_feature: MA Experiment ID: 20001247 Result: Up-regulated in Transcription
  misc_feature: MA Experiment 20001247 PARAMETER Experiment Name: At_Far-red-induction_P Parameter: Age (day) Value: 7
  misc_feature: MA Experiment 20001247 PARAMETER Experiment Name: At_Far-red-induction_P Parameter: Light Value: Far-red vs. White
  misc_feature: MA Experiment 20001247 PARAMETER Experiment Name: At_Far-red-induction_P Parameter: Organism Value: A. thaliana
  misc_feature: MA Experiment 20001247 PARAMETER Experiment Name: At_Far-red-induction_P Parameter: Plant Line Value: Columbia
  misc_feature: MA Experiment 20001247 PARAMETER Experiment Name: At_Far-red-induction_P Parameter: Timepoint (hr) Value: 1
  misc_feature: MA Experiment 20001247 PARAMETER Experiment Name: At_Far-red-induction_P Parameter: Tissue Value: Whole Plant
  misc_feature: MA Experiment ID: 20001451 Result: Down-regulated in Transcription
  misc_feature: MA Experiment 20001451 PARAMETER Experiment Name: At_Far-red-induction_P Parameter: Age (day) Value: 7
  misc_feature: MA Experiment 20001451 PARAMETER Experiment Name: At_Far-red-induction_P Parameter: Light Value: Far-red vs. White
  misc_feature: MA Experiment 20001451 PARAMETER Experiment Name: At_Far-red-induction_P Parameter: Organism Value: A. thaliana
  misc_feature: MA Experiment 20001451 PARAMETER Experiment Name: At_Far-red-induction_P Parameter: Plant Line Value: Columbia
  misc_feature: MA Experiment 20001451 PARAMETER Experiment Name: At_Far-red-induction_P Parameter: Timepoint (hr) Value: 24
  misc_feature: MA Experiment 20001451 PARAMETER Experiment Name: At_Far-red-induction_P Parameter: Tissue Value: Whole Plant
  misc_feature: MA Experiment ID: 20001555 Result: Down-regulated in Transcription
  misc_feature: MA Experiment 20001555 PARAMETER Experiment Name: At_Drought_Soil_Dry_P Parameter: Age (day) Value: 24
  misc_feature: MA Experiment 20001555 PARAMETER Experiment Name: At_Drought_Soil_Dry_P Parameter: Organism Value: A. thaliana
  misc_feature: MA Experiment 20001555 PARAMETER Experiment Name: At_Drought_Soil_Dry_P Parameter: Plant Line Value: WS
  misc_feature: MA Experiment 20001555 PARAMETER Experiment Name: At_Drought_Soil_Dry_P Parameter: Post Timepoint (hr) Value: None
  misc_feature: MA Experiment 20001555 PARAMETER Experiment Name: At_Drought_Soil_Dry_P Parameter: Post-Treatment Value: None
  misc_feature: MA Experiment 20001555 PARAMETER Experiment Name: At_Drought_Soil_Dry_P Parameter: Timepoint (day) Value: 10
  misc_feature: MA Experiment 20001555 PARAMETER Experiment Name: At_Drought_Soil_Dry_P Parameter: Treatment Value: Drought vs. No Drought
  misc_feature: MA Experiment ID: 20001556 Result: Down-regulated in Transcription
  misc_feature: MA Experiment 20001556 PARAMETER Experiment Name: At_Drought_Soil_Dry_P Parameter: Age (day) Value: 26
  misc_feature: MA Experiment 20001556 PARAMETER Experiment Name: At_Drought_Soil_Dry_P Parameter: Organism Value: A. thaliana
  misc_feature: MA Experiment 20001556 PARAMETER Experiment Name: At_Drought_Soil_Dry_P Parameter: Plant Line Value: WS
  misc_feature: MA Experiment 20001556 PARAMETER Experiment Name: At_Drought_Soil_Dry_P Parameter: Post Timepoint (hr) Value: None
  misc_feature: MA Experiment 20001556 PARAMETER Experiment Name: At_Drought_Soil_Dry_P Parameter: Post-Treatment Value: None
  misc_feature: MA Experiment 20001556 PARAMETER Experiment Name: At_Drought_Soil_Dry_P Parameter: Timepoint (day) Value: 12
  misc_feature: MA Experiment 20001556 PARAMETER Experiment Name: At_Drought_Soil_Dry_P Parameter: Treatment Value: Drought vs. No Drought
  misc_feature: MA Experiment ID: 20001904 Result: Down-regulated in Transcription
  misc_feature: MA Experiment 20001904 PARAMETER Experiment Name: At_Drought_Reproduction_P Parameter: Age (day) Value: 37
  misc_feature: MA Experiment 20001904 PARAMETER Experiment Name: At_Drought_Reproduction_P Parameter: Organism Value: A. thaliana
  misc_feature: MA Experiment 20001904 PARAMETER Experiment Name: At_Drought_Reproduction_P Parameter: Plant Line Value: WS
  misc_feature: MA Experiment 20001904 PARAMETER Experiment Name: At_Drought_Reproduction_P Parameter: Timepoint (day) Value: 7
  misc_feature: MA Experiment 20001904 PARAMETER Experiment Name: At_Drought_Reproduction_P Parameter: Tissue Value: Rosettes
  misc_feature: MA Experiment 20001904 PARAMETER Experiment Name: At_Drought_Reproduction_P Parameter: Treatment Value: Drought vs. No Drought
  misc_feature: MA Experiment ID: 20001910 Result: Down-regulated in Transcription
  misc_feature: MA Experiment 20001910 PARAMETER Experiment Name: At_Drought_Reproduction_P Parameter: Age (day) Value: 37
  misc_feature: MA Experiment 20001910 PARAMETER Experiment Name: At_Drought_Reproduction_P Parameter: Organism Value: A. thaliana
  misc_feature: MA Experiment 20001910 PARAMETER Experiment Name: At_Drought_Reproduction_P Parameter: Plant Line Value: WS
  misc_feature: MA Experiment 20001910 PARAMETER Experiment Name: At_Drought_Reproduction_P Parameter: Timepoint (day) Value: 7
  misc_feature: MA Experiment 20001910 PARAMETER Experiment Name: At_Drought_Reproduction_P Parameter: Tissue Value: Flowers
  misc_feature: MA Experiment 20001910 PARAMETER Experiment Name: At_Drought_Reproduction_P Parameter: Treatment Value: Drought vs. No Drought
tgaaagttcttaagtggttccacgatgtttccattttgttctgacttccgaggccaacgagatgagtccaataaacaaagggcacggaaacattctttttaaattagtcttcttgagatcgaaggataacttcaattcaattcttttccaaggtacacacagctgatttttgtgataagaagattgattgagatgggtactagagctcagcagattcctttacttgaaggtgagactgataattacgatggtgttactgtaaccatggtggaacctatggattctgaggtttttactgaaagtcttagggcttctctttcgcattggagagaagaggggaagaagggaatttggataaagctgcctcttggattggctaatcttgtggaggctgcagttagtgaaggatttagatatcaccacgcggagcctgagtacttgatgcttgtatcttggatctctgaaactcctgatacaatcccagccaatgcttctcatgttgtaggtgctggtgctttggtcatcaacaaaaatactaaagaggtcctcgttgtccaggagaggagtgggtttttcaaagataaaaatgtgtggaagctgcctactggtgttatcaacgagggcgaggatatatggactggagtagctagggaagtggaagaagaaactggaattattgcagattttgtcgaagtactggctttcaggcaaagccacaaagccatcttaaaaaagaaaacagatatgtttttcctgtgtgtcttaagtccgcgctcttacgatattactgaacaaaaatctgagatcttgcaagctaagtggatgccgatccaagagtatgtagaccaaccatggaacaagaagaacgagatgttcaagttcatggctaacatttgccaaaagaagtgtgaggaagaatacttgggattcgccattgtgccaactaccacatcatctggtaaagagagctttatctactgcaatgcggatcatgccaagcgccttaaagtatcgcgtgaccaagcctctgcttctctctgaaaacattctcatctgattctgtttgatctcggcatgtgtgtgtccagtgtgtacaaaacaggaaactttcttctatattattccgattctacaaaattgcgtctaaatatttaagtttataccatctctatgagccactgtaaaacttgccatcgacttctagtctatttccagtgatggtttgattctcccaacgcttacgtgcttttt

SEQ ID NO: 42540 - protein, 282 aa, Arabidopsis thaliana
  peptide (1)..(282): Ceres Seq. ID no. 12334114
  misc_feature (102)..(237): Pfam Name: NUDIX domain Pfam Description: NUDIX domain
  misc_feature (161)..(264): Homolog of NCBI NO: 30686884 NR Description: MutT/nudix family protein [Arabidopsis thaliana]
  misc_feature (16)..(161): Homolog of NCBI NO: 30686884 NR Description: MutT/nudix family protein [Arabidopsis thaliana]
  misc_feature (16)..(264): Homolog of NCBI NO: 38564312 NR Description: At4g25434 [Arabidopsis thaliana]
  misc_feature (3)..(269): Homolog of NCBI NO: 18422823 NR Description: MutT domain protein-like
  misc_feature (3)..(269): Homolog of NCBI NO: 9758793 NR Description: MutT domain protein-like [Arabidopsis thaliana]
  misc_feature (1)..(282): Homolog of NCBI NO: 15228145 NR Description: putative mutT domain protein; protein id:
  misc_feature (1)..(282): Homolog of NCBI NO: 38564302 NR Description: At2g04430 [Arabidopsis thaliana]
  misc_feature (1)..(281): Homolog of NCBI NO: 15228147 NR Description: putative mutT domain protein; protein id:
  misc_feature (1)..(282): Homolog of NCBI NO: 21553511 NR Description: growth factor like protein [Arabidopsis thaliana]
  misc_feature (1)..(282): Homolog of NCBI NO: 15235458 NR Description: growth factor like protein
MGTRAQQIPLLEGETDNYDGVTVTMVEPMDSEVFTESLRASLSHWREEGKKGIWIKLPLGLANLVEAAVSEGFRYHHAEPEYLMLVSWISETPDTIPANASHVVGAGALVINKNTKEVLVVQERSGFFKDKNVWKLPTGVINEGEDIWTGVAREVEEETGIIADFVEVLAFRQSHKAILKKKTDMFFLCVLSPRSYDITEQKSEILQAKWMPIQEYVDQPWNKKNEMFKFMANICQKKCEEEYLGFAIVPTTTSSGKESFIYCNADHAKRLKVSRDQASASL

SEQ ID NO: 42541 - protein, 258 aa, Arabidopsis thaliana; identical to SEQ ID NO: 21781
  peptide (1)..(258): Ceres Seq. ID no. 12334115
  misc_feature (78)..(213): Pfam Name: NUDIX domain Pfam Description: NUDIX domain
  misc_feature (137)..(240): Homolog of NCBI NO: 30686884 NR Description: MutT/nudix family protein [Arabidopsis thaliana]
  misc_feature (1)..(137): Homolog of NCBI NO: 30686884 NR Description: MutT/nudix family protein [Arabidopsis thaliana]
  misc_feature (1)..(240): Homolog of NCBI NO: 38564312 NR Description: At4g25434 [Arabidopsis thaliana]
  misc_feature (1)..(245): Homolog of NCBI NO: 18422823 NR Description: MutT domain protein-like
  misc_feature (1)..(245): Homolog of NCBI NO: 9758793 NR Description: MutT domain protein-like [Arabidopsis thaliana]
  misc_feature (1)..(258): Homolog of NCBI NO: 15228145 NR Description: putative mutT domain protein; protein id:
  misc_feature (1)..(258): Homolog of NCBI NO: 38564302 NR Description: At2g04430 [Arabidopsis thaliana]
  misc_feature (1)..(257): Homolog of NCBI NO: 15228147 NR Description: putative mutT domain protein; protein id:
  misc_feature (1)..(258): Homolog of NCBI NO: 21553511 NR Description: growth factor like protein [Arabidopsis thaliana]
  misc_feature (1)..(258): Homolog of NCBI NO: 15235458 NR Description: growth factor like protein

SEQ ID NO: 42542 - protein, 254 aa, Arabidopsis thaliana; identical to SEQ ID NO: 21782
  peptide (1)..(254): Ceres Seq. ID no. 12334116
  misc_feature (74)..(209): Pfam Name: NUDIX domain Pfam Description: NUDIX domain
  misc_feature (133)..(236): Homolog of NCBI NO: 30686884 NR Description: MutT/nudix family protein [Arabidopsis thaliana]
  misc_feature (1)..(133): Homolog of NCBI NO: 30686884 NR Description: MutT/nudix family protein [Arabidopsis thaliana]
  misc_feature (1)..(236): Homolog of NCBI NO: 38564312 NR Description: At4g25434 [Arabidopsis thaliana]
  misc_feature (1)..(241): Homolog of NCBI NO: 18422823 NR Description: MutT domain protein-like
  misc_feature (1)..(241): Homolog of NCBI NO: 9758793 NR Description: MutT domain protein-like [Arabidopsis thaliana]
  misc_feature (1)..(254): Homolog of NCBI NO: 15228145 NR Description: putative mutT domain protein; protein id:
  misc_feature (1)..(254): Homolog of NCBI NO: 38564302 NR Description: At2g04430 [Arabidopsis thaliana]
  misc_feature (1)..(253): Homolog of NCBI NO: 15228147 NR Description: putative mutT domain protein; protein id:
  misc_feature (1)..(254): Homolog of NCBI NO: 21553511 NR Description: growth factor like protein [Arabidopsis thaliana]
  misc_feature (1)..(254): Homolog of NCBI NO: 15235458 NR Description: growth factor like protein

SEQ ID NO: 42543 - DNA, 811 bp, Arabidopsis thaliana
  misc_feature (1)..(811): Ceres Seq. ID no. 12422552
  misc_feature: MA Experiment ID: 108576 Result: Up-regulated in Transcription
  misc_feature: MA Experiment 108576 PARAMETER Experiment Name: At_42deg_Heat_cDNA_P Parameter: Temperature (deg C) Value: 42 vs. 22
  misc_feature: MA Experiment 108576 PARAMETER Experiment Name: At_42deg_Heat_cDNA_P Parameter: Timepoint (hr) Value: 1
  misc_feature: MA Experiment 108576 PARAMETER Experiment Name: At_42deg_Heat_cDNA_P Parameter: Tissue Value: Aerial
  misc_feature: MA Experiment ID: 20000184 Result: Down-regulated in Transcription
  misc_feature: MA Experiment 20000184 PARAMETER Experiment Name: At_Shoots__P Parameter: Age (day) Value: 7
  misc_feature: MA Experiment 20000184 PARAMETER Experiment Name: At_Shoots__P Parameter: Tissue Value: Shoots vs. Whole Plant
  misc_feature: MA Experiment ID: 20000235 Result: Down-regulated in Transcription
  misc_feature: MA Experiment 20000235 PARAMETER Experiment Name: At_Siliques_P Parameter: Age (day) Value: 21
  misc_feature: MA Experiment 20000235 PARAMETER Experiment Name: At_Siliques_P Parameter: Organism Value: A. thaliana
  misc_feature: MA Experiment 20000235 PARAMETER Experiment Name: At_Siliques_P Parameter: Plant Line Value: WS
  misc_feature: MA Experiment 20000235 PARAMETER Experiment Name: At_Siliques_P Parameter: Tissue Value: 5-10mm Siliques vs. Whole Plant
  misc_feature: MA Experiment ID: 20000451 Result: Down-regulated in Transcription
  misc_feature: MA Experiment 20000451 PARAMETER Experiment Name: At_CS6879_Shoots-Roots_P Parameter: Age (day) Value: 14
  misc_feature: MA Experiment 20000451 PARAMETER Experiment Name: At_CS6879_Shoots-Roots_P Parameter: Organism Value: A. thaliana
  misc_feature: MA Experiment 20000451 PARAMETER Experiment Name: At_CS6879_Shoots-Roots_P Parameter: Plant Line Value: CS6879 vs. WS
  misc_feature: MA Experiment 20000451 PARAMETER Experiment Name: At_CS6879_Shoots-Roots_P Parameter: Tissue Value: Roots
  misc_feature: MA Experiment ID: 20000452 Result: Down-regulated in Transcription
  misc_feature: MA Experiment 20000452 PARAMETER Experiment Name: At_CS6879_Shoots-Roots_P Parameter: Age (day) Value: 14
  misc_feature: MA Experiment 20000452 PARAMETER Experiment Name: At_CS6879_Shoots-Roots_P Parameter: Organism Value: A. thaliana
  misc_feature: MA Experiment 20000452 PARAMETER Experiment Name: At_CS6879_Shoots-Roots_P Parameter: Plant Line Value: CS6879 vs. WS
  misc_feature: MA Experiment 20000452 PARAMETER Experiment Name: At_CS6879_Shoots-Roots_P Parameter: Tissue Value: Shoots
  misc_feature: MA Experiment ID: 20001450 Result: Up-regulated in Transcription
  misc_feature: MA Experiment 20001450 PARAMETER Experiment Name: At_Far-red-induction_P Parameter: Age (day) Value: 7
  misc_feature: MA Experiment 20001450 PARAMETER Experiment Name: At_Far-red-induction_P Parameter: Light Value: Far-red vs. White
  misc_feature: MA Experiment 20001450 PARAMETER Experiment Name: At_Far-red-induction_P Parameter: Organism Value: A. thaliana
  misc_feature: MA Experiment 20001450 PARAMETER Experiment Name: At_Far-red-induction_P Parameter: Plant Line Value: Columbia
  misc_feature: MA Experiment 20001450 PARAMETER Experiment Name: At_Far-red-induction_P Parameter: Timepoint (hr) Value: 8
  misc_feature: MA Experiment 20001450 PARAMETER Experiment Name: At_Far-red-induction_P Parameter: Tissue Value: Whole Plant
agaacaaaacaaacaaaaagtcatgtctccgacgacgacatcgttacgatccctaagcttctcgctttacgcttcttctaattctactccgatttctacaccaattgaggcccgacagttactgagttcatgcagtagattctacggtctgtcctcttcgagctcttcttcctcccttactacttcatctttgatcggaaatcttgttttctcatcaaggaatcagtctctctccgtaaaggtccaagcgttagctgctgaaaccgaacagccaaaatggtgggagaggaaagcagggccaaacatgattgacattacctcagctgagcagtttctcaacgcgttaaaagatgcgggagatagattagttatcgtagatttttacggaacttggtgtggttcttgccgtgcaatgttcccaaagctctgcaaaacggcgaaagaacaccctgacatcttgttccttaaagtaaactttgacgagaacaagtctctctgcaaaagcttaaacgtcaaggtgttaccgtatttccacttctaccgcggtgctgatggccaagtcgaatccttctcatgctctcttgccaagttccagaaactgagagaggcgatagagagacacaatgtaggaagtatcagtaacatctcttcttcagcttctgagaaagttgaagattcaagtgaataatcaatgcctggttcagattgatcacagattattttgttaaatcgcttccctgtatatatgttgactgcattttccatgtggtgcatcataatttttgtacataaataaatgagtctgacttcg

SEQ ID NO: 42544 - protein, 228 aa, Arabidopsis thaliana
  peptide (1)..(228): Ceres Seq. ID no. 12422553
  misc_feature (26)..(207): Homolog of NCBI NO: 15240254 NR Description: thioredoxin-like 3
  misc_feature (71)..(213): Homolog of NCBI NO: 308906 NR Description: thioredoxin
  misc_feature (35)..(207): Homolog of NCBI NO: 15225825 NR Description: putative thioredoxin; protein id: At2g33270.1
  misc_feature (102)..(199): Homolog of NCBI NO: 14423392 NR Description: Thioredoxin-like protein [Arabidopsis thaliana]
  misc_feature (7)..(199): Homolog of NCBI NO: 30688403 NR Description: thioredoxin family [Arabidopsis thaliana]
  misc_feature (7)..(213): Homolog of NCBI NO: 21554313 NR Description: thioredoxin-like protein [Arabidopsis thaliana]
  misc_feature (7)..(213): Homolog of NCBI NO: 18417441 NR Description: Thioredoxin - like protein
  misc_feature (15)..(228): Homolog of NCBI NO: 4973258 NR Description: thioredoxin-like 2 [Arabidopsis thaliana]
  misc_feature (8)..(228): Homolog of NCBI NO: 15236134 NR Description: putative thioredoxin
  misc_feature (8)..(228): Homolog of NCBI NO: 21553512 NR Description: putative thioredoxin [Arabidopsis thaliana]
EQNKQKVMSPTTTSLRSLSFSLYASSNSTPISTPIEARQLLSSCSRFYGLSSSSSSSSLTTSSLIGNLVFSSRNQSLSVKVQALAAETEQPKWWERKAGPNMIDITSAEQFLNALKDAGDRLVIVDFYGTWCGSCRAMFPKLCKTAKEHPDILFLKVNFDENKSLCKSLNVKVLPYFHFYRGADGQVESFSCSLAKFQKLREAIERHNVGSISNISSSASEKVEDSSE

SEQ ID NO: 42545 - protein, 221 aa, Arabidopsis thaliana
  peptide (1)..(221): Ceres Seq. ID no. 12422554
  misc_feature (19)..(200): Homolog of NCBI NO: 15240254 NR Description: thioredoxin-like 3
  misc_feature (64)..(206): Homolog of NCBI NO: 308906 NR Description: thioredoxin
  misc_feature (28)..(200): Homolog of NCBI NO: 15225825 NR Description: putative thioredoxin; protein id: At2g33270.1
  misc_feature (95)..(192): Homolog of NCBI NO: 14423392 NR Description: Thioredoxin-like protein [Arabidopsis thaliana]
  misc_feature (1)..(192): Homolog of NCBI NO: 30688403 NR Description: thioredoxin family [Arabidopsis thaliana]
  misc_feature (1)..(206): Homolog of NCBI NO: 21554313 NR Description: thioredoxin-like protein [Arabidopsis thaliana]
  misc_feature (1)..(206): Homolog of NCBI NO: 18417441 NR Description: Thioredoxin - like protein
  misc_feature (8)..(221): Homolog of NCBI NO: 4973258 NR Description: thioredoxin-like 2 [Arabidopsis thaliana]
  misc_feature (1)..(221): Homolog of NCBI NO: 15236134 NR Description: putative thioredoxin
  misc_feature (1)..(221): Homolog of NCBI NO: 21553512 NR Description: putative thioredoxin [Arabidopsis thaliana]
MSPTTTSLRSLSFSLYASSNSTPISTPIEARQLLSSCSRFYGLSSSSSSSSLTTSSLIGNLVFSSRNQSLSVKVQALAAETEQPKWWERKAGPNMIDITSAEQFLNALKDAGDRLVIVDFYGTWCGSCRAMFPKLCKTAKEHPDILFLKVNFDENKSLCKSLNVKVLPYFHFYRGADGQVESFSCSLAKFQKLREAIERHNVGSISNISSSASEKVEDSSE

SEQ ID NO: 42546 - protein, 127 aa, Arabidopsis thaliana
  peptide (1)..(127): Ceres Seq. ID no. 12422555
  misc_feature (1)..(106): Homolog of NCBI NO: 15240254 NR Description: thioredoxin-like 3
  misc_feature (1)..(112): Homolog of NCBI NO: 308906 NR Description: thioredoxin
  misc_feature (1)..(106): Homolog of NCBI NO: 15225825 NR Description: putative thioredoxin; protein id: At2g33270.1
  misc_feature (1)..(98): Homolog of NCBI NO: 14423392 NR Description: Thioredoxin-like protein [Arabidopsis thaliana]
  misc_feature (1)..(98): Homolog of NCBI NO: 30688403 NR Description: thioredoxin family [Arabidopsis thaliana]
  misc_feature (1)..(112): Homolog of NCBI NO: 21554313 NR Description: thioredoxin-like protein [Arabidopsis thaliana]
  misc_feature (1)..(112): Homolog of NCBI NO: 18417441 NR Description: Thioredoxin - like protein
  misc_feature (1)..(127): Homolog of NCBI NO: 4973258 NR Description: thioredoxin-like 2 [Arabidopsis thaliana]
  misc_feature (1)..(127): Homolog of NCBI NO: 15236134 NR Description: putative thioredoxin
  misc_feature (1)..(127): Homolog of NCBI NO: 21553512 NR Description: putative thioredoxin [Arabidopsis thaliana]
MIDITSAEQFLNALKDAGDRLVIVDFYGTWCGSCRAMFPKLCKTAKEHPDILFLKVNFDENKSLCKSLNVKVLPYFHFYRGADGQVESFSCSLAKFQKLREAIERHNVGSISNISSSASEKVEDSSE

SEQ ID NO: 42547 - DNA, 847 bp, Arabidopsis thaliana
  misc_feature (1)..(847): Ceres Seq. ID no. 12488557
  misc_feature: MA Experiment ID: 108473 Result: Down-regulated in Transcription
  misc_feature: MA Experiment 108473 PARAMETER Experiment Name: At_Drought_Flowers_cDNA_P Parameter: Timepoint (hr) Value: 7 d
  misc_feature: MA Experiment 108473 PARAMETER Experiment Name: At_Drought_Flowers_cDNA_P Parameter: Tissue Value: Flower
  misc_feature: MA Experiment 108473 PARAMETER Experiment Name: At_Drought_Flowers_cDNA_P Parameter: Treatment Value: Drought vs. No Drought
  misc_feature: MA Experiment ID: 108501 Result: Down-regulated in Transcription
  misc_feature: MA Experiment 108501 PARAMETER Experiment Name: At_ap2_floral_buds_cDNA_P Parameter: Plant Line Value: ap2 (Ler.)
  misc_feature: MA Experiment 108501 PARAMETER Experiment Name: At_ap2_floral_buds_cDNA_P Parameter: Tissue Value: Closed Flower
  misc_feature: MA Experiment ID: 108595 Result: Up-regulated in Transcription
  misc_feature: MA Experiment 108595 PARAMETER Experiment Name: At_Ler-pi_Ovule_cDNA_P Parameter: Plant Line Value: null
  misc_feature: MA Experiment ID: 20000171 Result: Down-regulated in Transcription
  misc_feature: MA Experiment 20000171 PARAMETER Experiment Name: At_42deg_Heat_P Parameter: Age (day) Value: 14
  misc_feature: MA Experiment 20000171 PARAMETER Experiment Name: At_42deg_Heat_P Parameter: Organism Value: A. thaliana
  misc_feature: MA Experiment 20000171 PARAMETER Experiment Name: At_42deg_Heat_P Parameter: Plant Line Value: WS
  misc_feature: MA Experiment 20000171 PARAMETER Experiment Name: At_42deg_Heat_P Parameter: Temperature (deg C) Value: 42 vs. 22
  misc_feature: MA Experiment 20000171 PARAMETER Experiment Name: At_42deg_Heat_P Parameter: Timepoint (hr) Value: 1
  misc_feature: MA Experiment 20000171 PARAMETER Experiment Name: At_42deg_Heat_P Parameter: Tissue Value: Aerial
  misc_feature: MA Experiment ID: 20000173 Result: Down-regulated in Transcription
  misc_feature: MA Experiment 20000173 PARAMETER Experiment Name: At_42deg_Heat_P Parameter: Age (day) Value: 14
  misc_feature: MA Experiment 20000173 PARAMETER Experiment Name: At_42deg_Heat_P Parameter: Organism Value: A. thaliana
  misc_feature: MA Experiment 20000173 PARAMETER Experiment Name: At_42deg_Heat_P Parameter: Plant Line Value: WS
  misc_feature: MA Experiment 20000173 PARAMETER Experiment Name: At_42deg_Heat_P Parameter: Temperature (deg C) Value: 42 vs. 22
  misc_feature: MA Experiment 20000173 PARAMETER Experiment Name: At_42deg_Heat_P Parameter: Timepoint (hr) Value: 6
  misc_feature: MA Experiment 20000173 PARAMETER Experiment Name: At_42deg_Heat_P Parameter: Tissue Value: Aerial
  misc_feature: MA Experiment ID: 20000184 Result: Down-regulated in Transcription
  misc_feature: MA Experiment 20000184 PARAMETER Experiment Name: At_Shoots__P Parameter: Age (day) Value: 7
  misc_feature: MA Experiment 20000184 PARAMETER Experiment Name: At_Shoots__P Parameter: Tissue Value: Shoots vs. Whole Plant
  misc_feature: MA Experiment ID: 20000235 Result: Down-regulated in Transcription
  misc_feature: MA Experiment 20000235 PARAMETER Experiment Name: At_Siliques_P Parameter: Age (day) Value: 21
  misc_feature: MA Experiment 20000235 PARAMETER Experiment Name: At_Siliques_P Parameter: Organism Value: A. thaliana
  misc_feature: MA Experiment 20000235 PARAMETER Experiment Name: At_Siliques_P Parameter: Plant Line Value: WS
  misc_feature: MA Experiment 20000235 PARAMETER Experiment Name: At_Siliques_P Parameter: Tissue Value: 5-10mm Siliques vs. Whole Plant
  misc_feature: MA Experiment ID: 20000264 Result: Down-regulated in Transcription
  misc_feature: MA Experiment 20000264 PARAMETER Experiment Name: At_Open_Flower_P Parameter: Age (day) Value: 21
  misc_feature: MA Experiment 20000264 PARAMETER Experiment Name: At_Open_Flower_P Parameter: Plant Line Value: WS
  misc_feature: MA Experiment 20000264 PARAMETER Experiment Name: At_Open_Flower_P Parameter: Tissue Value: Open Flower vs. Whole Plant
  misc_feature: MA Experiment ID: 20000265 Result: Up-regulated in Transcription
  misc_feature: MA Experiment 20000265 PARAMETER Experiment Name: At_Open_Flower_P Parameter: Age (day) Value: 21
  misc_feature: MA Experiment 20000265 PARAMETER Experiment Name: At_Open_Flower_P Parameter: Plant Line Value: WS
  misc_feature: MA Experiment 20000265 PARAMETER Experiment Name: At_Open_Flower_P Parameter: Tissue Value: Closed Flower vs. Whole Plant
  misc_feature: MA Experiment ID: 20000286 Result: Up-regulated in Transcription
  misc_feature: MA Experiment 20000286 PARAMETER Experiment Name: At_Open_Flower_P Parameter: Age (day) Value: 21
  misc_feature: MA Experiment 20000286 PARAMETER Experiment Name: At_Open_Flower_P Parameter: Plant Line Value: WS
  misc_feature: MA Experiment 20000286 PARAMETER Experiment Name: At_Open_Flower_P Parameter: Tissue Value: Half Open vs. Whole Plant
  misc_feature: MA Experiment ID: 20000438 Result: Down-regulated in Transcription
  misc_feature: MA Experiment 20000438 PARAMETER Experiment Name: At_Shoots__P Parameter: Age (day) Value: 14
  misc_feature: MA Experiment 20000438 PARAMETER Experiment Name: At_Shoots__P Parameter: Tissue Value: Shoots vs. Whole Plant
  misc_feature: MA Experiment ID: 20000439 Result: Down-regulated in Transcription
  misc_feature: MA Experiment 20000439 PARAMETER Experiment Name: At_Roots__P Parameter: Age (day) Value: 14 vs. 21
  misc_feature: MA Experiment 20000439 PARAMETER Experiment Name: At_Roots__P Parameter: Organism Value: A. thaliana
  misc_feature: MA Experiment 20000439 PARAMETER Experiment Name: At_Roots__P Parameter: Tissue Value: Roots vs. Whole Plant
  misc_feature: MA Experiment ID: 20000794 Result: Down-regulated in Transcription
  misc_feature: MA Experiment 20000794 PARAMETER Experiment Name: At_Petals_P Parameter: Age (day) Value: 23-25 days
  misc_feature: MA Experiment 20000794 PARAMETER Experiment Name: At_Petals_P Parameter: Plant Line Value: WS
  misc_feature: MA Experiment 20000794 PARAMETER Experiment Name: At_Petals_P Parameter: Tissue Value: Petals vs. Whole plant
  misc_feature: MA Experiment ID: 20001555 Result: Down-regulated in Transcription
  misc_feature: MA Experiment 20001555 PARAMETER Experiment Name: At_Drought_Soil_Dry_P Parameter: Age (day) Value: 24
  misc_feature: MA Experiment 20001555 PARAMETER Experiment Name: At_Drought_Soil_Dry_P Parameter: Organism Value: A. thaliana
  misc_feature: MA Experiment 20001555 PARAMETER Experiment Name: At_Drought_Soil_Dry_P Parameter: Plant Line Value: WS
  misc_feature: MA Experiment 20001555 PARAMETER Experiment Name: At_Drought_Soil_Dry_P Parameter: Post Timepoint (hr) Value: None
  misc_feature: MA Experiment 20001555 PARAMETER Experiment Name: At_Drought_Soil_Dry_P Parameter: Post-Treatment Value: None
  misc_feature: MA Experiment 20001555 PARAMETER Experiment Name: At_Drought_Soil_Dry_P Parameter: Timepoint (day) Value: 10
  misc_feature: MA Experiment 20001555 PARAMETER Experiment Name: At_Drought_Soil_Dry_P Parameter: Treatment Value: Drought vs. No Drought
  misc_feature: MA Experiment ID: 20001556 Result: Down-regulated in Transcription
  misc_feature: MA Experiment 20001556 PARAMETER Experiment Name: At_Drought_Soil_Dry_P Parameter: Age (day) Value: 26
  misc_feature: MA Experiment 20001556 PARAMETER Experiment Name: At_Drought_Soil_Dry_P Parameter: Organism Value: A. thaliana
  misc_feature: MA Experiment 20001556 PARAMETER Experiment Name: At_Drought_Soil_Dry_P Parameter: Plant Line Value: WS
  misc_feature: MA Experiment 20001556 PARAMETER Experiment Name: At_Drought_Soil_Dry_P Parameter: Post Timepoint (hr) Value: None
  misc_feature: MA Experiment 20001556 PARAMETER Experiment Name: At_Drought_Soil_Dry_P Parameter: Post-Treatment Value: None
  misc_feature: MA Experiment 20001556 PARAMETER Experiment Name: At_Drought_Soil_Dry_P Parameter: Timepoint (day) Value: 12
  misc_feature: MA Experiment 20001556 PARAMETER Experiment Name: At_Drought_Soil_Dry_P Parameter: Treatment Value: Drought vs. No Drought
  misc_feature: MA Experiment ID: 20001557 Result: Down-regulated in Transcription
  misc_feature: MA Experiment 20001557 PARAMETER Experiment Name: At_Drought_Soil_Dry_P Parameter: Age (day) Value: 27
  misc_feature: MA Experiment 20001557 PARAMETER Experiment Name: At_Drought_Soil_Dry_P Parameter: Organism Value: A. thaliana
  misc_feature: MA Experiment 20001557 PARAMETER Experiment Name: At_Drought_Soil_Dry_P Parameter: Plant Line Value: WS
  misc_feature: MA Experiment 20001557 PARAMETER Experiment Name: At_Drought_Soil_Dry_P Parameter: Post Timepoint (hr) Value: 3
  misc_feature: MA Experiment 20001557 PARAMETER Experiment Name: At_Drought_Soil_Dry_P Parameter: Post-Treatment Value: Re-Water vs. No Drought
  misc_feature: MA Experiment 20001557 PARAMETER Experiment Name: At_Drought_Soil_Dry_P Parameter: Timepoint (day) Value: 13
  misc_feature: MA Experiment 20001557 PARAMETER Experiment Name: At_Drought_Soil_Dry_P Parameter: Treatment Value: Drought vs. No Drought
  misc_feature: MA Experiment ID: 20001560 Result: Up-regulated in Transcription
  misc_feature: MA Experiment 20001560 PARAMETER Experiment Name: At_Drought_Soil_Dry_P Parameter: Age (day) Value: 28
  misc_feature: MA Experiment 20001560 PARAMETER Experiment Name: At_Drought_Soil_Dry_P Parameter: Organism Value: A. thaliana
  misc_feature: MA Experiment 20001560 PARAMETER Experiment Name: At_Drought_Soil_Dry_P Parameter: Plant Line Value: WS
  misc_feature: MA Experiment 20001560 PARAMETER Experiment Name: At_Drought_Soil_Dry_P Parameter: Post Timepoint (hr) Value: None
  misc_feature: MA Experiment 20001560 PARAMETER Experiment Name: At_Drought_Soil_Dry_P Parameter: Post-Treatment Value: None
  misc_feature: MA Experiment 20001560 PARAMETER Experiment Name: At_Drought_Soil_Dry_P Parameter: Timepoint (day) Value: 14
  misc_feature: MA Experiment 20001560 PARAMETER Experiment Name: At_Drought_Soil_Dry_P Parameter: Treatment Value: Drought vs. No Drought
  misc_feature: MA Experiment ID: 20001761 Result: Up-regulated in Transcription
  misc_feature: MA Experiment 20001761 PARAMETER Experiment Name: At_50mM_NH4NO3_L-to-H_P Parameter: Timepoint (hr) Value: 4
  misc_feature: MA Experiment 20001761 PARAMETER Experiment Name: At_50mM_NH4NO3_L-to-H_P Parameter: Tissue Value: Siliques
  misc_feature: MA Experiment 20001761 PARAMETER Experiment Name: At_50mM_NH4NO3_L-to-H_P Parameter: Treatment Value: 50mM NH4NO3 vs 100mM Mannitol
  misc_feature: MA Experiment ID: 20001762 Result: Down-regulated in Transcription
  misc_feature: MA Experiment 20001762 PARAMETER Experiment Name: At_50mM_NH4NO3_L-to-H_P Parameter: Timepoint (hr) Value: 6
  misc_feature: MA Experiment 20001762 PARAMETER Experiment Name: At_50mM_NH4NO3_L-to-H_P Parameter: Tissue Value: Siliques
  misc_feature: MA Experiment 20001762 PARAMETER Experiment Name: At_50mM_NH4NO3_L-to-H_P Parameter: Treatment Value: 50mM NH4NO3 vs 100mM Mannitol
  misc_feature: MA Experiment ID: 20001771 Result: Up-regulated in Transcription
  misc_feature: MA Experiment 20001771 PARAMETER Experiment Name: At_Far-red-enriched-adult_P Parameter: Age (day) Value: 28
  misc_feature: MA Experiment 20001771 PARAMETER Experiment Name: At_Far-red-enriched-adult_P Parameter: Light Value: Far-red enriched vs. White
  misc_feature: MA Experiment 20001771 PARAMETER Experiment Name: At_Far-red-enriched-adult_P Parameter: Organism Value: A. thaliana
  misc_feature: MA Experiment 20001771 PARAMETER Experiment Name: At_Far-red-enriched-adult_P Parameter: Plant Line Value: Columbia
  misc_feature: MA Experiment 20001771 PARAMETER Experiment Name: At_Far-red-enriched-adult_P Parameter: Timepoint (hr) Value: 16
  misc_feature: MA Experiment 20001771 PARAMETER Experiment Name: At_Far-red-enriched-adult_P Parameter: Tissue Value: Aerial
  misc_feature: MA Experiment ID: 20001773 Result: Up-regulated in Transcription
  misc_feature: MA Experiment 20001773 PARAMETER Experiment Name: At_Far-red-enriched-adult_P Parameter: Age (day) Value: 30
  misc_feature: MA Experiment 20001773 PARAMETER Experiment Name: At_Far-red-enriched-adult_P Parameter: Light Value: Far-red enriched vs. White
  misc_feature: MA Experiment 20001773 PARAMETER Experiment Name: At_Far-red-enriched-adult_P Parameter: Organism Value: A. thaliana
  misc_feature: MA Experiment 20001773 PARAMETER Experiment Name: At_Far-red-enriched-adult_P Parameter: Plant Line Value: Columbia
  misc_feature: MA Experiment 20001773 PARAMETER Experiment Name: At_Far-red-enriched-adult_P Parameter: Timepoint (hr) Value: 48
  misc_feature: MA Experiment 20001773 PARAMETER Experiment Name: At_Far-red-enriched-adult_P Parameter: Tissue Value: Aerial
  misc_feature: MA Experiment ID: 20001904 Result: Down-regulated in Transcription
  misc_feature: MA Experiment 20001904 PARAMETER Experiment Name: At_Drought_Reproduction_P Parameter: Age (day) Value: 37
  misc_feature: MA Experiment 20001904 PARAMETER Experiment Name: At_Drought_Reproduction_P Parameter: Organism Value: A. thaliana
  misc_feature: MA Experiment 20001904 PARAMETER Experiment Name: At_Drought_Reproduction_P Parameter: Plant Line Value: WS
  misc_feature: MA Experiment 20001904 PARAMETER Experiment Name: At_Drought_Reproduction_P Parameter: Timepoint (day) Value: 7
  misc_feature: MA Experiment 20001904 PARAMETER Experiment Name: At_Drought_Reproduction_P Parameter: Tissue Value: Rosettes
  misc_feature: MA Experiment 20001904 PARAMETER Experiment Name: At_Drought_Reproduction_P Parameter: Treatment Value: Drought vs. No Drought
  misc_feature: MA Experiment ID: 20001911 Result: Down-regulated in Transcription
  misc_feature: MA Experiment 20001911 PARAMETER Experiment Name: At_Drought_Reproduction_P Parameter: Age (day) Value: 40
  misc_feature: MA Experiment 20001911 PARAMETER Experiment Name: At_Drought_Reproduction_P Parameter: Organism Value: A. thaliana
  misc_feature: MA Experiment 20001911 PARAMETER Experiment Name: At_Drought_Reproduction_P Parameter: Plant Line Value: WS
  misc_feature: MA Experiment 20001911 PARAMETER Experiment Name: At_Drought_Reproduction_P Parameter: Timepoint (day) Value: 10
  misc_feature: MA Experiment 20001911 PARAMETER Experiment Name: At_Drought_Reproduction_P Parameter: Tissue Value: Flowers
  misc_feature: MA Experiment 20001911 PARAMETER Experiment Name: At_Drought_Reproduction_P Parameter: Treatment Value: Drought vs. No Drought
actcactcaagaagacatctaaagccatcaaaaatatatccatagaagcttcatcgaaatggcgaatcaagcagctgctgcagcattcttccttttcgctttagccgtcttctccaacttggagctctcagcttcttcacttgtcagtggcaagatctcttgccttgactgccaccgcgatttcgacttctcaggcattaaggtcctccttaaatgcgacggagagaagaaacaaataaccgcggtggcagctgcagacggatctttccggtcagtgcttccaacggctgacaaaaaaggctccataaattgtcttgcaaagctcttgggaggccctgagcaactctatgctcacaaacacaacttggtctctgaattggtcaaatctaaacacgattccaaagttttaactacctcaaacccacttgccttctctctctcctgccccaaaccatcccgagatgatatcggaagtatgatcggagattccaagactattaattttccgggggcaggaggttttggattcccacctgccagcttctttcccttcttaccaatcattggtatcccatgatttaaataagtgttacttttaagtccttaaagacatatgtatacatatgttttgttgtttacgtgaatgaagccagccaagacaagacacaaatatttagcaaattacattactttgtttagtgagatataaggtttgtttatgagctaagaaaatgttatttattggctttatttagtttaaatcagttgcttttgtatcaagtttgtaataagaaggttgggttaatccaacaacatacgctttattgtgaacattcatgcttctatg

SEQ ID NO: 42548 - protein, 172 aa, Arabidopsis thaliana
  peptide (1)..(172): Ceres Seq. ID no. 12488558
  misc_feature (1)..(172): Homolog of NCBI NO: 30683502 NR Description: expressed protein [Arabidopsis thaliana]
  misc_feature (1)..(172): Homolog of NCBI NO: 21594030 NR Description: unknown [Arabidopsis thaliana]
  misc_feature (1)..(172): Homolog of NCBI NO: 18420486 NR Description: expressed protein
  misc_feature (1)..(172): Homolog of NCBI NO: 30683502 NR Description: expressed protein [Arabidopsis thaliana]
  misc_feature (1)..(172): Homolog of NCBI NO: 21594030 NR Description: unknown [Arabidopsis thaliana]
  misc_feature (1)..(172): Homolog of NCBI NO: 18420486 NR Description: expressed protein
MANQAAAAAFFLFALAVFSNLELSASSLVSGKISCLDCHRDFDFSGIKVLLKCDGEKKQITAVAAADGSFRSVLPTADKKGSINCLAKLLGGPEQLYAHKHNLVSELVKSKHDSKVLTTSNPLAFSLSCPKPSRDDIGSMIGDSKTINFPGAGGFGFPPASFFPFLPIIGIP

SEQ ID NO: 42549 - DNA, 1110 bp, Arabidopsis thaliana
  misc_feature (1)..(1110): Ceres Seq. ID no. 13504710
  misc_feature: MA Experiment ID: 108462 Result: Down-regulated in Transcription
  misc_feature: MA Experiment 108462 PARAMETER Experiment Name: At_Germinating_Seeds_cDNA_P Parameter: Age (day) Value: 2 vs. 0
  misc_feature: MA Experiment 108462 PARAMETER Experiment Name: At_Germinating_Seeds_cDNA_P Parameter: Tissue Value: Germinating Seeds
  misc_feature: MA Experiment ID: 108464 Result: Down-regulated in Transcription
  misc_feature: MA Experiment 108464 PARAMETER Experiment Name: At_Germinating_Seeds_cDNA_P Parameter: Age (day) Value: 4 vs. 0
  misc_feature: MA Experiment 108464 PARAMETER Experiment Name: At_Germinating_Seeds_cDNA_P Parameter: Tissue Value: Germinating Seeds
  misc_feature: MA Experiment ID: 108595 Result: Up-regulated in Transcription
  misc_feature: MA Experiment 108595 PARAMETER Experiment Name: At_Ler-pi_Ovule_cDNA_P Parameter: Plant Line Value: null
  misc_feature: MA Experiment ID: 20000184 Result: Down-regulated in Transcription
  misc_feature: MA Experiment 20000184 PARAMETER Experiment Name: At_Shoots__P Parameter: Age (day) Value: 7
  misc_feature: MA Experiment 20000184 PARAMETER Experiment Name: At_Shoots__P Parameter: Tissue Value: Shoots vs. Whole Plant
  misc_feature: MA Experiment ID: 20000227 Result: Down-regulated in Transcription
  misc_feature: MA Experiment 20000227 PARAMETER Experiment Name: At_Root-Tips-vs-Tops_P Parameter: Tissue Value: Root Tips vs. Root Tops
  misc_feature: MA Experiment ID: 20000235 Result: Down-regulated in Transcription
  misc_feature: MA Experiment 20000235 PARAMETER Experiment Name: At_Siliques_P Parameter: Age (day) Value: 21
  misc_feature: MA Experiment 20000235 PARAMETER Experiment Name: At_Siliques_P Parameter: Organism Value: A. thaliana
  misc_feature: MA Experiment 20000235 PARAMETER Experiment Name: At_Siliques_P Parameter: Plant Line Value: WS
  misc_feature: MA Experiment 20000235 PARAMETER Experiment Name: At_Siliques_P Parameter: Tissue Value: 5-10mm Siliques vs. Whole Plant
  misc_feature: MA Experiment ID: 20000496 Result: Down-regulated in Transcription
  misc_feature: MA Experiment 20000496 PARAMETER Experiment Name: At_Guard_Cells_P Parameter: Harvest Date Value: 7/19/2002
  misc_feature: MA Experiment 20000496 PARAMETER Experiment Name: At_Guard_Cells_P Parameter: Organism Value: Canola
  misc_feature: MA Experiment 20000496 PARAMETER Experiment Name: At_Guard_Cells_P Parameter: Tissue Value: Guard Cells vs. Leaves
  misc_feature: MA Experiment ID: 20001451 Result: Down-regulated in Transcription
  misc_feature: MA Experiment 20001451 PARAMETER Experiment Name: At_Far-red-induction_P Parameter: Age (day) Value: 7
  misc_feature: MA Experiment 20001451 PARAMETER Experiment Name: At_Far-red-induction_P Parameter: Light Value: Far-red vs. White
  misc_feature: MA Experiment 20001451 PARAMETER Experiment Name: At_Far-red-induction_P Parameter: Organism Value: A. thaliana
  misc_feature: MA Experiment 20001451 PARAMETER Experiment Name: At_Far-red-induction_P Parameter: Plant Line Value: Columbia
  misc_feature: MA Experiment 20001451 PARAMETER Experiment Name: At_Far-red-induction_P Parameter: Timepoint (hr) Value: 24
  misc_feature: MA Experiment 20001451 PARAMETER Experiment Name: At_Far-red-induction_P Parameter: Tissue Value: Whole Plant
gccgtcttttatctctttaccggtaagagaagccggtttcagatttgatcaattcgaagaattgtggctttcgttcgttgggtgaatccttgcttcgtcctttttgatagattgctactgtgttttcgaggaagttgtgtggagatagttagagagatttatgagatttcaagaggggttattataacgcacgcatggtgttcgacggaaagccgcagagaagttttgttgctatccgatttgactgagactcaaagtttgaaaattgttacttgggtattgagaaagctaaccttgggcaggttcgtatatgagttgggagtaaaacgacggtgatacatttgactgtttttcaactaaactagctttgaaatggtgagcttgtctgtttcgaataagagatacacttacatacacgaaagtggaagtaagtcaactagagaagccattgatattcaccatgtgattatcaacggaagcagcggaactggttatgcccgtcgttgggggcttggtttcttccttgtgtttctggcgagttctatgtactttttgcttggaaaggacaatccagctagaactctttcttggggctgccttttaagtggtttcttggttatgctacatagtcgcaagttcgtcaagaaagaatctgtgataatcttgccaaccttcgggatccaacttgaaactcaatatttaagtggaaaaactgtctccaggtttatccctattgacaagattttgaagcctgtgttggtcgaatgtgtcactcccattacgtgttactggagtctctctttatttcttcgtggtgaagaacaacttacattggtgtttaaggaactgcgtcctccattgaagatgttggttcccatttggaaagcattgtgtgctgctatcggtacagaccaccaaagtgaaacgatagctgaagaagaacatgatgtatctagttaactgcagttgtgattagagaacttgtagatttgttacttgttgttggcagttttgtttggaagatgatcacacaatatgttctgtaatgggagaattgacttgacacaaaaaaagaaaaaagaaaaaaactctttgagtggtgaacatttc

SEQ ID NO: 42550 - protein, 195 aa, Arabidopsis thaliana
  peptide (1)..(195): Ceres Seq. ID no. 13504711
  misc_feature (1)..(195): Homolog of NCBI NO: 7486656 NR Description: hypothetical protein F8D20.40 - Arabidopsis
  misc_feature (1)..(195): Homolog of NCBI NO: 22329188 NR Description: expressed protein [Arabidopsis thaliana]
MVSLSVSNKRYTYIHESGSKSTREAIDIHHVIINGSSGTGYARRWGLGFFLVFLASSMYFLLGKDNPARTLSWGCLLSGFLVMLHSRKFVKKESVIILPTFGIQLETQYLSGKTVSRFIPIDKILKPVLVECVTPITCYWSLSLFLRGEEQLTLVFKELRPPLKMLVPIWKALCAAIGTDHQSETIAEEEHDVSS

SEQ ID NO: 42551 - protein, 138 aa, Arabidopsis thaliana
  peptide (1)..(138): Ceres Seq. ID no. 13504712
  misc_feature (1)..(138): Homolog of NCBI NO: 7486656 NR Description: hypothetical protein F8D20.40 - Arabidopsis
  misc_feature (1)..(138): Homolog of NCBI NO: 22329188 NR Description: expressed protein [Arabidopsis thaliana]
MYFLLGKDNPARTLSWGCLLSGFLVMLHSRKFVKKESVIILPTFGIQLETQYLSGKTVSRFIPIDKILKPVLVECVTPITCYWSLSLFLRGEEQLTLVFKELRPPLKMLVPIWKALCAAIGTDHQSETIAEEEHDVSS

SEQ ID NO: 42552 - protein, 113 aa, Arabidopsis thaliana
  peptide (1)..(113): Ceres Seq. ID no. 13504713
  misc_feature (1)..(113): Homolog of NCBI NO: 7486656 NR Description: hypothetical protein F8D20.40 - Arabidopsis
  misc_feature (1)..(113): Homolog of NCBI NO: 22329188 NR Description: expressed protein [Arabidopsis thaliana]
MLHSRKFVKKESVIILPTFGIQLETQYLSGKTVSRFIPIDKILKPVLVECVTPITCYWSLSLFLRGEEQLTLVFKELRPPLKMLVPIWKALCAAIGTDHQSETIAEEEHDVSS

SEQ ID NO: 42553 - DNA, 822 bp, Arabidopsis thaliana
  misc_feature (1)..(822): Ceres Seq. ID no. 12326710
  misc_feature: MA Experiment ID: 108434 Result: Down-regulated in Transcription
  misc_feature: MA Experiment 108434 PARAMETER Experiment Name: At_Root_Tips_cDNA_P Parameter: Tissue Value: Root Tips
  misc_feature: MA Experiment ID: 108561 Result: Up-regulated in Transcription
  misc_feature: MA Experiment 108561 PARAMETER Experiment Name: At_100uM_ABA_cDNA_P Parameter: Timepoint (hr) Value: 6
  misc_feature: MA Experiment 108561 PARAMETER Experiment Name: At_100uM_ABA_cDNA_P Parameter: Tissue Value: Aerial
  misc_feature: MA Experiment 108561 PARAMETER Experiment Name: At_100uM_ABA_cDNA_P Parameter: Treatment Value: 100uM ABA vs. No Treatment
  misc_feature: MA Experiment ID: 108577 Result: Down-regulated in Transcription
  misc_feature: MA Experiment 108577 PARAMETER Experiment Name: At_42deg_Heat_cDNA_P Parameter: Temperature (deg C) Value: 42 vs. 22
  misc_feature: MA Experiment 108577 PARAMETER Experiment Name: At_42deg_Heat_cDNA_P Parameter: Timepoint (hr) Value: 6
  misc_feature: MA Experiment 108577 PARAMETER Experiment Name: At_42deg_Heat_cDNA_P Parameter: Tissue Value: Aerial
  misc_feature: MA Experiment ID: 108605 Result: Up-regulated in Transcription
  misc_feature: MA Experiment 108605 PARAMETER Experiment Name: At_100uM_ABA_cDNA_P Parameter: Timepoint (hr) Value: 6
  misc_feature: MA Experiment 108605 PARAMETER Experiment Name: At_100uM_ABA_cDNA_P Parameter: Tissue Value: Aerial
  misc_feature: MA Experiment 108605 PARAMETER Experiment Name: At_100uM_ABA_cDNA_P Parameter: Treatment Value: 100uM ABA vs. No Treatment
  misc_feature: MA Experiment ID: 108607 Result: Up-regulated in Transcription
  misc_feature: MA Experiment 108607 PARAMETER Experiment Name: At_100uM_ABA_cDNA_P Parameter: Timepoint (hr) Value: 4
  misc_feature: MA Experiment 108607 PARAMETER Experiment Name: At_100uM_ABA_cDNA_P Parameter: Tissue Value: Aerial
  misc_feature: MA Experiment 108607 PARAMETER Experiment Name: At_100uM_ABA_cDNA_P Parameter: Treatment Value: 100uM ABA vs. No Treatment
  misc_feature: MA Experiment ID: 20000069 Result: Up-regulated in Transcription
  misc_feature: MA Experiment 20000069 PARAMETER Experiment Name: At_100uM_ABA_Mutants_cDNA_P Parameter: Plant Line Value: CS23
  misc_feature: MA Experiment 20000069 PARAMETER Experiment Name: At_100uM_ABA_Mutants_cDNA_P Parameter: Timepoint (hr) Value: 6
  misc_feature: MA Experiment 20000069 PARAMETER Experiment Name: At_100uM_ABA_Mutants_cDNA_P Parameter: Tissue Value: Aerial
  misc_feature: MA Experiment 20000069 PARAMETER Experiment Name: At_100uM_ABA_Mutants_cDNA_P Parameter: Treatment Value: 100uM ABA vs. No Treatment
  misc_feature: MA Experiment ID: 20000070 Result: Up-regulated in Transcription
  misc_feature: MA Experiment 20000070 PARAMETER Experiment Name: At_100uM_ABA_Mutants_cDNA_P Parameter: Plant Line Value: CS24
  misc_feature: MA Experiment 20000070 PARAMETER Experiment Name: At_100uM_ABA_Mutants_cDNA_P Parameter: Timepoint (hr) Value: 6
  misc_feature: MA Experiment 20000070 PARAMETER Experiment Name: At_100uM_ABA_Mutants_cDNA_P Parameter: Tissue Value: Aerial
  misc_feature: MA Experiment 20000070 PARAMETER Experiment Name: At_100uM_ABA_Mutants_cDNA_P Parameter: Treatment Value: 100uM ABA vs. No Treatment
  misc_feature: MA Experiment ID: 20000071 Result: Up-regulated in Transcription
  misc_feature: MA Experiment 20000071 PARAMETER Experiment Name: At_100uM_ABA_Mutants_cDNA_P Parameter: Plant Line Value: CS8104
  misc_feature: MA Experiment 20000071 PARAMETER Experiment Name: At_100uM_ABA_Mutants_cDNA_P Parameter: Timepoint (hr) Value: 6
  misc_feature: MA Experiment 20000071 PARAMETER Experiment Name: At_100uM_ABA_Mutants_cDNA_P Parameter: Tissue Value: Aerial
  misc_feature: MA Experiment 20000071 PARAMETER Experiment Name: At_100uM_ABA_Mutants_cDNA_P Parameter: Treatment Value: 100uM ABA vs. No Treatment
  misc_feature: MA Experiment ID: 20000072 Result: Up-regulated in Transcription
  misc_feature: MA Experiment 20000072 PARAMETER Experiment Name: At_100uM_ABA_Mutants_cDNA_P Parameter: Plant Line Value: CS8105
  misc_feature: MA Experiment 20000072 PARAMETER Experiment Name: At_100uM_ABA_Mutants_cDNA_P Parameter: Timepoint (hr) Value: 6
  misc_feature: MA Experiment 20000072 PARAMETER Experiment Name: At_100uM_ABA_Mutants_cDNA_P Parameter: Tissue Value: Aerial
  misc_feature: MA Experiment 20000072 PARAMETER Experiment Name: At_100uM_ABA_Mutants_cDNA_P Parameter: Treatment Value: 100uM ABA vs. No Treatment
  misc_feature: MA Experiment ID: 20000086 Result: Up-regulated in Transcription
  misc_feature: MA Experiment 20000086 PARAMETER Experiment Name: At_100uM_ABA_Mutants_cDNA_P Parameter: Plant Line Value: CS22
  misc_feature: MA Experiment 20000086 PARAMETER Experiment Name: At_100uM_ABA_Mutants_cDNA_P Parameter: Timepoint (hr) Value: 6
  misc_feature: MA Experiment 20000086 PARAMETER Experiment Name: At_100uM_ABA_Mutants_cDNA_P Parameter: Tissue Value: Aerial
  misc_feature: MA Experiment 20000086 PARAMETER Experiment Name: At_100uM_ABA_Mutants_cDNA_P Parameter: Treatment Value: 100uM ABA vs. No Treatment
  misc_feature: MA Experiment ID: 20000087 Result: Up-regulated in Transcription
  misc_feature: MA Experiment 20000087 PARAMETER Experiment Name: At_100uM_ABA_Mutants_cDNA_P Parameter: Plant Line Value: WS
  misc_feature: MA Experiment 20000087 PARAMETER Experiment Name: At_100uM_ABA_Mutants_cDNA_P Parameter: Timepoint (hr) Value: 6
  misc_feature: MA Experiment 20000087 PARAMETER Experiment Name: At_100uM_ABA_Mutants_cDNA_P Parameter: Tissue Value: Aerial
  misc_feature: MA Experiment 20000087 PARAMETER Experiment Name: At_100uM_ABA_Mutants_cDNA_P Parameter: Treatment Value: 100uM ABA vs. No Treatment
  misc_feature: MA Experiment ID: 20000088 Result: Up-regulated in Transcription
  misc_feature: MA Experiment 20000088 PARAMETER Experiment Name: At_100uM_ABA_Mutants_cDNA_P Parameter: Plant Line Value: Landsberg
  misc_feature: MA Experiment 20000088 PARAMETER Experiment Name: At_100uM_ABA_Mutants_cDNA_P Parameter: Timepoint (hr) Value: 6
  misc_feature: MA Experiment 20000088 PARAMETER Experiment Name: At_100uM_ABA_Mutants_cDNA_P Parameter: Tissue Value: Aerial
  misc_feature: MA Experiment 20000088 PARAMETER Experiment Name: At_100uM_ABA_Mutants_cDNA_P Parameter: Treatment Value: 100uM ABA vs. No Treatment
  misc_feature: MA Experiment ID: 20000111 Result: Down-regulated in Transcription
  misc_feature: MA Experiment 20000111 PARAMETER Experiment Name: At_42deg_Heat_cDNA_P Parameter: Temperature (deg C) Value: 42 vs. 22
  misc_feature: MA Experiment 20000111 PARAMETER Experiment Name: At_42deg_Heat_cDNA_P Parameter: Timepoint (hr) Value: 6
  misc_feature: MA Experiment 20000111 PARAMETER Experiment Name: At_42deg_Heat_cDNA_P Parameter: Tissue Value: Aerial
  misc_feature: MA Experiment ID: 20000112 Result: Down-regulated in Transcription
  misc_feature: MA Experiment 20000112 PARAMETER Experiment Name: At_42deg_Heat_cDNA_P Parameter: Temperature (deg C) Value: 42 vs. 22
  misc_feature: MA Experiment 20000112 PARAMETER Experiment Name: At_42deg_Heat_cDNA_P Parameter: Timepoint (hr) Value: 2
  misc_feature: MA Experiment 20000112 PARAMETER Experiment Name: At_42deg_Heat_cDNA_P Parameter: Tissue Value: Aerial
  misc_feature: MA Experiment ID: 20000113 Result: Down-regulated in Transcription
  misc_feature: MA Experiment 20000113 PARAMETER Experiment Name: At_42deg_Heat_cDNA_P Parameter: Temperature (deg C) Value: 42 vs. 22
  misc_feature: MA Experiment 20000113 PARAMETER Experiment Name: At_42deg_Heat_cDNA_P Parameter: Timepoint (hr) Value: 8
  misc_feature: MA Experiment 20000113 PARAMETER Experiment Name: At_42deg_Heat_cDNA_P Parameter: Tissue Value: Aerial
  misc_feature: MA Experiment ID: 20000117 Result: Up-regulated in Transcription
  misc_feature: MA Experiment 20000117 PARAMETER Experiment Name: At_100uM_ABA_Mutants_cDNA_P Parameter: Plant Line Value: Columbia
  misc_feature: MA Experiment 20000117 PARAMETER Experiment Name: At_100uM_ABA_Mutants_cDNA_P Parameter: Timepoint (hr) Value: 6
  misc_feature: MA Experiment 20000117 PARAMETER Experiment Name: At_100uM_ABA_Mutants_cDNA_P Parameter: Tissue Value: Aerial
  misc_feature: MA Experiment 20000117 PARAMETER Experiment Name: At_100uM_ABA_Mutants_cDNA_P Parameter: Treatment Value: 100uM ABA vs. No Treatment
  misc_feature: MA Experiment ID: 20000169 Result: Up-regulated in Transcription
  misc_feature: MA Experiment 20000169 PARAMETER Experiment Name: At_100uM_ABA_P Parameter: Age (day) Value: 14
  misc_feature: MA Experiment 20000169 PARAMETER Experiment Name: At_100uM_ABA_P Parameter: Organism Value: A. thaliana
  misc_feature: MA Experiment 20000169 PARAMETER Experiment Name: At_100uM_ABA_P Parameter: Plant Line Value: WS
  misc_feature: MA Experiment 20000169 PARAMETER Experiment Name: At_100uM_ABA_P Parameter: Timepoint (hr) Value: 6
  misc_feature: MA Experiment 20000169 PARAMETER Experiment Name: At_100uM_ABA_P Parameter: Tissue Value: Aerial
  misc_feature: MA Experiment 20000169 PARAMETER Experiment Name: At_100uM_ABA_P Parameter: Treatment Value: 100uM ABA vs. No Treatment
  misc_feature: MA Experiment ID: 20000173 Result: Down-regulated in Transcription
  misc_feature: MA Experiment 20000173 PARAMETER Experiment Name: At_42deg_Heat_P Parameter: Age (day) Value: 14
  misc_feature: MA Experiment 20000173 PARAMETER Experiment Name: At_42deg_Heat_P Parameter: Organism Value: A. thaliana
  misc_feature: MA Experiment 20000173 PARAMETER Experiment Name: At_42deg_Heat_P Parameter: Plant Line Value: WS
  misc_feature: MA Experiment 20000173 PARAMETER Experiment Name: At_42deg_Heat_P Parameter: Temperature (deg C) Value: 42 vs. 22
  misc_feature: MA Experiment 20000173 PARAMETER Experiment Name: At_42deg_Heat_P Parameter: Timepoint (hr) Value: 6
  misc_feature: MA Experiment 20000173 PARAMETER Experiment Name: At_42deg_Heat_P Parameter: Tissue Value: Aerial
  misc_feature: MA Experiment ID: 20000179 Result: Up-regulated in Transcription
  misc_feature: MA Experiment 20000179 PARAMETER Experiment Name: At_Germinating_Seeds_P Parameter: Age (hr) Value: 6 vs. 0
  misc_feature: MA Experiment 20000179 PARAMETER Experiment Name: At_Germinating_Seeds_P Parameter: Tissue Value: Germinating Seeds
  misc_feature: MA Experiment ID: 20000180 Result: Up-regulated in Transcription
  misc_feature: MA Experiment 20000180 PARAMETER Experiment Name: At_Germinating_Seeds_P Parameter: Age (hr) Value: 24 vs. 0
  misc_feature: MA Experiment 20000180 PARAMETER Experiment Name: At_Germinating_Seeds_P Parameter: Tissue Value: Germinating Seeds
  misc_feature: MA Experiment ID: 20000184 Result: Down-regulated in Transcription
  misc_feature: MA Experiment 20000184 PARAMETER Experiment Name: At_Shoots__P Parameter: Age (day) Value: 7
  misc_feature: MA Experiment 20000184 PARAMETER Experiment Name: At_Shoots__P Parameter: Tissue Value: Shoots vs. Whole Plant
  misc_feature: MA Experiment ID: 20000185 Result: Up-regulated in Transcription
  misc_feature: MA Experiment 20000185 PARAMETER Experiment Name: At_Roots__P Parameter: Age (day) Value: 7 vs. 21
  misc_feature: MA Experiment 20000185 PARAMETER Experiment Name: At_Roots__P Parameter: Organism Value: A. thaliana
  misc_feature: MA Experiment 20000185 PARAMETER Experiment Name: At_Roots__P Parameter: Tissue Value: Roots vs. Whole Plant
  misc_feature: MA Experiment ID: 20000227 Result: Down-regulated in Transcription
  misc_feature: MA Experiment 20000227 PARAMETER Experiment Name: At_Root-Tips-vs-Tops_P Parameter: Tissue Value: Root Tips vs. Root Tops
  misc_feature: MA Experiment ID: 20000453 Result: Up-regulated in Transcription
  misc_feature: MA Experiment 20000453 PARAMETER Experiment Name: At_100uM_ABA_P Parameter: Age (day) Value: 15
  misc_feature: MA Experiment 20000453 PARAMETER Experiment Name: At_100uM_ABA_P Parameter: Organism Value: A. thaliana
  misc_feature: MA Experiment 20000453 PARAMETER Experiment Name: At_100uM_ABA_P Parameter: Plant Line Value: WS
  misc_feature: MA Experiment 20000453 PARAMETER Experiment Name: At_100uM_ABA_P Parameter: Timepoint (hr) Value: 24
  misc_feature: MA Experiment 20000453 PARAMETER Experiment Name: At_100uM_ABA_P Parameter: Tissue Value: Aerial
  misc_feature: MA Experiment 20000453 PARAMETER Experiment Name: At_100uM_ABA_P Parameter: Treatment Value: 100uM ABA vs. No Treatment
  misc_feature: MA Experiment ID: 20000794 Result: Up-regulated in Transcription
  misc_feature: MA Experiment 20000794 PARAMETER Experiment Name: At_Petals_P Parameter: Age (day) Value: 23-25 days
  misc_feature: MA Experiment 20000794 PARAMETER Experiment Name: At_Petals_P Parameter: Plant Line Value: WS
  misc_feature: MA Experiment 20000794 PARAMETER Experiment Name: At_Petals_P Parameter: Tissue Value: Petals vs. Whole plant
  misc_feature: MA Experiment ID: 20001451 Result: Up-regulated in Transcription
  misc_feature: MA Experiment 20001451 PARAMETER Experiment Name: At_Far-red-induction_P Parameter: Age (day) Value: 7
  misc_feature: MA Experiment 20001451 PARAMETER Experiment Name: At_Far-red-induction_P Parameter: Light Value: Far-red vs. White
  misc_feature: MA Experiment 20001451 PARAMETER Experiment Name: At_Far-red-induction_P Parameter: Organism Value: A. thaliana
  misc_feature: MA Experiment 20001451 PARAMETER Experiment Name: At_Far-red-induction_P Parameter: Plant Line Value: Columbia
  misc_feature: MA Experiment 20001451 PARAMETER Experiment Name: At_Far-red-induction_P Parameter: Timepoint (hr) Value: 24
  misc_feature: MA Experiment 20001451 PARAMETER Experiment Name: At_Far-red-induction_P Parameter: Tissue Value: Whole Plant
  misc_feature: MA Experiment ID: 20001557 Result: Down-regulated in Transcription
  misc_feature: MA Experiment 20001557 PARAMETER Experiment Name: At_Drought_Soil_Dry_P Parameter: Age (day) Value: 27
  misc_feature: MA Experiment 20001557 PARAMETER Experiment Name: At_Drought_Soil_Dry_P Parameter: Organism Value: A. thaliana
  misc_feature: MA Experiment 20001557 PARAMETER Experiment Name: At_Drought_Soil_Dry_P Parameter: Plant Line Value: WS
  misc_feature: MA Experiment 20001557 PARAMETER Experiment Name: At_Drought_Soil_Dry_P Parameter: Post Timepoint (hr) Value: 3
  misc_feature: MA Experiment 20001557 PARAMETER Experiment Name: At_Drought_Soil_Dry_P Parameter: Post-Treatment Value: Re-Water vs. No Drought
  misc_feature: MA Experiment 20001557 PARAMETER Experiment Name: At_Drought_Soil_Dry_P Parameter: Timepoint (day) Value: 13
  misc_feature: MA Experiment 20001557 PARAMETER Experiment Name: At_Drought_Soil_Dry_P Parameter: Treatment Value: Drought vs. No Drought
  misc_feature: MA Experiment ID: 20001905 Result: Down-regulated in Transcription
  misc_feature: MA Experiment 20001905 PARAMETER Experiment Name: At_Drought_Reproduction_P Parameter: Age (day) Value: 40
  misc_feature: MA Experiment 20001905 PARAMETER Experiment Name: At_Drought_Reproduction_P Parameter: Organism Value: A. thaliana
  misc_feature: MA Experiment 20001905 PARAMETER Experiment Name: At_Drought_Reproduction_P Parameter: Plant Line Value: WS
  misc_feature: MA Experiment 20001905 PARAMETER Experiment Name: At_Drought_Reproduction_P Parameter: Timepoint (day) Value: 10
  misc_feature: MA Experiment 20001905 PARAMETER Experiment Name: At_Drought_Reproduction_P Parameter: Tissue Value: Rosettes
  misc_feature: MA Experiment 20001905 PARAMETER Experiment Name: At_Drought_Reproduction_P Parameter: Treatment Value: Drought vs. No Drought
ctctcagattttacaggcaaatcgatttcactcgaagactggttgttgtgtaattgtgttcgtcgtctcaggttttcaatatctgtctctttgagggttcaagaagttccatggagtagctgagaatcctacagagaaaatggctaacaatttgaaagaatatttggctaagaattgtgtttcgaaagatgtgaatcttggaagttgtactgtgcttgagactgctggtcaaggagctcttgcttctctctatcagttgctacaatccgcggttaacacaaaagagtcagagtcgttgaccggaaaaaccatatgggttcactttggagttaatagtggcgctacaaaatttgcaattgagcaacaagctgtgaatgaagcgacttttcgttgtcctgatgaattgggttggaaacctcagaatttgccaattgttccctctgatggtccaatctcaactgtaagaaagactaatcttcctgttgaagagataacaaaggcgttggagaagaatggctttgaagtgataacatcagatgatgcaggtcgatttgtgtgtaactatgtctattaccattctctgagatttgcagagcagaataagaccagatcactctttgttcacgttcctcttttcgttgccgtggatgaagaaacccaaatgagattcactgtttctctgctggaggtactcgcttctatttgcaagtaatgttatcccaaatgtggctattcttattcatgaaatgtgcatcatggaccgattgtctccccacgggaaaaattcgcttatcaataaatggaatataagttcacttctct

SEQ ID NO: 42554 - protein, 190 aa, Arabidopsis thaliana; identical to SEQ ID NO: 22925
  peptide (1)..(190): Ceres Seq. ID no. 12326711
  misc_feature (1)..(172): Pfam Name: Pyroglutamyl peptidase Pfam Description: Pyroglutamyl peptidase
  misc_feature (1)..(164): Homolog of NCBI NO: 13787025 NR Description: Chain A, X-Ray Crystalline Structures Of Carboxyl Peptidase From A Hyperthermophile, Pyrococcus Furiosus,
  misc_feature (1)..(59): Homolog of NCBI NO: 15220751 NR Description: hypothetical protein; protein id: At1g23430.1
  misc_feature (1)..(59): Homolog of NCBI NO: 9295697 NR Description: F26F24.31 [Arabidopsis thaliana]
  misc_feature (58)..(189): Homolog of NCBI NO: 15220753 NR Description: hypothetical protein; protein id: At1g23440.1
  misc_feature (1)..(59): Homolog of NCBI NO: 8778575 NR Description: F28C11.8 [Arabidopsis thaliana]
  misc_feature (62)..(189): Homolog of NCBI NO: 8778575 NR Description: F28C11.8 [Arabidopsis thaliana]
  misc_feature (1)..(189): Homolog of NCBI NO: 13430708 NR Description: unknown protein [Arabidopsis thaliana]
  misc_feature (1)..(187): Homolog of NCBI NO: 12039349 NR Description: putative pyrrolidone carboxyl peptidase [Oryza
  misc_feature (1)..(186): Homolog of NCBI NO: 38175741 NR Description: pyrrolidone carboxyl peptidase-like protein
  misc_feature (1)..(190): Homolog of NCBI NO: 18405940 NR Description: expressed protein

SEQ ID NO: 42555 - DNA, 1055 bp, Arabidopsis thaliana
  misc_feature (1)..(1055): Ceres Seq. ID no. 12324495
  misc_feature: MA Experiment ID: 20000180 Result: Up-regulated in Transcription
  misc_feature: MA Experiment 20000180 PARAMETER Experiment Name: At_Germinating_Seeds_P Parameter: Age (hr) Value: 24 vs. 0
  misc_feature: MA Experiment 20000180 PARAMETER Experiment Name: At_Germinating_Seeds_P Parameter: Tissue Value: Germinating Seeds
  misc_feature: MA Experiment ID: 20000182 Result: Down-regulated in Transcription
  misc_feature: MA Experiment 20000182 PARAMETER Experiment Name: At_2mM_SA_P Parameter: Age (day) Value: 14
  misc_feature: MA Experiment 20000182 PARAMETER Experiment Name: At_2mM_SA_P Parameter: Organism Value: A. thaliana
  misc_feature: MA Experiment 20000182 PARAMETER Experiment Name: At_2mM_SA_P Parameter: Plant Line Value: WS
  misc_feature: MA Experiment 20000182 PARAMETER Experiment Name: At_2mM_SA_P Parameter: Timepoint (hr) Value: 6
  misc_feature: MA Experiment 20000182 PARAMETER Experiment Name: At_2mM_SA_P Parameter: Tissue Value: Aerial
  misc_feature: MA Experiment 20000182 PARAMETER Experiment Name: At_2mM_SA_P Parameter: Treatment Value: 2mM SA vs. No Treatment
  misc_feature: MA Experiment ID: 20000227 Result: Up-regulated in Transcription
  misc_feature: MA Experiment 20000227 PARAMETER Experiment Name: At_Root-Tips-vs-Tops_P Parameter: Tissue Value: Root Tips vs. Root Tops
  misc_feature: MA Experiment ID: 20000264 Result: Down-regulated in Transcription
  misc_feature: MA Experiment 20000264 PARAMETER Experiment Name: At_Open_Flower_P Parameter: Age (day) Value: 21
  misc_feature: MA Experiment 20000264 PARAMETER Experiment Name: At_Open_Flower_P Parameter: Plant Line Value: WS
  misc_feature: MA Experiment 20000264 PARAMETER Experiment Name: At_Open_Flower_P Parameter: Tissue Value: Open Flower vs. Whole Plant
  misc_feature: MA Experiment ID: 20000437 Result: Down-regulated in Transcription
  misc_feature: MA Experiment 20000437 PARAMETER Experiment Name: At_Drought_P Parameter: Age (day) Value: 8
  misc_feature: MA Experiment 20000437 PARAMETER Experiment Name: At_Drought_P Parameter: Organism Value: A. thaliana
  misc_feature: MA Experiment 20000437 PARAMETER Experiment Name: At_Drought_P Parameter: Plant Line Value: WS
  misc_feature: MA Experiment 20000437 PARAMETER Experiment Name: At_Drought_P Parameter: Timepoint (hr) Value: 24
  misc_feature: MA Experiment 20000437 PARAMETER Experiment Name: At_Drought_P Parameter: Tissue Value: Whole Plant
  misc_feature: MA Experiment 20000437 PARAMETER Experiment Name: At_Drought_P Parameter: Treatment Value: Drought vs. No Drought
  misc_feature: MA Experiment ID: 20000794 Result: Down-regulated in Transcription
  misc_feature: MA Experiment 20000794 PARAMETER Experiment Name: At_Petals_P Parameter: Age (day) Value: 23-25 days
  misc_feature: MA Experiment 20000794 PARAMETER Experiment Name: At_Petals_P Parameter: Plant Line Value: WS
  misc_feature: MA Experiment 20000794 PARAMETER Experiment Name: At_Petals_P Parameter: Tissue Value: Petals vs. Whole plant
  misc_feature: MA Experiment ID: 20001554 Result: Down-regulated in Transcription
  misc_feature: MA Experiment 20001554 PARAMETER Experiment Name: At_Drought_Soil_Dry_P Parameter: Age (day) Value: 21
  misc_feature: MA Experiment 20001554 PARAMETER Experiment Name: At_Drought_Soil_Dry_P Parameter: Organism Value: A. thaliana
  misc_feature: MA Experiment 20001554 PARAMETER Experiment Name: At_Drought_Soil_Dry_P Parameter: Plant Line Value: WS
  misc_feature: MA Experiment 20001554 PARAMETER Experiment Name: At_Drought_Soil_Dry_P Parameter: Post Timepoint (hr) Value: None
  misc_feature: MA Experiment 20001554 PARAMETER Experiment Name: At_Drought_Soil_Dry_P Parameter: Post-Treatment Value: None
  misc_feature: MA Experiment 20001554 PARAMETER Experiment Name: At_Drought_Soil_Dry_P Parameter: Timepoint (day) Value: 7
  misc_feature: MA Experiment 20001554 PARAMETER Experiment Name: At_Drought_Soil_Dry_P Parameter: Treatment Value: Drought vs. No Drought
  misc_feature: MA Experiment ID: 20001555 Result: Down-regulated in Transcription
  misc_feature: MA Experiment 20001555 PARAMETER Experiment Name: At_Drought_Soil_Dry_P Parameter: Age (day) Value: 24
  misc_feature: MA Experiment 20001555 PARAMETER Experiment Name: At_Drought_Soil_Dry_P Parameter: Organism Value: A. thaliana
  misc_feature: MA Experiment 20001555 PARAMETER Experiment Name: At_Drought_Soil_Dry_P Parameter: Plant Line Value: WS
  misc_feature: MA Experiment 20001555 PARAMETER Experiment Name: At_Drought_Soil_Dry_P Parameter: Post Timepoint (hr) Value: None
  misc_feature: MA Experiment 20001555 PARAMETER Experiment Name: At_Drought_Soil_Dry_P Parameter: Post-Treatment Value: None
  misc_feature: MA Experiment 20001555 PARAMETER Experiment Name: At_Drought_Soil_Dry_P Parameter: Timepoint (day) Value: 10
  misc_feature: MA Experiment 20001555 PARAMETER Experiment Name: At_Drought_Soil_Dry_P Parameter: Treatment Value: Drought vs. No Drought
  misc_feature: MA Experiment ID: 20001556 Result: Down-regulated in Transcription
  misc_feature: MA Experiment 20001556 PARAMETER Experiment Name: At_Drought_Soil_Dry_P Parameter: Age (day) Value: 26
  misc_feature: MA Experiment 20001556 PARAMETER Experiment Name: At_Drought_Soil_Dry_P Parameter: Organism Value: A. thaliana
  misc_feature: MA Experiment 20001556 PARAMETER Experiment Name: At_Drought_Soil_Dry_P Parameter: Plant Line Value: WS
  misc_feature: MA Experiment 20001556 PARAMETER Experiment Name: At_Drought_Soil_Dry_P Parameter: Post Timepoint (hr) Value: None
  misc_feature: MA Experiment 20001556 PARAMETER Experiment Name: At_Drought_Soil_Dry_P Parameter: Post-Treatment Value: None
  misc_feature: MA Experiment 20001556 PARAMETER Experiment Name: At_Drought_Soil_Dry_P Parameter: Timepoint (day) Value: 12
  misc_feature: MA Experiment 20001556 PARAMETER Experiment Name: At_Drought_Soil_Dry_P Parameter: Treatment Value: Drought vs. No Drought
  misc_feature: MA Experiment ID: 20001558 Result: Up-regulated in Transcription
  misc_feature: MA Experiment 20001558 PARAMETER Experiment Name: At_Drought_Soil_Dry_P Parameter: Age (day) Value: 27
  misc_feature: MA Experiment 20001558 PARAMETER Experiment Name: At_Drought_Soil_Dry_P Parameter: Organism Value: A. thaliana
  misc_feature: MA Experiment 20001558 PARAMETER Experiment Name: At_Drought_Soil_Dry_P Parameter: Plant Line Value: WS
  misc_feature: MA Experiment 20001558 PARAMETER Experiment Name: At_Drought_Soil_Dry_P Parameter: Post Timepoint (hr) Value: 6
  misc_feature: MA Experiment 20001558 PARAMETER Experiment Name: At_Drought_Soil_Dry_P Parameter: Post-Treatment Value: Re-Water vs. No Drought
  misc_feature: MA Experiment 20001558 PARAMETER Experiment Name: At_Drought_Soil_Dry_P Parameter: Timepoint (day) Value: 13
  misc_feature: MA Experiment 20001558 PARAMETER Experiment Name: At_Drought_Soil_Dry_P Parameter: Treatment Value: Drought vs. No Drought
  misc_feature: MA Experiment ID: 20001560 Result: Up-regulated in Transcription
  misc_feature: MA Experiment 20001560 PARAMETER Experiment Name: At_Drought_Soil_Dry_P Parameter: Age (day) Value: 28
  misc_feature: MA Experiment 20001560 PARAMETER Experiment Name: At_Drought_Soil_Dry_P Parameter: Organism Value: A. thaliana
  misc_feature: MA Experiment 20001560 PARAMETER Experiment Name: At_Drought_Soil_Dry_P Parameter: Plant Line Value: WS
  misc_feature: MA Experiment 20001560 PARAMETER Experiment Name: At_Drought_Soil_Dry_P Parameter: Post Timepoint (hr) Value: None
  misc_feature: MA Experiment 20001560 PARAMETER Experiment Name: At_Drought_Soil_Dry_P Parameter: Post-Treatment Value: None
  misc_feature: MA Experiment 20001560 PARAMETER Experiment Name: At_Drought_Soil_Dry_P Parameter: Timepoint (day) Value: 14
  misc_feature: MA Experiment 20001560 PARAMETER Experiment Name: At_Drought_Soil_Dry_P Parameter: Treatment Value: Drought vs. No Drought
  misc_feature: MA Experiment ID: 20001757 Result: Up-regulated in Transcription
  misc_feature: MA Experiment 20001757 PARAMETER Experiment Name: At_50mM_NH4NO3_L-to-H_P Parameter: Timepoint (hr) Value: 6
  misc_feature: MA Experiment 20001757 PARAMETER Experiment Name: At_50mM_NH4NO3_L-to-H_P Parameter: Tissue Value: Leaf
  misc_feature: MA Experiment 20001757 PARAMETER Experiment Name: At_50mM_NH4NO3_L-to-H_P Parameter: Treatment Value: 50mM NH4NO3 vs 100mM Mannitol
  misc_feature: MA Experiment ID: 20001904 Result: Down-regulated in Transcription
  misc_feature: MA Experiment 20001904 PARAMETER Experiment Name: At_Drought_Reproduction_P Parameter: Age (day) Value: 37
  misc_feature: MA Experiment 20001904 PARAMETER Experiment Name: At_Drought_Reproduction_P Parameter: Organism Value: A. thaliana
  misc_feature: MA Experiment 20001904 PARAMETER Experiment Name: At_Drought_Reproduction_P Parameter: Plant Line Value: WS
  misc_feature: MA Experiment 20001904 PARAMETER Experiment Name: At_Drought_Reproduction_P Parameter: Timepoint (day) Value: 7
  misc_feature: MA Experiment 20001904 PARAMETER Experiment Name: At_Drought_Reproduction_P Parameter: Tissue Value: Rosettes
  misc_feature: MA Experiment 20001904 PARAMETER Experiment Name: At_Drought_Reproduction_P Parameter: Treatment Value: Drought vs. No Drought
  misc_feature: MA Experiment ID: 20001906 Result: Down-regulated in Transcription
  misc_feature: MA Experiment 20001906 PARAMETER Experiment Name: At_Drought_Reproduction_P Parameter: Age (day) Value: 35
  misc_feature: MA Experiment 20001906 PARAMETER Experiment Name: At_Drought_Reproduction_P Parameter: Organism Value: A. thaliana
  misc_feature: MA Experiment 20001906 PARAMETER Experiment Name: At_Drought_Reproduction_P Parameter: Plant Line Value: WS
  misc_feature: MA Experiment 20001906 PARAMETER Experiment Name: At_Drought_Reproduction_P Parameter: Timepoint (day) Value: 5
  misc_feature: MA Experiment 20001906 PARAMETER Experiment Name: At_Drought_Reproduction_P Parameter: Tissue Value: Siliques
  misc_feature: MA Experiment 20001906 PARAMETER Experiment Name: At_Drought_Reproduction_P Parameter: Treatment Value: Drought vs. No Drought
  misc_feature: MA Experiment ID: 20001907 Result: Down-regulated in Transcription
  misc_feature: MA Experiment 20001907 PARAMETER Experiment Name: At_Drought_Reproduction_P Parameter: Age (day) Value: 37
  misc_feature: MA Experiment 20001907 PARAMETER Experiment Name: At_Drought_Reproduction_P Parameter: Organism Value: A. thaliana
  misc_feature: MA Experiment 20001907 PARAMETER Experiment Name: At_Drought_Reproduction_P Parameter: Plant Line Value: WS
  misc_feature: MA Experiment 20001907 PARAMETER Experiment Name: At_Drought_Reproduction_P Parameter: Timepoint (day) Value: 7
  misc_feature: MA Experiment 20001907 PARAMETER Experiment Name: At_Drought_Reproduction_P Parameter: Tissue Value: Siliques
  misc_feature: MA Experiment 20001907 PARAMETER Experiment Name: At_Drought_Reproduction_P Parameter: Treatment Value: Drought vs. No Drought
  misc_feature: MA Experiment ID: 20001911 Result: Down-regulated in Transcription
  misc_feature: MA Experiment 20001911 PARAMETER Experiment Name: At_Drought_Reproduction_P Parameter: Age (day) Value: 40
  misc_feature: MA Experiment 20001911 PARAMETER Experiment Name: At_Drought_Reproduction_P Parameter: Organism Value: A. thaliana
  misc_feature: MA Experiment 20001911 PARAMETER Experiment Name: At_Drought_Reproduction_P Parameter: Plant Line Value: WS
  misc_feature: MA Experiment 20001911 PARAMETER Experiment Name: At_Drought_Reproduction_P Parameter: Timepoint (day) Value: 10
  misc_feature: MA Experiment 20001911 PARAMETER Experiment Name: At_Drought_Reproduction_P Parameter: Tissue Value: Flowers
  misc_feature: MA Experiment 20001911 PARAMETER Experiment Name: At_Drought_Reproduction_P Parameter: Treatment Value: Drought vs. No Drought
acttgtgatcaaaatctcaagatccaaaactcttctttcaaacatggaccgaaccatgtttctttccctgacaatagcctcactcttggtcggagtcgtctcagctggtgactggaacatcttgaaccaactcagaggactcggctcatcgtcaagccaaaatggtatcgtttctaaaggtatcaagacggacctgaaaggatactgtgaaagctggaggatcaacgtggaagttcacaacatcagaaagttcgatgtggtgcctcaagagtgtgtatcgcacattaaggattacatgacgtcatcgcagtacaaggatgacgtggcgagaaccgttgatgaggtcattcttcatttcgggagcatgtgctgtagcaagtctaagtgtgacggcatggacgcttggatctttgatatcgatgacacgcttctctctaccatcccttaccacaagaaaaatggcttcttcggaggagagaaattgaactcaacgaaattcgaggattggatacagaagaagaaagcaccagcagtgccacacatgaagaaattgtaccacgacatcagagaaagaggcattaagatcttcttgatctcttcccggaaagaatatctcaggtctgccaccgtcgacaacctcatccaagccggttactatggctggtccaacctaatgctcagggggctagaagatcagcaaaaggaagtgaaacaatacaagtcagagaagagaaaatggctaatgagtcttggttacagagtctggggagtgatgggtgaccaatggagtagctttgcaggctgtcctcttcccaggagaaccttcaagctccctaactccatctactatgtcgcctgatcaaaaccaaacacaaaactttgatttagcttcaaacaaaaagaagaatccacgaataagagagagctgttttgaatctgtttcttgtttattttcccctttttcgtgtcatattatattgagagacttatgcatccaaaagaacaaacaaatggttatatgtaacagagagaaatcaaatcaaaatcacacatta

SEQ ID NO: 42556 - protein, 285 aa, Arabidopsis thaliana
  peptide (1)..(285): Ceres Seq. ID no. 12324496
  misc_feature (53)..(285): Pfam Name: HAD superfamily, subfamily IIIB (Acid phosphatase) Pfam Description: HAD superfamily, subfamily IIIB (Acid
  misc_feature (71)..(285): Homolog of NCBI NO: 16506634 NR Description: putative defense associated acid phosphatase
  misc_feature (63)..(284): Homolog of NCBI NO: 15233504 NR Description: acid phosphatase-like protein
  misc_feature (62)..(285): Homolog of NCBI NO: 15233526 NR Description: acid phosphatase-like protein
  misc_feature (59)..(284): Homolog of NCBI NO: 445113 NR Description: acid phosphatase 1
  misc_feature (59)..(284): Homolog of NCBI NO: 130718 NR Description: Acid phosphatase precursor 1
  misc_feature (59)..(284): Homolog of NCBI NO: 15241412 NR Description: acid phosphatase; protein id: At5g51260.1
  misc_feature (59)..(284): Homolog of NCBI NO: 15234949 NR Description: acid phosphatase - like protein
  misc_feature (15)..(285): Homolog of NCBI NO: 15240067 NR Description: vegetative storage protein-like
  misc_feature (15)..(285): Homolog of NCBI NO: 21555213 NR Description: vegetative storage protein-like [Arabidopsis
  misc_feature (15)..(285): Homolog of NCBI NO: 18379219 NR Description: expressed protein
LVIKISRSKTLLSNMDRTMFLSLTIASLLVGVVSAGDWNILNQLRGLGSSSSQNGIVSKGIKTDLKGYCESWRINVEVHNIRKFDVVPQECVSHIKDYMTSSQYKDDVARTVDEVILHFGSMCCSKSKCDGMDAWIFDIDDTLLSTIPYHKKNGFFGGEKLNSTKFEDWIQKKKAPAVPHMKKLYHDIRERGIKIFLISSRKEYLRSATVDNLIQAGYYGWSNLMLRGLEDQQKEVKQYKSEKRKWLMSLGYRVWGVMGDQWSSFAGCPLPRRTFKLPNSIYYVA

SEQ ID NO: 42557 - protein, 271 aa, Arabidopsis thaliana
  peptide (1)..(271): Ceres Seq. ID no. 12324497
  misc_feature (39)..(271): Pfam Name: HAD superfamily, subfamily IIIB (Acid phosphatase) Pfam Description: HAD superfamily, subfamily IIIB (Acid
  misc_feature (57)..(271): Homolog of NCBI NO: 16506634 NR Description: putative defense associated acid phosphatase
  misc_feature (49)..(270): Homolog of NCBI NO: 15233504 NR Description: acid phosphatase-like protein
  misc_feature (48)..(271): Homolog of NCBI NO: 15233526 NR Description: acid phosphatase-like protein
  misc_feature (45)..(270): Homolog of NCBI NO: 445113 NR Description: acid phosphatase 1
  misc_feature (45)..(270): Homolog of NCBI NO: 130718 NR Description: Acid phosphatase precursor 1
  misc_feature (45)..(270): Homolog of NCBI NO: 15241412 NR Description: acid phosphatase; protein id: At5g51260.1
  misc_feature (45)..(270): Homolog of NCBI NO: 15234949 NR Description: acid phosphatase - like protein
  misc_feature (1)..(271): Homolog of NCBI NO: 15240067 NR Description: vegetative storage protein-like
  misc_feature (1)..(271): Homolog of NCBI NO: 21555213 NR Description: vegetative storage protein-like [Arabidopsis
  misc_feature (1)..(271): Homolog of NCBI NO: 18379219 NR Description: expressed protein
MDRTMFLSLTIASLLVGVVSAGDWNILNQLRGLGSSSSQNGIVSKGIKTDLKGYCESWRINVEVHNIRKFDVVPQECVSHIKDYMTSSQYKDDVARTVDEVILHFGSMCCSKSKCDGMDAWIFDIDDTLLSTIPYHKKNGFFGGEKLNSTKFEDWIQKKKAPAVPHMKKLYHDIRERGIKIFLISSRKEYLRSATVDNLIQAGYYGWSNLMLRGLEDQQKEVKQYKSEKRKWLMSLGYRVWGVMGDQWSSFAGCPLPRRTFKLPNSIYYVA

SEQ ID NO: 42558 - protein, 267 aa, Arabidopsis thaliana
  peptide (1)..(267): Ceres Seq. ID no. 12324498
  misc_feature (35)..(267): Pfam Name: HAD superfamily, subfamily IIIB (Acid phosphatase) Pfam Description: HAD superfamily, subfamily IIIB (Acid
  misc_feature (53)..(267): Homolog of NCBI NO: 16506634 NR Description: putative defense associated acid phosphatase
  misc_feature (45)..(266): Homolog of NCBI NO: 15233504 NR Description: acid phosphatase-like protein
  misc_feature (44)..(267): Homolog of NCBI NO: 15233526 NR Description: acid phosphatase-like protein
  misc_feature (41)..(266): Homolog of NCBI NO: 445113 NR Description: acid phosphatase 1
  misc_feature (41)..(266): Homolog of NCBI NO: 130718 NR Description: Acid phosphatase precursor 1
  misc_feature (41)..(266): Homolog of NCBI NO: 15241412 NR Description: acid phosphatase; protein id: At5g51260.1
  misc_feature (41)..(266): Homolog of NCBI NO: 15234949 NR Description: acid phosphatase - like protein
  misc_feature (1)..(267): Homolog of NCBI NO: 15240067 NR Description: vegetative storage protein-like
  misc_feature (1)..(267): Homolog of NCBI NO: 21555213 NR Description: vegetative storage protein-like [Arabidopsis
  misc_feature (1)..(267): Homolog of NCBI NO: 18379219 NR Description: expressed protein
MFLSLTIASLLVGVVSAGDWNILNQLRGLGSSSSQNGIVSKGIKTDLKGYCESWRINVEVHNIRKFDVVPQECVSHIKDYMTSSQYKDDVARTVDEVILHFGSMCCSKSKCDGMDAWIFDIDDTLLSTIPYHKKNGFFGGEKLNSTKFEDWIQKKKAPAVPHMKKLYHDIRERGIKIFLISSRKEYLRSATVDNLIQAGYYGWSNLMLRGLEDQQKEVKQYKSEKRKWLMSLGYRVWGVMGDQWSSFAGCPLPRRTFKLPNSIYYVA

SEQ ID NO: 42559 - DNA, 1860 bp, Arabidopsis thaliana
  misc_feature (1)..(1860): Ceres Seq. ID no. 12336491
  misc_feature: MA Experiment ID: 20000171 Result: Down-regulated in Transcription
  misc_feature: MA Experiment 20000171 PARAMETER Experiment Name: At_42deg_Heat_P Parameter: Age (day) Value: 14
  misc_feature: MA Experiment 20000171 PARAMETER Experiment Name: At_42deg_Heat_P Parameter: Organism Value: A. thaliana
  misc_feature: MA Experiment 20000171 PARAMETER Experiment Name: At_42deg_Heat_P Parameter: Plant Line Value: WS
  misc_feature: MA Experiment 20000171 PARAMETER Experiment Name: At_42deg_Heat_P Parameter: Temperature (deg C) Value: 42 vs. 22
  misc_feature: MA Experiment 20000171 PARAMETER Experiment Name: At_42deg_Heat_P Parameter: Timepoint (hr) Value: 1
  misc_feature: MA Experiment 20000171 PARAMETER Experiment Name: At_42deg_Heat_P Parameter: Tissue Value: Aerial
  misc_feature: MA Experiment ID: 20000173 Result: Down-regulated in Transcription
  misc_feature: MA Experiment 20000173 PARAMETER Experiment Name: At_42deg_Heat_P Parameter: Age (day) Value: 14
  misc_feature: MA Experiment 20000173 PARAMETER Experiment Name: At_42deg_Heat_P Parameter: Organism Value: A. thaliana
  misc_feature: MA Experiment 20000173 PARAMETER Experiment Name: At_42deg_Heat_P Parameter: Plant Line Value: WS
  misc_feature: MA Experiment 20000173 PARAMETER Experiment Name: At_42deg_Heat_P Parameter: Temperature (deg C) Value: 42 vs. 22
  misc_feature: MA Experiment 20000173 PARAMETER Experiment Name: At_42deg_Heat_P Parameter: Timepoint (hr) Value: 6
  misc_feature: MA Experiment 20000173 PARAMETER Experiment Name: At_42deg_Heat_P Parameter: Tissue Value: Aerial
  misc_feature: MA Experiment ID: 20000182 Result: Up-regulated in Transcription
  misc_feature: MA Experiment 20000182 PARAMETER Experiment Name: At_2mM_SA_P Parameter: Age (day) Value: 14
  misc_feature: MA Experiment 20000182 PARAMETER Experiment Name: At_2mM_SA_P Parameter: Organism Value: A. thaliana
  misc_feature: MA Experiment 20000182 PARAMETER Experiment Name: At_2mM_SA_P Parameter: Plant Line Value: WS
  misc_feature: MA Experiment 20000182 PARAMETER Experiment Name: At_2mM_SA_P Parameter: Timepoint (hr) Value: 6
  misc_feature: MA Experiment 20000182 PARAMETER Experiment Name: At_2mM_SA_P Parameter: Tissue Value: Aerial
  misc_feature: MA Experiment 20000182 PARAMETER Experiment Name: At_2mM_SA_P Parameter: Treatment Value: 2mM SA vs. No Treatment
  misc_feature: MA Experiment ID: 20000185 Result: Up-regulated in Transcription
  misc_feature: MA Experiment 20000185 PARAMETER Experiment Name: At_Roots__P Parameter: Age (day) Value: 7 vs. 21
  misc_feature: MA Experiment 20000185 PARAMETER Experiment Name: At_Roots__P Parameter: Organism Value: A. thaliana
  misc_feature: MA Experiment 20000185 PARAMETER Experiment Name: At_Roots__P Parameter: Tissue Value: Roots vs. Whole Plant
  misc_feature: MA Experiment ID: 20000439 Result: Up-regulated in Transcription
  misc_feature: MA Experiment 20000439 PARAMETER Experiment Name: At_Roots__P Parameter: Age (day) Value: 14 vs. 21
  misc_feature: MA Experiment 20000439 PARAMETER Experiment Name: At_Roots__P Parameter: Organism Value: A. thaliana
  misc_feature: MA Experiment 20000439 PARAMETER Experiment Name: At_Roots__P Parameter: Tissue Value: Roots vs. Whole Plant
  misc_feature: MA Experiment ID: 20000495 Result: Down-regulated in Transcription
  misc_feature: MA Experiment 20000495 PARAMETER Experiment Name: At_Guard_Cells_P Parameter: Harvest Date Value: 8/2/2002
  misc_feature: MA Experiment 20000495 PARAMETER Experiment Name: At_Guard_Cells_P Parameter: Organism Value: A. thaliana
  misc_feature: MA Experiment 20000495 PARAMETER Experiment Name: At_Guard_Cells_P Parameter: Tissue Value: Guard Cells vs. Leaves
  misc_feature: MA Experiment ID: 20001560 Result: Down-regulated in Transcription
  misc_feature: MA Experiment 20001560 PARAMETER Experiment Name: At_Drought_Soil_Dry_P Parameter: Age (day) Value: 28
  misc_feature: MA Experiment 20001560 PARAMETER Experiment Name: At_Drought_Soil_Dry_P Parameter: Organism Value: A. thaliana
  misc_feature: MA Experiment 20001560 PARAMETER Experiment Name: At_Drought_Soil_Dry_P Parameter: Plant Line Value: WS
  misc_feature: MA Experiment 20001560 PARAMETER Experiment Name: At_Drought_Soil_Dry_P Parameter: Post Timepoint (hr) Value: None
  misc_feature: MA Experiment 20001560 PARAMETER Experiment Name: At_Drought_Soil_Dry_P Parameter: Post-Treatment Value: None
  misc_feature: MA Experiment 20001560 PARAMETER Experiment Name: At_Drought_Soil_Dry_P Parameter: Timepoint (day) Value: 14
  misc_feature: MA Experiment 20001560 PARAMETER Experiment Name: At_Drought_Soil_Dry_P Parameter: Treatment Value: Drought vs. No Drought
acaatcagtctctttctctaaaccttcaccaatttctctctctctctcttgcccttttacacagccatttgttagattcctctctcaataagcctctcttctcttttctattggagtttttgcattagactgattagctcaaagcaaaacccataaaccaaaatcttctctttgtgttcttgtttttttcatttctccaatttttctttgtggaggaggtttttcactttttgtttttctgggtttttattggctttcttctgcaaaaaccataactttattttttctgggtttttcttcgtaaagaagcttcccaaaacccagttttttgtataagctcaattagtagcaaacaagaaaaaacaatcttaaactcaatttcacaaaatctctgattcttgtgaaaatttgtatattgcaaaactttggaaaaaaaagagaaaaaatatggggaagcaaggtccttgctatcactgtggagttacaagtacacctctatggagaaacgggccaccagagaagccggtgttgtgcaatgcgtgtggttcgaggtggagaactaaaggatcattagtaaactacacacctcttcatgctcgtgctgaaggtgatgagactgagattgaggatcatagaactcaaacggtgatgattaagggaatgtctttgaacaaaaagattcccaagaggaaaccatatcaagaaaacttcacagtgaaaagagctaacttggaattccataccggtttcaagaggaaggctctggatgaagaagctagcaatagatcgagttcaggatcggttgtatcaaactccgagagctgtgcacaatctaatgcgtgggactcgacttttccttgtaagagaaggacatgtgtgggacgtccaaaggcagcttcttctgttgaaaagctcacaaaggatctttatactattctacaagaacagcaatcttcttgtctctctggtacttcagaggaagatttgctttttgagaatgaaacaccaatgctgttaggacatggtagtgttcttatgagagatcctcactcaggtgctcgagaagaggaatctgaagctagctcactcttagttgagagcagcaagtcttcatcagttcattctgttaaatttggtggaaaagcaatgaagcaggagcaagtgaagaggagcaaatctcaagtcttaggaagacatagttcactactctgtagcatagatttgaaggatgttttcaactttgatgagttcatagaaaatttcacagaggaagaacagcaaaaactgatgaaattacttcctcaagttgactctgttgatcgtcctgatagcctcagaagcatgtttgagagttctcaattcaaagagaacttatccttgtttcagcaacttgtggcagatggtgtttttgagacaaattcgtcttatgcaaaacttgaagacattaagacacttgcaaagcttgctttatcagatcctaacaaatcccatttgttggaaagctattacatgctcaagagaagagagattgaagactgtgttactacaacatcaagggtctcaagcttgagtccatcgaataataatagtcttgtaaccattgaaagaccttgtgaaagcttaaaccaaaacttctcagagacaagaggtgtgatgagaagcccgaaagaagtgatgaagattagatcaaagcacaccgaagagaatttagagaatagtgtatcttcctttaaacctgtgagctgtggtggacctctggtgtttagctatgaagataatgatatttctgatcaggatcttcttcttgatgtgccgtcgaacggctcattccctcaagcagagcttctaaacatgatatga

SEQ ID NO: 42560 - protein, 470 aa, Arabidopsis thaliana
  peptide (1)..(470): Ceres Seq. ID no. 12336492
  misc_feature (441)..(467): Homolog of NCBI NO: 38345953 NR Description: OSJNBb0038F03.10 [Oryza sativa (japonica
  misc_feature (1)..(231): Homolog of NCBI NO: 38345953 NR Description: OSJNBb0038F03.10 [Oryza sativa (japonica
  misc_feature (209)..(377): Homolog of NCBI NO: 7485111 NR Description: hypothetical protein - Arabidopsis thaliana
  misc_feature (40)..(222): Homolog of NCBI NO: 7485111 NR Description: hypothetical protein - Arabidopsis thaliana
  misc_feature (1)..(222): Homolog of NCBI NO: 30684095 NR Description: GATA zinc finger protein [Arabidopsis thaliana]
  misc_feature (209)..(470): Homolog of NCBI NO: 30684095 NR Description: GATA zinc finger protein [Arabidopsis thaliana]
  misc_feature (13)..(470): Homolog of NCBI NO: 8978081 NR Description: gene_id:K14A3.9~pir||D71445~similar to unknown
  misc_feature (1)..(470): Homolog of NCBI NO: 22327632 NR Description: GATA zinc finger protein; protein id: At5g47140.1
MGKQGPCYHCGVTSTPLWRNGPPEKPVLCNACGSRWRTKGSLVNYTPLHARAEGDETEIEDHRTQTVMIKGMSLNKKIPKRKPYQENFTVKRANLEFHTGFKRKALDEEASNRSSSGSVVSNSESCAQSNAWDSTFPCKRRTCVGRPKAASSVEKLTKDLYTILQEQQSSCLSGTSEEDLLFENETPMLLGHGSVLMRDPHSGAREEESEASSLLVESSKSSSVHSVKFGGKAMKQEQVKRSKSQVLGRHSSLLCSIDLKDVFNFDEFIENFTEEEQQKLMKLLPQVDSVDRPDSLRSMFESSQFKENLSLFQQLVADGVFETNSSYAKLEDIKTLAKLALSDPNKSHLLESYYMLKRREIEDCVTTTSRVSSLSPSNNNSLVTIERPCESLNQNFSETRGVMRSPKEVMKIRSKHTEENLENSVSSFKPVSCGGPLVFSYEDNDISDQDLLLDVPSNGSFPQAELLNMI

SEQ ID NO: 42561 - protein, 403 aa, Arabidopsis thaliana
  peptide (1)..(403): Ceres Seq. ID no. 12336493
  misc_feature (374)..(400): Homolog of NCBI NO: 38345953 NR Description: OSJNBb0038F03.10 [Oryza sativa (japonica
  misc_feature (1)..(164): Homolog of NCBI NO: 38345953 NR Description: OSJNBb0038F03.10 [Oryza sativa (japonica
  misc_feature (142)..(310): Homolog of NCBI NO: 7485111 NR Description: hypothetical protein - Arabidopsis thaliana
  misc_feature (1)..(155): Homolog of NCBI NO: 7485111 NR Description: hypothetical protein - Arabidopsis thaliana
  misc_feature (1)..(155): Homolog of NCBI NO: 30684095 NR Description: GATA zinc finger protein [Arabidopsis thaliana]
  misc_feature (142)..(403): Homolog of NCBI NO: 30684095 NR Description: GATA zinc finger protein [Arabidopsis thaliana]
  misc_feature (1)..(403): Homolog of NCBI NO: 8978081 NR Description: gene_id:K14A3.9~pir||D71445~similar to unknown
  misc_feature (1)..(403): Homolog of NCBI NO: 22327632 NR Description: GATA zinc finger protein; protein id: At5g47140.1
MIKGMSLNKKIPKRKPYQENFTVKRANLEFHTGFKRKALDEEASNRSSSGSVVSNSESCAQSNAWDSTFPCKRRTCVGRPKAASSVEKLTKDLYTILQEQQSSCLSGTSEEDLLFENETPMLLGHGSVLMRDPHSGAREEESEASSLLVESSKSSSVHSVKFGGKAMKQEQVKRSKSQVLGRHSSLLCSIDLKDVFNFDEFIENFTEEEQQKLMKLLPQVDSVDRPDSLRSMFESSQFKENLSLFQQLVADGVFETNSSYAKLEDIKTLAKLALSDPNKSHLLESYYMLKRREIEDCVTTTSRVSSLSPSNNNSLVTIERPCESLNQNFSETRGVMRSPKEVMKIRSKHTEENLENSVSSFKPVSCGGPLVFSYEDNDISDQDLLLDVPSNGSFPQAELLNMI

SEQ ID NO: 42562 - protein, 399 aa, Arabidopsis thaliana
  peptide (1)..(399): Ceres Seq. ID no. 12336494
  misc_feature (370)..(396): Homolog of NCBI NO: 38345953 NR Description: OSJNBb0038F03.10 [Oryza sativa (japonica
  misc_feature (1)..(160): Homolog of NCBI NO: 38345953 NR Description: OSJNBb0038F03.10 [Oryza sativa (japonica
  misc_feature (138)..(306): Homolog of NCBI NO: 7485111 NR Description: hypothetical protein - Arabidopsis thaliana
  misc_feature (1)..(151): Homolog of NCBI NO: 7485111 NR Description: hypothetical protein - Arabidopsis thaliana
  misc_feature (1)..(151): Homolog of NCBI NO: 30684095 NR Description: GATA zinc finger protein [Arabidopsis thaliana]
  misc_feature (138)..(399): Homolog of NCBI NO: 30684095 NR Description: GATA zinc finger protein [Arabidopsis thaliana]
  misc_feature (1)..(399): Homolog of NCBI NO: 8978081 NR Description: gene_id:K14A3.9~pir||D71445~similar to unknown
  misc_feature (1)..(399): Homolog of NCBI NO: 22327632 NR Description: GATA zinc finger protein; protein id: At5g47140.1
MSLNKKIPKRKPYQENFTVKRANLEFHTGFKRKALDEEASNRSSSGSVVSNSESCAQSNAWDSTFPCKRRTCVGRPKAASSVEKLTKDLYTILQEQQSSCLSGTSEEDLLFENETPMLLGHGSVLMRDPHSGAREEESEASSLLVESSKSSSVHSVKFGGKAMKQEQVKRSKSQVLGRHSSLLCSIDLKDVFNFDEFIENFTEEEQQKLMKLLPQVDSVDRPDSLRSMFESSQFKENLSLFQQLVADGVFETNSSYAKLEDIKTLAKLALSDPNKSHLLESYYMLKRREIEDCVTTTSRVSSLSPSNNNSLVTIERPCESLNQNFSETRGVMRSPKEVMKIRSKHTEENLENSVSSFKPVSCGGPLVFSYEDNDISDQDLLLDVPSNGSFPQAELLNMI

SEQ ID NO: 42563 - DNA, 888 bp, Arabidopsis thaliana
  misc_feature (1)..(888): Ceres Seq. ID no. 12326707
  misc_feature: MA Experiment ID: 108461 Result: Up-regulated in Transcription
  misc_feature: MA Experiment 108461 PARAMETER Experiment Name: At_Germinating_Seeds_cDNA_P Parameter: Age (day) Value: 1 vs. 0
  misc_feature: MA Experiment 108461 PARAMETER Experiment Name: At_Germinating_Seeds_cDNA_P Parameter: Tissue Value: Germinating Seeds
  misc_feature: MA Experiment ID: 108462 Result: Up-regulated in Transcription
  misc_feature: MA Experiment 108462 PARAMETER Experiment Name: At_Germinating_Seeds_cDNA_P Parameter: Age (day) Value: 2 vs. 0
  misc_feature: MA Experiment 108462 PARAMETER Experiment Name: At_Germinating_Seeds_cDNA_P Parameter: Tissue Value: Germinating Seeds
  misc_feature: MA Experiment ID: 108463 Result: Up-regulated in Transcription
  misc_feature: MA Experiment 108463 PARAMETER Experiment Name: At_Germinating_Seeds_cDNA_P Parameter: Age (day) Value: 3 vs. 0
  misc_feature: MA Experiment 108463 PARAMETER Experiment Name: At_Germinating_Seeds_cDNA_P Parameter: Tissue Value: Germinating Seeds
  misc_feature: MA Experiment ID: 108464 Result: Up-regulated in Transcription
  misc_feature: MA Experiment 108464 PARAMETER Experiment Name: At_Germinating_Seeds_cDNA_P Parameter: Age (day) Value: 4 vs. 0
  misc_feature: MA Experiment 108464 PARAMETER Experiment Name: At_Germinating_Seeds_cDNA_P Parameter: Tissue Value: Germinating Seeds
  misc_feature: MA Experiment ID: 108573 Result: Down-regulated in Transcription
  misc_feature: MA Experiment 108573 PARAMETER Experiment Name: At_Drought_cDNA_P Parameter: Timepoint (hr) Value: 6
  misc_feature: MA Experiment 108573 PARAMETER Experiment Name: At_Drought_cDNA_P Parameter: Tissue Value: Aerial
  misc_feature: MA Experiment 108573 PARAMETER Experiment Name: At_Drought_cDNA_P Parameter: Treatment Value: Drought vs. No Drought
  misc_feature: MA Experiment ID: 108577 Result: Down-regulated in Transcription
  misc_feature: MA Experiment 108577 PARAMETER Experiment Name: At_42deg_Heat_cDNA_P Parameter: Temperature (deg C) Value: 42 vs. 22
  misc_feature: MA Experiment 108577 PARAMETER Experiment Name: At_42deg_Heat_cDNA_P Parameter: Timepoint (hr) Value: 6
  misc_feature: MA Experiment 108577 PARAMETER Experiment Name: At_42deg_Heat_cDNA_P Parameter: Tissue Value: Aerial
  misc_feature: MA Experiment ID: 108579 Result: Down-regulated in Transcription
  misc_feature: MA Experiment 108579 PARAMETER Experiment Name: At_4deg_Cold_cDNA_P Parameter: Temperature (deg C) Value: 4 vs. 22
  misc_feature: MA Experiment 108579 PARAMETER Experiment Name: At_4deg_Cold_cDNA_P Parameter: Timepoint (hr) Value: 6
  misc_feature: MA Experiment 108579 PARAMETER Experiment Name: At_4deg_Cold_cDNA_P Parameter: Tissue Value: Aerial
  misc_feature: MA Experiment ID: 108585 Result: Down-regulated in Transcription
  misc_feature: MA Experiment 108585 PARAMETER Experiment Name: At_5mM_NaNP_cDNA_P Parameter: Timepoint (hr) Value: 6
  misc_feature: MA Experiment 108585 PARAMETER Experiment Name: At_5mM_NaNP_cDNA_P Parameter: Tissue Value: Aerial
  misc_feature: MA Experiment 108585 PARAMETER Experiment Name: At_5mM_NaNP_cDNA_P Parameter: Treatment Value: null
  misc_feature: MA Experiment ID: 20000069 Result: Up-regulated in Transcription
  misc_feature: MA Experiment 20000069 PARAMETER Experiment Name: At_100uM_ABA_Mutants_cDNA_P Parameter: Plant Line Value: CS23
  misc_feature: MA Experiment 20000069 PARAMETER Experiment Name: At_100uM_ABA_Mutants_cDNA_P Parameter: Timepoint (hr) Value: 6
  misc_feature: MA Experiment 20000069 PARAMETER Experiment Name: At_100uM_ABA_Mutants_cDNA_P Parameter: Tissue Value: Aerial
  misc_feature: MA Experiment 20000069 PARAMETER Experiment Name: At_100uM_ABA_Mutants_cDNA_P Parameter: Treatment Value: 100uM ABA vs. No Treatment
  misc_feature: MA Experiment ID: 20000070 Result: Up-regulated in Transcription
  misc_feature: MA Experiment 20000070 PARAMETER Experiment Name: At_100uM_ABA_Mutants_cDNA_P Parameter: Plant Line Value: CS24
  misc_feature: MA Experiment 20000070 PARAMETER Experiment Name: At_100uM_ABA_Mutants_cDNA_P Parameter: Timepoint (hr) Value: 6
  misc_feature: MA Experiment 20000070 PARAMETER Experiment Name: At_100uM_ABA_Mutants_cDNA_P Parameter: Tissue Value: Aerial
  misc_feature: MA Experiment 20000070 PARAMETER Experiment Name: At_100uM_ABA_Mutants_cDNA_P Parameter: Treatment Value: 100uM ABA vs. No Treatment
  misc_feature: MA Experiment ID: 20000071 Result: Up-regulated in Transcription
  misc_feature: MA Experiment 20000071 PARAMETER Experiment Name: At_100uM_ABA_Mutants_cDNA_P Parameter: Plant Line Value: CS8104
  misc_feature: MA Experiment 20000071 PARAMETER Experiment Name: At_100uM_ABA_Mutants_cDNA_P Parameter: Timepoint (hr) Value: 6
  misc_feature: MA Experiment 20000071 PARAMETER Experiment Name: At_100uM_ABA_Mutants_cDNA_P Parameter: Tissue Value: Aerial
  misc_feature: MA Experiment 20000071 PARAMETER Experiment Name: At_100uM_ABA_Mutants_cDNA_P Parameter: Treatment Value: 100uM ABA vs. No Treatment
  misc_feature: MA Experiment ID: 20000072 Result: Up-regulated in Transcription
  misc_feature: MA Experiment 20000072 PARAMETER Experiment Name: At_100uM_ABA_Mutants_cDNA_P Parameter: Plant Line Value: CS8105
  misc_feature: MA Experiment 20000072 PARAMETER Experiment Name: At_100uM_ABA_Mutants_cDNA_P Parameter: Timepoint (hr) Value: 6
  misc_feature: MA Experiment 20000072 PARAMETER Experiment Name: At_100uM_ABA_Mutants_cDNA_P Parameter: Tissue Value: Aerial
  misc_feature: MA Experiment 20000072 PARAMETER Experiment Name: At_100uM_ABA_Mutants_cDNA_P Parameter: Treatment Value: 100uM ABA vs. No Treatment
  misc_feature: MA Experiment ID: 20000087 Result: Up-regulated in Transcription
  misc_feature: MA Experiment 20000087 PARAMETER Experiment Name: At_100uM_ABA_Mutants_cDNA_P Parameter: Plant Line Value: WS
  misc_feature: MA Experiment 20000087 PARAMETER Experiment Name: At_100uM_ABA_Mutants_cDNA_P Parameter: Timepoint (hr) Value: 6
  misc_feature: MA Experiment 20000087 PARAMETER Experiment Name: At_100uM_ABA_Mutants_cDNA_P Parameter: Tissue Value: Aerial
  misc_feature: MA Experiment 20000087 PARAMETER Experiment Name: At_100uM_ABA_Mutants_cDNA_P Parameter: Treatment Value: 100uM ABA vs. No Treatment
  misc_feature: MA Experiment ID: 20000088 Result: Up-regulated in Transcription
  misc_feature: MA Experiment 20000088 PARAMETER Experiment Name: At_100uM_ABA_Mutants_cDNA_P Parameter: Plant Line Value: Landsberg
  misc_feature: MA Experiment 20000088 PARAMETER Experiment Name: At_100uM_ABA_Mutants_cDNA_P Parameter: Timepoint (hr) Value: 6
  misc_feature: MA Experiment 20000088 PARAMETER Experiment Name: At_100uM_ABA_Mutants_cDNA_P Parameter: Tissue Value: Aerial
  misc_feature: MA Experiment 20000088 PARAMETER Experiment Name: At_100uM_ABA_Mutants_cDNA_P Parameter: Treatment Value: 100uM ABA vs. No Treatment
  misc_feature: MA Experiment ID: 20000089 Result: Up-regulated in Transcription
  misc_feature: MA Experiment ID: 20000090 Result: Up-regulated in Transcription
  misc_feature: MA Experiment ID: 20000111 Result: Down-regulated in Transcription
  misc_feature: MA Experiment 20000111 PARAMETER Experiment Name: At_42deg_Heat_cDNA_P Parameter: Temperature (deg C) Value: 42 vs. 22
  misc_feature: MA Experiment 20000111 PARAMETER Experiment Name: At_42deg_Heat_cDNA_P Parameter: Timepoint (hr) Value: 6
  misc_feature: MA Experiment 20000111 PARAMETER Experiment Name: At_42deg_Heat_cDNA_P Parameter: Tissue Value: Aerial
  misc_feature: MA Experiment ID: 20000112 Result: Down-regulated in Transcription
  misc_feature: MA Experiment 20000112 PARAMETER Experiment Name: At_42deg_Heat_cDNA_P Parameter: Temperature (deg C) Value: 42 vs. 22
  misc_feature: MA Experiment 20000112 PARAMETER Experiment Name: At_42deg_Heat_cDNA_P Parameter: Timepoint (hr) Value: 2
  misc_feature: MA Experiment 20000112 PARAMETER Experiment Name: At_42deg_Heat_cDNA_P Parameter: Tissue Value: Aerial
  misc_feature: MA Experiment ID: 20000113 Result: Down-regulated in Transcription
  misc_feature: MA Experiment 20000113 PARAMETER Experiment Name: At_42deg_Heat_cDNA_P Parameter: Temperature (deg C) Value: 42 vs. 22
  misc_feature: MA Experiment 20000113 PARAMETER Experiment Name: At_42deg_Heat_cDNA_P Parameter: Timepoint (hr) Value: 8
  misc_feature: MA Experiment 20000113 PARAMETER Experiment Name: At_42deg_Heat_cDNA_P Parameter: Tissue Value: Aerial
  misc_feature: MA Experiment ID: 20000117 Result: Up-regulated in Transcription
  misc_feature: MA Experiment 20000117 PARAMETER Experiment Name: At_100uM_ABA_Mutants_cDNA_P Parameter: Plant Line Value: Columbia
  misc_feature: MA Experiment 20000117 PARAMETER Experiment Name: At_100uM_ABA_Mutants_cDNA_P Parameter: Timepoint (hr) Value: 6
  misc_feature: MA Experiment 20000117 PARAMETER Experiment Name: At_100uM_ABA_Mutants_cDNA_P Parameter: Tissue Value: Aerial
  misc_feature: MA Experiment 20000117 PARAMETER Experiment Name: At_100uM_ABA_Mutants_cDNA_P Parameter: Treatment Value: 100uM ABA vs. No Treatment
  misc_feature: MA Experiment ID: 20000173 Result: Down-regulated in Transcription
  misc_feature: MA Experiment 20000173 PARAMETER Experiment Name: At_42deg_Heat_P Parameter: Age (day) Value: 14
  misc_feature: MA Experiment 20000173 PARAMETER Experiment Name: At_42deg_Heat_P Parameter: Organism Value: A. thaliana
  misc_feature: MA Experiment 20000173 PARAMETER Experiment Name: At_42deg_Heat_P Parameter: Plant Line Value: WS
  misc_feature: MA Experiment 20000173 PARAMETER Experiment Name: At_42deg_Heat_P Parameter: Temperature (deg C) Value: 42 vs. 22
  misc_feature: MA Experiment 20000173 PARAMETER Experiment Name: At_42deg_Heat_P Parameter: Timepoint (hr) Value: 6
  misc_feature: MA Experiment 20000173 PARAMETER Experiment Name: At_42deg_Heat_P Parameter: Tissue Value: Aerial
  misc_feature: MA Experiment ID: 20000179 Result: Up-regulated in Transcription
  misc_feature: MA Experiment 20000179 PARAMETER Experiment Name: At_Germinating_Seeds_P Parameter: Age (hr) Value: 6 vs. 0
  misc_feature: MA Experiment 20000179 PARAMETER Experiment Name: At_Germinating_Seeds_P Parameter: Tissue Value: Germinating Seeds
  misc_feature: MA Experiment ID: 20000180 Result: Up-regulated in Transcription
  misc_feature: MA Experiment 20000180 PARAMETER Experiment Name: At_Germinating_Seeds_P Parameter: Age (hr) Value: 24 vs. 0
  misc_feature: MA Experiment 20000180 PARAMETER Experiment Name: At_Germinating_Seeds_P Parameter: Tissue Value: Germinating Seeds
  misc_feature: MA Experiment ID: 20000184 Result: Down-regulated in Transcription
  misc_feature: MA Experiment 20000184 PARAMETER Experiment Name: At_Shoots__P Parameter: Age (day) Value: 7
  misc_feature: MA Experiment 20000184 PARAMETER Experiment Name: At_Shoots__P Parameter: Tissue Value: Shoots vs. Whole Plant
  misc_feature: MA Experiment ID: 20000234 Result: Up-regulated in Transcription
  misc_feature: MA Experiment 20000234 PARAMETER Experiment Name: At_Siliques_P Parameter: Age (day) Value: 21
  misc_feature: MA Experiment 20000234 PARAMETER Experiment Name: At_Siliques_P Parameter: Organism Value: A. thaliana
  misc_feature: MA Experiment 20000234 PARAMETER Experiment Name: At_Siliques_P Parameter: Plant Line Value: WS
  misc_feature: MA Experiment 20000234 PARAMETER Experiment Name: At_Siliques_P Parameter: Tissue Value: Less Than 5mm Siliques vs. Whole Plant
  misc_feature: MA Experiment ID: 20000794 Result: Up-regulated in Transcription
  misc_feature: MA Experiment 20000794 PARAMETER Experiment Name: At_Petals_P Parameter: Age (day) Value: 23-25 days
  misc_feature: MA Experiment 20000794 PARAMETER Experiment Name: At_Petals_P Parameter: Plant Line Value: WS
  misc_feature: MA Experiment 20000794 PARAMETER Experiment Name: At_Petals_P Parameter: Tissue Value: Petals vs. Whole plant
  misc_feature: MA Experiment ID: 20001905 Result: Down-regulated in Transcription
  misc_feature: MA Experiment 20001905 PARAMETER Experiment Name: At_Drought_Reproduction_P Parameter: Age (day) Value: 40
  misc_feature: MA Experiment 20001905 PARAMETER Experiment Name: At_Drought_Reproduction_P Parameter: Organism Value: A. thaliana
  misc_feature: MA Experiment 20001905 PARAMETER Experiment Name: At_Drought_Reproduction_P Parameter: Plant Line Value: WS
  misc_feature: MA Experiment 20001905 PARAMETER Experiment Name: At_Drought_Reproduction_P Parameter: Timepoint (day) Value: 10
  misc_feature: MA Experiment 20001905 PARAMETER Experiment Name: At_Drought_Reproduction_P Parameter: Tissue Value: Rosettes
  misc_feature: MA Experiment 20001905 PARAMETER Experiment Name: At_Drought_Reproduction_P Parameter: Treatment Value: Drought vs. No Drought
  misc_feature: MA Experiment ID: 20001906 Result: Down-regulated in Transcription
  misc_feature: MA Experiment 20001906 PARAMETER Experiment Name: At_Drought_Reproduction_P Parameter: Age (day) Value: 35
  misc_feature: MA Experiment 20001906 PARAMETER Experiment Name: At_Drought_Reproduction_P Parameter: Organism Value: A. thaliana
  misc_feature: MA Experiment 20001906 PARAMETER Experiment Name: At_Drought_Reproduction_P Parameter: Plant Line Value: WS
  misc_feature: MA Experiment 20001906 PARAMETER Experiment Name: At_Drought_Reproduction_P Parameter: Timepoint (day) Value: 5
  misc_feature: MA Experiment 20001906 PARAMETER Experiment Name: At_Drought_Reproduction_P Parameter: Tissue Value: Siliques
  misc_feature: MA Experiment 20001906 PARAMETER Experiment Name: At_Drought_Reproduction_P Parameter: Treatment Value: Drought vs. No Drought
  misc_feature: MA Experiment ID: 20001908 Result: Down-regulated in Transcription
  misc_feature: MA Experiment 20001908 PARAMETER Experiment Name: At_Drought_Reproduction_P Parameter: Age (day) Value: 40
  misc_feature: MA Experiment 20001908 PARAMETER Experiment Name: At_Drought_Reproduction_P Parameter: Organism Value: A. thaliana
  misc_feature: MA Experiment 20001908 PARAMETER Experiment Name: At_Drought_Reproduction_P Parameter: Plant Line Value: WS
  misc_feature: MA Experiment 20001908 PARAMETER Experiment Name: At_Drought_Reproduction_P Parameter: Timepoint (day) Value: 10
  misc_feature: MA Experiment 20001908 PARAMETER Experiment Name: At_Drought_Reproduction_P Parameter: Tissue Value: Siliques
  misc_feature: MA Experiment 20001908 PARAMETER Experiment Name: At_Drought_Reproduction_P Parameter: Treatment Value: Drought vs. No Drought
  misc_feature: MA Experiment ID: 20001911 Result: Down-regulated in Transcription
  misc_feature: MA Experiment 20001911 PARAMETER Experiment Name: At_Drought_Reproduction_P Parameter: Age (day) Value: 40
  misc_feature: MA Experiment 20001911 PARAMETER Experiment Name: At_Drought_Reproduction_P Parameter: Organism Value: A. thaliana
  misc_feature: MA Experiment 20001911 PARAMETER Experiment Name: At_Drought_Reproduction_P Parameter: Plant Line Value: WS
  misc_feature: MA Experiment 20001911 PARAMETER Experiment Name: At_Drought_Reproduction_P Parameter: Timepoint (day) Value: 10
  misc_feature: MA Experiment 20001911 PARAMETER Experiment Name: At_Drought_Reproduction_P Parameter: Tissue Value: Flowers
  misc_feature: MA Experiment 20001911 PARAMETER Experiment Name: At_Drought_Reproduction_P Parameter: Treatment Value: Drought vs. No Drought
attcttctttatctctctctctctctcaagactattgagcttctttcttttttcctgagtcttttagtctgatctcttacaagaatggcgttcgcaggaacaacccagaaatgcatggcatgtgacaaaacagtttatcttgtcgacaagttaaccgccgataaccgggtctaccacaaagcttgtttccgatgtcaccattgcaaaggaactctcaagcttagcaattacaactcctttgaaggagttctctactgcagaccacatttcgatcaaaacttcaagagaactggaagtcttgagaaaagcttcgaagggacaccaaagattgggaaacctgataggcctttggagggagagagacctgctggaaccaaagtttcgaatatgtttggtggaacacgagagaaatgcgttggttgcgacaaaaccgtgtatccaattgagaaggtatcggtgaatggaacattgtaccacaagagctgcttcaagtgtacacatggaggctgcacgataagcccttcgaattacatagctcacgagggtaagctatattgcaagcatcatcatattcagctgatcaaggagaaaggaaacttgagccagctcgaaggaggaggagagaatgccgccaaggacaaagtcgtcgctgcttaaagaaacaattcaatctctctgggatgattttgactatcgaagaatcaaaagagtcactacttctccatcgatcgataacatatattggttttgtttcttcctacgtttgtgtttttctttttggtctttaatatgttttttttttttttgggacctttgttcactcttttattgggtttcttgaaatgaaactagagaaacaaagaaataatggatgtttgcttatgagat

SEQ ID NO: 42564 - protein, 190 aa, Arabidopsis thaliana; identical to SEQ ID NO: 24619
  peptide (1)..(190): Ceres Seq. ID no. 12326708
  misc_feature (10)..(67): Pfam Name: LIM domain Pfam Description: LIM domain
  misc_feature (1)..(180): Homolog of NCBI NO: 5932418 NR Description: LIM domain protein PLIM1 [Nicotiana tabacum]
  misc_feature (1)..(184): Homolog of NCBI NO: 5932436 NR Description: LIM domain protein WLIM1 [Helianthus annuus]
  misc_feature (1)..(180): Homolog of NCBI NO: 6467903 NR Description: pollen specific LIM domain protein 1a [Nicotiana
  misc_feature (1)..(184): Homolog of NCBI NO: 5070280 NR Description: LIM domain protein WLIM-1 [Helianthus annuus]
  misc_feature (1)..(190): Homolog of NCBI NO: 5689136 NR Description: transcription factor Ntlim1 [Nicotiana tabacum]
  misc_feature (1)..(190): Homolog of NCBI NO: 5932413 NR Description: LIM domain protein WLIM1 [Nicotiana tabacum]
  misc_feature (1)..(190): Homolog of NCBI NO: 18565124 NR Description: transcription factor LIM [Nicotiana tabacum]
  misc_feature (1)..(177): Homolog of NCBI NO: 18565116 NR Description: transcription factor LIM [Populus kitakamiensis]
  misc_feature (1)..(177): Homolog of NCBI NO: 18565112 NR Description: transcription factor LIM [Populus kitakamiensis]
  misc_feature (1)..(190): Homolog of NCBI NO: 15218450 NR Description: putative transcription factor

SEQ ID NO: 42565 - protein, 180 aa, Arabidopsis thaliana; identical to SEQ ID NO: 24620
  peptide (1)..(180): Ceres Seq. ID no. 12326709
  misc_feature (1)..(57): Pfam Name: LIM domain Pfam Description: LIM domain
  misc_feature (1)..(170): Homolog of NCBI NO: 5932418 NR Description: LIM domain protein PLIM1 [Nicotiana tabacum]
  misc_feature (1)..(174): Homolog of NCBI NO: 5932436 NR Description: LIM domain protein WLIM1 [Helianthus annuus]
  misc_feature (1)..(170): Homolog of NCBI NO: 6467903 NR Description: pollen specific LIM domain protein 1a [Nicotiana
  misc_feature (1)..(174): Homolog of NCBI NO: 5070280 NR Description: LIM domain protein WLIM-1 [Helianthus annuus]
  misc_feature (1)..(180): Homolog of NCBI NO: 5689136 NR Description: transcription factor Ntlim1 [Nicotiana tabacum]
  misc_feature (1)..(180): Homolog of NCBI NO: 5932413 NR Description: LIM domain protein WLIM1 [Nicotiana tabacum]
  misc_feature (1)..(180): Homolog of NCBI NO: 18565124 NR Description: transcription factor LIM [Nicotiana tabacum]
  misc_feature (1)..(167): Homolog of NCBI NO: 18565116 NR Description: transcription factor LIM [Populus kitakamiensis]
  misc_feature (1)..(167): Homolog of NCBI NO: 18565112 NR Description: transcription factor LIM [Populus kitakamiensis]
  misc_feature (1)..(180): Homolog of NCBI NO: 15218450 NR Description: putative transcription factor

SEQ ID NO: 42566 - DNA, 1426 bp, Arabidopsis thaliana
  misc_feature (1)..(1426): Ceres Seq. ID no. 13489571
  misc_feature: MA Experiment ID: 108469 Result: Down-regulated in Transcription
  misc_feature: MA Experiment ID: 108488 Result: Up-regulated in Transcription
  misc_feature: MA Experiment ID: 108573 Result: Down-regulated in Transcription
  misc_feature: MA Experiment 108573 PARAMETER Experiment Name: At_Drought_cDNA_P Parameter: Timepoint (hr) Value: 6
  misc_feature: MA Experiment 108573 PARAMETER Experiment Name: At_Drought_cDNA_P Parameter: Tissue Value: Aerial
  misc_feature: MA Experiment 108573 PARAMETER Experiment Name: At_Drought_cDNA_P Parameter: Treatment Value: Drought vs. No Drought
  misc_feature: MA Experiment ID: 108577 Result: Down-regulated in Transcription
  misc_feature: MA Experiment 108577 PARAMETER Experiment Name: At_42deg_Heat_cDNA_P Parameter: Temperature (deg C) Value: 42 vs. 22
  misc_feature: MA Experiment 108577 PARAMETER Experiment Name: At_42deg_Heat_cDNA_P Parameter: Timepoint (hr) Value: 6
  misc_feature: MA Experiment 108577 PARAMETER Experiment Name: At_42deg_Heat_cDNA_P Parameter: Tissue Value: Aerial
  misc_feature: MA Experiment ID: 20000093 Result: Down-regulated in Transcription
  misc_feature: MA Experiment 20000093 PARAMETER Experiment Name: At_42deg_Heat_cDNA_P Parameter: Temperature (deg C) Value: 42 vs. 22
  misc_feature: MA Experiment 20000093 PARAMETER Experiment Name: At_42deg_Heat_cDNA_P Parameter: Timepoint (hr) Value: 0.5
  misc_feature: MA Experiment 20000093 PARAMETER Experiment Name: At_42deg_Heat_cDNA_P Parameter: Tissue Value: Aerial
  misc_feature: MA Experiment ID: 20000111 Result: Down-regulated in Transcription
  misc_feature: MA Experiment 20000111 PARAMETER Experiment Name: At_42deg_Heat_cDNA_P Parameter: Temperature (deg C) Value: 42 vs. 22
  misc_feature: MA Experiment 20000111 PARAMETER Experiment Name: At_42deg_Heat_cDNA_P Parameter: Timepoint (hr) Value: 6
  misc_feature: MA Experiment 20000111 PARAMETER Experiment Name: At_42deg_Heat_cDNA_P Parameter: Tissue Value: Aerial
  misc_feature: MA Experiment ID: 20000112 Result: Down-regulated in Transcription
  misc_feature: MA Experiment 20000112 PARAMETER Experiment Name: At_42deg_Heat_cDNA_P Parameter: Temperature (deg C) Value: 42 vs. 22
  misc_feature: MA Experiment 20000112 PARAMETER Experiment Name: At_42deg_Heat_cDNA_P Parameter: Timepoint (hr) Value: 2
  misc_feature: MA Experiment 20000112 PARAMETER Experiment Name: At_42deg_Heat_cDNA_P Parameter: Tissue Value: Aerial
  misc_feature: MA Experiment ID: 20000113 Result: Down-regulated in Transcription
  misc_feature: MA Experiment 20000113 PARAMETER Experiment Name: At_42deg_Heat_cDNA_P Parameter: Temperature (deg C) Value: 42 vs. 22
  misc_feature: MA Experiment 20000113 PARAMETER Experiment Name: At_42deg_Heat_cDNA_P Parameter: Timepoint (hr) Value: 8
  misc_feature: MA Experiment 20000113 PARAMETER Experiment Name: At_42deg_Heat_cDNA_P Parameter: Tissue Value: Aerial
  misc_feature: MA Experiment ID: 20000173 Result: Down-regulated in Transcription
  misc_feature: MA Experiment 20000173 PARAMETER Experiment Name: At_42deg_Heat_P Parameter: Age (day) Value: 14
  misc_feature: MA Experiment 20000173 PARAMETER Experiment Name: At_42deg_Heat_P Parameter: Organism Value: A. thaliana
  misc_feature: MA Experiment 20000173 PARAMETER Experiment Name: At_42deg_Heat_P Parameter: Plant Line Value: WS
  misc_feature: MA Experiment 20000173 PARAMETER Experiment Name: At_42deg_Heat_P Parameter: Temperature (deg C) Value: 42 vs. 22
  misc_feature: MA Experiment 20000173 PARAMETER Experiment Name: At_42deg_Heat_P Parameter: Timepoint (hr) Value: 6
  misc_feature: MA Experiment 20000173 PARAMETER Experiment Name: At_42deg_Heat_P Parameter: Tissue Value: Aerial
  misc_feature: MA Experiment ID: 20000224 Result: Up-regulated in Transcription
  misc_feature: MA Experiment ID: 20000573 Result: Down-regulated in Transcription
  misc_feature: MA Experiment 20000573 PARAMETER Experiment Name: At_100uM_ABA_Mutants__P Parameter: Organism Value: A. thaliana
  misc_feature: MA Experiment 20000573 PARAMETER Experiment Name: At_100uM_ABA_Mutants__P Parameter: Plant Line Value: CS22 vs. Ler wt
  misc_feature: MA Experiment 20000573 PARAMETER Experiment Name: At_100uM_ABA_Mutants__P Parameter: Timepoint (hr) Value: N/A
  misc_feature: MA Experiment 20000573 PARAMETER Experiment Name: At_100uM_ABA_Mutants__P Parameter: Tissue Value: Whole Plant
  misc_feature: MA Experiment 20000573 PARAMETER Experiment Name: At_100uM_ABA_Mutants__P Parameter: Treatment Value: None
  misc_feature: MA Experiment ID: 20000794 Result: Up-regulated in Transcription
  misc_feature: MA Experiment 20000794 PARAMETER Experiment Name: At_Petals_P Parameter: Age (day) Value: 23-25 days
  misc_feature: MA Experiment 20000794 PARAMETER Experiment Name: At_Petals_P Parameter: Plant Line Value: WS
  misc_feature: MA Experiment 20000794 PARAMETER Experiment Name: At_Petals_P Parameter: Tissue Value: Petals vs. Whole plant
  misc_feature: MA Experiment ID: 20001248 Result: Down-regulated in Transcription
  misc_feature: MA Experiment 20001248 PARAMETER Experiment Name: At_Far-red-induction_P Parameter: Age (day) Value: 7
  misc_feature: MA Experiment 20001248 PARAMETER Experiment Name: At_Far-red-induction_P Parameter: Light Value: Far-red vs. White
  misc_feature: MA Experiment 20001248 PARAMETER Experiment Name: At_Far-red-induction_P Parameter: Organism Value: A. thaliana
  misc_feature: MA Experiment 20001248 PARAMETER Experiment Name: At_Far-red-induction_P Parameter: Plant Line Value: Columbia
  misc_feature: MA Experiment 20001248 PARAMETER Experiment Name: At_Far-red-induction_P Parameter: Timepoint (hr) Value: 4
  misc_feature: MA Experiment 20001248 PARAMETER Experiment Name: At_Far-red-induction_P Parameter: Tissue Value: Whole Plant
  misc_feature: MA Experiment ID: 20001911 Result: Down-regulated in Transcription
  misc_feature: MA Experiment 20001911 PARAMETER Experiment Name: At_Drought_Reproduction_P Parameter: Age (day) Value: 40
  misc_feature: MA Experiment 20001911 PARAMETER Experiment Name: At_Drought_Reproduction_P Parameter: Organism Value: A. thaliana
  misc_feature: MA Experiment 20001911 PARAMETER Experiment Name: At_Drought_Reproduction_P Parameter: Plant Line Value: WS
  misc_feature: MA Experiment 20001911 PARAMETER Experiment Name: At_Drought_Reproduction_P Parameter: Timepoint (day) Value: 10
  misc_feature: MA Experiment 20001911 PARAMETER Experiment Name: At_Drought_Reproduction_P Parameter: Tissue Value: Flowers
  misc_feature: MA Experiment 20001911 PARAMETER Experiment Name: At_Drought_Reproduction_P Parameter: Treatment Value: Drought vs. No Drought
aagtataacaaagaacccaacttgtgaacctaaattgctgtgaaagagatcgttcttctctctgtttcacataaaaggaaaacataagaaaagaaaaaaaaaaatctttctctttcacaatcttaatttctgctcaccatcaaggcaagtttccttcttttgatcctcaacaatttccattgctactaaaaatatcttctttccaaaacaattcacgcatttacgtttttctcaatctttacatatatggtaaccaactcttattccattcctctgtaactcacacaaattcctgtccaaaaattagttttttcttttcatgtgatgtgagaatttgggttacgagaaagatgaagactattagtggattaggtattgggttaagtttaatgtttgggtttcttctattagcacttgttggagaagtctactatcttctaagatgtaagaagcacaagaagagagtcataagccaagagagtgaagaagagaaagaagaagaacaacaacaaaacggatacgctaaagaactaatccagctcttctgcttcaaaaaacctcaatctctgcagcaaaacaatggaggaagagaaggtgaagtctcaatgaatgaagatgggaatccagatttagaacttgggttgatgaaacacttgaatggaggagatctagggtttgaagcagagcttatgaagcttcataaccagaggtttctattcacaatcatggaagagacaaaagcagatttggaatctgaagatgggggtaaatcaagattaggttcaagatcaagaagaagaagcttgagtgatgttcctaatgactgtaatacccctggattcactccattggcttctcctaaaaagtcatcatctcctctggagtcttatccacaccatggattcaatcctctgtttgagtcagacggtgagcttgagtttaacaagtttttcaggtcctcttcttcacctccaccgaagtttaagttcatgagagatgctgaagagaagctaaggaagagattgattgaagaagccaaaagaagagaactctcgattgtaacagaaggttcgtttctcaagtttatgaatcctgcgatgaacagagagaagaaacagagtattcaagaatgtgatgaaacggtgtcgttttctccttcttcttcctcatcaggtacaacaattacaaatcttagaacgttagtggttgtttagtattagcatctctgtggctttactcttttaatttttatttttggttgaatttttgtttccaaaaatttcaattatattgtgtgaaaattctatctttcctttctctcattcttgttatttaggaatgatttcttctgtacgtatcaatctgaaattttttgcagatgcttgttttgttttcgtctaagaaatcttcttaagatatagaaatt

SEQ ID NO: 42567 - protein, 287 aa, Arabidopsis thaliana
  peptide (1)..(287): Ceres Seq. ID no. 13489572
  misc_feature (1)..(228): Homolog of NCBI NO: 15225496 NR Description: expressed protein [Arabidopsis thaliana]
  misc_feature (1)..(287): Homolog of NCBI NO: 21553514 NR Description: unknown [Arabidopsis thaliana]
  misc_feature (1)..(287): Homolog of NCBI NO: 15238384 NR Description: expressed protein [Arabidopsis thaliana]
MKTISGLGIGLSLMFGFLLLALVGEVYYLLRCKKHKKRVISQESEEEKEEEQQQNGYAKELIQLFCFKKPQSLQQNNGGREGEVSMNEDGNPDLELGLMKHLNGGDLGFEAELMKLHNQRFLFTIMEETKADLESEDGGKSRLGSRSRRRSLSDVPNDCNTPGFTPLASPKKSSSPLESYPHHGFNPLFESDGELEFNKFFRSSSSPPPKFKFMRDAEEKLRKRLIEEAKRRELSIVTEGSFLKFMNPAMNREKKQSIQECDETVSFSPSSSSSGTTITNLRTLVVV

SEQ ID NO: 42568 - protein, 274 aa, Arabidopsis thaliana
  peptide (1)..(274): Ceres Seq. ID no. 13489573
  misc_feature (1)..(215): Homolog of NCBI NO: 15225496 NR Description: expressed protein [Arabidopsis thaliana]
  misc_feature (1)..(274): Homolog of NCBI NO: 21553514 NR Description: unknown [Arabidopsis thaliana]
  misc_feature (1)..(274): Homolog of NCBI NO: 15238384 NR Description: expressed protein [Arabidopsis thaliana]
MFGFLLLALVGEVYYLLRCKKHKKRVISQESEEEKEEEQQQNGYAKELIQLFCFKKPQSLQQNNGGREGEVSMNEDGNPDLELGLMKHLNGGDLGFEAELMKLHNQRFLFTIMEETKADLESEDGGKSRLGSRSRRRSLSDVPNDCNTPGFTPLASPKKSSSPLESYPHHGFNPLFESDGELEFNKFFRSSSSPPPKFKFMRDAEEKLRKRLIEEAKRRELSIVTEGSFLKFMNPAMNREKKQSIQECDETVSFSPSSSSSGTTITNLRTLVVV

SEQ ID NO: 42569 - protein, 202 aa, Arabidopsis thaliana
  peptide (1)..(202): Ceres Seq. ID no. 13489574
  misc_feature (1)..(143): Homolog of NCBI NO: 15225496 NR Description: expressed protein [Arabidopsis thaliana]
  misc_feature (1)..(202): Homolog of NCBI NO: 21553514 NR Description: unknown [Arabidopsis thaliana]
  misc_feature (1)..(202): Homolog of NCBI NO: 15238384 NR Description: expressed protein [Arabidopsis thaliana]
MNEDGNPDLELGLMKHLNGGDLGFEAELMKLHNQRFLFTIMEETKADLESEDGGKSRLGSRSRRRSLSDVPNDCNTPGFTPLASPKKSSSPLESYPHHGFNPLFESDGELEFNKFFRSSSSPPPKFKFMRDAEEKLRKRLIEEAKRRELSIVTEGSFLKFMNPAMNREKKQSIQECDETVSFSPSSSSSGTTITNLRTLVVV

SEQ ID NO: 42570 - DNA, 1668 bp, Arabidopsis thaliana
  misc_feature (1)..(1668): Ceres Seq. ID no. 12331175
  misc_feature: MA Experiment ID: 108462 Result: Down-regulated in Transcription
  misc_feature: MA Experiment 108462 PARAMETER Experiment Name: At_Germinating_Seeds_cDNA_P Parameter: Age (day) Value: 2 vs. 0
  misc_feature: MA Experiment 108462 PARAMETER Experiment Name: At_Germinating_Seeds_cDNA_P Parameter: Tissue Value: Germinating Seeds
  misc_feature: MA Experiment ID: 20000171 Result: Down-regulated in Transcription
  misc_feature: MA Experiment 20000171 PARAMETER Experiment Name: At_42deg_Heat_P Parameter: Age (day) Value: 14
  misc_feature: MA Experiment 20000171 PARAMETER Experiment Name: At_42deg_Heat_P Parameter: Organism Value: A. thaliana
  misc_feature: MA Experiment 20000171 PARAMETER Experiment Name: At_42deg_Heat_P Parameter: Plant Line Value: WS
  misc_feature: MA Experiment 20000171 PARAMETER Experiment Name: At_42deg_Heat_P Parameter: Temperature (deg C) Value: 42 vs. 22
  misc_feature: MA Experiment 20000171 PARAMETER Experiment Name: At_42deg_Heat_P Parameter: Timepoint (hr) Value: 1
  misc_feature: MA Experiment 20000171 PARAMETER Experiment Name: At_42deg_Heat_P Parameter: Tissue Value: Aerial
  misc_feature: MA Experiment ID: 20000173 Result: Down-regulated in Transcription
  misc_feature: MA Experiment 20000173 PARAMETER Experiment Name: At_42deg_Heat_P Parameter: Age (day) Value: 14
  misc_feature: MA Experiment 20000173 PARAMETER Experiment Name: At_42deg_Heat_P Parameter: Organism Value: A. thaliana
  misc_feature: MA Experiment 20000173 PARAMETER Experiment Name: At_42deg_Heat_P Parameter: Plant Line Value: WS
  misc_feature: MA Experiment 20000173 PARAMETER Experiment Name: At_42deg_Heat_P Parameter: Temperature (deg C) Value: 42 vs. 22
  misc_feature: MA Experiment 20000173 PARAMETER Experiment Name: At_42deg_Heat_P Parameter: Timepoint (hr) Value: 6
  misc_feature: MA Experiment 20000173 PARAMETER Experiment Name: At_42deg_Heat_P Parameter: Tissue Value: Aerial
  misc_feature: MA Experiment ID: 20000179 Result: Down-regulated in Transcription
  misc_feature: MA Experiment 20000179 PARAMETER Experiment Name: At_Germinating_Seeds_P Parameter: Age (hr) Value: 6 vs. 0
  misc_feature: MA Experiment 20000179 PARAMETER Experiment Name: At_Germinating_Seeds_P Parameter: Tissue Value: Germinating Seeds
  misc_feature: MA Experiment ID: 20000180 Result: Down-regulated in Transcription
  misc_feature: MA Experiment 20000180 PARAMETER Experiment Name: At_Germinating_Seeds_P Parameter: Age (hr) Value: 24 vs. 0
  misc_feature: MA Experiment 20000180 PARAMETER Experiment Name: At_Germinating_Seeds_P Parameter: Tissue Value: Germinating Seeds
  misc_feature: MA Experiment ID: 20000184 Result: Down-regulated in Transcription
  misc_feature: MA Experiment 20000184 PARAMETER Experiment Name: At_Shoots__P Parameter: Age (day) Value: 7
  misc_feature: MA Experiment 20000184 PARAMETER Experiment Name: At_Shoots__P Parameter: Tissue Value: Shoots vs. Whole Plant
  misc_feature: MA Experiment ID: 20000437 Result: Down-regulated in Transcription
  misc_feature: MA Experiment 20000437 PARAMETER Experiment Name: At_Drought_P Parameter: Age (day) Value: 8
  misc_feature: MA Experiment 20000437 PARAMETER Experiment Name: At_Drought_P Parameter: Organism Value: A. thaliana
  misc_feature: MA Experiment 20000437 PARAMETER Experiment Name: At_Drought_P Parameter: Plant Line Value: WS
  misc_feature: MA Experiment 20000437 PARAMETER Experiment Name: At_Drought_P Parameter: Timepoint (hr) Value: 24
  misc_feature: MA Experiment 20000437 PARAMETER Experiment Name: At_Drought_P Parameter: Tissue Value: Whole Plant
  misc_feature: MA Experiment 20000437 PARAMETER Experiment Name: At_Drought_P Parameter: Treatment Value: Drought vs. No Drought
  misc_feature: MA Experiment ID: 20000495 Result: Down-regulated in Transcription
  misc_feature: MA Experiment 20000495 PARAMETER Experiment Name: At_Guard_Cells_P Parameter: Harvest Date Value: 8/2/2002
  misc_feature: MA Experiment 20000495 PARAMETER Experiment Name: At_Guard_Cells_P Parameter: Organism Value: A. thaliana
  misc_feature: MA Experiment 20000495 PARAMETER Experiment Name: At_Guard_Cells_P Parameter: Tissue Value: Guard Cells vs. Leaves
  misc_feature: MA Experiment ID: 20001558 Result: Up-regulated in Transcription
  misc_feature: MA Experiment 20001558 PARAMETER Experiment Name: At_Drought_Soil_Dry_P Parameter: Age (day) Value: 27
  misc_feature: MA Experiment 20001558 PARAMETER Experiment Name: At_Drought_Soil_Dry_P Parameter: Organism Value: A. thaliana
  misc_feature: MA Experiment 20001558 PARAMETER Experiment Name: At_Drought_Soil_Dry_P Parameter: Plant Line Value: WS
  misc_feature: MA Experiment 20001558 PARAMETER Experiment Name: At_Drought_Soil_Dry_P Parameter: Post Timepoint (hr) Value: 6
  misc_feature: MA Experiment 20001558 PARAMETER Experiment Name: At_Drought_Soil_Dry_P Parameter: Post-Treatment Value: Re-Water vs. No Drought
  misc_feature: MA Experiment 20001558 PARAMETER Experiment Name: At_Drought_Soil_Dry_P Parameter: Timepoint (day) Value: 13
  misc_feature: MA Experiment 20001558 PARAMETER Experiment Name: At_Drought_Soil_Dry_P Parameter: Treatment Value: Drought vs. No Drought
atctgcattgttctccgcctctctctctcaaactcttcagtttgcaaaacccttaagaaggtgtgaattagtaagtaatggggaagaagaagtttattgataagaaaaaggcggcgactttcgagttgtgtcctcgtgatacgtcagacccaagatacagtgatgcaccaggtggtgataagatcttcttacgagttgatcaaaaccctgttaacatcaatggtttcattgaagaagatgaagaagattttagagttagggtatcctgatgatggttataattacttggagcatttgagagagattaagaatactggtggtggttctaatttctatgtgaatcctaagtatgaggttgctcagttacctcgtgatgttaaggcttatgatgcgtctcgtgttaagatctctggtatggtgaatgaagaaggtaatgataataagttgatgtatagtgttgcgtccaagactgttaacgtcaaggtgcagaaagctattgatcctgaagttgctgcgttgcttgaaaacagtgatgggtctgagtttggttctgatgttgaggatttggaagaagattttgttgttcaagctaatcttactcaaaagggtgaatcttctggtgtgagcaatggagagctcgagttttctgtaagacgtgaggttagagaaagagaaagtgatgaacctgtggctgaaaacccgagagttcctcgtcaaattgatgagctatttgatcagctcgaactcaatgaatatggaagtgatagtgacggtgatggttacatagctgaagatggagaagaagaagaagaagaagacttcatggctcaagaagttcagaatcttattcatgggaaggcaaaagattatgagcttgaagaaaaatatatgaaccctgcggatatactgaagaacagtgactctgtcagagataaagaggaagtggacactgctgctcatgttatccgccgaactgtagaatatggtgaaaattttgataacgggaatgaagatgaatttgtagagctgactgaagaaagcagcgatgaaagcgagaagcatgattgtgaaaccatagtctcaacatactcgaatctcgataacctccctggtaaaatccttgctgcagagtcagctaggcagaagaagctgagtgaaacattagctaacgcattgagttcaaatggaagaatcattaatctccaagggagagagaggattcctgtcgagtttttacctggtaggagagctgaacaaaccgatgtcaaagcggaaatcccaaaagctgaaccgatcaagaggaagactcatggtcaagagtcgaaagaagagaagaaagagcggaaaaatgctgtaaaagccgaaaagcgagaagcaaggataattaagaaacagacaaagatgctgtattgcggtgaaacgcagcgtgctcaaagagctgttgctacctctggtccatcgtcgagacctctaaaataatatgttactaaggtaaaacaaaacaattctcagactgtttaaaaccagtttttccagccatttcgtgtaatatttgctgtttgtttttttctttttcatcaagatttgaaaatcttgaatcttgttttggatgtggacgttttgaatattatttattacttttactagtctaatttcgagaaagtgatg

SEQ ID NO: 42571 - protein, 438 aa, Arabidopsis thaliana
  peptide (1)..(438): Ceres Seq. ID no. 12331176
  misc_feature (214)..(425): Homolog of NCBI NO: 14042772 NR Description: unnamed protein product [Homo sapiens]
  misc_feature (36)..(425): Homolog of NCBI NO: 31324539 NR Description: RIKEN cDNA 2610020N02 gene [Mus musculus]
  misc_feature (36)..(425): Homolog of NCBI NO: 21361875 NR Description: hypothetical protein FLJ14909 [Homo sapiens]
  misc_feature (27)..(144): Homolog of NCBI NO: 34913326 NR Description: hypothetical protein~predicted by FGENESH etc.
  misc_feature (27)..(144): Homolog of NCBI NO: 33146615 NR Description: unknown protein [Oryza sativa (japonica
  misc_feature (27)..(434): Homolog of NCBI NO: 28927687 NR Description: unknown protein [Oryza sativa (japonica
  misc_feature (27)..(438): Homolog of NCBI NO: 15229649 NR Description: putative protein; protein id: At3g49990.1
MHQVVIRSSYELIKTLLTSMVSLKKMKKILELGYPDDGYNYLEHLREIKNTGGGSNFYVNPKYEVAQLPRDVKAYDASRVKISGMVNEEGNDNKLMYSVASKTVNVKVQKAIDPEVAALLENSDGSEFGSDVEDLEEDFVVQANLTQKGESSGVSNGELEFSVRREVRERESDEPVAENPRVPRQIDELFDQLELNEYGSDSDGDGYIAEDGEEEEEEDFMAQEVQNLIHGKAKDYELEEKYMNPADILKNSDSVRDKEEVDTAAHVIRRTVEYGENFDNGNEDEFVELTEESSDESEKHDCETIVSTYSNLDNLPGKILAAESARQKKLSETLANALSSNGRIINLQGRERIPVEFLPGRRAEQTDVKAEIPKAEPIKRKTHGQESKEEKKERKNAVKAEKREARIIKKQTKMLYCGETQRAQRAVATSGPSSRPLK

SEQ ID NO: 42572 - protein, 419 aa, Arabidopsis thaliana
  peptide (1)..(419): Ceres Seq. ID no. 12331177
  misc_feature (195)..(406): Homolog of NCBI NO: 14042772 NR Description: unnamed protein product [Homo sapiens]
  misc_feature (17)..(406): Homolog of NCBI NO: 31324539 NR Description: RIKEN cDNA 2610020N02 gene [Mus musculus]
  misc_feature (17)..(406): Homolog of NCBI NO: 21361875 NR Description: hypothetical protein FLJ14909 [Homo sapiens]
  misc_feature (8)..(125): Homolog of NCBI NO: 34913326 NR Description: hypothetical protein~predicted by FGENESH etc.
  misc_feature (8)..(125): Homolog of NCBI NO: 33146615 NR Description: unknown protein [Oryza sativa (japonica
  misc_feature (8)..(415): Homolog of NCBI NO: 28927687 NR Description: unknown protein [Oryza sativa (japonica
  misc_feature (8)..(419): Homolog of NCBI NO: 15229649 NR Description: putative protein; protein id: At3g49990.1
MVSLKKMKKILELGYPDDGYNYLEHLREIKNTGGGSNFYVNPKYEVAQLPRDVKAYDASRVKISGMVNEEGNDNKLMYSVASKTVNVKVQKAIDPEVAALLENSDGSEFGSDVEDLEEDFVVQANLTQKGESSGVSNGELEFSVRREVRERESDEPVAENPRVPRQIDELFDQLELNEYGSDSDGDGYIAEDGEEEEEEDFMAQEVQNLIHGKAKDYELEEKYMNPADILKNSDSVRDKEEVDTAAHVIRRTVEYGENFDNGNEDEFVELTEESSDESEKHDCETIVSTYSNLDNLPGKILAAESARQKKLSETLANALSSNGRIINLQGRERIPVEFLPGRRAEQTDVKAEIPKAEPIKRKTHGQESKEEKKERKNAVKAEKREARIIKKQTKMLYCGETQRAQRAVATSGPSSRPLK

SEQ ID NO: 42573 - protein, 413 aa, Arabidopsis thaliana
  peptide (1)..(413): Ceres Seq. ID no. 12331178
  misc_feature (189)..(400): Homolog of NCBI NO: 14042772 NR Description: unnamed protein product [Homo sapiens]
  misc_feature (11)..(400): Homolog of NCBI NO: 31324539 NR Description: RIKEN cDNA 2610020N02 gene [Mus musculus]
  misc_feature (11)..(400): Homolog of NCBI NO: 21361875 NR Description: hypothetical protein FLJ14909 [Homo sapiens]
  misc_feature (2)..(119): Homolog of NCBI NO: 34913326 NR Description: hypothetical protein~predicted by FGENESH etc.
  misc_feature (2)..(119): Homolog of NCBI NO: 33146615 NR Description: unknown protein [Oryza sativa (japonica
  misc_feature (2)..(409): Homolog of NCBI NO: 28927687 NR Description: unknown protein [Oryza sativa (japonica
  misc_feature (2)..(413): Homolog of NCBI NO: 15229649 NR Description: putative protein; protein id: At3g49990.1
MKKILELGYPDDGYNYLEHLREIKNTGGGSNFYVNPKYEVAQLPRDVKAYDASRVKISGMVNEEGNDNKLMYSVASKTVNVKVQKAIDPEVAALLENSDGSEFGSDVEDLEEDFVVQANLTQKGESSGVSNGELEFSVRREVRERESDEPVAENPRVPRQIDELFDQLELNEYGSDSDGDGYIAEDGEEEEEEDFMAQEVQNLIHGKAKDYELEEKYMNPADILKNSDSVRDKEEVDTAAHVIRRTVEYGENFDNGNEDEFVELTEESSDESEKHDCETIVSTYSNLDNLPGKILAAESARQKKLSETLANALSSNGRIINLQGRERIPVEFLPGRRAEQTDVKAEIPKAEPIKRKTHGQESKEEKKERKNAVKAEKREARIIKKQTKMLYCGETQRAQRAVATSGPSSRPLK

SEQ ID NO: 42574 - DNA, 1275 bp, Arabidopsis thaliana
  misc_feature (1)..(1275): Ceres Seq. ID no. 12338095
  misc_feature: MA Experiment ID: 20000179 Result: Up-regulated in Transcription
  misc_feature: MA Experiment 20000179 PARAMETER Experiment Name: At_Germinating_Seeds_P Parameter: Age (hr) Value: 6 vs. 0
  misc_feature: MA Experiment 20000179 PARAMETER Experiment Name: At_Germinating_Seeds_P Parameter: Tissue Value: Germinating Seeds
  misc_feature: MA Experiment ID: 20000180 Result: Up-regulated in Transcription
  misc_feature: MA Experiment 20000180 PARAMETER Experiment Name: At_Germinating_Seeds_P Parameter: Age (hr) Value: 24 vs. 0
  misc_feature: MA Experiment 20000180 PARAMETER Experiment Name: At_Germinating_Seeds_P Parameter: Tissue Value: Germinating Seeds
  misc_feature: MA Experiment ID: 20000185 Result: Down-regulated in Transcription
  misc_feature: MA Experiment 20000185 PARAMETER Experiment Name: At_Roots__P Parameter: Age (day) Value: 7 vs. 21
  misc_feature: MA Experiment 20000185 PARAMETER Experiment Name: At_Roots__P Parameter: Organism Value: A. thaliana
  misc_feature: MA Experiment 20000185 PARAMETER Experiment Name: At_Roots__P Parameter: Tissue Value: Roots vs. Whole Plant
  misc_feature: MA Experiment ID: 20000214 Result: Up-regulated in Transcription
  misc_feature: MA Experiment 20000214 PARAMETER Experiment Name: At_4deg_Cold_P Parameter: Timepoint (hr) Value: 6
  misc_feature: MA Experiment ID: 20000264 Result: Down-regulated in Transcription
  misc_feature: MA Experiment 20000264 PARAMETER Experiment Name: At_Open_Flower_P Parameter: Age (day) Value: 21
  misc_feature: MA Experiment 20000264 PARAMETER Experiment Name: At_Open_Flower_P Parameter: Plant Line Value: WS
  misc_feature: MA Experiment 20000264 PARAMETER Experiment Name: At_Open_Flower_P Parameter: Tissue Value: Open Flower vs. Whole Plant
  misc_feature: MA Experiment ID: 20000269 Result: Down-regulated in Transcription
  misc_feature: MA Experiment 20000269 PARAMETER Experiment Name: At_1mM_KNO3_L-vs-H_Roots_P Parameter: Age (day) Value: 7,10,12
  misc_feature: MA Experiment 20000269 PARAMETER Experiment Name: At_1mM_KNO3_L-vs-H_Roots_P Parameter: Organism Value: A. thaliana
  misc_feature: MA Experiment 20000269 PARAMETER Experiment Name: At_1mM_KNO3_L-vs-H_Roots_P Parameter: Plant Line Value: WS
  misc_feature: MA Experiment 20000269 PARAMETER Experiment Name: At_1mM_KNO3_L-vs-H_Roots_P Parameter: Timepoint (day) Value: 7,10,12
  misc_feature: MA Experiment 20000269 PARAMETER Experiment Name: At_1mM_KNO3_L-vs-H_Roots_P Parameter: Tissue Value: Roots
  misc_feature: MA Experiment 20000269 PARAMETER Experiment Name: At_1mM_KNO3_L-vs-H_Roots_P Parameter: Treatment Value: 1mM KNO3 vs. 50mM KNO3
  misc_feature: MA Experiment ID: 20000286 Result: Down-regulated in Transcription
  misc_feature: MA Experiment 20000286 PARAMETER Experiment Name: At_Open_Flower_P Parameter: Age (day) Value: 21
  misc_feature: MA Experiment 20000286 PARAMETER Experiment Name: At_Open_Flower_P Parameter: Plant Line Value: WS
  misc_feature: MA Experiment 20000286 PARAMETER Experiment Name: At_Open_Flower_P Parameter: Tissue Value: Half Open vs. Whole Plant
  misc_feature: MA Experiment ID: 20000437 Result: Down-regulated in Transcription
  misc_feature: MA Experiment 20000437 PARAMETER Experiment Name: At_Drought_P Parameter: Age (day) Value: 8
  misc_feature: MA Experiment 20000437 PARAMETER Experiment Name: At_Drought_P Parameter: Organism Value: A. thaliana
  misc_feature: MA Experiment 20000437 PARAMETER Experiment Name: At_Drought_P Parameter: Plant Line Value: WS
  misc_feature: MA Experiment 20000437 PARAMETER Experiment Name: At_Drought_P Parameter: Timepoint (hr) Value: 24
  misc_feature: MA Experiment 20000437 PARAMETER Experiment Name: At_Drought_P Parameter: Tissue Value: Whole Plant
  misc_feature: MA Experiment 20000437 PARAMETER Experiment Name: At_Drought_P Parameter: Treatment Value: Drought vs. No Drought
  misc_feature: MA Experiment ID: 20000439 Result: Down-regulated in Transcription
  misc_feature: MA Experiment 20000439 PARAMETER Experiment Name: At_Roots__P Parameter: Age (day) Value: 14 vs. 21
  misc_feature: MA Experiment 20000439 PARAMETER Experiment Name: At_Roots__P Parameter: Organism Value: A. thaliana
  misc_feature: MA Experiment 20000439 PARAMETER Experiment Name: At_Roots__P Parameter: Tissue Value: Roots vs. Whole Plant
  misc_feature: MA Experiment ID: 20000794 Result: Down-regulated in Transcription
  misc_feature: MA Experiment 20000794 PARAMETER Experiment Name: At_Petals_P Parameter: Age (day) Value: 23-25 days
  misc_feature: MA Experiment 20000794 PARAMETER Experiment Name: At_Petals_P Parameter: Plant Line Value: WS
  misc_feature: MA Experiment 20000794 PARAMETER Experiment Name: At_Petals_P Parameter: Tissue Value: Petals vs. Whole plant
  misc_feature: MA Experiment ID: 20001450 Result: Down-regulated in Transcription
  misc_feature: MA Experiment 20001450 PARAMETER Experiment Name: At_Far-red-induction_P Parameter: Age (day) Value: 7
  misc_feature: MA Experiment 20001450 PARAMETER Experiment Name: At_Far-red-induction_P Parameter: Light Value: Far-red vs. White
  misc_feature: MA Experiment 20001450 PARAMETER Experiment Name: At_Far-red-induction_P Parameter: Organism Value: A. thaliana
  misc_feature: MA Experiment 20001450 PARAMETER Experiment Name: At_Far-red-induction_P Parameter: Plant Line Value: Columbia
  misc_feature: MA Experiment 20001450 PARAMETER Experiment Name: At_Far-red-induction_P Parameter: Timepoint (hr) Value: 8
  misc_feature: MA Experiment 20001450 PARAMETER Experiment Name: At_Far-red-induction_P Parameter: Tissue Value: Whole Plant
  misc_feature: MA Experiment ID: 20001557 Result: Down-regulated in Transcription
  misc_feature: MA Experiment 20001557 PARAMETER Experiment Name: At_Drought_Soil_Dry_P Parameter: Age (day) Value: 27
  misc_feature: MA Experiment 20001557 PARAMETER Experiment Name: At_Drought_Soil_Dry_P Parameter: Organism Value: A. thaliana
  misc_feature: MA Experiment 20001557 PARAMETER Experiment Name: At_Drought_Soil_Dry_P Parameter: Plant Line Value: WS
  misc_feature: MA Experiment 20001557 PARAMETER Experiment Name: At_Drought_Soil_Dry_P Parameter: Post Timepoint (hr) Value: 3
  misc_feature: MA Experiment 20001557 PARAMETER Experiment Name: At_Drought_Soil_Dry_P Parameter: Post-Treatment Value: Re-Water vs. No Drought
  misc_feature: MA Experiment 20001557 PARAMETER Experiment Name: At_Drought_Soil_Dry_P Parameter: Timepoint (day) Value: 13
  misc_feature: MA Experiment 20001557 PARAMETER Experiment Name: At_Drought_Soil_Dry_P Parameter: Treatment Value: Drought vs. No Drought
aatctttttttttttgcttattatttttttgactttgatctcccatcagttcatcttcttcttcttcttctgatcaaccatggctgctgctataagtgctgcagtctctttaccttcctccaagtcatcctctctcctcaccaaaatctcctctgtatcccctcaaaggattttcctcaagaagagcacagtgtgttacagaagagttgtgtcagtgaaggctcaggtgacaacagatactaccgaggcaccaccagttaaagtagtcaaggagtctaagaaacaggaagaagggattgttgtcaacaaattcaaacctaagaacccttacactggtcgctgccttttgaacaccaagatcaccggtgatgacgctcccggtgagacttggcacattgtcttcaccaccgaaggtgaggttccgtatagagaaggacaatcgataggagtgattccagagggaatagacaagaacgggaagccgcacaagctcaggctttactctatcgcgagtagtgccattggtgactttggagactccaagaccgtttctctctgtgtcaagagactagtttacacaaatgatggcggagagattgttaagggggtctgctccaacttcttgtgtgacttgaagccgggtgatgaagctaagatcactggacctgttggcaaggaaatgcttatgccaaaagaccccaatgccaccatcatcatgcttggaacaggaactggaatagctccattcagatcatttttgtggaaaatgttctttgaggagcacgaggactacaagttcaatggtttggcgtggcttttcttgggtgtacccagaagcagctcactgctatacaaggaggagtttgagaagatgaaggagaagaacccagacaacttcaggctggactttgcggtgagcagagagcagacgaacgagaagggagagaaaatgtacattcagacaagaatggcagagtatgcagaaagagctgtgggagttgctgaagaaagacaacacctttgtttacatgtgtggtcttaagggtatggagaagggtatcgatgacattatggtctcgcttgctgctaaagatgggatcgattggttggagtacaagaagcaattgaagaggagtgaacagtggaatgttgaagtctactaaggaagcttctgagggagtaattatataatgtagataaaaagcttcagatgcattgtgaaatcttcatatctgcttcttttttctttctcaaggattttcaatcaaaacatcc

SEQ ID NO: 42575 - protein, 320 aa, Arabidopsis thaliana
  peptide (1)..(320): Ceres Seq. ID no. 12338096
  misc_feature (208)..(302): Pfam Name: Oxidoreductase NAD-binding domain Pfam Description: Oxidoreductase NAD-binding domain
  misc_feature (258)..(301): Homolog of NCBI NO: 25285862 NR Description: hypothetical protein T20H2.20 - Arabidopsis
  misc_feature (1)..(239): Homolog of NCBI NO: 25285862 NR Description: hypothetical protein T20H2.20 - Arabidopsis
  misc_feature (1)..(302): Homolog of NCBI NO: 20302471 NR Description: ferredoxin-NADP(H) oxidoreductase [Triticum
  misc_feature (46)..(302): Homolog of NCBI NO: 13096165 NR Description: Chain A, Crystal Structure Of The Complex Between
  misc_feature (1)..(302): Homolog of NCBI NO: 6561889 NR Description: ferredoxin [Zea mays]
  misc_feature (1)..(302): Homolog of NCBI NO: 20302473 NR Description: ferredoxin-NADP(H) oxidoreductase [Triticum
  misc_feature (1)..(301): Homolog of NCBI NO: 15223753 NR Description: ferredoxin--NADP reductase precursor, putative
  misc_feature (1)..(302): Homolog of NCBI NO: 6561891 NR Description: ferredoxin [Zea mays]
  misc_feature (1)..(302): Homolog of NCBI NO: 5730139 NR Description: ferredoxin-NADP+ reductase [Arabidopsis thaliana]
  misc_feature (1)..(302): Homolog of NCBI NO: 15239282 NR Description: ferredoxin-NADP+ reductase
MAAAISAAVSLPSSKSSSLLTKISSVSPQRIFLKKSTVCYRRVVSVKAQVTTDTTEAPPVKVVKESKKQEEGIVVNKFKPKNPYTGRCLLNTKITGDDAPGETWHIVFTTEGEVPYREGQSIGVIPEGIDKNGKPHKLRLYSIASSAIGDFGDSKTVSLCVKRLVYTNDGGEIVKGVCSNFLCDLKPGDEAKITGPVGKEMLMPKDPNATIIMLGTGTGIAPFRSFLWKMFFEEHEDYKFNGLAWLFLGVPRSSSLLYKEEFEKMKEKNPDNFRLDFAVSREQTNEKGEKMYIQTRMAEYAERAVGVAEERQHLCLHVWS

SEQ ID NO: 42576 - DNA, 1925 bp, Arabidopsis thaliana
  misc_feature (1)..(1925): Ceres Seq. ID no. 12336250
  misc_feature: MA Experiment ID: 108433 Result: Down-regulated in Transcription
  misc_feature: MA Experiment 108433 PARAMETER Experiment Name: At_rhl_Mutant2_cDNA_P Parameter: Age (day) Value: 7
  misc_feature: MA Experiment 108433 PARAMETER Experiment Name: At_rhl_Mutant2_cDNA_P Parameter: Organism Value: A. thaliana
  misc_feature: MA Experiment 108433 PARAMETER Experiment Name: At_rhl_Mutant2_cDNA_P Parameter: Plant Line Value: rhl Mutant vs. wt landsburg
  misc_feature: MA Experiment 108433 PARAMETER Experiment Name: At_rhl_Mutant2_cDNA_P Parameter: Tissue Value: Roots
  misc_feature: MA Experiment ID: 108461 Result: Up-regulated in Transcription
  misc_feature: MA Experiment 108461 PARAMETER Experiment Name: At_Germinating_Seeds_cDNA_P Parameter: Age (day) Value: 1 vs. 0
  misc_feature: MA Experiment 108461 PARAMETER Experiment Name: At_Germinating_Seeds_cDNA_P Parameter: Tissue Value: Germinating Seeds
  misc_feature: MA Experiment ID: 108569 Result: Up-regulated in Transcription
  misc_feature: MA Experiment 108569 PARAMETER Experiment Name: At_0.001%_MeJA__cDNA_P Parameter: Timepoint (hr) Value: 6
  misc_feature: MA Experiment 108569 PARAMETER Experiment Name: At_0.001%_MeJA__cDNA_P Parameter: Tissue Value: Aerial
  misc_feature: MA Experiment 108569 PARAMETER Experiment Name: At_0.001%_MeJA__cDNA_P Parameter: Treatment Value: 0.001% MeJA vs. No Treatment
  misc_feature: MA Experiment ID: 108573 Result: Up-regulated in Transcription
  misc_feature: MA Experiment 108573 PARAMETER Experiment Name: At_Drought_cDNA_P Parameter: Timepoint (hr) Value: 6
  misc_feature: MA Experiment 108573 PARAMETER Experiment Name: At_Drought_cDNA_P Parameter: Tissue Value: Aerial
  misc_feature: MA Experiment 108573 PARAMETER Experiment Name: At_Drought_cDNA_P Parameter: Treatment Value: Drought vs. No Drought
  misc_feature: MA Experiment ID: 108576 Result: Down-regulated in Transcription
  misc_feature: MA Experiment 108576 PARAMETER Experiment Name: At_42deg_Heat_cDNA_P Parameter: Temperature (deg C) Value: 42 vs. 22
  misc_feature: MA Experiment 108576 PARAMETER Experiment Name: At_42deg_Heat_cDNA_P Parameter: Timepoint (hr) Value: 1
  misc_feature: MA Experiment 108576 PARAMETER Experiment Name: At_42deg_Heat_cDNA_P Parameter: Tissue Value: Aerial
  misc_feature: MA Experiment ID: 108668 Result: Up-regulated in Transcription
  misc_feature: MA Experiment 108668 PARAMETER Experiment Name: At_2mM_SA_cDNA_P Parameter: Plant Line Value: WS
  misc_feature: MA Experiment 108668 PARAMETER Experiment Name: At_2mM_SA_cDNA_P Parameter: Timepoint (hr) Value: 6
  misc_feature: MA Experiment 108668 PARAMETER Experiment Name: At_2mM_SA_cDNA_P Parameter: Treatment Value: 2mM SA vs. No Treatment
  misc_feature: MA Experiment ID: 20000111 Result: Down-regulated in Transcription
  misc_feature: MA Experiment 20000111 PARAMETER Experiment Name: At_42deg_Heat_cDNA_P Parameter: Temperature (deg C) Value: 42 vs. 22
  misc_feature: MA Experiment 20000111 PARAMETER Experiment Name: At_42deg_Heat_cDNA_P Parameter: Timepoint (hr) Value: 6
  misc_feature: MA Experiment 20000111 PARAMETER Experiment Name: At_42deg_Heat_cDNA_P Parameter: Tissue Value: Aerial
  misc_feature: MA Experiment ID: 20000113 Result: Down-regulated in Transcription
  misc_feature: MA Experiment 20000113 PARAMETER Experiment Name: At_42deg_Heat_cDNA_P Parameter: Temperature (deg C) Value: 42 vs. 22
  misc_feature: MA Experiment 20000113 PARAMETER Experiment Name: At_42deg_Heat_cDNA_P Parameter: Timepoint (hr) Value: 8
  misc_feature: MA Experiment 20000113 PARAMETER Experiment Name: At_42deg_Heat_cDNA_P Parameter: Tissue Value: Aerial
  misc_feature: MA Experiment ID: 20000182 Result: Up-regulated in Transcription
  misc_feature: MA Experiment 20000182 PARAMETER Experiment Name: At_2mM_SA_P Parameter: Age (day) Value: 14
  misc_feature: MA Experiment 20000182 PARAMETER Experiment Name: At_2mM_SA_P Parameter: Organism Value: A. thaliana
  misc_feature: MA Experiment 20000182 PARAMETER Experiment Name: At_2mM_SA_P Parameter: Plant Line Value: WS
  misc_feature: MA Experiment 20000182 PARAMETER Experiment Name: At_2mM_SA_P Parameter: Timepoint (hr) Value: 6
  misc_feature: MA Experiment 20000182 PARAMETER Experiment Name: At_2mM_SA_P Parameter: Tissue Value: Aerial
  misc_feature: MA Experiment 20000182 PARAMETER Experiment Name: At_2mM_SA_P Parameter: Treatment Value: 2mM SA vs. No Treatment
  misc_feature: MA Experiment ID: 20001757 Result: Down-regulated in Transcription
  misc_feature: MA Experiment 20001757 PARAMETER Experiment Name: At_50mM_NH4NO3_L-to-H_P Parameter: Timepoint (hr) Value: 6
  misc_feature: MA Experiment 20001757 PARAMETER Experiment Name: At_50mM_NH4NO3_L-to-H_P Parameter: Tissue Value: Leaf
  misc_feature: MA Experiment 20001757 PARAMETER Experiment Name: At_50mM_NH4NO3_L-to-H_P Parameter: Treatment Value: 50mM NH4NO3 vs 100mM Mannitol
atatactttctctgtttacattctcgtttccgaggagaaaagtctcgatcttctggatctggggtttggtttggtttggggttgactcggttttgactcgggacaagtcgtctcgtgagatggatgtctctcgtttattagtatctctttgagagtctgtctttctgggttcaatagattcttatagtttcgcttagaaacacgcacaaaaagatgtcgttgaagcatcatcacagaggattagagctctctgcttcgaagagttttgtctcaaagaaatggactttatttctctgtatcggtttcttctgcgcaggaattctcttctccgacagaatgtggccagagcctgaatccaatgttgtatcaagggacacagtagcatcagatgaacggctgcggttagagtctgaggactgtgattcatcaaaaaagggtttaaagcgtgaatcgaaagacatccttggagatgtttacaagagtccagatgcaattcaaacgcttgataaaacgatttcaaagctggaaacagaactggccgatgcaagagctgcgcaagaatctatcatgaatggttcaccagtttctgatgactttaagctccctgaaactgtcactaaaagaaagtatctgatggttgttggtgttaatactgcgtttagcagcagaaagcgcagggattcagtccgtgctacttggatgcctcccggtgaggagagaaagaagctcgaggaagagaaagggatcgtgatgcggtttgtgataggccatagttctactcccggtggaattcttgatagagcgattcaggctgaagaaagtaaacatggagacttcttgaggctggatcatgttgaaggttatctcgagctgtcagcaaagactaaaacttactttaccacggcttttgcaatgtgggatgcagacttctacgtcaaagtcgatgatgatgtgcatgtaaatatagccacgcttggagcagaattagcaagataccggatgaagccccgagtgtacattggttgcatgaaatctggacctgttcttgctcagaaaggagtgagatatcatgaacccgaatactggaaatttggagaagagggtaacaaatacttccgccatgccacaggtcagctctatgcaatatccagggagttggcgtcttacatatcgataaaccaaaacgtacttcacaaatatgtgaatgaagatgtctctttaggatcatggtttcttggattagatgtggagcatgtagatgaccgtaggctatgttgtggtacaacagattgtgagtggaaggcgcaggcgggcaacatctgtgttgcctcgttcgattggagctgcagtgggatttgtagatcagcggataggatgaaggatgttcatcgtaggtgtggagaaggtgaaaaggcccttctggctgcatctttctgaacacaataactaaagaaacacattgaggaagaagagtacagagacaaatccgctcgacagtctacacttggtagtatagacacacagtcaaactctctctatatatgtatgtatgtatgtatgtatgtatgtatcttgtgaactgagatgagaagggtgctttttgccctcctttcttgtttctttatgcttttctcaattctctgaaggtctggagttctttgcacacagaaaatgcagattttagctgcaaaggcggactccatgagtgcaccttcagagtcatttcattgaggcgttttctctgccttttgagcttttcttcttcatttctttttggattttgcctattttgttcattttttcctttgccatgattgtggtgaaacatgggttgtttatgtgtgtacttgaaacacaaaactagtcaataaagattagaccatatgagaagaaattcagaagcttaataaaaacttttcttggcg

SEQ ID NO: 42577 - protein, 407 aa, Arabidopsis thaliana
  peptide (1)..(407): Ceres Seq. ID no. 12336251
  misc_feature (153)..(351): Pfam Name: Galactosyltransferase Pfam Description: Galactosyltransferase
  misc_feature (15)..(402): Homolog of NCBI NO: 30699558 NR Description: Avr9 elicitor response protein -related
  misc_feature (1)..(129): Homolog of NCBI NO: 15221085 NR Description: Avr9 elicitor response-like protein; protein id:
  misc_feature (92)..(402): Homolog of NCBI NO: 15221085 NR Description: Avr9 elicitor response-like protein; protein id:
  misc_feature (14)..(407): Homolog of NCBI NO: 15223337 NR Description: Avr9 elicitor response protein, putative; protein
  misc_feature (19)..(407): Homolog of NCBI NO: 4138265 NR Description: Avr9 elicitor response protein [Nicotiana tabacum]
  misc_feature (11)..(407): Homolog of NCBI NO: 15225684 NR Description: unknown protein; protein id: At2g32430.1
  misc_feature (1)..(281): Homolog of NCBI NO: 30687425 NR Description: galactosyltransferase family [Arabidopsis
  misc_feature (14)..(407): Homolog of NCBI NO: 15220440 NR Description: putative AVR9 elicitor response protein
  misc_feature (1)..(407): Homolog of NCBI NO: 7485336 NR Description: hypothetical protein F10M23.280 - Arabidopsis
  misc_feature (1)..(407): Homolog of NCBI NO: 18416895 NR Description: Avr9 elicitor response like protein
MSLKHHHRGLELSASKSFVSKKWTLFLCIGFFCAGILFSDRMWPEPESNVVSRDTVASDERLRLESEDCDSSKKGLKRESKDILGDVYKSPDAIQTLDKTISKLETELADARAAQESIMNGSPVSDDFKLPETVTKRKYLMVVGVNTAFSSRKRRDSVRATWMPPGEERKKLEEEKGIVMRFVIGHSSTPGGILDRAIQAEESKHGDFLRLDHVEGYLELSAKTKTYFTTAFAMWDADFYVKVDDDVHVNIATLGAELARYRMKPRVYIGCMKSGPVLAQKGVRYHEPEYWKFGEEGNKYFRHATGQLYAISRELASYISINQNVLHKYVNEDVSLGSWFLGLDVEHVDDRRLCCGTTDCEWKAQAGNICVASFDWSCSGICRSADRMKDVHRRCGEGEKALLAASF

SEQ ID NO: 42578 - protein, 366 aa, Arabidopsis thaliana
  peptide (1)..(366): Ceres Seq. ID no. 12336252
  misc_feature (112)..(310): Pfam Name: Galactosyltransferase Pfam Description: Galactosyltransferase
  misc_feature (1)..(361): Homolog of NCBI NO: 30699558 NR Description: Avr9 elicitor response protein -related
  misc_feature (1)..(88): Homolog of NCBI NO: 15221085 NR Description: Avr9 elicitor response-like protein; protein id:
  misc_feature (51)..(361): Homolog of NCBI NO: 15221085 NR Description: Avr9 elicitor response-like protein; protein id:
  misc_feature (1)..(366): Homolog of NCBI NO: 15223337 NR Description: Avr9 elicitor response protein, putative; protein
  misc_feature (1)..(366): Homolog of NCBI NO: 4138265 NR Description: Avr9 elicitor response protein [Nicotiana tabacum]
  misc_feature (1)..(366): Homolog of NCBI NO: 15225684 NR Description: unknown protein; protein id: At2g32430.1
  misc_feature (1)..(240): Homolog of NCBI NO: 30687425 NR Description: galactosyltransferase family [Arabidopsis
  misc_feature (1)..(366): Homolog of NCBI NO: 15220440 NR Description: putative AVR9 elicitor response protein
  misc_feature (1)..(366): Homolog of NCBI NO: 7485336 NR Description: hypothetical protein F10M23.280 - Arabidopsis
  misc_feature (1)..(366): Homolog of NCBI NO: 18416895 NR Description: Avr9 elicitor response like protein
MWPEPESNVVSRDTVASDERLRLESEDCDSSKKGLKRESKDILGDVYKSPDAIQTLDKTISKLETELADARAAQESIMNGSPVSDDFKLPETVTKRKYLMVVGVNTAFSSRKRRDSVRATWMPPGEERKKLEEEKGIVMRFVIGHSSTPGGILDRAIQAEESKHGDFLRLDHVEGYLELSAKTKTYFTTAFAMWDADFYVKVDDDVHVNIATLGAELARYRMKPRVYIGCMKSGPVLAQKGVRYHEPEYWKFGEEGNKYFRHATGQLYAISRELASYISINQNVLHKYVNEDVSLGSWFLGLDVEHVDDRRLCCGTTDCEWKAQAGNICVASFDWSCSGICRSADRMKDVHRRCGEGEKALLAASF

SEQ ID NO: 42579 - protein, 289 aa, Arabidopsis thaliana
  peptide (1)..(289): Ceres Seq. ID no. 12336253
  misc_feature (35)..(233): Pfam Name: Galactosyltransferase Pfam Description: Galactosyltransferase
  misc_feature (1)..(284): Homolog of NCBI NO: 30699558 NR Description: Avr9 elicitor response protein -related
  misc_feature (1)..(11): Homolog of NCBI NO: 15221085 NR Description: Avr9 elicitor response-like protein; protein id:
  misc_feature (1)..(284): Homolog of NCBI NO: 15221085 NR Description: Avr9 elicitor response-like protein; protein id:
  misc_feature (1)..(289): Homolog of NCBI NO: 15223337 NR Description: Avr9 elicitor response protein, putative; protein
  misc_feature (1)..(289): Homolog of NCBI NO: 4138265 NR Description: Avr9 elicitor response protein [Nicotiana tabacum]
  misc_feature (1)..(289): Homolog of NCBI NO: 15225684 NR Description: unknown protein; protein id: At2g32430.1
  misc_feature (1)..(163): Homolog of NCBI NO: 30687425 NR Description: galactosyltransferase family [Arabidopsis
  misc_feature (1)..(289): Homolog of NCBI NO: 15220440 NR Description: putative AVR9 elicitor response protein
  misc_feature (1)..(289): Homolog of NCBI NO: 7485336 NR Description: hypothetical protein F10M23.280 - Arabidopsis
  misc_feature (1)..(289): Homolog of NCBI NO: 18416895 NR Description: Avr9 elicitor response like protein
MNGSPVSDDFKLPETVTKRKYLMVVGVNTAFSSRKRRDSVRATWMPPGEERKKLEEEKGIVMRFVIGHSSTPGGILDRAIQAEESKHGDFLRLDHVEGYLELSAKTKTYFTTAFAMWDADFYVKVDDDVHVNIATLGAELARYRMKPRVYIGCMKSGPVLAQKGVRYHEPEYWKFGEEGNKYFRHATGQLYAISRELASYISINQNVLHKYVNEDVSLGSWFLGLDVEHVDDRRLCCGTTDCEWKAQAGNICVASFDWSCSGICRSADRMKDVHRRCGEGEKALLAASF

SEQ ID NO: 42580 - DNA, 920 bp, Arabidopsis thaliana
  misc_feature (1)..(920): Ceres Seq. ID no. 12339008
  misc_feature: MA Experiment ID: 108435 Result: Down-regulated in Transcription
  misc_feature: MA Experiment 108435 PARAMETER Experiment Name: At_stm_Mutants_cDNA_P Parameter: Plant Line Value: wt Landsburg vs stm
  misc_feature: MA Experiment 108435 PARAMETER Experiment Name: At_stm_Mutants_cDNA_P Parameter: Tissue Value: Shoot Apical Meristem Region
  misc_feature: MA Experiment ID: 108461 Result: Up-regulated in Transcription
  misc_feature: MA Experiment 108461 PARAMETER Experiment Name: At_Germinating_Seeds_cDNA_P Parameter: Age (day) Value: 1 vs. 0
  misc_feature: MA Experiment 108461 PARAMETER Experiment Name: At_Germinating_Seeds_cDNA_P Parameter: Tissue Value: Germinating Seeds
  misc_feature: MA Experiment ID: 108462 Result: Up-regulated in Transcription
  misc_feature: MA Experiment 108462 PARAMETER Experiment Name: At_Germinating_Seeds_cDNA_P Parameter: Age (day) Value: 2 vs. 0
  misc_feature: MA Experiment 108462 PARAMETER Experiment Name: At_Germinating_Seeds_cDNA_P Parameter: Tissue Value: Germinating Seeds
  misc_feature: MA Experiment ID: 108464 Result: Up-regulated in Transcription
  misc_feature: MA Experiment 108464 PARAMETER Experiment Name: At_Germinating_Seeds_cDNA_P Parameter: Age (day) Value: 4 vs. 0
  misc_feature: MA Experiment 108464 PARAMETER Experiment Name: At_Germinating_Seeds_cDNA_P Parameter: Tissue Value: Germinating Seeds
  misc_feature: MA Experiment ID: 108595 Result: Down-regulated in Transcription
  misc_feature: MA Experiment 108595 PARAMETER Experiment Name: At_Ler-pi_Ovule_cDNA_P Parameter: Plant Line Value: null
  misc_feature: MA Experiment ID: 20000087 Result: Down-regulated in Transcription
  misc_feature: MA Experiment 20000087 PARAMETER Experiment Name: At_100uM_ABA_Mutants_cDNA_P Parameter: Plant Line Value: WS
  misc_feature: MA Experiment 20000087 PARAMETER Experiment Name: At_100uM_ABA_Mutants_cDNA_P Parameter: Timepoint (hr) Value: 6
  misc_feature: MA Experiment 20000087 PARAMETER Experiment Name: At_100uM_ABA_Mutants_cDNA_P Parameter: Tissue Value: Aerial
  misc_feature: MA Experiment 20000087 PARAMETER Experiment Name: At_100uM_ABA_Mutants_cDNA_P Parameter: Treatment Value: 100uM ABA vs. No Treatment
  misc_feature: MA Experiment ID: 20000224 Result: Down-regulated in Transcription
gaccaaaaaaaaaactcaagagagactttgtggccatggcagcctctctccaatccaccgctacattcctccagtcggcgaagatcgccaccgctccttctcgcggaagttctcacctccgatcgactcaagccgtcggcaaatcttttgggctcgaaacttcctcggctcgcctcacttgctccttccagtctgactttaaggacttcaccggtaaatgctccgacgctgtcaaaatcgccggattcgctcttgccacctctgctctcgtcgtctcgggagcaagtgcggagggagctccaaagagattgacctatgacgagatcgaaggacccttcgaggttgcttcagacggaagcgtcaatttcaaggaagaagatggaatcgactatgctgcagtcacagtccaacttccaggaggtgaacgtgtgccattccttttcacagtcaaacagcttgactcctcaggcaaaccagacagcttcaccggaaaattcttggttccatcgtaccgtggctcttccttcttggacccaaagggccgtggtggatccacaggatatgacaacgccgtggcattgccagctggaggcagaggagacgaggaggagcttgtaaaggagaacgtgaagaacactgccgcttcagtgggagagatcactctgaaagtgacaaagagcaagccggagacaggagaggtgatcggagtgttcgagagtcttcagccgtcggatactgacttgggtgctaaggtaccaaaggatgtgaagatccaaggggtgtggtatggtcaacttgagtgatcatgttattatattttccgttgattgtgtttgatgataatgataacatcttttgatgctttcttcgtttatctctcttatataaaatgcacatgcctaagatcttgaattttctgc

SEQ ID NO: 42581 - protein, 266 aa, Arabidopsis thaliana
  peptide (1)..(266): Ceres Seq. ID no. 12339009
  misc_feature (102)..(266): Pfam Name: Manganese-stabilising protein / photosystem II Pfam Description: Manganese-stabilising protein / photosystem II
  misc_feature (102)..(266): Pfam Name: Manganese-stabilising protein / photosystem II Pfam Description: Manganese-stabilising protein / photosystem II
  misc_feature (12)..(121): Homolog of NCBI NO: 11133881 NR Description: Oxygen-evolving enhancer protein 1, chloroplast (OEE1) (33 kDa subunit of oxygen evolving system of photosystem (OEC 33 kDa subunit) (33 kDa thylakoid membrane protein) protein
  misc_feature (102)..(266): Homolog of NCBI NO: 11133881 NR Description: Oxygen-evolving enhancer protein 1, chloroplast (OEE1) (33 kDa subunit of oxygen evolving system of photosystem (OEC 33 kDa subunit) (33 kDa thylakoid membrane protein) protein
  misc_feature (12)..(121): Homolog of NCBI NO: 131384 NR Description: Oxygen-evolving enhancer protein 1, chloroplast (OEE1) (33 kDa subunit of oxygen evolving system of photosystem
  misc_feature (102)..(266): Homolog of NCBI NO: 131384 NR Description: Oxygen-evolving enhancer protein 1, chloroplast (OEE1) (33 kDa subunit of oxygen evolving system of photosystem
  misc_feature (12)..(121): Homolog of NCBI NO: 12644171 NR Description: Oxygen-evolving enhancer protein 1, chloroplast (OEE1) (33 kDa subunit of oxygen evolving system of photosystem (OEC 33 kDa subunit) (33 kDa thylakoid membrane protein) protein
  misc_feature (12)..(121): Homolog of NCBI NO: 11133881 NR Description: Oxygen-evolving enhancer protein 1, chloroplast (OEE1) (33 kDa subunit of oxygen evolving system of photosystem (OEC 33 kDa subunit) (33 kDa thylakoid membrane protein) protein
  misc_feature (12)..(121): Homolog of NCBI NO: 131384 NR Description: Oxygen-evolving enhancer protein 1, chloroplast (OEE1) (33 kDa subunit of oxygen evolving system of photosystem
  misc_feature (12)..(121): Homolog of NCBI NO: 12644171 NR Description: Oxygen-evolving enhancer protein 1, chloroplast (OEE1) (33 kDa subunit of oxygen evolving system of photosystem (OEC 33 kDa subunit) (33 kDa thylakoid membrane protein) protein
  misc_feature (102)..(266): Homolog of NCBI NO: 30013657 NR Description: oxygen evolving complex 33 kDa photosystem II
  misc_feature (12)..(121): Homolog of NCBI NO: 30013657 NR Description: oxygen evolving complex 33 kDa photosystem II
  misc_feature (102)..(266): Homolog of NCBI NO: 11134054 NR Description: Oxygen-evolving enhancer protein 1, chloroplast (OEE1) (33 kDa subunit of oxygen evolving system of photosystem (OEC 33 kDa subunit) (33 kDa thylakoid membrane protein) kDa
  misc_feature (12)..(121): Homolog of NCBI NO: 11134054 NR Description: Oxygen-evolving enhancer protein 1, chloroplast (OEE1) (33 kDa subunit of oxygen evolving system of photosystem (OEC 33 kDa subunit) (33 kDa thylakoid membrane protein) kDa
  misc_feature (102)..(266): Homolog of NCBI NO: 12644171 NR Description: Oxygen-evolving enhancer protein 1, chloroplast (OEE1) (33 kDa subunit of oxygen evolving system of photosystem (OEC 33 kDa subunit) (33 kDa thylakoid membrane protein) protein
  misc_feature (102)..(266): Homolog of NCBI NO: 131384 NR Description: Oxygen-evolving enhancer protein 1, chloroplast (OEE1) (33 kDa subunit of oxygen evolving system of photosystem
  misc_feature (102)..(266): Homolog of NCBI NO: 11133881 NR Description: Oxygen-evolving enhancer protein 1, chloroplast (OEE1) (33 kDa subunit of oxygen evolving system of photosystem (OEC 33 kDa subunit) (33 kDa thylakoid membrane protein) protein
  misc_feature (102)..(266): Homolog of NCBI NO: 12644171 NR Description: Oxygen-evolving enhancer protein 1, chloroplast (OEE1) (33 kDa subunit of oxygen evolving system of photosystem (OEC 33 kDa subunit) (33 kDa thylakoid membrane protein) protein
  misc_feature (12)..(121): Homolog of NCBI NO: 11134054 NR Description: Oxygen-evolving enhancer protein 1, chloroplast (OEE1) (33 kDa subunit of oxygen evolving system of photosystem (OEC 33 kDa subunit) (33 kDa thylakoid membrane protein) kDa
  misc_feature (102)..(266): Homolog of NCBI NO: 11134054 NR Description: Oxygen-evolving enhancer protein 1, chloroplast (OEE1) (33 kDa subunit of oxygen evolving system of photosystem (OEC 33 kDa subunit) (33 kDa thylakoid membrane protein) kDa
  misc_feature (12)..(121): Homolog of NCBI NO: 30013657 NR Description: oxygen evolving complex 33 kDa photosystem II
  misc_feature (102)..(266): Homolog of NCBI NO: 30013657 NR Description: oxygen evolving complex 33 kDa photosystem II
PKKKLKRDFVAMAASLQSTATFLQSAKIATAPSRGSSHLRSTQAVGKSFGLETSSARLTCSFQSDFKDFTGKCSDAVKIAGFALATSALVVSGASAEGAPKRLTYDEIEGPFEVASDGSVNFKEEDGIDYAAVTVQLPGGERVPFLFTVKQLDSSGKPDSFTGKFLVPSYRGSSFLDPKGRGGSTGYDNAVALPAGGRGDEEELVKENVKNTAASVGEITLKVTKSKPETGEVIGVFESLQPSDTDLGAKVPKDVKIQGVWYGQLE

SEQ ID NO: 42582 - protein, 255 aa, Arabidopsis thaliana
  peptide (1)..(255): Ceres Seq. ID no. 12339010
  misc_feature (91)..(255): Pfam Name: Manganese-stabilising protein / photosystem II Pfam Description: Manganese-stabilising protein / photosystem II
  misc_feature (91)..(255): Pfam Name: Manganese-stabilising protein / photosystem II Pfam Description: Manganese-stabilising protein / photosystem II
  misc_feature (1)..(110): Homolog of NCBI NO: 11133881 NR Description: Oxygen-evolving enhancer protein 1, chloroplast (OEE1) (33 kDa subunit of oxygen evolving system of photosystem (OEC 33 kDa subunit) (33 kDa thylakoid membrane protein) protein
  misc_feature (91)..(255): Homolog of NCBI NO: 11133881 NR Description: Oxygen-evolving enhancer protein 1, chloroplast (OEE1) (33 kDa subunit of oxygen evolving system of photosystem (OEC 33 kDa subunit) (33 kDa thylakoid membrane protein) protein
  misc_feature (1)..(110): Homolog of NCBI NO: 131384 NR Description: Oxygen-evolving enhancer protein 1, chloroplast (OEE1) (33 kDa subunit of oxygen evolving system of photosystem
  misc_feature (91)..(255): Homolog of NCBI NO: 131384 NR Description: Oxygen-evolving enhancer protein 1, chloroplast (OEE1) (33 kDa subunit of oxygen evolving system of photosystem
  misc_feature (1)..(110): Homolog of NCBI NO: 12644171 NR Description: Oxygen-evolving enhancer protein 1, chloroplast (OEE1) (33 kDa subunit of oxygen evolving system of photosystem (OEC 33 kDa subunit) (33 kDa thylakoid membrane protein) protein
  misc_feature (1)..(110): Homolog of NCBI NO: 11133881 NR Description: Oxygen-evolving enhancer protein 1, chloroplast (OEE1) (33 kDa subunit of oxygen evolving system of photosystem (OEC 33 kDa subunit) (33 kDa thylakoid membrane protein) protein
  misc_feature (1)..(110): Homolog of NCBI NO: 131384 NR Description: Oxygen-evolving enhancer protein 1, chloroplast (OEE1) (33 kDa subunit of oxygen evolving system of photosystem
  misc_feature (1)..(110): Homolog of NCBI NO: 12644171 NR Description: Oxygen-evolving enhancer protein 1, chloroplast (OEE1) (33 kDa subunit of oxygen evolving system of photosystem (OEC 33 kDa subunit) (33 kDa thylakoid membrane protein) protein
  misc_feature (91)..(255): Homolog of NCBI NO: 30013657 NR Description: oxygen evolving complex 33 kDa photosystem II
  misc_feature (1)..(110): Homolog of NCBI NO: 30013657 NR Description: oxygen evolving complex 33 kDa photosystem II
  misc_feature (91)..(255): Homolog of NCBI NO: 11134054 NR Description: Oxygen-evolving enhancer protein 1, chloroplast (OEE1) (33 kDa subunit of oxygen evolving system of photosystem (OEC 33 kDa subunit) (33 kDa thylakoid membrane protein) kDa
  misc_feature (1)..(110): Homolog of NCBI NO: 11134054 NR Description: Oxygen-evolving enhancer protein 1, chloroplast (OEE1) (33 kDa subunit of oxygen evolving system of photosystem (OEC 33 kDa subunit) (33 kDa thylakoid membrane protein) kDa
  misc_feature (91)..(255): Homolog of NCBI NO: 12644171 NR Description: Oxygen-evolving enhancer protein 1, chloroplast (OEE1) (33 kDa subunit of oxygen evolving system of photosystem (OEC 33 kDa subunit) (33 kDa thylakoid membrane protein) protein
  misc_feature (91)..(255): Homolog of NCBI NO: 131384 NR Description: Oxygen-evolving enhancer protein 1, chloroplast (OEE1) (33 kDa subunit of oxygen evolving system of photosystem
  misc_feature (91)..(255): Homolog of NCBI NO: 11133881 NR Description: Oxygen-evolving enhancer protein 1, chloroplast (OEE1) (33 kDa subunit of oxygen evolving system of photosystem (OEC 33 kDa subunit) (33 kDa thylakoid membrane protein) protein
  misc_feature (91)..(255): Homolog of NCBI NO: 12644171 NR Description: Oxygen-evolving enhancer protein 1, chloroplast (OEE1) (33 kDa subunit of oxygen evolving system of photosystem (OEC 33 kDa subunit) (33 kDa thylakoid membrane protein) protein
  misc_feature (1)..(110): Homolog of NCBI NO: 11134054 NR Description: Oxygen-evolving enhancer protein 1, chloroplast (OEE1) (33 kDa subunit of oxygen evolving system of photosystem (OEC 33 kDa subunit) (33 kDa thylakoid membrane protein) kDa
  misc_feature (91)..(255): Homolog of NCBI NO: 11134054 NR Description: Oxygen-evolving enhancer protein 1, chloroplast (OEE1) (33 kDa subunit of oxygen evolving system of photosystem (OEC 33 kDa subunit) (33 kDa thylakoid membrane protein) kDa
  misc_feature (1)..(110): Homolog of NCBI NO: 30013657 NR Description: oxygen evolving complex 33 kDa photosystem II
  misc_feature (91)..(255): Homolog of NCBI NO: 30013657 NR Description: oxygen evolving complex 33 kDa photosystem II
MAASLQSTATFLQSAKIATAPSRGSSHLRSTQAVGKSFGLETSSARLTCSFQSDFKDFTGKCSDAVKIAGFALATSALVVSGASAEGAPKRLTYDEIEGPFEVASDGSVNFKEEDGIDYAAVTVQLPGGERVPFLFTVKQLDSSGKPDSFTGKFLVPSYRGSSFLDPKGRGGSTGYDNAVALPAGGRGDEEELVKENVKNTAASVGEITLKVTKSKPETGEVIGVFESLQPSDTDLGAKVPKDVKIQGVWYGQLE

SEQ ID NO: 42583 - DNA, 1195 bp, Arabidopsis thaliana
  misc_feature (1)..(1195): Ceres Seq. ID no. 12395686
  misc_feature: MA Experiment ID: 108461 Result: Up-regulated in Transcription
  misc_feature: MA Experiment 108461 PARAMETER Experiment Name: At_Germinating_Seeds_cDNA_P Parameter: Age (day) Value: 1 vs. 0
  misc_feature: MA Experiment 108461 PARAMETER Experiment Name: At_Germinating_Seeds_cDNA_P Parameter: Tissue Value: Germinating Seeds
  misc_feature: MA Experiment ID: 108462 Result: Up-regulated in Transcription
  misc_feature: MA Experiment 108462 PARAMETER Experiment Name: At_Germinating_Seeds_cDNA_P Parameter: Age (day) Value: 2 vs. 0
  misc_feature: MA Experiment 108462 PARAMETER Experiment Name: At_Germinating_Seeds_cDNA_P Parameter: Tissue Value: Germinating Seeds
  misc_feature: MA Experiment ID: 108464 Result: Up-regulated in Transcription
  misc_feature: MA Experiment 108464 PARAMETER Experiment Name: At_Germinating_Seeds_cDNA_P Parameter: Age (day) Value: 4 vs. 0
  misc_feature: MA Experiment 108464 PARAMETER Experiment Name: At_Germinating_Seeds_cDNA_P Parameter: Tissue Value: Germinating Seeds
  misc_feature: MA Experiment ID: 108569 Result: Up-regulated in Transcription
  misc_feature: MA Experiment 108569 PARAMETER Experiment Name: At_0.001%_MeJA__cDNA_P Parameter: Timepoint (hr) Value: 6
  misc_feature: MA Experiment 108569 PARAMETER Experiment Name: At_0.001%_MeJA__cDNA_P Parameter: Tissue Value: Aerial
  misc_feature: MA Experiment 108569 PARAMETER Experiment Name: At_0.001%_MeJA__cDNA_P Parameter: Treatment Value: 0.001% MeJA vs. No Treatment
  misc_feature: MA Experiment ID: 108573 Result: Up-regulated in Transcription
  misc_feature: MA Experiment 108573 PARAMETER Experiment Name: At_Drought_cDNA_P Parameter: Timepoint (hr) Value: 6
  misc_feature: MA Experiment 108573 PARAMETER Experiment Name: At_Drought_cDNA_P Parameter: Tissue Value: Aerial
  misc_feature: MA Experiment 108573 PARAMETER Experiment Name: At_Drought_cDNA_P Parameter: Treatment Value: Drought vs. No Drought
  misc_feature: MA Experiment ID: 108585 Result: Up-regulated in Transcription
  misc_feature: MA Experiment 108585 PARAMETER Experiment Name: At_5mM_NaNP_cDNA_P Parameter: Timepoint (hr) Value: 6
  misc_feature: MA Experiment 108585 PARAMETER Experiment Name: At_5mM_NaNP_cDNA_P Parameter: Tissue Value: Aerial
  misc_feature: MA Experiment 108585 PARAMETER Experiment Name: At_5mM_NaNP_cDNA_P Parameter: Treatment Value: null
  misc_feature: MA Experiment ID: 108595 Result: Down-regulated in Transcription
  misc_feature: MA Experiment 108595 PARAMETER Experiment Name: At_Ler-pi_Ovule_cDNA_P Parameter: Plant Line Value: null
  misc_feature: MA Experiment ID: 20000069 Result: Down-regulated in Transcription
  misc_feature: MA Experiment 20000069 PARAMETER Experiment Name: At_100uM_ABA_Mutants_cDNA_P Parameter: Plant Line Value: CS23
  misc_feature: MA Experiment 20000069 PARAMETER Experiment Name: At_100uM_ABA_Mutants_cDNA_P Parameter: Timepoint (hr) Value: 6
  misc_feature: MA Experiment 20000069 PARAMETER Experiment Name: At_100uM_ABA_Mutants_cDNA_P Parameter: Tissue Value: Aerial
  misc_feature: MA Experiment 20000069 PARAMETER Experiment Name: At_100uM_ABA_Mutants_cDNA_P Parameter: Treatment Value: 100uM ABA vs. No Treatment
  misc_feature: MA Experiment ID: 20000070 Result: Down-regulated in Transcription
  misc_feature: MA Experiment 20000070 PARAMETER Experiment Name: At_100uM_ABA_Mutants_cDNA_P Parameter: Plant Line Value: CS24
  misc_feature: MA Experiment 20000070 PARAMETER Experiment Name: At_100uM_ABA_Mutants_cDNA_P Parameter: Timepoint (hr) Value: 6
  misc_feature: MA Experiment 20000070 PARAMETER Experiment Name: At_100uM_ABA_Mutants_cDNA_P Parameter: Tissue Value: Aerial
  misc_feature: MA Experiment 20000070 PARAMETER Experiment Name: At_100uM_ABA_Mutants_cDNA_P Parameter: Treatment Value: 100uM ABA vs. No Treatment
  misc_feature: MA Experiment ID: 20000072 Result: Down-regulated in Transcription
  misc_feature: MA Experiment 20000072 PARAMETER Experiment Name: At_100uM_ABA_Mutants_cDNA_P Parameter: Plant Line Value: CS8105
  misc_feature: MA Experiment 20000072 PARAMETER Experiment Name: At_100uM_ABA_Mutants_cDNA_P Parameter: Timepoint (hr) Value: 6
  misc_feature: MA Experiment 20000072 PARAMETER Experiment Name: At_100uM_ABA_Mutants_cDNA_P Parameter: Tissue Value: Aerial
  misc_feature: MA Experiment 20000072 PARAMETER Experiment Name: At_100uM_ABA_Mutants_cDNA_P Parameter: Treatment Value: 100uM ABA vs. No Treatment
  misc_feature: MA Experiment ID: 20000089 Result: Down-regulated in Transcription
  misc_feature: MA Experiment ID: 20000117 Result: Down-regulated in Transcription
  misc_feature: MA Experiment 20000117 PARAMETER Experiment Name: At_100uM_ABA_Mutants_cDNA_P Parameter: Plant Line Value: Columbia
  misc_feature: MA Experiment 20000117 PARAMETER Experiment Name: At_100uM_ABA_Mutants_cDNA_P Parameter: Timepoint (hr) Value: 6
  misc_feature: MA Experiment 20000117 PARAMETER Experiment Name: At_100uM_ABA_Mutants_cDNA_P Parameter: Tissue Value: Aerial
  misc_feature: MA Experiment 20000117 PARAMETER Experiment Name: At_100uM_ABA_Mutants_cDNA_P Parameter: Treatment Value: 100uM ABA vs. No Treatment
  misc_feature: MA Experiment ID: 20000495 Result: Down-regulated in Transcription
  misc_feature: MA Experiment 20000495 PARAMETER Experiment Name: At_Guard_Cells_P Parameter: Harvest Date Value: 8/2/2002
  misc_feature: MA Experiment 20000495 PARAMETER Experiment Name: At_Guard_Cells_P Parameter: Organism Value: A. thaliana
  misc_feature: MA Experiment 20000495 PARAMETER Experiment Name: At_Guard_Cells_P Parameter: Tissue Value: Guard Cells vs. Leaves
  misc_feature: MA Experiment ID: 20001248 Result: Down-regulated in Transcription
  misc_feature: MA Experiment 20001248 PARAMETER Experiment Name: At_Far-red-induction_P Parameter: Age (day) Value: 7
  misc_feature: MA Experiment 20001248 PARAMETER Experiment Name: At_Far-red-induction_P Parameter: Light Value: Far-red vs. White
  misc_feature: MA Experiment 20001248 PARAMETER Experiment Name: At_Far-red-induction_P Parameter: Organism Value: A. thaliana
  misc_feature: MA Experiment 20001248 PARAMETER Experiment Name: At_Far-red-induction_P Parameter: Plant Line Value: Columbia
  misc_feature: MA Experiment 20001248 PARAMETER Experiment Name: At_Far-red-induction_P Parameter: Timepoint (hr) Value: 4
  misc_feature: MA Experiment 20001248 PARAMETER Experiment Name: At_Far-red-induction_P Parameter: Tissue Value: Whole Plant
  misc_feature: MA Experiment ID: 20001451 Result: Down-regulated in Transcription
  misc_feature: MA Experiment 20001451 PARAMETER Experiment Name: At_Far-red-induction_P Parameter: Age (day) Value: 7
  misc_feature: MA Experiment 20001451 PARAMETER Experiment Name: At_Far-red-induction_P Parameter: Light Value: Far-red vs. White
  misc_feature: MA Experiment 20001451 PARAMETER Experiment Name: At_Far-red-induction_P Parameter: Organism Value: A. thaliana
  misc_feature: MA Experiment 20001451 PARAMETER Experiment Name: At_Far-red-induction_P Parameter: Plant Line Value: Columbia
  misc_feature: MA Experiment 20001451 PARAMETER Experiment Name: At_Far-red-induction_P Parameter: Timepoint (hr) Value: 24
  misc_feature: MA Experiment 20001451 PARAMETER Experiment Name: At_Far-red-induction_P Parameter: Tissue Value: Whole Plant
agagcaaagagtttttgtgtggctagtggcatcaatggagctctcgatctcacaatcaccgcgtgttcggttctcgtctctggcgcctcgtttcttagcagcttctcatcatcatcgtccttctgtgcatttagctgggaagtttataagcctccctcgagatgttcgcttcacgagcttatcaacttcaagaatgcggtccaaatttgtttcaaccaattatagaaaaatctcaatccgggcatgttctcaggttggtgctgctgagtctgatgatccagtgctggatagaattgcccggttccaaaatgcttgctggagatttcttagaccccatacaatccgcggaacagctttaggatccactgccttggtgacaagagctttgatagagaacactcatttgatcaaatggagtcttgtactaaaggcactttcaggtcttcttgctcttatttgtgggaatggttatatagtcggcatcaatcagatctacgacattggaatcgacaaagtgaacaaaccatacttgccaatagcagcaggagatctatcagtgcagtctgcttggttgttagtgatattttttgcgatagcagggcttttagttgtcggatttaactttggtccattcattacaagcctatactctcttggcctttttctgggaaccatctattctgttccacccctcagaatgaaaagattcccagttgcagcatttcttattattgccacggtacgaggtttccttcttaactttggtgtgtaccatgctacaagagctgctcttggacttccatttcagtggagtgcacctgtggcgttcatcacatcttttgtgacactgtttgcactggtcattgctattacaaaggaccttcctgatgttgaaggagatcgaaagttccaaatatcaaccctggcaacaaaacttggagtgagaaacattgcattcctcggttctggacttctgctagtaaattatgtttcagccatatcactagctttctacatgcctcaggtttttagaggtagcttgatgattcctgcacatgtgatcttggcttcaggcttaattttccagacatgggtactagaaaaagcaaactacaccaaggaagctatctcaggatattatcggtttatatggaatctcttctacgcagagtatctgttattccccttcctctag

SEQ ID NO: 42584 - protein, 397 aa, Arabidopsis thaliana
  peptide (1)..(397): Ceres Seq. ID no. 12395687
  misc_feature (115)..(360): Pfam Name: UbiA prenyltransferase family Pfam Description: UbiA prenyltransferase family
  misc_feature (103)..(397): Homolog of NCBI NO: 30680535 NR Description: tocopherol polyprenyltransferase (homogentisate
  misc_feature (104)..(395): Homolog of NCBI NO: 37519852 NR Description: unknown protein [Gloeobacter violaceus]
  misc_feature (104)..(395): Homolog of NCBI NO: 17230940 NR Description: hypothetical protein [Nostoc sp. PCC 7120]
  misc_feature (104)..(395): Homolog of NCBI NO: 16330366 NR Description: unknown protein [Synechocystis sp. PCC 6803]
  misc_feature (104)..(395): Homolog of NCBI NO: 23125851 NR Description: hypothetical protein [Nostoc punctiforme]
  misc_feature (277)..(395): Homolog of NCBI NO: 23039416 NR Description: hypothetical protein [Trichodesmium erythraeum
  misc_feature (106)..(257): Homolog of NCBI NO: 23039416 NR Description: hypothetical protein [Trichodesmium erythraeum
  misc_feature (34)..(397): Homolog of NCBI NO: 34393498 NR Description: putative tocopherol polyprenyltransferase
  misc_feature (12)..(373): Homolog of NCBI NO: 10998133 NR Description: dbj|BAA17774.1~gene_id:MEC18.5~similar to unknown
  misc_feature (9)..(397): Homolog of NCBI NO: 30681973 NR Description: UbiA prenyltransferase family [Arabidopsis
EQRVFVWLVASMELSISQSPRVRFSSLAPRFLAASHHHRPSVHLAGKFISLPRDVRFTSLSTSRMRSKFVSTNYRKISIRACSQVGAAESDDPVLDRIARFQNACWRFLRPHTIRGTALGSTALVTRALIENTHLIKWSLVLKALSGLLALICGNGYIVGINQIYDIGIDKVNKPYLPIAAGDLSVQSAWLLVIFFAIAGLLVVGFNFGPFITSLYSLGLFLGTIYSVPPLRMKRFPVAAFLIIATVRGFLLNFGVYHATRAALGLPFQWSAPVAFITSFVTLFALVIAITKDLPDVEGDRKFQISTLATKLGVRNIAFLGSGLLLVNYVSAISLAFYMPQVFRGSLMIPAHVILASGLIFQTWVLEKANYTKEAISGYYRFIWNLFYAEYLLFPFL

SEQ ID NO: 42585 - protein, 386 aa, Arabidopsis thaliana
  peptide (1)..(386): Ceres Seq. ID no. 12395688
  misc_feature (104)..(349): Pfam Name: UbiA prenyltransferase family Pfam Description: UbiA prenyltransferase family
  misc_feature (92)..(386): Homolog of NCBI NO: 30680535 NR Description: tocopherol polyprenyltransferase (homogentisate
  misc_feature (93)..(384): Homolog of NCBI NO: 37519852 NR Description: unknown protein [Gloeobacter violaceus]
  misc_feature (93)..(384): Homolog of NCBI NO: 17230940 NR Description: hypothetical protein [Nostoc sp. PCC 7120]
  misc_feature (93)..(384): Homolog of NCBI NO: 16330366 NR Description: unknown protein [Synechocystis sp. PCC 6803]
  misc_feature (93)..(384): Homolog of NCBI NO: 23125851 NR Description: hypothetical protein [Nostoc punctiforme]
  misc_feature (266)..(384): Homolog of NCBI NO: 23039416 NR Description: hypothetical protein [Trichodesmium erythraeum
  misc_feature (95)..(246): Homolog of NCBI NO: 23039416 NR Description: hypothetical protein [Trichodesmium erythraeum
  misc_feature (23)..(386): Homolog of NCBI NO: 34393498 NR Description: putative tocopherol polyprenyltransferase
  misc_feature (1)..(362): Homolog of NCBI NO: 10998133 NR Description: dbj|BAA17774.1~gene_id:MEC18.5~similar to unknown
  misc_feature (1)..(386): Homolog of NCBI NO: 30681973 NR Description: UbiA prenyltransferase family [Arabidopsis
MELSISQSPRVRFSSLAPRFLAASHHHRPSVHLAGKFISLPRDVRFTSLSTSRMRSKFVSTNYRKISIRACSQVGAAESDDPVLDRIARFQNACWRFLRPHTIRGTALGSTALVTRALIENTHLIKWSLVLKALSGLLALICGNGYIVGINQIYDIGIDKVNKPYLPIAAGDLSVQSAWLLVIFFAIAGLLVVGFNFGPFITSLYSLGLFLGTIYSVPPLRMKRFPVAAFLIIATVRGFLLNFGVYHATRAALGLPFQWSAPVAFITSFVTLFALVIAITKDLPDVEGDRKFQISTLATKLGVRNIAFLGSGLLLVNYVSAISLAFYMPQVFRGSLMIPAHVILASGLIFQTWVLEKANYTKEAISGYYRFIWNLFYAEYLLFPFL

SEQ ID NO: 42586 - protein, 333 aa, Arabidopsis thaliana
  peptide (1)..(333): Ceres Seq. ID no. 12395689
  misc_feature (51)..(296): Pfam Name: UbiA prenyltransferase family Pfam Description: UbiA prenyltransferase family
  misc_feature (39)..(333): Homolog of NCBI NO: 30680535 NR Description: tocopherol polyprenyltransferase (homogentisate
  misc_feature (40)..(331): Homolog of NCBI NO: 37519852 NR Description: unknown protein [Gloeobacter violaceus]
  misc_feature (40)..(331): Homolog of NCBI NO: 17230940 NR Description: hypothetical protein [Nostoc sp. PCC 7120]
  misc_feature (40)..(331): Homolog of NCBI NO: 16330366 NR Description: unknown protein [Synechocystis sp. PCC 6803]
  misc_feature (40)..(331): Homolog of NCBI NO: 23125851 NR Description: hypothetical protein [Nostoc punctiforme]
  misc_feature (213)..(331): Homolog of NCBI NO: 23039416 NR Description: hypothetical protein [Trichodesmium erythraeum
  misc_feature (42)..(193): Homolog of NCBI NO: 23039416 NR Description: hypothetical protein [Trichodesmium erythraeum
  misc_feature (1)..(333): Homolog of NCBI NO: 34393498 NR Description: putative tocopherol polyprenyltransferase
  misc_feature (1)..(309): Homolog of NCBI NO: 10998133 NR Description: dbj|BAA17774.1~gene_id:MEC18.5~similar to unknown
  misc_feature (1)..(333): Homolog of NCBI NO: 30681973 NR Description: UbiA prenyltransferase family [Arabidopsis
MRSKFVSTNYRKISIRACSQVGAAESDDPVLDRIARFQNACWRFLRPHTIRGTALGSTALVTRALIENTHLIKWSLVLKALSGLLALICGNGYIVGINQIYDIGIDKVNKPYLPIAAGDLSVQSAWLLVIFFAIAGLLVVGFNFGPFITSLYSLGLFLGTIYSVPPLRMKRFPVAAFLIIATVRGFLLNFGVYHATRAALGLPFQWSAPVAFITSFVTLFALVIAITKDLPDVEGDRKFQISTLATKLGVRNIAFLGSGLLLVNYVSAISLAFYMPQVFRGSLMIPAHVILASGLIFQTWVLEKANYTKEAISGYYRFIWNLFYAEYLLFPFL

SEQ ID NO: 42587 - DNA, 2144 bp, Arabidopsis thaliana
  misc_feature (1)..(2144): Ceres Seq. ID no. 12370339
  misc_feature: MA Experiment ID: 108435 Result: Up-regulated in Transcription
  misc_feature: MA Experiment 108435 PARAMETER Experiment Name: At_stm_Mutants_cDNA_P Parameter: Plant Line Value: wt Landsburg vs stm
  misc_feature: MA Experiment 108435 PARAMETER Experiment Name: At_stm_Mutants_cDNA_P Parameter: Tissue Value: Shoot Apical Meristem Region
  misc_feature: MA Experiment ID: 108463 Result: Down-regulated in Transcription
  misc_feature: MA Experiment 108463 PARAMETER Experiment Name: At_Germinating_Seeds_cDNA_P Parameter: Age (day) Value: 3 vs. 0
  misc_feature: MA Experiment 108463 PARAMETER Experiment Name: At_Germinating_Seeds_cDNA_P Parameter: Tissue Value: Germinating Seeds
  misc_feature: MA Experiment ID: 108464 Result: Down-regulated in Transcription
  misc_feature: MA Experiment 108464 PARAMETER Experiment Name: At_Germinating_Seeds_cDNA_P Parameter: Age (day) Value: 4 vs. 0
  misc_feature: MA Experiment 108464 PARAMETER Experiment Name: At_Germinating_Seeds_cDNA_P Parameter: Tissue Value: Germinating Seeds
  misc_feature: MA Experiment ID: 108585 Result: Up-regulated in Transcription
  misc_feature: MA Experiment 108585 PARAMETER Experiment Name: At_5mM_NaNP_cDNA_P Parameter: Timepoint (hr) Value: 6
  misc_feature: MA Experiment 108585 PARAMETER Experiment Name: At_5mM_NaNP_cDNA_P Parameter: Tissue Value: Aerial
  misc_feature: MA Experiment 108585 PARAMETER Experiment Name: At_5mM_NaNP_cDNA_P Parameter: Treatment Value: null
aaggaatcgaaaacccagaagaggactcagtgaacaaatttcttcaggttaaatttcctcactattctactgtgtttttgttctcagaatcctcgaaaatcgtaatattgtttttcgtatgctcctaaaatctgggcaattcattagatttcgttgcgtagataaacttaagcttgatgtattctttggtacaatgtaattctgtttagttctataacttggaatcactctaagtgtaatgtatattgatgcgaagtcaaatgttgctgaatttttgctctcctgcatttttccccaattttttctgagccagtattgtgaaaaattggagtctgagaaaactgaaaagtttaatgtattctcatttaatcagtgttcatagattcactagttgtttgaccagggcttaggcttaatcattcttgtgacacttggttttcttttaaatctgttttgatgttcagttttctttggaagctatatacccataaacttaaaatgaataaagatggaagctttagctgatataatttgggtgtttctttctttcttccttggtgtgaagctgtttcaaaatgtctcggaggtatgatagtcgcaccacgatcttctcaccggaaggtcgtctctaccaggttgaatatgctatggaagctattggcaatgctggttctgccattggaatcttggcaaaagacggagtggtgttggttggtgagaagaaagtcacttctaaacttcttcaaacctcttcatccatggagaaaatgtacaagatcgatgaccatgtggcttgtgcagttgctggtataatgtctgatgccaacattctgattaacactgctcgagttcaagctcagcgttacacctttatgtaccaagagccaatgcccgtttagcagctggttcagtctctttgtgacaccaagcaaggatacacccagtttggtggtctccgcccgtttggagtttcctttctttttgcaggctgggacaggaaccacgggtttcagctgtatatgagtgacccaagtggaaactatggtggatggcaagctgcagctgttggagcaaataatcaagcggctcagtctattcttaagcaagactataaggatgatgcaacgagggaagaagtggttcagctcgctatcaaggttttgagcaagacgatggacagcacgagctttacagctgaaaaactcgagcttgctgagttgtatctgactccttcaaaatgtgttaagtaccatgttcactcgcctgactcgctcactaagctcttggttaagcatggtgtgactcaaccagccgcagaaacttcctaagctagaaactggtgacagttttacctgacccgcctggttactgtagatgtccatttgctttctttccctttggagatatcgtatcagaatcaatttaccactctgattatgtcatgtgattcatttgggttgactatcttttatcttgagattgatcttcttctagtctaaagtaaagttagactttagaggttttattcaataaatgaatgagcaatcaccaacgggcccattagaaagcccataacattcattgattgaggtaacgggttttaatggctcaaattaacgaagaatcagaatctctttaagtttcaccacgtcgatttaacggtcaagagtgtctgtttattaacagaacagtaaaaatgttaccgctcaaagcgtatatcttgagcgccaaatggaatttcattggtacaatgcccagaagttctgggccagaactggcctcattgtaagagattttttaggagatttatgcagatctggaaaaacaagtttttctctcttggattatctacaaaatattatttacttaagtagttgtcagttagacaatgccctgaatccaaggaattgtatcgaccgggattgaagagaccattcttgcatcgtctcttctttttgcagcatcgcgattgtatgaaacattgatggccagatctttcttctataagtcaatcaaccggccaccggaattaccctaaaaacatagaaaatatgttgaaatatattgagatattagtcatcgactatgactaagtgtcacaaacttttgtgtgataggattcaatcaatccaatggatcttagt

SEQ ID NO: 42588 - protein, 107 aa, Arabidopsis thaliana
  peptide (1)..(107): Ceres Seq. ID no. 12370340
  misc_feature (28)..(107): Pfam Name: Proteasome A-type and B-type Pfam Description: Proteasome A-type and B-type
  misc_feature (1)..(107): Homolog of NCBI NO: 464458 NR Description: Proteasome subunit alpha type 4 (Proteasome
  misc_feature (1)..(107): Homolog of NCBI NO: 40744887 NR Description: conserved hypothetical protein [Aspergillus
  misc_feature (6)..(107): Homolog of NCBI NO: 14594915 NR Description: putative alpha3 proteasome subunit [Nicotiana
  misc_feature (1)..(107): Homolog of NCBI NO: 34898458 NR Description: ESTs AU058081(E3082),AU075427(E30384) correspond a region of the predicted gene.~Similar to Spinacia oleracea
  misc_feature (1)..(107): Homolog of NCBI NO: 34898416 NR Description: ESTs AU058081(E30812),AU058365(E50679), correspond to a region of the predicted gene.~Similar to Spinacia
  misc_feature (9)..(107): Homolog of NCBI NO: 6984140 NR Description: proteasome 27 kDa subunit [Euphorbia esula]
  misc_feature (1)..(107): Homolog of NCBI NO: 12229904 NR Description: Proteasome subunit alpha type 4 (20S proteasome
  misc_feature (1)..(107): Homolog of NCBI NO: 1709761 NR Description: Proteasome subunit alpha type 4 (20S proteasome subunit C) (20S proteasome subunit alpha-3) (Proteasome 27 kDa
  misc_feature (1)..(107): Homolog of NCBI NO: 2511584 NR Description: multicatalytic endopeptidase [Arabidopsis
  misc_feature (1)..(107): Homolog of NCBI NO: 15233268 NR Description: 20S proteasome alpha subunit C (PAC1)
MSRRYDSRTTIFSPEGRLYQVEYAMEAIGNAGSAIGILAKDGVVLVGEKKVTSKLLQTSSSMEKMYKIDDHVACAVAGIMSDANILINTARVQAQRYTFMYQEPMPV

SEQ ID NO: 42589 - protein, 102 aa, Arabidopsis thaliana
  peptide (1)..(102): Ceres Seq. ID no. 12370341
  misc_feature (1)..(67): Pfam Name: Proteasome A-type and B-type Pfam Description: Proteasome A-type and B-type
  misc_feature (1)..(96): Homolog of NCBI NO: 464458 NR Description: Proteasome subunit alpha type 4 (Proteasome
  misc_feature (1)..(96): Homolog of NCBI NO: 40744887 NR Description: conserved hypothetical protein [Aspergillus
  misc_feature (1)..(24): Homolog of NCBI NO: 14594915 NR Description: putative alpha3 proteasome subunit [Nicotiana
  misc_feature (1)..(100): Homolog of NCBI NO: 34898458 NR Description: ESTs AU058081(E3082),AU075427(E30384) correspond a region of the predicted gene.~Similar to Spinacia oleracea
  misc_feature (1)..(100): Homolog of NCBI NO: 34898416 NR Description: ESTs AU058081(E30812),AU058365(E50679), correspond to a region of the predicted gene.~Similar to Spinacia
  misc_feature (1)..(102): Homolog of NCBI NO: 6984140 NR Description: proteasome 27 kDa subunit [Euphorbia esula]
  misc_feature (1)..(102): Homolog of NCBI NO: 12229904 NR Description: Proteasome subunit alpha type 4 (20S proteasome
  misc_feature (1)..(102): Homolog of NCBI NO: 1709761 NR Description: Proteasome subunit alpha type 4 (20S proteasome subunit C) (20S proteasome subunit alpha-3) (Proteasome 27 kDa
  misc_feature (1)..(102): Homolog of NCBI NO: 2511584 NR Description: multicatalytic endopeptidase [Arabidopsis
  misc_feature (1)..(102): Homolog of NCBI NO: 15233268 NR Description: 20S proteasome alpha subunit C (PAC1)
MSDPSGNYGGWQAAAVGANNQAAQSILKQDYKDDATREEVVQLAIKVLSKTMDSTSFTAEKLELAELYLTPSKCVKYHVHSPDSLTKLLVKHGVTQPAAETS

SEQ ID NO: 42590 - protein, 83 aa, Arabidopsis thaliana
  peptide (1)..(83): Ceres Seq. ID no. 12370342
  misc_feature (4)..(83): Pfam Name: Proteasome A-type and B-type Pfam Description: Proteasome A-type and B-type
  misc_feature (1)..(83): Homolog of NCBI NO: 464458 NR Description: Proteasome subunit alpha type 4 (Proteasome
  misc_feature (1)..(83): Homolog of NCBI NO: 40744887 NR Description: conserved hypothetical protein [Aspergillus
  misc_feature (1)..(83): Homolog of NCBI NO: 14594915 NR Description: putative alpha3 proteasome subunit [Nicotiana
  misc_feature (1)..(83): Homolog of NCBI NO: 34898458 NR Description: ESTs AU058081(E3082),AU075427(E30384) correspond a region of the predicted gene.~Similar to Spinacia oleracea
  misc_feature (1)..(83): Homolog of NCBI NO: 34898416 NR Description: ESTs AU058081(E30812),AU058365(E50679), correspond to a region of the predicted gene.~Similar to Spinacia
  misc_feature (1)..(83): Homolog of NCBI NO: 6984140 NR Description: proteasome 27 kDa subunit [Euphorbia esula]
  misc_feature (1)..(83): Homolog of NCBI NO: 12229904 NR Description: Proteasome subunit alpha type 4 (20S proteasome
  misc_feature (1)..(83): Homolog of NCBI NO: 1709761 NR Description: Proteasome subunit alpha type 4 (20S proteasome subunit C) (20S proteasome subunit alpha-3) (Proteasome 27 kDa
  misc_feature (1)..(83): Homolog of NCBI NO: 2511584 NR Description: multicatalytic endopeptidase [Arabidopsis
  misc_feature (1)..(83): Homolog of NCBI NO: 15233268 NR Description: 20S proteasome alpha subunit C (PAC1)
MEAIGNAGSAIGILAKDGVVLVGEKKVTSKLLQTSSSMEKMYKIDDHVACAVAGIMSDANILINTARVQAQRYTFMYQEPMPV

SEQ ID NO: 42591 - DNA, 1332 bp, Arabidopsis thaliana
  misc_feature (1)..(1332): Ceres Seq. ID no. 13645913
  misc_feature: MA Experiment ID: 20000314 Result: Up-regulated in Transcription
  misc_feature: MA Experiment 20000314 PARAMETER Experiment Name: At_14day_Shoots-Roots_Sub_P Parameter: Age (day) Value: 14
  misc_feature: MA Experiment 20000314 PARAMETER Experiment Name: At_14day_Shoots-Roots_Sub_P Parameter: Organism Value: A. thaliana
  misc_feature: MA Experiment 20000314 PARAMETER Experiment Name: At_14day_Shoots-Roots_Sub_P Parameter: Plant Line Value: WS
  misc_feature: MA Experiment 20000314 PARAMETER Experiment Name: At_14day_Shoots-Roots_Sub_P Parameter: Tissue Value: Roots vs. Whole Plant
  misc_feature: MA Experiment ID: 20000315 Result: Up-regulated in Transcription
  misc_feature: MA Experiment 20000315 PARAMETER Experiment Name: At_14day_Shoots-Roots_Sub_P Parameter: Age (day) Value: 14
  misc_feature: MA Experiment 20000315 PARAMETER Experiment Name: At_14day_Shoots-Roots_Sub_P Parameter: Organism Value: A. thaliana
  misc_feature: MA Experiment 20000315 PARAMETER Experiment Name: At_14day_Shoots-Roots_Sub_P Parameter: Plant Line Value: WS
  misc_feature: MA Experiment 20000315 PARAMETER Experiment Name: At_14day_Shoots-Roots_Sub_P Parameter: Tissue Value: Shoots vs. Whole Plant
  misc_feature: MA Experiment ID: 20000355 Result: Up-regulated in Transcription
  misc_feature: MA Experiment 20000355 PARAMETER Experiment Name: At_Siliques_Sub_P Parameter: Age (day) Value: 21
  misc_feature: MA Experiment 20000355 PARAMETER Experiment Name: At_Siliques_Sub_P Parameter: Organism Value: A. thaliana
  misc_feature: MA Experiment 20000355 PARAMETER Experiment Name: At_Siliques_Sub_P Parameter: Plant Line Value: WS
  misc_feature: MA Experiment 20000355 PARAMETER Experiment Name: At_Siliques_Sub_P Parameter: Tissue Value: Less Than 5mm Siliques vs. Whole Plant
atcacttccttgtcacaaaccaaaccctaaaccatctttctcaacatggcgcttcttcacaagcaaaacatttcctttgtgatactcctcctcctcggtctccttgccgtctcttatgcttgtgattgtagtgaccctcctaaaccatcaccacaccctgttaaaccgccaaaacatcccgctaaaccacctaagccccctaccgttaaaccacctactcacaccccaaagcctcccactgtgaagcctccacctccatacattccatgccctcctccgccctatactccaaaacctccaaccgtgaagccaccaccacctccctacgtgaagccaccaccacctcccactgtgaagccaccaccacctccttacgtgaagccaccaccaccccctaccgtgaagccaccaccaccacccacgccgtatactccaccaccacccacgccgtatactcctccaccacccacggtgaagccaccaccaccaccggtcgttaccccaccaccgccaacaccaaccccagaggcgccatgtccgccaccaccaccaacaccatatcctcctccgcctaaaccggaaacttgtccaatcgacgcactgaaactaggcgcatgtgtggacgtgctaggcggtttgattcacatcggactagggaaaagctacgctaaggcaaagtgttgcccacttcttgacgacttagtgggtcttgacgcggcggtttgtctctgcaccaccattagagcgaagcttctcaacattgacctcattatcccaattgctctagaggttcttgtcgactgtggtaagactcctccacctcgtggcttcaagtgtcctactccgctaaaaaggactcctctcttggaagttcacaagtctcgttcctttaataatcaagcaccaagttctcagcgaaatcaaggaatcgaaaacccagaagaggactcagtgaacaaatttcttcagctattggcaatgctggttctgccattggaattcttggcaaaagacggagtggtgttggttggtgagaagaaagtcacttctaaacttcttcaaacctcttcatccatggagaaaatgtacaagatcgatgaccatgtggcttgtgcagttgctggctgggacaggaaccacgggtttcagctgtatatgagtgacccaagtggaaactatggtggatggcaagctgcagctgttggagcaaataatcaagcggctcagtctattcttaagcaagactataaggatgatgcaacgagggaagaagtggttcagctcgctatcaaggttttgagcaagacgatgacagcacgacttgacagctga

SEQ ID NO: 42592 - protein, 428 aa, Arabidopsis thaliana
  peptide (1)..(428): Ceres Seq. ID no. 13645914
  misc_feature (317)..(426): Pfam Name: Proteasome A-type and B-type Pfam Description: Proteasome A-type and B-type
  misc_feature (31)..(265): Homolog of NCBI NO: 7446488 NR Description: cytokinin-induced proline rich protein - southern
  misc_feature (28)..(266): Homolog of NCBI NO: 1709767 NR Description: 36.4 KD PROLINE-RICH PROTEIN
  misc_feature (28)..(266): Homolog of NCBI NO: 19521 NR Description: proline rich protein [Lycopersicon esculentum]
  misc_feature (31)..(266): Homolog of NCBI NO: 7446483 NR Description: probable cell wall protein - garden pea
  misc_feature (31)..(265): Homolog of NCBI NO: 1076501 NR Description: cell wall protein - alfalfa
  misc_feature (31)..(265): Homolog of NCBI NO: 25453525 NR Description: cell wall-plasma membrane linker protein homolog
  misc_feature (31)..(265): Homolog of NCBI NO: 15233282 NR Description: protease inhibitor/seed storage/lipid transfer
  misc_feature (31)..(265): Homolog of NCBI NO: 11994732 NR Description: contains similarity to cell wall-plasma membrane
  misc_feature (32)..(266): Homolog of NCBI NO: 7446482 NR Description: probable cell wall-plasma membrane linker protein
  misc_feature (1)..(428): Homolog of NCBI NO: 15233717 NR Description: protease inhibitor/seed storage/lipid transfer
MALLHKQNISFVILLLLGLLAVSYACDCSDPPKPSPHPVKPPKHPAKPPKPPTVKPPTHTPKPPTVKPPPPYIPCPPPPYTPKPPTVKPPPPPYVKPPPPPTVKPPPPPYVKPPPPPTVKPPPPPTPYTPPPPTPYTPPPPTVKPPPPPVVTPPPPTPTPEAPCPPPPPTPYPPPPKPETCPIDALKLGACVDVLGGLIHIGLGKSYAKAKCCPLLDDLVGLDAAVCLCTTIRAKLLNIDLIIPIALEVLVDCGKTPPPRGFKCPTPLKRTPLLEVHKSRSFNNQAPSSQRNQGIENPEEDSVNKFLQLLAMLVLPLEFLAKDGVVLVGEKKVTSKLLQTSSSMEKMYKIDDHVACAVAGWDRNHGFQLYMSDPSGNYGGWQAAAVGANNQAAQSILKQDYKDDATREEVVQLAIKVLSKTMTARLDS

SEQ ID NO: 42593 - DNA, 1667 bp, Arabidopsis thaliana
  misc_feature (1)..(1667): Ceres Seq. ID no. 13489635
  misc_feature: MA Experiment ID: 20000308 Result: Up-regulated in Transcription
  misc_feature: MA Experiment 20000308 PARAMETER Experiment Name: At_100mM_NaCl__P Parameter: Age (day) Value: 17
  misc_feature: MA Experiment 20000308 PARAMETER Experiment Name: At_100mM_NaCl__P Parameter: Organism Value: A. thaliana
  misc_feature: MA Experiment 20000308 PARAMETER Experiment Name: At_100mM_NaCl__P Parameter: Plant Line Value: WS
  misc_feature: MA Experiment 20000308 PARAMETER Experiment Name: At_100mM_NaCl__P Parameter: Timepoint (hr) Value: 72
  misc_feature: MA Experiment 20000308 PARAMETER Experiment Name: At_100mM_NaCl__P Parameter: Tissue Value: Whole Plant
  misc_feature: MA Experiment 20000308 PARAMETER Experiment Name: At_100mM_NaCl__P Parameter: Treatment Value: 100mM NaCl vs. No Treatment
  misc_feature: MA Experiment ID: 20000453 Result: Up-regulated in Transcription
  misc_feature: MA Experiment 20000453 PARAMETER Experiment Name: At_100uM_ABA_P Parameter: Age (day) Value: 15
  misc_feature: MA Experiment 20000453 PARAMETER Experiment Name: At_100uM_ABA_P Parameter: Organism Value: A. thaliana
  misc_feature: MA Experiment 20000453 PARAMETER Experiment Name: At_100uM_ABA_P Parameter: Plant Line Value: WS
  misc_feature: MA Experiment 20000453 PARAMETER Experiment Name: At_100uM_ABA_P Parameter: Timepoint (hr) Value: 24
  misc_feature: MA Experiment 20000453 PARAMETER Experiment Name: At_100uM_ABA_P Parameter: Tissue Value: Aerial
  misc_feature: MA Experiment 20000453 PARAMETER Experiment Name: At_100uM_ABA_P Parameter: Treatment Value: 100uM ABA vs. No Treatment
  misc_feature: MA Experiment ID: 20000455 Result: Up-regulated in Transcription
  misc_feature: MA Experiment 20000455 PARAMETER Experiment Name: At_100uM_ABA_P Parameter: Age (day) Value: 16
  misc_feature: MA Experiment 20000455 PARAMETER Experiment Name: At_100uM_ABA_P Parameter: Organism Value: A. thaliana
  misc_feature: MA Experiment 20000455 PARAMETER Experiment Name: At_100uM_ABA_P Parameter: Plant Line Value: WS
  misc_feature: MA Experiment 20000455 PARAMETER Experiment Name: At_100uM_ABA_P Parameter: Timepoint (hr) Value: 48
  misc_feature: MA Experiment 20000455 PARAMETER Experiment Name: At_100uM_ABA_P Parameter: Tissue Value: Aerial
  misc_feature: MA Experiment 20000455 PARAMETER Experiment Name: At_100uM_ABA_P Parameter: Treatment Value: 100uM ABA vs. No Treatment
  misc_feature: MA Experiment ID: 20001248 Result: Down-regulated in Transcription
  misc_feature: MA Experiment 20001248 PARAMETER Experiment Name: At_Far-red-induction_P Parameter: Age (day) Value: 7
  misc_feature: MA Experiment 20001248 PARAMETER Experiment Name: At_Far-red-induction_P Parameter: Light Value: Far-red vs. White
  misc_feature: MA Experiment 20001248 PARAMETER Experiment Name: At_Far-red-induction_P Parameter: Organism Value: A. thaliana
  misc_feature: MA Experiment 20001248 PARAMETER Experiment Name: At_Far-red-induction_P Parameter: Plant Line Value: Columbia
  misc_feature: MA Experiment 20001248 PARAMETER Experiment Name: At_Far-red-induction_P Parameter: Timepoint (hr) Value: 4
  misc_feature: MA Experiment 20001248 PARAMETER Experiment Name: At_Far-red-induction_P Parameter: Tissue Value: Whole Plant
  misc_feature: MA Experiment ID: 20001554 Result: Up-regulated in Transcription
  misc_feature: MA Experiment 20001554 PARAMETER Experiment Name: At_Drought_Soil_Dry_P Parameter: Age (day) Value: 21
  misc_feature: MA Experiment 20001554 PARAMETER Experiment Name: At_Drought_Soil_Dry_P Parameter: Organism Value: A. thaliana
  misc_feature: MA Experiment 20001554 PARAMETER Experiment Name: At_Drought_Soil_Dry_P Parameter: Plant Line Value: WS
  misc_feature: MA Experiment 20001554 PARAMETER Experiment Name: At_Drought_Soil_Dry_P Parameter: Post Timepoint (hr) Value: None
  misc_feature: MA Experiment 20001554 PARAMETER Experiment Name: At_Drought_Soil_Dry_P Parameter: Post-Treatment Value: None
  misc_feature: MA Experiment 20001554 PARAMETER Experiment Name: At_Drought_Soil_Dry_P Parameter: Timepoint (day) Value: 7
  misc_feature: MA Experiment 20001554 PARAMETER Experiment Name: At_Drought_Soil_Dry_P Parameter: Treatment Value: Drought vs. No Drought
  misc_feature: MA Experiment ID: 20001555 Result: Up-regulated in Transcription
  misc_feature: MA Experiment 20001555 PARAMETER Experiment Name: At_Drought_Soil_Dry_P Parameter: Age (day) Value: 24
  misc_feature: MA Experiment 20001555 PARAMETER Experiment Name: At_Drought_Soil_Dry_P Parameter: Organism Value: A. thaliana
  misc_feature: MA Experiment 20001555 PARAMETER Experiment Name: At_Drought_Soil_Dry_P Parameter: Plant Line Value: WS
  misc_feature: MA Experiment 20001555 PARAMETER Experiment Name: At_Drought_Soil_Dry_P Parameter: Post Timepoint (hr) Value: None
  misc_feature: MA Experiment 20001555 PARAMETER Experiment Name: At_Drought_Soil_Dry_P Parameter: Post-Treatment Value: None
  misc_feature: MA Experiment 20001555 PARAMETER Experiment Name: At_Drought_Soil_Dry_P Parameter: Timepoint (day) Value: 10
  misc_feature: MA Experiment 20001555 PARAMETER Experiment Name: At_Drought_Soil_Dry_P Parameter: Treatment Value: Drought vs. No Drought
  misc_feature: MA Experiment ID: 20001556 Result: Up-regulated in Transcription
  misc_feature: MA Experiment 20001556 PARAMETER Experiment Name: At_Drought_Soil_Dry_P Parameter: Age (day) Value: 26
  misc_feature: MA Experiment 20001556 PARAMETER Experiment Name: At_Drought_Soil_Dry_P Parameter: Organism Value: A. thaliana
  misc_feature: MA Experiment 20001556 PARAMETER Experiment Name: At_Drought_Soil_Dry_P Parameter: Plant Line Value: WS
  misc_feature: MA Experiment 20001556 PARAMETER Experiment Name: At_Drought_Soil_Dry_P Parameter: Post Timepoint (hr) Value: None
  misc_feature: MA Experiment 20001556 PARAMETER Experiment Name: At_Drought_Soil_Dry_P Parameter: Post-Treatment Value: None
  misc_feature: MA Experiment 20001556 PARAMETER Experiment Name: At_Drought_Soil_Dry_P Parameter: Timepoint (day) Value: 12
  misc_feature: MA Experiment 20001556 PARAMETER Experiment Name: At_Drought_Soil_Dry_P Parameter: Treatment Value: Drought vs. No Drought
  misc_feature: MA Experiment ID: 20001559 Result: Up-regulated in Transcription
  misc_feature: MA Experiment 20001559 PARAMETER Experiment Name: At_Drought_Soil_Dry_P Parameter: Age (day) Value: 28
  misc_feature: MA Experiment 20001559 PARAMETER Experiment Name: At_Drought_Soil_Dry_P Parameter: Organism Value: A. thaliana
  misc_feature: MA Experiment 20001559 PARAMETER Experiment Name: At_Drought_Soil_Dry_P Parameter: Plant Line Value: WS
  misc_feature: MA Experiment 20001559 PARAMETER Experiment Name: At_Drought_Soil_Dry_P Parameter: Post Timepoint (hr) Value: 29
  misc_feature: MA Experiment 20001559 PARAMETER Experiment Name: At_Drought_Soil_Dry_P Parameter: Post-Treatment Value: Re-Water vs. No Drought
  misc_feature: MA Experiment 20001559 PARAMETER Experiment Name: At_Drought_Soil_Dry_P Parameter: Timepoint (day) Value: 14
  misc_feature: MA Experiment 20001559 PARAMETER Experiment Name: At_Drought_Soil_Dry_P Parameter: Treatment Value: Drought vs. No Drought
  misc_feature: MA Experiment ID: 20001904 Result: Up-regulated in Transcription
  misc_feature: MA Experiment 20001904 PARAMETER Experiment Name: At_Drought_Reproduction_P Parameter: Age (day) Value: 37
  misc_feature: MA Experiment 20001904 PARAMETER Experiment Name: At_Drought_Reproduction_P Parameter: Organism Value: A. thaliana
  misc_feature: MA Experiment 20001904 PARAMETER Experiment Name: At_Drought_Reproduction_P Parameter: Plant Line Value: WS
  misc_feature: MA Experiment 20001904 PARAMETER Experiment Name: At_Drought_Reproduction_P Parameter: Timepoint (day) Value: 7
  misc_feature: MA Experiment 20001904 PARAMETER Experiment Name: At_Drought_Reproduction_P Parameter: Tissue Value: Rosettes
  misc_feature: MA Experiment 20001904 PARAMETER Experiment Name: At_Drought_Reproduction_P Parameter: Treatment Value: Drought vs. No Drought
tggagcatcactggcagcaatgaccaccactgagtttcaaagctgcttcatcttcctcctcttatgtctcttctcactcgtctgttactctctctttttcaggaaaccaagctcaagacgggacgcccatggctgtgatctgcctccgagccctccttctttgccagtcatcggccatcttcaccttatcctctcttcccttgtccacaagtcttttcaaaagatctcctccaactacggacctctcctccatctccgcatcttcaacgttcccatagtcctcgtctcctctgcgtcagtggcctacgatatcttcagggtgcatgacttgaacgtctcttctcgcggctcccctccgtttgaggagtcactgttgttcggatctaccggcttcattagtgctccctatggagattatttcaagttcatgaagaaacacctggtcacaaagctccttggaccacaggcactcgagcgctcacgcctcatccggacaaatgaactagaacggttttacataaacctgcttgataaggcgacgaagaaggagagcgttgaaattggtaaggaagcgatgaagctcagtaacaacagcatctgcaagatgatcatggggaggagttgtttagaggaaaagggtgaggcagagagagtcaggggtttgattatcgagtcgttttacttgacgaagaaatttttcttggcattcactttgcgcgggctgctcgagaagcttggaatctcgctgttcaaaaaagaaataatgggagtttcccgcagatttgatgatttgctcgaaaggtatcttagggaacatgaagagaaaccagataatgagcatcaagatacggacatgattgatgcactattggcagcttatcgagacgaaaaggccgagtataagatcactaggaaccagatcaaggcgtttttagtggatattttcattgcgggcactgacatctcggcgctaacaacgcagggaacaatggctgagatcattaacaaccctaacatatttgtgagaattagagaagaaatcgattctgttgtagggaaatcaaggctgattcaagaaacggatctaccaaagctcccttacttgcaagcggtagtcaaagaagggcttagattgcacccgcctacgcctctcatggtaagggagttccaagaagggtgtaaggtcaaaggtttctacataccagcgagcacaacccttgttgttaatggttatgctgtgatgagagatccaaatgtctgggaagaccctgaggagttcaagccggagaggtttttagcttcttcaagattaatgcaagaggacgagataagagagcaagccctcaagtacatcgctttcggtagtggaaggagaggctgcccaggagcaaatgtagcttatatctttgtaggaaccgcgattggaatgatggtgcaatgctttgactggagaatcaatggagaaaaggttgacatgaaagaggccattggaggactgaacctgaccttggctcatccccttaagtgcactcctgttgctcgattcccaaaacctttttaagttcaaattattaaaaccgatgttccatgtttgatgttggtgactggactagtgttgtaagatggttgaagtaaaataataaggaagcttgctttctgttgttctg

SEQ ID NO: 42594 - protein, 519 aa, Arabidopsis thaliana
  peptide (1)..(519): Ceres Seq. ID no. 13489636
  misc_feature (4)..(518): Homolog of NCBI NO: 30685997 NR Description: cytochrome P450 family [Arabidopsis thaliana]
  misc_feature (4)..(516): Homolog of NCBI NO: 15231052 NR Description: cytochrome P450 family [Arabidopsis thaliana]
  misc_feature (17)..(514): Homolog of NCBI NO: 15233774 NR Description: cytochrome P450 family [Arabidopsis thaliana]
  misc_feature (4)..(109): Homolog of NCBI NO: 9293964 NR Description: contains similarity to cytochrome
  misc_feature (226)..(519): Homolog of NCBI NO: 9293964 NR Description: contains similarity to cytochrome
  misc_feature (4)..(519): Homolog of NCBI NO: 9294003 NR Description: cytochrome P450-like protein [Arabidopsis
  misc_feature (15)..(514): Homolog of NCBI NO: 9293969 NR Description: cytochrome P450-like protein [Arabidopsis
  misc_feature (4)..(519): Homolog of NCBI NO: 15231047 NR Description: cytochrome P450 family [Arabidopsis thaliana]
  misc_feature (7)..(519): Homolog of NCBI NO: 21553521 NR Description: cytochrome P450, putative [Arabidopsis thaliana]
  misc_feature (7)..(519): Homolog of NCBI NO: 15231049 NR Description: cytochrome P450 family [Arabidopsis thaliana]
GASLAAMTTTEFQSCFIFLLLCLFSLVCYSLFFRKPSSRRDAHGCDLPPSPPSLPVIGHLHLILSSLVHKSFQKISSNYGPLLHLRIFNVPIVLVSSASVAYDIFRVHDLNVSSRGSPPFEESLLFGSTGFISAPYGDYFKFMKKHLVTKLLGPQALERSRLIRTNELERFYINLLDKATKKESVEIGKEAMKLSNNSICKMIMGRSCLEEKGEAERVRGLIIESFYLTKKFFLAFTLRGLLEKLGISLFKKEIMGVSRRFDDLLERYLREHEEKPDNEHQDTDMIDALLAAYRDEKAEYKITRNQIKAFLVDIFIAGTDISALTTQGTMAEIINNPNIFVRIREEIDSVVGKSRLIQETDLPKLPYLQAVVKEGLRLHPPTPLMVREFQEGCKVKGFYIPASTTLVVNGYAVMRDPNVWEDPEEFKPERFLASSRLMQEDEIREQALKYIAFGSGRRGCPGANVAYIFVGTAIGMMVQCFDWRINGEKVDMKEAIGGLNLTLAHPLKCTPVARFPKPF

SEQ ID NO: 42595 - protein, 513 aa, Arabidopsis thaliana
  peptide (1)..(513): Ceres Seq. ID no. 13489637
  misc_feature (1)..(512): Homolog of NCBI NO: 30685997 NR Description: cytochrome P450 family [Arabidopsis thaliana]
  misc_feature (1)..(510): Homolog of NCBI NO: 15231052 NR Description: cytochrome P450 family [Arabidopsis thaliana]
  misc_feature (11)..(508): Homolog of NCBI NO: 15233774 NR Description: cytochrome P450 family [Arabidopsis thaliana]
  misc_feature (1)..(103): Homolog of NCBI NO: 9293964 NR Description: contains similarity to cytochrome
  misc_feature (220)..(513): Homolog of NCBI NO: 9293964 NR Description: contains similarity to cytochrome
  misc_feature (1)..(513): Homolog of NCBI NO: 9294003 NR Description: cytochrome P450-like protein [Arabidopsis
  misc_feature (9)..(508): Homolog of NCBI NO: 9293969 NR Description: cytochrome P450-like protein [Arabidopsis
  misc_feature (1)..(513): Homolog of NCBI NO: 15231047 NR Description: cytochrome P450 family [Arabidopsis thaliana]
  misc_feature (1)..(513): Homolog of NCBI NO: 21553521 NR Description: cytochrome P450, putative [Arabidopsis thaliana]
  misc_feature (1)..(513): Homolog of NCBI NO: 15231049 NR Description: cytochrome P450 family [Arabidopsis thaliana]
MTTTEFQSCFIFLLLCLFSLVCYSLFFRKPSSRRDAHGCDLPPSPPSLPVIGHLHLILSSLVHKSFQKISSNYGPLLHLRIFNVPIVLVSSASVAYDIFRVHDLNVSSRGSPPFEESLLFGSTGFISAPYGDYFKFMKKHLVTKLLGPQALERSRLIRTNELERFYINLLDKATKKESVEIGKEAMKLSNNSICKMIMGRSCLEEKGEAERVRGLIIESFYLTKKFFLAFTLRGLLEKLGISLFKKEIMGVSRRFDDLLERYLREHEEKPDNEHQDTDMIDALLAAYRDEKAEYKITRNQIKAFLVDIFIAGTDISALTTQGTMAEIINNPNIFVRIREEIDSVVGKSRLIQETDLPKLPYLQAVVKEGLRLHPPTPLMVREFQEGCKVKGFYIPASTTLVVNGYAVMRDPNVWEDPEEFKPERFLASSRLMQEDEIREQALKYIAFGSGRRGCPGANVAYIFVGTAIGMMVQCFDWRINGEKVDMKEAIGGLNLTLAHPLKCTPVARFPKPF

SEQ ID NO: 42596 - protein, 377 aa, Arabidopsis thaliana
  peptide (1)..(377): Ceres Seq. ID no. 13489638
  misc_feature (1)..(372): Homolog of NCBI NO: 7430617 NR Description: cytochrome P450 - Arabidopsis thaliana
  misc_feature (1)..(376): Homolog of NCBI NO: 30685997 NR Description: cytochrome P450 family [Arabidopsis thaliana]
  misc_feature (1)..(374): Homolog of NCBI NO: 15231052 NR Description: cytochrome P450 family [Arabidopsis thaliana]
  misc_feature (1)..(372): Homolog of NCBI NO: 15233774 NR Description: cytochrome P450 family [Arabidopsis thaliana]
  misc_feature (84)..(377): Homolog of NCBI NO: 9293964 NR Description: contains similarity to cytochrome
  misc_feature (1)..(377): Homolog of NCBI NO: 9294003 NR Description: cytochrome P450-like protein [Arabidopsis
  misc_feature (1)..(372): Homolog of NCBI NO: 9293969 NR Description: cytochrome P450-like protein [Arabidopsis
  misc_feature (1)..(377): Homolog of NCBI NO: 15231047 NR Description: cytochrome P450 family [Arabidopsis thaliana]
  misc_feature (1)..(377): Homolog of NCBI NO: 21553521 NR Description: cytochrome P450, putative [Arabidopsis thaliana]
  misc_feature (1)..(377): Homolog of NCBI NO: 15231049 NR Description: cytochrome P450 family [Arabidopsis thaliana]
MKKHLVTKLLGPQALERSRLIRTNELERFYINLLDKATKKESVEIGKEAMKLSNNSICKMIMGRSCLEEKGEAERVRGLIIESFYLTKKFFLAFTLRGLLEKLGISLFKKEIMGVSRRFDDLLERYLREHEEKPDNEHQDTDMIDALLAAYRDEKAEYKITRNQIKAFLVDIFIAGTDISALTTQGTMAEIINNPNIFVRIREEIDSVVGKSRLIQETDLPKLPYLQAVVKEGLRLHPPTPLMVREFQEGCKVKGFYIPASTTLVVNGYAVMRDPNVWEDPEEFKPERFLASSRLMQEDEIREQALKYIAFGSGRRGCPGANVAYIFVGTAIGMMVQCFDWRINGEKVDMKEAIGGLNLTLAHPLKCTPVARFPKPF

SEQ ID NO: 42597 - DNA, 889 bp, Arabidopsis thaliana
  misc_feature (1)..(889): Ceres Seq. ID no. 12330482
  misc_feature: MA Experiment ID: 108434 Result: Down-regulated in Transcription
  misc_feature: MA Experiment 108434 PARAMETER Experiment Name: At_Root_Tips_cDNA_P Parameter: Tissue Value: Root Tips
  misc_feature: MA Experiment ID: 108463 Result: Up-regulated in Transcription
  misc_feature: MA Experiment 108463 PARAMETER Experiment Name: At_Germinating_Seeds_cDNA_P Parameter: Age (day) Value: 3 vs. 0
  misc_feature: MA Experiment 108463 PARAMETER Experiment Name: At_Germinating_Seeds_cDNA_P Parameter: Tissue Value: Germinating Seeds
  misc_feature: MA Experiment ID: 108464 Result: Up-regulated in Transcription
  misc_feature: MA Experiment 108464 PARAMETER Experiment Name: At_Germinating_Seeds_cDNA_P Parameter: Age (day) Value: 4 vs. 0
  misc_feature: MA Experiment 108464 PARAMETER Experiment Name: At_Germinating_Seeds_cDNA_P Parameter: Tissue Value: Germinating Seeds
  misc_feature: MA Experiment ID: 108469 Result: Up-regulated in Transcription
  misc_feature: MA Experiment ID: 108573 Result: Up-regulated in Transcription
  misc_feature: MA Experiment 108573 PARAMETER Experiment Name: At_Drought_cDNA_P Parameter: Timepoint (hr) Value: 6
  misc_feature: MA Experiment 108573 PARAMETER Experiment Name: At_Drought_cDNA_P Parameter: Tissue Value: Aerial
  misc_feature: MA Experiment 108573 PARAMETER Experiment Name: At_Drought_cDNA_P Parameter: Treatment Value: Drought vs. No Drought
  misc_feature: MA Experiment ID: 108579 Result: Up-regulated in Transcription
  misc_feature: MA Experiment 108579 PARAMETER Experiment Name: At_4deg_Cold_cDNA_P Parameter: Temperature (deg C) Value: 4 vs. 22
  misc_feature: MA Experiment 108579 PARAMETER Experiment Name: At_4deg_Cold_cDNA_P Parameter: Timepoint (hr) Value: 6
  misc_feature: MA Experiment 108579 PARAMETER Experiment Name: At_4deg_Cold_cDNA_P Parameter: Tissue Value: Aerial
  misc_feature: MA Experiment ID: 108667 Result: Up-regulated in Transcription
  misc_feature: MA Experiment 108667 PARAMETER Experiment Name: At_2mM_SA_cDNA_P Parameter: Plant Line Value: WS
  misc_feature: MA Experiment 108667 PARAMETER Experiment Name: At_2mM_SA_cDNA_P Parameter: Timepoint (hr) Value: 1
  misc_feature: MA Experiment 108667 PARAMETER Experiment Name: At_2mM_SA_cDNA_P Parameter: Treatment Value: 2mM SA vs. No Treatment
  misc_feature: MA Experiment ID: 108668 Result: Up-regulated in Transcription
  misc_feature: MA Experiment 108668 PARAMETER Experiment Name: At_2mM_SA_cDNA_P Parameter: Plant Line Value: WS
  misc_feature: MA Experiment 108668 PARAMETER Experiment Name: At_2mM_SA_cDNA_P Parameter: Timepoint (hr) Value: 6
  misc_feature: MA Experiment 108668 PARAMETER Experiment Name: At_2mM_SA_cDNA_P Parameter: Treatment Value: 2mM SA vs. No Treatment
  misc_feature: MA Experiment ID: 20000069 Result: Up-regulated in Transcription
  misc_feature: MA Experiment 20000069 PARAMETER Experiment Name: At_100uM_ABA_Mutants_cDNA_P Parameter: Plant Line Value: CS23
  misc_feature: MA Experiment 20000069 PARAMETER Experiment Name: At_100uM_ABA_Mutants_cDNA_P Parameter: Timepoint (hr) Value: 6
  misc_feature: MA Experiment 20000069 PARAMETER Experiment Name: At_100uM_ABA_Mutants_cDNA_P Parameter: Tissue Value: Aerial
  misc_feature: MA Experiment 20000069 PARAMETER Experiment Name: At_100uM_ABA_Mutants_cDNA_P Parameter: Treatment Value: 100uM ABA vs. No Treatment
  misc_feature: MA Experiment ID: 20000071 Result: Up-regulated in Transcription
  misc_feature: MA Experiment 20000071 PARAMETER Experiment Name: At_100uM_ABA_Mutants_cDNA_P Parameter: Plant Line Value: CS8104
  misc_feature: MA Experiment 20000071 PARAMETER Experiment Name: At_100uM_ABA_Mutants_cDNA_P Parameter: Timepoint (hr) Value: 6
  misc_feature: MA Experiment 20000071 PARAMETER Experiment Name: At_100uM_ABA_Mutants_cDNA_P Parameter: Tissue Value: Aerial
  misc_feature: MA Experiment 20000071 PARAMETER Experiment Name: At_100uM_ABA_Mutants_cDNA_P Parameter: Treatment Value: 100uM ABA vs. No Treatment
  misc_feature: MA Experiment ID: 20000072 Result: Up-regulated in Transcription
  misc_feature: MA Experiment 20000072 PARAMETER Experiment Name: At_100uM_ABA_Mutants_cDNA_P Parameter: Plant Line Value: CS8105
  misc_feature: MA Experiment 20000072 PARAMETER Experiment Name: At_100uM_ABA_Mutants_cDNA_P Parameter: Timepoint (hr) Value: 6
  misc_feature: MA Experiment 20000072 PARAMETER Experiment Name: At_100uM_ABA_Mutants_cDNA_P Parameter: Tissue Value: Aerial
  misc_feature: MA Experiment 20000072 PARAMETER Experiment Name: At_100uM_ABA_Mutants_cDNA_P Parameter: Treatment Value: 100uM ABA vs. No Treatment
  misc_feature: MA Experiment ID: 20000112 Result: Up-regulated in Transcription
  misc_feature: MA Experiment 20000112 PARAMETER Experiment Name: At_42deg_Heat_cDNA_P Parameter: Temperature (deg C) Value: 42 vs. 22
  misc_feature: MA Experiment 20000112 PARAMETER Experiment Name: At_42deg_Heat_cDNA_P Parameter: Timepoint (hr) Value: 2
  misc_feature: MA Experiment 20000112 PARAMETER Experiment Name: At_42deg_Heat_cDNA_P Parameter: Tissue Value: Aerial
  misc_feature: MA Experiment ID: 20000117 Result: Up-regulated in Transcription
  misc_feature: MA Experiment 20000117 PARAMETER Experiment Name: At_100uM_ABA_Mutants_cDNA_P Parameter: Plant Line Value: Columbia
  misc_feature: MA Experiment 20000117 PARAMETER Experiment Name: At_100uM_ABA_Mutants_cDNA_P Parameter: Timepoint (hr) Value: 6
  misc_feature: MA Experiment 20000117 PARAMETER Experiment Name: At_100uM_ABA_Mutants_cDNA_P Parameter: Tissue Value: Aerial
  misc_feature: MA Experiment 20000117 PARAMETER Experiment Name: At_100uM_ABA_Mutants_cDNA_P Parameter: Treatment Value: 100uM ABA vs. No Treatment
  misc_feature: MA Experiment ID: 20000182 Result: Up-regulated in Transcription
  misc_feature: MA Experiment 20000182 PARAMETER Experiment Name: At_2mM_SA_P Parameter: Age (day) Value: 14
  misc_feature: MA Experiment 20000182 PARAMETER Experiment Name: At_2mM_SA_P Parameter: Organism Value: A. thaliana
  misc_feature: MA Experiment 20000182 PARAMETER Experiment Name: At_2mM_SA_P Parameter: Plant Line Value: WS
  misc_feature: MA Experiment 20000182 PARAMETER Experiment Name: At_2mM_SA_P Parameter: Timepoint (hr) Value: 6
  misc_feature: MA Experiment 20000182 PARAMETER Experiment Name: At_2mM_SA_P Parameter: Tissue Value: Aerial
  misc_feature: MA Experiment 20000182 PARAMETER Experiment Name: At_2mM_SA_P Parameter: Treatment Value: 2mM SA vs. No Treatment
  misc_feature: MA Experiment ID: 20000184 Result: Down-regulated in Transcription
  misc_feature: MA Experiment 20000184 PARAMETER Experiment Name: At_Shoots__P Parameter: Age (day) Value: 7
  misc_feature: MA Experiment 20000184 PARAMETER Experiment Name: At_Shoots__P Parameter: Tissue Value: Shoots vs. Whole Plant
  misc_feature: MA Experiment ID: 20000213 Result: Up-regulated in Transcription
  misc_feature: MA Experiment 20000213 PARAMETER Experiment Name: At_4deg_Cold_P Parameter: Timepoint (hr) Value: 2
  misc_feature: MA Experiment ID: 20000234 Result: Down-regulated in Transcription
  misc_feature: MA Experiment 20000234 PARAMETER Experiment Name: At_Siliques_P Parameter: Age (day) Value: 21
  misc_feature: MA Experiment 20000234 PARAMETER Experiment Name: At_Siliques_P Parameter: Organism Value: A. thaliana
  misc_feature: MA Experiment 20000234 PARAMETER Experiment Name: At_Siliques_P Parameter: Plant Line Value: WS
  misc_feature: MA Experiment 20000234 PARAMETER Experiment Name: At_Siliques_P Parameter: Tissue Value: Less Than 5mm Siliques vs. Whole Plant
  misc_feature: MA Experiment ID: 20000265 Result: Down-regulated in Transcription
  misc_feature: MA Experiment 20000265 PARAMETER Experiment Name: At_Open_Flower_P Parameter: Age (day) Value: 21
  misc_feature: MA Experiment 20000265 PARAMETER Experiment Name: At_Open_Flower_P Parameter: Plant Line Value: WS
  misc_feature: MA Experiment 20000265 PARAMETER Experiment Name: At_Open_Flower_P Parameter: Tissue Value: Closed Flower vs. Whole Plant
  misc_feature: MA Experiment ID: 20000286 Result: Down-regulated in Transcription
  misc_feature: MA Experiment 20000286 PARAMETER Experiment Name: At_Open_Flower_P Parameter: Age (day) Value: 21
  misc_feature: MA Experiment 20000286 PARAMETER Experiment Name: At_Open_Flower_P Parameter: Plant Line Value: WS
  misc_feature: MA Experiment 20000286 PARAMETER Experiment Name: At_Open_Flower_P Parameter: Tissue Value: Half Open vs. Whole Plant
  misc_feature: MA Experiment ID: 20000436 Result: Up-regulated in Transcription
  misc_feature: MA Experiment 20000436 PARAMETER Experiment Name: At_Drought_P Parameter: Age (day) Value: 7
  misc_feature: MA Experiment 20000436 PARAMETER Experiment Name: At_Drought_P Parameter: Organism Value: A. thaliana
  misc_feature: MA Experiment 20000436 PARAMETER Experiment Name: At_Drought_P Parameter: Plant Line Value: WS
  misc_feature: MA Experiment 20000436 PARAMETER Experiment Name: At_Drought_P Parameter: Timepoint (hr) Value: 12
  misc_feature: MA Experiment 20000436 PARAMETER Experiment Name: At_Drought_P Parameter: Tissue Value: Whole Plant
  misc_feature: MA Experiment 20000436 PARAMETER Experiment Name: At_Drought_P Parameter: Treatment Value: Drought vs. No Drought
  misc_feature: MA Experiment ID: 20000437 Result: Up-regulated in Transcription
  misc_feature: MA Experiment 20000437 PARAMETER Experiment Name: At_Drought_P Parameter: Age (day) Value: 8
  misc_feature: MA Experiment 20000437 PARAMETER Experiment Name: At_Drought_P Parameter: Organism Value: A. thaliana
  misc_feature: MA Experiment 20000437 PARAMETER Experiment Name: At_Drought_P Parameter: Plant Line Value: WS
  misc_feature: MA Experiment 20000437 PARAMETER Experiment Name: At_Drought_P Parameter: Timepoint (hr) Value: 24
  misc_feature: MA Experiment 20000437 PARAMETER Experiment Name: At_Drought_P Parameter: Tissue Value: Whole Plant
  misc_feature: MA Experiment 20000437 PARAMETER Experiment Name: At_Drought_P Parameter: Treatment Value: Drought vs. No Drought
  misc_feature: MA Experiment ID: 20000438 Result: Down-regulated in Transcription
  misc_feature: MA Experiment 20000438 PARAMETER Experiment Name: At_Shoots__P Parameter: Age (day) Value: 14
  misc_feature: MA Experiment 20000438 PARAMETER Experiment Name: At_Shoots__P Parameter: Tissue Value: Shoots vs. Whole Plant
  misc_feature: MA Experiment ID: 20000460 Result: Up-regulated in Transcription
  misc_feature: MA Experiment 20000460 PARAMETER Experiment Name: At_10percent_PEG_P Parameter: Age (day) Value: 12
  misc_feature: MA Experiment 20000460 PARAMETER Experiment Name: At_10percent_PEG_P Parameter: Organism Value: A. thaliana
  misc_feature: MA Experiment 20000460 PARAMETER Experiment Name: At_10percent_PEG_P Parameter: Plant Line Value: WS
  misc_feature: MA Experiment 20000460 PARAMETER Experiment Name: At_10percent_PEG_P Parameter: Timepoint (day) Value: 12
  misc_feature: MA Experiment 20000460 PARAMETER Experiment Name: At_10percent_PEG_P Parameter: Tissue Value: Whole Plant
  misc_feature: MA Experiment 20000460 PARAMETER Experiment Name: At_10percent_PEG_P Parameter: Treatment Value: 10percent PEG vs. No Treatment
  misc_feature: MA Experiment ID: 20000527 Result: Up-regulated in Transcription
  misc_feature: MA Experiment 20000527 PARAMETER Experiment Name: At_10percent_PEG_P Parameter: Age (day) Value: 20
  misc_feature: MA Experiment 20000527 PARAMETER Experiment Name: At_10percent_PEG_P Parameter: Organism Value: A. thaliana
  misc_feature: MA Experiment 20000527 PARAMETER Experiment Name: At_10percent_PEG_P Parameter: Plant Line Value: WS
  misc_feature: MA Experiment 20000527 PARAMETER Experiment Name: At_10percent_PEG_P Parameter: Timepoint (day) Value: 20
  misc_feature: MA Experiment 20000527 PARAMETER Experiment Name: At_10percent_PEG_P Parameter: Tissue Value: Whole Plant
  misc_feature: MA Experiment 20000527 PARAMETER Experiment Name: At_10percent_PEG_P Parameter: Treatment Value: 10percent PEG vs. No Treatment
  misc_feature: MA Experiment ID: 20000794 Result: Down-regulated in Transcription
  misc_feature: MA Experiment 20000794 PARAMETER Experiment Name: At_Petals_P Parameter: Age (day) Value: 23-25 days
  misc_feature: MA Experiment 20000794 PARAMETER Experiment Name: At_Petals_P Parameter: Plant Line Value: WS
  misc_feature: MA Experiment 20000794 PARAMETER Experiment Name: At_Petals_P Parameter: Tissue Value: Petals vs. Whole plant
  misc_feature: MA Experiment ID: 20001905 Result: Up-regulated in Transcription
  misc_feature: MA Experiment 20001905 PARAMETER Experiment Name: At_Drought_Reproduction_P Parameter: Age (day) Value: 40
  misc_feature: MA Experiment 20001905 PARAMETER Experiment Name: At_Drought_Reproduction_P Parameter: Organism Value: A. thaliana
  misc_feature: MA Experiment 20001905 PARAMETER Experiment Name: At_Drought_Reproduction_P Parameter: Plant Line Value: WS
  misc_feature: MA Experiment 20001905 PARAMETER Experiment Name: At_Drought_Reproduction_P Parameter: Timepoint (day) Value: 10
  misc_feature: MA Experiment 20001905 PARAMETER Experiment Name: At_Drought_Reproduction_P Parameter: Tissue Value: Rosettes
  misc_feature: MA Experiment 20001905 PARAMETER Experiment Name: At_Drought_Reproduction_P Parameter: Treatment Value: Drought vs. No Drought
aaaggttccttctgtttccagacaaagaaaacacaaattcattccctcctcctcttcatctcttttgcagatatggatggttattattctctgtctcccatctctgtcctccaccggattaaagattccttccatttcgccgtctctgcccttctcgccaacctcttctccgctctcttcaccttcttcttcgctttaggggctttgatcggccaagaaacagagagcggtttcatcagaggagccgccgttggtgctatctcaggcgccgtcttctccatcgaagtctttgaatcttccctcctcctttggcaatccgatgagtctggaattggatgccttctctacttgccttttgagcgggaggcttgttcgtgagcgtatcggtcctgcaatgctaagtgccgtccagagtcagatgggagctgtggagtcccagttccaagatcatacagacatctttgacactgccatttcaaagggtctcactggggactctctcaacaggatccctaaggtccgaatcacagacacctctccggagattgtctcttgctctgtctgccttcaggactttcaggtgggagagacagttagaagtttgccgcactgccatcatatgttccacctaccatgcatcgacaaatggcttcgcaggcatgcttcttgtcccttgtgcagaagacatctttgaattgattttgaactcttctttcttctcttctttgtacatgaggtataggcatacacacacacacatatatacacactagtagtcttccttgattttttttagattacacgttacacagattttgatgcaccaatcattgtaacttcactcatctcttggagatcctgtttatttatgctacttattcttggctcc

SEQ ID NO: 42598 - protein, 125 aa, Arabidopsis thaliana
  peptide (1)..(125): Ceres Seq. ID no. 12330483
  misc_feature (51)..(117): Homolog of NCBI NO: 18855037 NR Description: putative zinc finger protein [Oryza sativa]
  misc_feature (50)..(117): Homolog of NCBI NO: 37536572 NR Description: hypothetical protein [Oryza sativa (japonica
  misc_feature (21)..(102): Homolog of NCBI NO: 7485279 NR Description: hypothetical protein A_TM017A05.9 - Arabidopsis
  misc_feature (43)..(117): Homolog of NCBI NO: 7485279 NR Description: hypothetical protein A_TM017A05.9 - Arabidopsis
  misc_feature (37)..(117): Homolog of NCBI NO: 27524902 NR Description: NEP1-interacting protein [Arabidopsis thaliana]
  misc_feature (37)..(117): Homolog of NCBI NO: 26451101 NR Description: unknown protein [Arabidopsis thaliana]
  misc_feature (21)..(117): Homolog of NCBI NO: 25411815 NR Description: hypothetical protein At2g17730 [imported] -
  misc_feature (21)..(117): Homolog of NCBI NO: 30680091 NR Description: expressed protein [Arabidopsis thaliana]
  misc_feature (21)..(117): Homolog of NCBI NO: 26452210 NR Description: unknown protein [Arabidopsis thaliana]
  misc_feature (25)..(117): Homolog of NCBI NO: 15239242 NR Description: putative protein; protein id: At5g66070.1
KGSFCFQTKKTQIHSLLLFISFADMDGYYSLSPISVLHRIKDSFHFAVSALLANLFSALFTFFFALGALIGQETESGFIRGAAVGAISGAVFSIEVFESSLLLWQSDESGIGCLLYLPFEREACS

SEQ ID NO: 42599 - protein, 124 aa, Arabidopsis thaliana
  peptide (1)..(124): Ceres Seq. ID no. 12330484
  misc_feature (79)..(120): Pfam Name: Zinc finger, C3HC4 type (RING finger) Pfam Description: Zinc finger, C3HC4 type (RING finger)
  misc_feature (5)..(124): Homolog of NCBI NO: 34901682 NR Description: P0434A03.5 [Oryza sativa (japonica
  misc_feature (12)..(124): Homolog of NCBI NO: 18855037 NR Description: putative zinc finger protein [Oryza sativa]
  misc_feature (5)..(124): Homolog of NCBI NO: 37536572 NR Description: hypothetical protein [Oryza sativa (japonica
  misc_feature (1)..(119): Homolog of NCBI NO: 7485279 NR Description: hypothetical protein A_TM017A05.9 - Arabidopsis
  misc_feature (1)..(124): Homolog of NCBI NO: 27524902 NR Description: NEP1-interacting protein [Arabidopsis thaliana]
  misc_feature (1)..(124): Homolog of NCBI NO: 26451101 NR Description: unknown protein [Arabidopsis thaliana]
  misc_feature (1)..(119): Homolog of NCBI NO: 25411815 NR Description: hypothetical protein At2g17730 [imported] -
  misc_feature (1)..(124): Homolog of NCBI NO: 30680091 NR Description: expressed protein [Arabidopsis thaliana]
  misc_feature (1)..(124): Homolog of NCBI NO: 26452210 NR Description: unknown protein [Arabidopsis thaliana]
  misc_feature (5)..(124): Homolog of NCBI NO: 15239242 NR Description: putative protein; protein id: At5g66070.1
MSLELDAFSTCLLSGRLVRERIGPAMLSAVQSQMGAVESQFQDHTDIFDTAISKGLTGDSLNRIPKVRITDTSPEIVSCSVCLQDFQVGETVRSLPHCHHMFHLPCIDKWLRRHASCPLCRRHL

SEQ ID NO: 42600 - protein, 101 aa, Arabidopsis thaliana
  peptide (1)..(101): Ceres Seq. ID no. 12330485
  misc_feature (27)..(93): Homolog of NCBI NO: 18855037 NR Description: putative zinc finger protein [Oryza sativa]
  misc_feature (26)..(93): Homolog of NCBI NO: 37536572 NR Description: hypothetical protein [Oryza sativa (japonica
  misc_feature (1)..(78): Homolog of NCBI NO: 7485279 NR Description: hypothetical protein A_TM017A05.9 - Arabidopsis
  misc_feature (19)..(93): Homolog of NCBI NO: 7485279 NR Description: hypothetical protein A_TM017A05.9 - Arabidopsis
  misc_feature (13)..(93): Homolog of NCBI NO: 27524902 NR Description: NEP1-interacting protein [Arabidopsis thaliana]
  misc_feature (13)..(93): Homolog of NCBI NO: 26451101 NR Description: unknown protein [Arabidopsis thaliana]
  misc_feature (1)..(93): Homolog of NCBI NO: 25411815 NR Description: hypothetical protein At2g17730 [imported] -
  misc_feature (1)..(93): Homolog of NCBI NO: 30680091 NR Description: expressed protein [Arabidopsis thaliana]
  misc_feature (1)..(93): Homolog of NCBI NO: 26452210 NR Description: unknown protein [Arabidopsis thaliana]
  misc_feature (1)..(93): Homolog of NCBI NO: 15239242 NR Description: putative protein; protein id: At5g66070.1
MDGYYSLSPISVLHRIKDSFHFAVSALLANLFSALFTFFFALGALIGQETESGFIRGAAVGAISGAVFSIEVFESSLLLWQSDESGIGCLLYLPFEREACS

SEQ ID NO: 42601 - DNA, 1326 bp, Arabidopsis thaliana
  misc_feature (1)..(1326): Ceres Seq. ID no. 12331255
  misc_feature: MA Experiment ID: 108434 Result: Up-regulated in Transcription
  misc_feature: MA Experiment 108434 PARAMETER Experiment Name: At_Root_Tips_cDNA_P Parameter: Tissue Value: Root Tips
  misc_feature: MA Experiment ID: 108461 Result: Up-regulated in Transcription
  misc_feature: MA Experiment 108461 PARAMETER Experiment Name: At_Germinating_Seeds_cDNA_P Parameter: Age (day) Value: 1 vs. 0
  misc_feature: MA Experiment 108461 PARAMETER Experiment Name: At_Germinating_Seeds_cDNA_P Parameter: Tissue Value: Germinating Seeds
  misc_feature: MA Experiment ID: 108462 Result: Up-regulated in Transcription
  misc_feature: MA Experiment 108462 PARAMETER Experiment Name: At_Germinating_Seeds_cDNA_P Parameter: Age (day) Value: 2 vs. 0
  misc_feature: MA Experiment 108462 PARAMETER Experiment Name: At_Germinating_Seeds_cDNA_P Parameter: Tissue Value: Germinating Seeds
  misc_feature: MA Experiment ID: 108464 Result: Up-regulated in Transcription
  misc_feature: MA Experiment 108464 PARAMETER Experiment Name: At_Germinating_Seeds_cDNA_P Parameter: Age (day) Value: 4 vs. 0
  misc_feature: MA Experiment 108464 PARAMETER Experiment Name: At_Germinating_Seeds_cDNA_P Parameter: Tissue Value: Germinating Seeds
  misc_feature: MA Experiment ID: 108573 Result: Down-regulated in Transcription
  misc_feature: MA Experiment 108573 PARAMETER Experiment Name: At_Drought_cDNA_P Parameter: Timepoint (hr) Value: 6
  misc_feature: MA Experiment 108573 PARAMETER Experiment Name: At_Drought_cDNA_P Parameter: Tissue Value: Aerial
  misc_feature: MA Experiment 108573 PARAMETER Experiment Name: At_Drought_cDNA_P Parameter: Treatment Value: Drought vs. No Drought
  misc_feature: MA Experiment ID: 108576 Result: Down-regulated in Transcription
  misc_feature: MA Experiment 108576 PARAMETER Experiment Name: At_42deg_Heat_cDNA_P Parameter: Temperature (deg C) Value: 42 vs. 22
  misc_feature: MA Experiment 108576 PARAMETER Experiment Name: At_42deg_Heat_cDNA_P Parameter: Timepoint (hr) Value: 1
  misc_feature: MA Experiment 108576 PARAMETER Experiment Name: At_42deg_Heat_cDNA_P Parameter: Tissue Value: Aerial
  misc_feature: MA Experiment ID: 108577 Result: Down-regulated in Transcription
  misc_feature: MA Experiment 108577 PARAMETER Experiment Name: At_42deg_Heat_cDNA_P Parameter: Temperature (deg C) Value: 42 vs. 22
  misc_feature: MA Experiment 108577 PARAMETER Experiment Name: At_42deg_Heat_cDNA_P Parameter: Timepoint (hr) Value: 6
  misc_feature: MA Experiment 108577 PARAMETER Experiment Name: At_42deg_Heat_cDNA_P Parameter: Tissue Value: Aerial
  misc_feature: MA Experiment ID: 108595 Result: Down-regulated in Transcription
  misc_feature: MA Experiment 108595 PARAMETER Experiment Name: At_Ler-pi_Ovule_cDNA_P Parameter: Plant Line Value: null
  misc_feature: MA Experiment ID: 20000087 Result: Down-regulated in Transcription
  misc_feature: MA Experiment 20000087 PARAMETER Experiment Name: At_100uM_ABA_Mutants_cDNA_P Parameter: Plant Line Value: WS
  misc_feature: MA Experiment 20000087 PARAMETER Experiment Name: At_100uM_ABA_Mutants_cDNA_P Parameter: Timepoint (hr) Value: 6
  misc_feature: MA Experiment 20000087 PARAMETER Experiment Name: At_100uM_ABA_Mutants_cDNA_P Parameter: Tissue Value: Aerial
  misc_feature: MA Experiment 20000087 PARAMETER Experiment Name: At_100uM_ABA_Mutants_cDNA_P Parameter: Treatment Value: 100uM ABA vs. No Treatment
  misc_feature: MA Experiment ID: 20000113 Result: Down-regulated in Transcription
  misc_feature: MA Experiment 20000113 PARAMETER Experiment Name: At_42deg_Heat_cDNA_P Parameter: Temperature (deg C) Value: 42 vs. 22
  misc_feature: MA Experiment 20000113 PARAMETER Experiment Name: At_42deg_Heat_cDNA_P Parameter: Timepoint (hr) Value: 8
  misc_feature: MA Experiment 20000113 PARAMETER Experiment Name: At_42deg_Heat_cDNA_P Parameter: Tissue Value: Aerial
  misc_feature: MA Experiment ID: 20000173 Result: Down-regulated in Transcription
  misc_feature: MA Experiment 20000173 PARAMETER Experiment Name: At_42deg_Heat_P Parameter: Age (day) Value: 14
  misc_feature: MA Experiment 20000173 PARAMETER Experiment Name: At_42deg_Heat_P Parameter: Organism Value: A. thaliana
  misc_feature: MA Experiment 20000173 PARAMETER Experiment Name: At_42deg_Heat_P Parameter: Plant Line Value: WS
  misc_feature: MA Experiment 20000173 PARAMETER Experiment Name: At_42deg_Heat_P Parameter: Temperature (deg C) Value: 42 vs. 22
  misc_feature: MA Experiment 20000173 PARAMETER Experiment Name: At_42deg_Heat_P Parameter: Timepoint (hr) Value: 6
  misc_feature: MA Experiment 20000173 PARAMETER Experiment Name: At_42deg_Heat_P Parameter: Tissue Value: Aerial
  misc_feature: MA Experiment ID: 20000180 Result: Up-regulated in Transcription
  misc_feature: MA Experiment 20000180 PARAMETER Experiment Name: At_Germinating_Seeds_P Parameter: Age (hr) Value: 24 vs. 0
  misc_feature: MA Experiment 20000180 PARAMETER Experiment Name: At_Germinating_Seeds_P Parameter: Tissue Value: Germinating Seeds
  misc_feature: MA Experiment ID: 20000227 Result: Up-regulated in Transcription
  misc_feature: MA Experiment 20000227 PARAMETER Experiment Name: At_Root-Tips-vs-Tops_P Parameter: Tissue Value: Root Tips vs. Root Tops
  misc_feature: MA Experiment ID: 20000267 Result: Down-regulated in Transcription
  misc_feature: MA Experiment 20000267 PARAMETER Experiment Name: At_Drought_P Parameter: Age (day) Value: 7
  misc_feature: MA Experiment 20000267 PARAMETER Experiment Name: At_Drought_P Parameter: Organism Value: A. thaliana
  misc_feature: MA Experiment 20000267 PARAMETER Experiment Name: At_Drought_P Parameter: Plant Line Value: WS
  misc_feature: MA Experiment 20000267 PARAMETER Experiment Name: At_Drought_P Parameter: Timepoint (hr) Value: 6
  misc_feature: MA Experiment 20000267 PARAMETER Experiment Name: At_Drought_P Parameter: Tissue Value: Whole Plant
  misc_feature: MA Experiment 20000267 PARAMETER Experiment Name: At_Drought_P Parameter: Treatment Value: Drought vs. No Drought
  misc_feature: MA Experiment ID: 20000436 Result: Down-regulated in Transcription
  misc_feature: MA Experiment 20000436 PARAMETER Experiment Name: At_Drought_P Parameter: Age (day) Value: 7
  misc_feature: MA Experiment 20000436 PARAMETER Experiment Name: At_Drought_P Parameter: Organism Value: A. thaliana
  misc_feature: MA Experiment 20000436 PARAMETER Experiment Name: At_Drought_P Parameter: Plant Line Value: WS
  misc_feature: MA Experiment 20000436 PARAMETER Experiment Name: At_Drought_P Parameter: Timepoint (hr) Value: 12
  misc_feature: MA Experiment 20000436 PARAMETER Experiment Name: At_Drought_P Parameter: Tissue Value: Whole Plant
  misc_feature: MA Experiment 20000436 PARAMETER Experiment Name: At_Drought_P Parameter: Treatment Value: Drought vs. No Drought
  misc_feature: MA Experiment ID: 20000437 Result: Down-regulated in Transcription
  misc_feature: MA Experiment 20000437 PARAMETER Experiment Name: At_Drought_P Parameter: Age (day) Value: 8
  misc_feature: MA Experiment 20000437 PARAMETER Experiment Name: At_Drought_P Parameter: Organism Value: A. thaliana
  misc_feature: MA Experiment 20000437 PARAMETER Experiment Name: At_Drought_P Parameter: Plant Line Value: WS
  misc_feature: MA Experiment 20000437 PARAMETER Experiment Name: At_Drought_P Parameter: Timepoint (hr) Value: 24
  misc_feature: MA Experiment 20000437 PARAMETER Experiment Name: At_Drought_P Parameter: Tissue Value: Whole Plant
  misc_feature: MA Experiment 20000437 PARAMETER Experiment Name: At_Drought_P Parameter: Treatment Value: Drought vs. No Drought
  misc_feature: MA Experiment ID: 20001247 Result: Up-regulated in Transcription
  misc_feature: MA Experiment 20001247 PARAMETER Experiment Name: At_Far-red-induction_P Parameter: Age (day) Value: 7
  misc_feature: MA Experiment 20001247 PARAMETER Experiment Name: At_Far-red-induction_P Parameter: Light Value: Far-red vs. White
  misc_feature: MA Experiment 20001247 PARAMETER Experiment Name: At_Far-red-induction_P Parameter: Organism Value: A. thaliana
  misc_feature: MA Experiment 20001247 PARAMETER Experiment Name: At_Far-red-induction_P Parameter: Plant Line Value: Columbia
  misc_feature: MA Experiment 20001247 PARAMETER Experiment Name: At_Far-red-induction_P Parameter: Timepoint (hr) Value: 1
  misc_feature: MA Experiment 20001247 PARAMETER Experiment Name: At_Far-red-induction_P Parameter: Tissue Value: Whole Plant
  misc_feature: MA Experiment ID: 20001248 Result: Up-regulated in Transcription
  misc_feature: MA Experiment 20001248 PARAMETER Experiment Name: At_Far-red-induction_P Parameter: Age (day) Value: 7
  misc_feature: MA Experiment 20001248 PARAMETER Experiment Name: At_Far-red-induction_P Parameter: Light Value: Far-red vs. White
  misc_feature: MA Experiment 20001248 PARAMETER Experiment Name: At_Far-red-induction_P Parameter: Organism Value: A. thaliana
  misc_feature: MA Experiment 20001248 PARAMETER Experiment Name: At_Far-red-induction_P Parameter: Plant Line Value: Columbia
  misc_feature: MA Experiment 20001248 PARAMETER Experiment Name: At_Far-red-induction_P Parameter: Timepoint (hr) Value: 4
  misc_feature: MA Experiment 20001248 PARAMETER Experiment Name: At_Far-red-induction_P Parameter: Tissue Value: Whole Plant
  misc_feature: MA Experiment ID: 20001450 Result: Up-regulated in Transcription
  misc_feature: MA Experiment 20001450 PARAMETER Experiment Name: At_Far-red-induction_P Parameter: Age (day) Value: 7
  misc_feature: MA Experiment 20001450 PARAMETER Experiment Name: At_Far-red-induction_P Parameter: Light Value: Far-red vs. White
  misc_feature: MA Experiment 20001450 PARAMETER Experiment Name: At_Far-red-induction_P Parameter: Organism Value: A. thaliana
  misc_feature: MA Experiment 20001450 PARAMETER Experiment Name: At_Far-red-induction_P Parameter: Plant Line Value: Columbia
  misc_feature: MA Experiment 20001450 PARAMETER Experiment Name: At_Far-red-induction_P Parameter: Timepoint (hr) Value: 8
  misc_feature: MA Experiment 20001450 PARAMETER Experiment Name: At_Far-red-induction_P Parameter: Tissue Value: Whole Plant
  misc_feature: MA Experiment ID: 20001451 Result: Up-regulated in Transcription
  misc_feature: MA Experiment 20001451 PARAMETER Experiment Name: At_Far-red-induction_P Parameter: Age (day) Value: 7
  misc_feature: MA Experiment 20001451 PARAMETER Experiment Name: At_Far-red-induction_P Parameter: Light Value: Far-red vs. White
  misc_feature: MA Experiment 20001451 PARAMETER Experiment Name: At_Far-red-induction_P Parameter: Organism Value: A. thaliana
  misc_feature: MA Experiment 20001451 PARAMETER Experiment Name: At_Far-red-induction_P Parameter: Plant Line Value: Columbia
  misc_feature: MA Experiment 20001451 PARAMETER Experiment Name: At_Far-red-induction_P Parameter: Timepoint (hr) Value: 24
  misc_feature: MA Experiment 20001451 PARAMETER Experiment Name: At_Far-red-induction_P Parameter: Tissue Value: Whole Plant
  misc_feature: MA Experiment ID: 20001554 Result: Down-regulated in Transcription
  misc_feature: MA Experiment 20001554 PARAMETER Experiment Name: At_Drought_Soil_Dry_P Parameter: Age (day) Value: 21
  misc_feature: MA Experiment 20001554 PARAMETER Experiment Name: At_Drought_Soil_Dry_P Parameter: Organism Value: A. thaliana
  misc_feature: MA Experiment 20001554 PARAMETER Experiment Name: At_Drought_Soil_Dry_P Parameter: Plant Line Value: WS
  misc_feature: MA Experiment 20001554 PARAMETER Experiment Name: At_Drought_Soil_Dry_P Parameter: Post Timepoint (hr) Value: None
  misc_feature: MA Experiment 20001554 PARAMETER Experiment Name: At_Drought_Soil_Dry_P Parameter: Post-Treatment Value: None
  misc_feature: MA Experiment 20001554 PARAMETER Experiment Name: At_Drought_Soil_Dry_P Parameter: Timepoint (day) Value: 7
  misc_feature: MA Experiment 20001554 PARAMETER Experiment Name: At_Drought_Soil_Dry_P Parameter: Treatment Value: Drought vs. No Drought
  misc_feature: MA Experiment ID: 20001555 Result: Down-regulated in Transcription
  misc_feature: MA Experiment 20001555 PARAMETER Experiment Name: At_Drought_Soil_Dry_P Parameter: Age (day) Value: 24
  misc_feature: MA Experiment 20001555 PARAMETER Experiment Name: At_Drought_Soil_Dry_P Parameter: Organism Value: A. thaliana
  misc_feature: MA Experiment 20001555 PARAMETER Experiment Name: At_Drought_Soil_Dry_P Parameter: Plant Line Value: WS
  misc_feature: MA Experiment 20001555 PARAMETER Experiment Name: At_Drought_Soil_Dry_P Parameter: Post Timepoint (hr) Value: None
  misc_feature: MA Experiment 20001555 PARAMETER Experiment Name: At_Drought_Soil_Dry_P Parameter: Post-Treatment Value: None
  misc_feature: MA Experiment 20001555 PARAMETER Experiment Name: At_Drought_Soil_Dry_P Parameter: Timepoint (day) Value: 10
  misc_feature: MA Experiment 20001555 PARAMETER Experiment Name: At_Drought_Soil_Dry_P Parameter: Treatment Value: Drought vs. No Drought
  misc_feature: MA Experiment ID: 20001560 Result: Up-regulated in Transcription
  misc_feature: MA Experiment 20001560 PARAMETER Experiment Name: At_Drought_Soil_Dry_P Parameter: Age (day) Value: 28
  misc_feature: MA Experiment 20001560 PARAMETER Experiment Name: At_Drought_Soil_Dry_P Parameter: Organism Value: A. thaliana
  misc_feature: MA Experiment 20001560 PARAMETER Experiment Name: At_Drought_Soil_Dry_P Parameter: Plant Line Value: WS
  misc_feature: MA Experiment 20001560 PARAMETER Experiment Name: At_Drought_Soil_Dry_P Parameter: Post Timepoint (hr) Value: None
  misc_feature: MA Experiment 20001560 PARAMETER Experiment Name: At_Drought_Soil_Dry_P Parameter: Post-Treatment Value: None
  misc_feature: MA Experiment 20001560 PARAMETER Experiment Name: At_Drought_Soil_Dry_P Parameter: Timepoint (day) Value: 14
  misc_feature: MA Experiment 20001560 PARAMETER Experiment Name: At_Drought_Soil_Dry_P Parameter: Treatment Value: Drought vs. No Drought
  misc_feature: MA Experiment ID: 20001904 Result: Down-regulated in Transcription
  misc_feature: MA Experiment 20001904 PARAMETER Experiment Name: At_Drought_Reproduction_P Parameter: Age (day) Value: 37
  misc_feature: MA Experiment 20001904 PARAMETER Experiment Name: At_Drought_Reproduction_P Parameter: Organism Value: A. thaliana
  misc_feature: MA Experiment 20001904 PARAMETER Experiment Name: At_Drought_Reproduction_P Parameter: Plant Line Value: WS
  misc_feature: MA Experiment 20001904 PARAMETER Experiment Name: At_Drought_Reproduction_P Parameter: Timepoint (day) Value: 7
  misc_feature: MA Experiment 20001904 PARAMETER Experiment Name: At_Drought_Reproduction_P Parameter: Tissue Value: Rosettes
  misc_feature: MA Experiment 20001904 PARAMETER Experiment Name: At_Drought_Reproduction_P Parameter: Treatment Value: Drought vs. No Drought
  misc_feature: MA Experiment ID: 20001905 Result: Down-regulated in Transcription
  misc_feature: MA Experiment 20001905 PARAMETER Experiment Name: At_Drought_Reproduction_P Parameter: Age (day) Value: 40
  misc_feature: MA Experiment 20001905 PARAMETER Experiment Name: At_Drought_Reproduction_P Parameter: Organism Value: A. thaliana
  misc_feature: MA Experiment 20001905 PARAMETER Experiment Name: At_Drought_Reproduction_P Parameter: Plant Line Value: WS
  misc_feature: MA Experiment 20001905 PARAMETER Experiment Name: At_Drought_Reproduction_P Parameter: Timepoint (day) Value: 10
  misc_feature: MA Experiment 20001905 PARAMETER Experiment Name: At_Drought_Reproduction_P Parameter: Tissue Value: Rosettes
  misc_feature: MA Experiment 20001905 PARAMETER Experiment Name: At_Drought_Reproduction_P Parameter: Treatment Value: Drought vs. No Drought
  misc_feature: MA Experiment ID: 20001911 Result: Down-regulated in Transcription
  misc_feature: MA Experiment 20001911 PARAMETER Experiment Name: At_Drought_Reproduction_P Parameter: Age (day) Value: 40
  misc_feature: MA Experiment 20001911 PARAMETER Experiment Name: At_Drought_Reproduction_P Parameter: Organism Value: A. thaliana
  misc_feature: MA Experiment 20001911 PARAMETER Experiment Name: At_Drought_Reproduction_P Parameter: Plant Line Value: WS
  misc_feature: MA Experiment 20001911 PARAMETER Experiment Name: At_Drought_Reproduction_P Parameter: Timepoint (day) Value: 10
  misc_feature: MA Experiment 20001911 PARAMETER Experiment Name: At_Drought_Reproduction_P Parameter: Tissue Value: Flowers
  misc_feature: MA Experiment 20001911 PARAMETER Experiment Name: At_Drought_Reproduction_P Parameter: Treatment Value: Drought vs. No Drought
gtgttccgattccgatttctcttttctccttgatccttattctgattcagtctcactttttgcagatctcgtccgttgttgcataagtgctatggatctcgcgtcgaatcttggtgggaagatcgataaatccgatgttctcaccgccgtcgaaaagtatgagcaatatcatgtcttccatggaggaaacgaggaagagagaaaagccaattatactgacatggttaataagtactatgaccttgctactagcttttatgagtacggatggggagaatccttccattttgcacaaagatggaaaggagaatcgcttcgagagagtattaagcgacacgagcactttcttgctcttcagcttggcatccaaccaggacaaaaggtactggatgtaggatgtggaattggtggaccgttgagggaaattgcaagattcagcaattcagttgttaccgggctcaacaataacgaataccagatcaccagaggcaaggaactaaaccgacttgcaggtgtcgacaagacatgtaactttgtcaaggctgacttcatgaagatgccattcccggaaaacagtttcgatgcagtttatgcaatagaagcaacttgccatgcacctgatgcgtatggatgctacaaagagatctacagagtgctaaagcctgggcaatgttttgctgcctatgagtggtgtatgactgatgcatttgaccctgataacgccgaacatcagaaaataaagggagagatagagattggagatggtcttcctgacattaggctgactacaaaatgcctcgaagctctgaagcaggccggttttgaagtgatatgggaaaaggatctggccaaggactcgccggtcccatggtacttacctcttgacaaaaatcatttctcactcagtagcttccgccttacagctgttggacgattcataaccaaaaacatggtcaagatccttgaatacataagacttgcacctcaaggaagccaaagggtctcaaatttcctggagcaggctgcggaaggattagtcgacggtggaaggagagagattttcacgccaatgtatttcttcttggcccggaagccagagtaagcggatgagagatggcaatggtcatcgtaggtcgaatgaagtgacaaaatttctcaatttgcagtcttattttctatgtttatcggatttgttgcagagtttcttattcaccaactatattttggatgttcgtaacatgtcacgtgttgttcatgtgcactctgcctgaaatctgaatcatgtgcacatgcccaaaatatcttggaatctttctttctctttag

SEQ ID NO: 42602 - protein, 366 aa, Arabidopsis thaliana
  peptide (1)..(366): Ceres Seq. ID no. 12331256
  misc_feature (81)..(282): Pfam Name: ubiE/COQ5 methyltransferase family Pfam Description: ubiE/COQ5 methyltransferase family
  misc_feature (32)..(365): Homolog of NCBI NO: 3603295 NR Description: S-adenosyl-methionine
  misc_feature (30)..(365): Homolog of NCBI NO: 3560531 NR Description: cycloartenol-C24-methyltransferase [Oryza sativa
  misc_feature (30)..(365): Homolog of NCBI NO: 7443715 NR Description: sterol 24-C-methyltransferase (EC 2.1.1.41) -
  misc_feature (30)..(365): Homolog of NCBI NO: 34393309 NR Description: cycloartenol-C24-methyltransferase
  misc_feature (30)..(365): Homolog of NCBI NO: 3560474 NR Description: S-adenosyl-methionine-sterol-C- methyltransferase
  misc_feature (30)..(365): Homolog of NCBI NO: 7443716 NR Description: sterol 24-C-methyltransferase (EC 2.1.1.41)
  misc_feature (30)..(365): Homolog of NCBI NO: 7443719 NR Description: sterol 24-C-methyltransferase (EC 2.1.1.41) -
  misc_feature (28)..(366): Homolog of NCBI NO: 7443720 NR Description: probable sterol 24-C-methyltransferase (EC
  misc_feature (31)..(366): Homolog of NCBI NO: 21434843 NR Description: cephalopod [Arabidopsis thaliana]
  misc_feature (31)..(366): Homolog of NCBI NO: 15240691 NR Description: 24-sterol C-methyltransferase
CSDSDFSFLLDPYSDSVSLFADLVRCCISAMDLASNLGGKIDKSDVLTAVEKYEQYHVFHGGNEEERKANYTDMVNKYYDLATSFYEYGWGESFHFAQRWKGESLRESIKRHEHFLALQLGIQPGQKVLDVGCGIGGPLREIARFSNSVVTGLNNNEYQITRGKELNRLAGVDKTCNFVKADFMKMPFPENSFDAVYAIEATCHAPDAYGCYKEIYRVLKPGQCFAAYEWCMTDAFDPDNAEHQKIKGEIEIGDGLPDIRLTTKCLEALKQAGFEVIWEKDLAKDSPVPWYLPLDKNHFSLSSFRLTAVGRFITKNMVKILEYIRLAPQGSQRVSNFLEQAAEGLVDGGRREIFTPMYFFLARKPE

SEQ ID NO: 42603 - protein, 336 aa, Arabidopsis thaliana; identical to SEQ ID NO: 26651
  peptide (1)..(336): Ceres Seq. ID no. 12331257
  misc_feature (51)..(252): Pfam Name: ubiE/COQ5 methyltransferase family Pfam Description: ubiE/COQ5 methyltransferase family
  misc_feature (2)..(335): Homolog of NCBI NO: 3603295 NR Description: S-adenosyl-methionine
  misc_feature (1)..(335): Homolog of NCBI NO: 3560531 NR Description: cycloartenol-C24-methyltransferase [Oryza sativa
  misc_feature (1)..(335): Homolog of NCBI NO: 7443715 NR Description: sterol 24-C-methyltransferase (EC 2.1.1.41) -
  misc_feature (1)..(335): Homolog of NCBI NO: 34393309 NR Description: cycloartenol-C24-methyltransferase
  misc_feature (1)..(335): Homolog of NCBI NO: 3560474 NR Description: S-adenosyl-methionine-sterol-C- methyltransferase
  misc_feature (1)..(335): Homolog of NCBI NO: 7443716 NR Description: sterol 24-C-methyltransferase (EC 2.1.1.41)
  misc_feature (1)..(335): Homolog of NCBI NO: 7443719 NR Description: sterol 24-C-methyltransferase (EC 2.1.1.41) -
  misc_feature (1)..(336): Homolog of NCBI NO: 7443720 NR Description: probable sterol 24-C-methyltransferase (EC
  misc_feature (1)..(336): Homolog of NCBI NO: 21434843 NR Description: cephalopod [Arabidopsis thaliana]
  misc_feature (1)..(336): Homolog of NCBI NO: 15240691 NR Description: 24-sterol C-methyltransferase

SEQ ID NO: 42604 - protein, 293 aa, Arabidopsis thaliana; identical to SEQ ID NO: 26652
  peptide (1)..(293): Ceres Seq. ID no. 12331258
  misc_feature (8)..(209): Pfam Name: ubiE/COQ5 methyltransferase family Pfam Description: ubiE/COQ5 methyltransferase family
  misc_feature (1)..(292): Homolog of NCBI NO: 3603295 NR Description: S-adenosyl-methionine
  misc_feature (1)..(292): Homolog of NCBI NO: 3560531 NR Description: cycloartenol-C24-methyltransferase [Oryza sativa
  misc_feature (1)..(292): Homolog of NCBI NO: 7443715 NR Description: sterol 24-C-methyltransferase (EC 2.1.1.41) -
  misc_feature (1)..(292): Homolog of NCBI NO: 34393309 NR Description: cycloartenol-C24-methyltransferase
  misc_feature (1)..(292): Homolog of NCBI NO: 3560474 NR Description: S-adenosyl-methionine-sterol-C- methyltransferase
  misc_feature (1)..(292): Homolog of NCBI NO: 7443716 NR Description: sterol 24-C-methyltransferase (EC 2.1.1.41)
  misc_feature (1)..(292): Homolog of NCBI NO: 7443719 NR Description: sterol 24-C-methyltransferase (EC 2.1.1.41) -
  misc_feature (1)..(293): Homolog of NCBI NO: 7443720 NR Description: probable sterol 24-C-methyltransferase (EC
  misc_feature (1)..(293): Homolog of NCBI NO: 21434843 NR Description: cephalopod [Arabidopsis thaliana]
  misc_feature (1)..(293): Homolog of NCBI NO: 15240691 NR Description: 24-sterol C-methyltransferase

SEQ ID NO: 42605 - DNA, 1385 bp, Arabidopsis thaliana
  misc_feature (1)..(1385): Ceres Seq. ID no. 13576570
  misc_feature: MA Experiment ID: 20000173 Result: Down-regulated in Transcription
  misc_feature: MA Experiment 20000173 PARAMETER Experiment Name: At_42deg_Heat_P Parameter: Age (day) Value: 14
  misc_feature: MA Experiment 20000173 PARAMETER Experiment Name: At_42deg_Heat_P Parameter: Organism Value: A. thaliana
  misc_feature: MA Experiment 20000173 PARAMETER Experiment Name: At_42deg_Heat_P Parameter: Plant Line Value: WS
  misc_feature: MA Experiment 20000173 PARAMETER Experiment Name: At_42deg_Heat_P Parameter: Temperature (deg C) Value: 42 vs. 22
  misc_feature: MA Experiment 20000173 PARAMETER Experiment Name: At_42deg_Heat_P Parameter: Timepoint (hr) Value: 6
  misc_feature: MA Experiment 20000173 PARAMETER Experiment Name: At_42deg_Heat_P Parameter: Tissue Value: Aerial
  misc_feature: MA Experiment ID: 20000179 Result: Up-regulated in Transcription
  misc_feature: MA Experiment 20000179 PARAMETER Experiment Name: At_Germinating_Seeds_P Parameter: Age (hr) Value: 6 vs. 0
  misc_feature: MA Experiment 20000179 PARAMETER Experiment Name: At_Germinating_Seeds_P Parameter: Tissue Value: Germinating Seeds
  misc_feature: MA Experiment ID: 20000180 Result: Up-regulated in Transcription
  misc_feature: MA Experiment 20000180 PARAMETER Experiment Name: At_Germinating_Seeds_P Parameter: Age (hr) Value: 24 vs. 0
  misc_feature: MA Experiment 20000180 PARAMETER Experiment Name: At_Germinating_Seeds_P Parameter: Tissue Value: Germinating Seeds
  misc_feature: MA Experiment ID: 20000184 Result: Down-regulated in Transcription
  misc_feature: MA Experiment 20000184 PARAMETER Experiment Name: At_Shoots__P Parameter: Age (day) Value: 7
  misc_feature: MA Experiment 20000184 PARAMETER Experiment Name: At_Shoots__P Parameter: Tissue Value: Shoots vs. Whole Plant
  misc_feature: MA Experiment ID: 20000185 Result: Down-regulated in Transcription
  misc_feature: MA Experiment 20000185 PARAMETER Experiment Name: At_Roots__P Parameter: Age (day) Value: 7 vs. 21
  misc_feature: MA Experiment 20000185 PARAMETER Experiment Name: At_Roots__P Parameter: Organism Value: A. thaliana
  misc_feature: MA Experiment 20000185 PARAMETER Experiment Name: At_Roots__P Parameter: Tissue Value: Roots vs. Whole Plant
  misc_feature: MA Experiment ID: 20000227 Result: Down-regulated in Transcription
  misc_feature: MA Experiment 20000227 PARAMETER Experiment Name: At_Root-Tips-vs-Tops_P Parameter: Tissue Value: Root Tips vs. Root Tops
  misc_feature: MA Experiment ID: 20000439 Result: Down-regulated in Transcription
  misc_feature: MA Experiment 20000439 PARAMETER Experiment Name: At_Roots__P Parameter: Age (day) Value: 14 vs. 21
  misc_feature: MA Experiment 20000439 PARAMETER Experiment Name: At_Roots__P Parameter: Organism Value: A. thaliana
  misc_feature: MA Experiment 20000439 PARAMETER Experiment Name: At_Roots__P Parameter: Tissue Value: Roots vs. Whole Plant
  misc_feature: MA Experiment ID: 20001557 Result: Down-regulated in Transcription
  misc_feature: MA Experiment 20001557 PARAMETER Experiment Name: At_Drought_Soil_Dry_P Parameter: Age (day) Value: 27
  misc_feature: MA Experiment 20001557 PARAMETER Experiment Name: At_Drought_Soil_Dry_P Parameter: Organism Value: A. thaliana
  misc_feature: MA Experiment 20001557 PARAMETER Experiment Name: At_Drought_Soil_Dry_P Parameter: Plant Line Value: WS
  misc_feature: MA Experiment 20001557 PARAMETER Experiment Name: At_Drought_Soil_Dry_P Parameter: Post Timepoint (hr) Value: 3
  misc_feature: MA Experiment 20001557 PARAMETER Experiment Name: At_Drought_Soil_Dry_P Parameter: Post-Treatment Value: Re-Water vs. No Drought
  misc_feature: MA Experiment 20001557 PARAMETER Experiment Name: At_Drought_Soil_Dry_P Parameter: Timepoint (day) Value: 13
  misc_feature: MA Experiment 20001557 PARAMETER Experiment Name: At_Drought_Soil_Dry_P Parameter: Treatment Value: Drought vs. No Drought
gtggagcagaagaaacatttgatttgatgagatggggaagaagaaagggaaagcgatcatagtaggaggaagtatagcaggcttatcttgcgcacactcgctcacgttagcatgctgggatgttttggttctcgagaaatcttccgaacctcctgttgggagtcctactggtgctgggctcggactcgaccctcaggctcggcagatcatcaaatcatggcttactactccacagctcttagatgaaatcaccttgcctctctcgattgatcagaatcagacaactgatagtgagaagaaagtgacaaggattttaacaagagatgaggattttgatttccgagcagcttattggtcagatattcaatctcttctgtataacgcattgcctcagaccatgtttctttggggacataagtttctgtctttcacaatgtcacaagatgaatctaatgtaaaggttaagactttagttgtggaaactcaagaaactgttgaaattgaaggagacttacttattgcagctgatgggtgtttgtcttcgattcggaaaactttcttgcctgactttaaactgaggtactctggttattgtgcttggagaggtgtatttgatttctcagggaatgagaactcggaaacagttagtgggattaagaaagtgtatccggatcttggaaaatgcttgtattttgatctcggtgaacagactcatagcgtgttttacgagctttttaacaagaaactcaactggatttggtatgtcaatcaaccagagcctgacctgaaaagcaactctgttactctaaaagtgagtcaagaaatgatcaataagatgcatcaagaagcagaaaccatttggatccccgaactagcgagactcatgagtgaaacaaaggatcctttccttaatgttatttacgactctgaccctttagaacgaatcttttggggaaacatcgtgttggttggagacgcggctcatcccacgacccctcatggtctaagaagcacaaacatgtcgatacttgatgcggaagtgctaggcaaatgcttagagaactgtggacctgagaatgtaagtttgggtcttgaggaatatcagagaataagattgcctgttgtttctgagcaagttttgtatgcaaggcgtttggggcgtatcaagcaaggtctggatcatgacggaattggagatggcgtttttggtttggagcagagaaacatgccattcttttcctgtgctccccttatctagtgataaatatttgatgtgagagatgttgtatgttaataattgtgtgtttaatagacttgaacatattgtttggaacgttaatgtagaaactatggatacttcaaatacaagttatataaaaatgagg

SEQ ID NO: 42606 - protein, 408 aa, Arabidopsis thaliana
  peptide (1)..(408): Ceres Seq. ID no. 13576571
  misc_feature (158)..(373): Pfam Name: Monooxygenase Pfam Description: Monooxygenase
  misc_feature (7)..(383): Homolog of NCBI NO: 17549132 NR Description: PUTATIVE SALICYLATE HYDROXYLASE OXIDOREDUCTASE
  misc_feature (7)..(376): Homolog of NCBI NO: 27381191 NR Description: bll6080 [Bradyrhizobium japonicum]
  misc_feature (157)..(361): Homolog of NCBI NO: 2290996 NR Description: unknown [Bordetella pertussis]
  misc_feature (64)..(380): Homolog of NCBI NO: 33601729 NR Description: putative monooxygenase [Bordetella
  misc_feature (157)..(361): Homolog of NCBI NO: 33598512 NR Description: putative hydroxylase [Bordetella parapertussis]
  misc_feature (157)..(361): Homolog of NCBI NO: 33603456 NR Description: putative hydroxylase [Bordetella bronchiseptica]
  misc_feature (6)..(398): Homolog of NCBI NO: 34766436 NR Description: FscO [Streptomyces sp. FR-008]
  misc_feature (4)..(139): Homolog of NCBI NO: 22986825 NR Description: hypothetical protein [Burkholderia fungorum]
  misc_feature (108)..(344): Homolog of NCBI NO: 22986825 NR Description: hypothetical protein [Burkholderia fungorum]
  misc_feature (1)..(408): Homolog of NCBI NO: 15239022 NR Description: monooxygenase family [Arabidopsis thaliana]
MGKKKGKAIIVGGSIAGLSCAHSLTLACWDVLVLEKSSEPPVGSPTGAGLGLDPQARQIIKSWLTTPQLLDEITLPLSIDQNQTTDSEKKVTRILTRDEDFDFRAAYWSDIQSLLYNALPQTMFLWGHKFLSFTMSQDESNVKVKTLVVETQETVEIEGDLLIAADGCLSSIRKTFLPDFKLRYSGYCAWRGVFDFSGNENSETVSGIKKVYPDLGKCLYFDLGEQTHSVFYELFNKKLNWIWYVNQPEPDLKSNSVTLKVSQEMINKMHQEAETIWIPELARLMSETKDPFLNVIYDSDPLERIFWGNIVLVGDAAHPTTPHGLRSTNMSILDAEVLGKCLENCGPENVSLGLEEYQRIRLPVVSEQVLYARRLGRIKQGLDHDGIGDGVFGLEQRNMPFFSCAPLI

SEQ ID NO: 42607 - protein, 286 aa, Arabidopsis thaliana
  peptide (1)..(286): Ceres Seq. ID no. 13576572
  misc_feature (36)..(251): Pfam Name: Monooxygenase Pfam Description: Monooxygenase
  misc_feature (1)..(261): Homolog of NCBI NO: 17549132 NR Description: PUTATIVE SALICYLATE HYDROXYLASE OXIDOREDUCTASE
  misc_feature (1)..(254): Homolog of NCBI NO: 27381191 NR Description: bll6080 [Bradyrhizobium japonicum]
  misc_feature (35)..(239): Homolog of NCBI NO: 2290996 NR Description: unknown [Bordetella pertussis]
  misc_feature (1)..(258): Homolog of NCBI NO: 33601729 NR Description: putative monooxygenase [Bordetella
  misc_feature (35)..(239): Homolog of NCBI NO: 33598512 NR Description: putative hydroxylase [Bordetella parapertussis]
  misc_feature (35)..(239): Homolog of NCBI NO: 33603456 NR Description: putative hydroxylase [Bordetella bronchiseptica]
  misc_feature (1)..(276): Homolog of NCBI NO: 34766436 NR Description: FscO [Streptomyces sp. FR-008]
  misc_feature (1)..(17): Homolog of NCBI NO: 22986825 NR Description: hypothetical protein [Burkholderia fungorum]
  misc_feature (1)..(222): Homolog of NCBI NO: 22986825 NR Description: hypothetical protein [Burkholderia fungorum]
  misc_feature (1)..(286): Homolog of NCBI NO: 15239022 NR Description: monooxygenase family [Arabidopsis thaliana]
MFLWGHKFLSFTMSQDESNVKVKTLVVETQETVEIEGDLLIAADGCLSSIRKTFLPDFKLRYSGYCAWRGVFDFSGNENSETVSGIKKVYPDLGKCLYFDLGEQTHSVFYELFNKKLNWIWYVNQPEPDLKSNSVTLKVSQEMINKMHQEAETIWIPELARLMSETKDPFLNVIYDSDPLERIFWGNIVLVGDAAHPTTPHGLRSTNMSILDAEVLGKCLENCGPENVSLGLEEYQRIRLPVVSEQVLYARRLGRIKQGLDHDGIGDGVFGLEQRNMPFFSCAPLI

SEQ ID NO: 42608 - protein, 274 aa, Arabidopsis thaliana
  peptide (1)..(274): Ceres Seq. ID no. 13576573
  misc_feature (24)..(239): Pfam Name: Monooxygenase Pfam Description: Monooxygenase
  misc_feature (1)..(257): Homolog of NCBI NO: 40746445 NR Description: hypothetical protein AN1033.2 [Aspergillus
  misc_feature (1)..(249): Homolog of NCBI NO: 17549132 NR Description: PUTATIVE SALICYLATE HYDROXYLASE OXIDOREDUCTASE
  misc_feature (1)..(242): Homolog of NCBI NO: 27381191 NR Description: bll6080 [Bradyrhizobium japonicum]
  misc_feature (23)..(227): Homolog of NCBI NO: 2290996 NR Description: unknown [Bordetella pertussis]
  misc_feature (1)..(246): Homolog of NCBI NO: 33601729 NR Description: putative monooxygenase [Bordetella
  misc_feature (23)..(227): Homolog of NCBI NO: 33598512 NR Description: putative hydroxylase [Bordetella parapertussis]
  misc_feature (23)..(227): Homolog of NCBI NO: 33603456 NR Description: putative hydroxylase [Bordetella bronchiseptica]
  misc_feature (1)..(264): Homolog of NCBI NO: 34766436 NR Description: FscO [Streptomyces sp. FR-008]
  misc_feature (1)..(210): Homolog of NCBI NO: 22986825 NR Description: hypothetical protein [Burkholderia fungorum]
  misc_feature (1)..(274): Homolog of NCBI NO: 15239022 NR Description: monooxygenase family [Arabidopsis thaliana]
MSQDESNVKVKTLVVETQETVEIEGDLLIAADGCLSSIRKTFLPDFKLRYSGYCAWRGVFDFSGNENSETVSGIKKVYPDLGKCLYFDLGEQTHSVFYELFNKKLNWIWYVNQPEPDLKSNSVTLKVSQEMINKMHQEAETIWIPELARLMSETKDPFLNVIYDSDPLERIFWGNIVLVGDAAHPTTPHGLRSTNMSILDAEVLGKCLENCGPENVSLGLEEYQRIRLPVVSEQVLYARRLGRIKQGLDHDGIGDGVFGLEQRNMPFFSCAPLI

SEQ ID NO: 42609 - DNA, 1183 bp, Arabidopsis thaliana
  misc_feature (1)..(1183): Ceres Seq. ID no. 12385330
  misc_feature: MA Experiment ID: 108464 Result: Up-regulated in Transcription
  misc_feature: MA Experiment 108464 PARAMETER Experiment Name: At_Germinating_Seeds_cDNA_P Parameter: Age (day) Value: 4 vs. 0
  misc_feature: MA Experiment 108464 PARAMETER Experiment Name: At_Germinating_Seeds_cDNA_P Parameter: Tissue Value: Germinating Seeds
  misc_feature: MA Experiment ID: 108488 Result: Down-regulated in Transcription
  misc_feature: MA Experiment ID: 108585 Result: Up-regulated in Transcription
  misc_feature: MA Experiment 108585 PARAMETER Experiment Name: At_5mM_NaNP_cDNA_P Parameter: Timepoint (hr) Value: 6
  misc_feature: MA Experiment 108585 PARAMETER Experiment Name: At_5mM_NaNP_cDNA_P Parameter: Tissue Value: Aerial
  misc_feature: MA Experiment 108585 PARAMETER Experiment Name: At_5mM_NaNP_cDNA_P Parameter: Treatment Value: null
  misc_feature: MA Experiment ID: 108595 Result: Down-regulated in Transcription
  misc_feature: MA Experiment 108595 PARAMETER Experiment Name: At_Ler-pi_Ovule_cDNA_P Parameter: Plant Line Value: null
  misc_feature: MA Experiment ID: 108605 Result: Down-regulated in Transcription
  misc_feature: MA Experiment 108605 PARAMETER Experiment Name: At_100uM_ABA_cDNA_P Parameter: Timepoint (hr) Value: 6
  misc_feature: MA Experiment 108605 PARAMETER Experiment Name: At_100uM_ABA_cDNA_P Parameter: Tissue Value: Aerial
  misc_feature: MA Experiment 108605 PARAMETER Experiment Name: At_100uM_ABA_cDNA_P Parameter: Treatment Value: 100uM ABA vs. No Treatment
  misc_feature: MA Experiment ID: 108607 Result: Down-regulated in Transcription
  misc_feature: MA Experiment 108607 PARAMETER Experiment Name: At_100uM_ABA_cDNA_P Parameter: Timepoint (hr) Value: 4
  misc_feature: MA Experiment 108607 PARAMETER Experiment Name: At_100uM_ABA_cDNA_P Parameter: Tissue Value: Aerial
  misc_feature: MA Experiment 108607 PARAMETER Experiment Name: At_100uM_ABA_cDNA_P Parameter: Treatment Value: 100uM ABA vs. No Treatment
  misc_feature: MA Experiment ID: 108609 Result: Down-regulated in Transcription
  misc_feature: MA Experiment 108609 PARAMETER Experiment Name: At_100uM_ABA_cDNA_P Parameter: Timepoint (hr) Value: 24
  misc_feature: MA Experiment 108609 PARAMETER Experiment Name: At_100uM_ABA_cDNA_P Parameter: Tissue Value: Aerial
  misc_feature: MA Experiment 108609 PARAMETER Experiment Name: At_100uM_ABA_cDNA_P Parameter: Treatment Value: 100uM ABA vs. No Treatment
  misc_feature: MA Experiment ID: 20000069 Result: Down-regulated in Transcription
  misc_feature: MA Experiment 20000069 PARAMETER Experiment Name: At_100uM_ABA_Mutants_cDNA_P Parameter: Plant Line Value: CS23
  misc_feature: MA Experiment 20000069 PARAMETER Experiment Name: At_100uM_ABA_Mutants_cDNA_P Parameter: Timepoint (hr) Value: 6
  misc_feature: MA Experiment 20000069 PARAMETER Experiment Name: At_100uM_ABA_Mutants_cDNA_P Parameter: Tissue Value: Aerial
  misc_feature: MA Experiment 20000069 PARAMETER Experiment Name: At_100uM_ABA_Mutants_cDNA_P Parameter: Treatment Value: 100uM ABA vs. No Treatment
  misc_feature: MA Experiment ID: 20000071 Result: Down-regulated in Transcription
  misc_feature: MA Experiment 20000071 PARAMETER Experiment Name: At_100uM_ABA_Mutants_cDNA_P Parameter: Plant Line Value: CS8104
  misc_feature: MA Experiment 20000071 PARAMETER Experiment Name: At_100uM_ABA_Mutants_cDNA_P Parameter: Timepoint (hr) Value: 6
  misc_feature: MA Experiment 20000071 PARAMETER Experiment Name: At_100uM_ABA_Mutants_cDNA_P Parameter: Tissue Value: Aerial
  misc_feature: MA Experiment 20000071 PARAMETER Experiment Name: At_100uM_ABA_Mutants_cDNA_P Parameter: Treatment Value: 100uM ABA vs. No Treatment
  misc_feature: MA Experiment ID: 20000089 Result: Down-regulated in Transcription
  misc_feature: MA Experiment ID: 20000169 Result: Down-regulated in Transcription
  misc_feature: MA Experiment 20000169 PARAMETER Experiment Name: At_100uM_ABA_P Parameter: Age (day) Value: 14
  misc_feature: MA Experiment 20000169 PARAMETER Experiment Name: At_100uM_ABA_P Parameter: Organism Value: A. thaliana
  misc_feature: MA Experiment 20000169 PARAMETER Experiment Name: At_100uM_ABA_P Parameter: Plant Line Value: WS
  misc_feature: MA Experiment 20000169 PARAMETER Experiment Name: At_100uM_ABA_P Parameter: Timepoint (hr) Value: 6
  misc_feature: MA Experiment 20000169 PARAMETER Experiment Name: At_100uM_ABA_P Parameter: Tissue Value: Aerial
  misc_feature: MA Experiment 20000169 PARAMETER Experiment Name: At_100uM_ABA_P Parameter: Treatment Value: 100uM ABA vs. No Treatment
  misc_feature: MA Experiment ID: 20000185 Result: Up-regulated in Transcription
  misc_feature: MA Experiment 20000185 PARAMETER Experiment Name: At_Roots__P Parameter: Age (day) Value: 7 vs. 21
  misc_feature: MA Experiment 20000185 PARAMETER Experiment Name: At_Roots__P Parameter: Organism Value: A. thaliana
  misc_feature: MA Experiment 20000185 PARAMETER Experiment Name: At_Roots__P Parameter: Tissue Value: Roots vs. Whole Plant
  misc_feature: MA Experiment ID: 20000227 Result: Down-regulated in Transcription
  misc_feature: MA Experiment 20000227 PARAMETER Experiment Name: At_Root-Tips-vs-Tops_P Parameter: Tissue Value: Root Tips vs. Root Tops
  misc_feature: MA Experiment ID: 20000439 Result: Up-regulated in Transcription
  misc_feature: MA Experiment 20000439 PARAMETER Experiment Name: At_Roots__P Parameter: Age (day) Value: 14 vs. 21
  misc_feature: MA Experiment 20000439 PARAMETER Experiment Name: At_Roots__P Parameter: Organism Value: A. thaliana
  misc_feature: MA Experiment 20000439 PARAMETER Experiment Name: At_Roots__P Parameter: Tissue Value: Roots vs. Whole Plant
  misc_feature: MA Experiment ID: 20000453 Result: Down-regulated in Transcription
  misc_feature: MA Experiment 20000453 PARAMETER Experiment Name: At_100uM_ABA_P Parameter: Age (day) Value: 15
  misc_feature: MA Experiment 20000453 PARAMETER Experiment Name: At_100uM_ABA_P Parameter: Organism Value: A. thaliana
  misc_feature: MA Experiment 20000453 PARAMETER Experiment Name: At_100uM_ABA_P Parameter: Plant Line Value: WS
  misc_feature: MA Experiment 20000453 PARAMETER Experiment Name: At_100uM_ABA_P Parameter: Timepoint (hr) Value: 24
  misc_feature: MA Experiment 20000453 PARAMETER Experiment Name: At_100uM_ABA_P Parameter: Tissue Value: Aerial
  misc_feature: MA Experiment 20000453 PARAMETER Experiment Name: At_100uM_ABA_P Parameter: Treatment Value: 100uM ABA vs. No Treatment
  misc_feature: MA Experiment ID: 20000455 Result: Down-regulated in Transcription
  misc_feature: MA Experiment 20000455 PARAMETER Experiment Name: At_100uM_ABA_P Parameter: Age (day) Value: 16
  misc_feature: MA Experiment 20000455 PARAMETER Experiment Name: At_100uM_ABA_P Parameter: Organism Value: A. thaliana
  misc_feature: MA Experiment 20000455 PARAMETER Experiment Name: At_100uM_ABA_P Parameter: Plant Line Value: WS
  misc_feature: MA Experiment 20000455 PARAMETER Experiment Name: At_100uM_ABA_P Parameter: Timepoint (hr) Value: 48
  misc_feature: MA Experiment 20000455 PARAMETER Experiment Name: At_100uM_ABA_P Parameter: Tissue Value: Aerial
  misc_feature: MA Experiment 20000455 PARAMETER Experiment Name: At_100uM_ABA_P Parameter: Treatment Value: 100uM ABA vs. No Treatment
  misc_feature: MA Experiment ID: 20000495 Result: Up-regulated in Transcription
  misc_feature: MA Experiment 20000495 PARAMETER Experiment Name: At_Guard_Cells_P Parameter: Harvest Date Value: 8/2/2002
  misc_feature: MA Experiment 20000495 PARAMETER Experiment Name: At_Guard_Cells_P Parameter: Organism Value: A. thaliana
  misc_feature: MA Experiment 20000495 PARAMETER Experiment Name: At_Guard_Cells_P Parameter: Tissue Value: Guard Cells vs. Leaves
  misc_feature: MA Experiment ID: 20000527 Result: Down-regulated in Transcription
  misc_feature: MA Experiment 20000527 PARAMETER Experiment Name: At_10percent_PEG_P Parameter: Age (day) Value: 20
  misc_feature: MA Experiment 20000527 PARAMETER Experiment Name: At_10percent_PEG_P Parameter: Organism Value: A. thaliana
  misc_feature: MA Experiment 20000527 PARAMETER Experiment Name: At_10percent_PEG_P Parameter: Plant Line Value: WS
  misc_feature: MA Experiment 20000527 PARAMETER Experiment Name: At_10percent_PEG_P Parameter: Timepoint (day) Value: 20
  misc_feature: MA Experiment 20000527 PARAMETER Experiment Name: At_10percent_PEG_P Parameter: Tissue Value: Whole Plant
  misc_feature: MA Experiment 20000527 PARAMETER Experiment Name: At_10percent_PEG_P Parameter: Treatment Value: 10percent PEG vs. No Treatment
  misc_feature: MA Experiment ID: 20000794 Result: Up-regulated in Transcription
  misc_feature: MA Experiment 20000794 PARAMETER Experiment Name: At_Petals_P Parameter: Age (day) Value: 23-25 days
  misc_feature: MA Experiment 20000794 PARAMETER Experiment Name: At_Petals_P Parameter: Plant Line Value: WS
  misc_feature: MA Experiment 20000794 PARAMETER Experiment Name: At_Petals_P Parameter: Tissue Value: Petals vs. Whole plant
aataggtcagagagaacatttcttattggtttagtttgacgtctggtctctgttttgcttctttctaatcaacccatagctttcattctttttcttctttcagcagtgttttcaagaaaatgctagtaatactttttgtgtctgtcaatttcaggagaaaaggcattttctttgtcgccatcgatttgaaccggcccctatctgaacaagggccatttgatgttgttttgcataagttgttgggaaaagagtgggaagaggttattgaggattaccaacaaaaacacccagaagtgactgtgcttgatcctccaggatcaatacagcgtatatataatcgacaatcgatgcttcagggtatggcagatttgaaactgtcagattgcagtggcagcctttttgttccaaagcaaatggttgtcttgaaagattcagcagctagtgctgatgcagttgtggaagctggtctcaaatttccactagttgcaaagccgctctggatcgatgggactgcaaagtcacatcaattgtacttggcttatgacaggcgctcgcttgcagagcttgatccgcctttagtccttcaagagtttgttaatcatggtggagttatgttcaaggtatttgtggtgggtgatgttataaaagtcatgagacggttttctctaccaaatgtgagtaattgtgaaaaagccaaagttgatggcgtcttccaattcccaagggtttcatcagctgctgcttcagctgataacgcagacttggaccctcgtgttgctgagctacctccaaagcctttcctcgaggcgcttgtgaaagagctaagaagcttattgggacttcggcttttcaacatagacatgatcagggaacatgggagcaaaaacgtgttttatgttattgacatcaactattttcctggttacggaaaactgccagactacgagcaagtctttgtagatttcttccaaaatctggcgcaggtcaaatataagaagagacaacattgtaaatgaaagaaaatggcggcagtttttagatggtctactaagaagcgacaaataataaaatgtctaattatggatttgtacagaatttagctctcccttttggaagcagtatcagataaacaagttttgattactgattttgaattttcagtgaaataaacgtctcttcatcc

SEQ ID NO: 42610 - protein, 298 aa, Arabidopsis thaliana
  peptide (1)..(298): Ceres Seq. ID no. 12385331
  misc_feature (12)..(121): Pfam Name: Inositol 1, 3, 4-trisphosphate 5/6-kinase Pfam Description: Inositol 1, 3, 4-trisphosphate 5/6-kinase
  misc_feature (14)..(283): Homolog of NCBI NO: 27549256 NR Description: inositol phosphate kinase [Zea mays]
  misc_feature (41)..(294): Homolog of NCBI NO: 30680654 NR Description: inositol 1,3,4-trisphosphate 5/6-kinase-related
  misc_feature (12)..(286): Homolog of NCBI NO: 7487925 NR Description: inositol 1,3,4-trisphosphate 5/6-kinase homolog
  misc_feature (12)..(293): Homolog of NCBI NO: 27311236 NR Description: Putative inositol 1,3,4-trisphosphate 5/6-kinase
  misc_feature (12)..(294): Homolog of NCBI NO: 37530372 NR Description: putative inositol 1,3,4-trisphosphate 5/6-kinase
  misc_feature (12)..(294): Homolog of NCBI NO: 18413088 NR Description: inositol 1,3,4-trisphosphate 5/6-kinase-like
  misc_feature (12)..(121): Homolog of NCBI NO: 7487088 NR Description: hypothetical protein T16L1.260 - Arabidopsis
  misc_feature (118)..(268): Homolog of NCBI NO: 7487088 NR Description: hypothetical protein T16L1.260 - Arabidopsis
  misc_feature (12)..(121): Homolog of NCBI NO: 30689810 NR Description: expressed protein [Arabidopsis thaliana]
  misc_feature (118)..(298): Homolog of NCBI NO: 30689810 NR Description: expressed protein [Arabidopsis thaliana]
MLVILFVSVNFRRKGIFFVAIDLNRPLSEQGPFDVVLHKLLGKEWEEVIEDYQQKHPEVTVLDPPGSIQRIYNRQSMLQGMADLKLSDCSGSLFVPKQMVVLKDSAASADAVVEAGLKFPLVAKPLWIDGTAKSHQLYLAYDRRSLAELDPPLVLQEFVNHGGVMFKVFVVGDVIKVMRRFSLPNVSNCEKAKVDGVFQFPRVSSAAASADNADLDPRVAELPPKPFLEALVKELRSLLGLRLFNIDMIREHGSKNVFYVIDINYFPGYGKLPDYEQVFVDFFQNLAQVKYKKRQHCK

SEQ ID NO: 42611 - protein, 222 aa, Arabidopsis thaliana
  peptide (1)..(222): Ceres Seq. ID no. 12385332
  misc_feature (42)..(192): Pfam Name: Inositol 1, 3, 4-trisphosphate 5/6-kinase Pfam Description: Inositol 1, 3, 4-trisphosphate 5/6-kinase
  misc_feature (1)..(207): Homolog of NCBI NO: 27549256 NR Description: inositol phosphate kinase [Zea mays]
  misc_feature (1)..(218): Homolog of NCBI NO: 30680654 NR Description: inositol 1,3,4-trisphosphate 5/6-kinase-related
  misc_feature (1)..(210): Homolog of NCBI NO: 7487925 NR Description: inositol 1,3,4-trisphosphate 5/6-kinase homolog
  misc_feature (1)..(217): Homolog of NCBI NO: 27311236 NR Description: Putative inositol 1,3,4-trisphosphate 5/6-kinase
  misc_feature (1)..(218): Homolog of NCBI NO: 37530372 NR Description: putative inositol 1,3,4-trisphosphate 5/6-kinase
  misc_feature (1)..(218): Homolog of NCBI NO: 18413088 NR Description: inositol 1,3,4-trisphosphate 5/6-kinase-like
  misc_feature (1)..(45): Homolog of NCBI NO: 7487088 NR Description: hypothetical protein T16L1.260 - Arabidopsis
  misc_feature (42)..(192): Homolog of NCBI NO: 7487088 NR Description: hypothetical protein T16L1.260 - Arabidopsis
  misc_feature (1)..(45): Homolog of NCBI NO: 30689810 NR Description: expressed protein [Arabidopsis thaliana]
  misc_feature (42)..(222): Homolog of NCBI NO: 30689810 NR Description: expressed protein [Arabidopsis thaliana]
MLQGMADLKLSDCSGSLFVPKQMVVLKDSAASADAVVEAGLKFPLVAKPLWIDGTAKSHQLYLAYDRRSLAELDPPLVLQEFVNHGGVMFKVFVVGDVIKVMRRFSLPNVSNCEKAKVDGVFQFPRVSSAAASADNADLDPRVAELPPKPFLEALVKELRSLLGLRLFNIDMIREHGSKNVFYVIDINYFPGYGKLPDYEQVFVDFFQNLAQVKYKKRQHCK

SEQ ID NO: 42612 - protein, 218 aa, Arabidopsis thaliana
  peptide (1)..(218): Ceres Seq. ID no. 12385333
  misc_feature (38)..(188): Pfam Name: Inositol 1, 3, 4-trisphosphate 5/6-kinase Pfam Description: Inositol 1, 3, 4-trisphosphate 5/6-kinase
  misc_feature (1)..(203): Homolog of NCBI NO: 27549256 NR Description: inositol phosphate kinase [Zea mays]
  misc_feature (1)..(214): Homolog of NCBI NO: 30680654 NR Description: inositol 1,3,4-trisphosphate 5/6-kinase-related
  misc_feature (1)..(206): Homolog of NCBI NO: 7487925 NR Description: inositol 1,3,4-trisphosphate 5/6-kinase homolog
  misc_feature (1)..(213): Homolog of NCBI NO: 27311236 NR Description: Putative inositol 1,3,4-trisphosphate 5/6-kinase
  misc_feature (1)..(214): Homolog of NCBI NO: 37530372 NR Description: putative inositol 1,3,4-trisphosphate 5/6-kinase
  misc_feature (1)..(214): Homolog of NCBI NO: 18413088 NR Description: inositol 1,3,4-trisphosphate 5/6-kinase-like
  misc_feature (1)..(41): Homolog of NCBI NO: 7487088 NR Description: hypothetical protein T16L1.260 - Arabidopsis
  misc_feature (38)..(188): Homolog of NCBI NO: 7487088 NR Description: hypothetical protein T16L1.260 - Arabidopsis
  misc_feature (1)..(41): Homolog of NCBI NO: 30689810 NR Description: expressed protein [Arabidopsis thaliana]
  misc_feature (38)..(218): Homolog of NCBI NO: 30689810 NR Description: expressed protein [Arabidopsis thaliana]
MADLKLSDCSGSLFVPKQMVVLKDSAASADAVVEAGLKFPLVAKPLWIDGTAKSHQLYLAYDRRSLAELDPPLVLQEFVNHGGVMFKVFVVGDVIKVMRRFSLPNVSNCEKAKVDGVFQFPRVSSAAASADNADLDPRVAELPPKPFLEALVKELRSLLGLRLFNIDMIREHGSKNVFYVIDINYFPGYGKLPDYEQVFVDFFQNLAQVKYKKRQHCK

SEQ ID NO: 42613 - DNA, 1326 bp, Arabidopsis thaliana
  misc_feature (1)..(1326): Ceres Seq. ID no. 13497100
  misc_feature: MA Experiment ID: 108434 Result: Down-regulated in Transcription
  misc_feature: MA Experiment 108434 PARAMETER Experiment Name: At_Root_Tips_cDNA_P Parameter: Tissue Value: Root Tips
  misc_feature: MA Experiment ID: 108462 Result: Up-regulated in Transcription
  misc_feature: MA Experiment 108462 PARAMETER Experiment Name: At_Germinating_Seeds_cDNA_P Parameter: Age (day) Value: 2 vs. 0
  misc_feature: MA Experiment 108462 PARAMETER Experiment Name: At_Germinating_Seeds_cDNA_P Parameter: Tissue Value: Germinating Seeds
  misc_feature: MA Experiment ID: 108463 Result: Up-regulated in Transcription
  misc_feature: MA Experiment 108463 PARAMETER Experiment Name: At_Germinating_Seeds_cDNA_P Parameter: Age (day) Value: 3 vs. 0
  misc_feature: MA Experiment 108463 PARAMETER Experiment Name: At_Germinating_Seeds_cDNA_P Parameter: Tissue Value: Germinating Seeds
  misc_feature: MA Experiment ID: 108464 Result: Up-regulated in Transcription
  misc_feature: MA Experiment 108464 PARAMETER Experiment Name: At_Germinating_Seeds_cDNA_P Parameter: Age (day) Value: 4 vs. 0
  misc_feature: MA Experiment 108464 PARAMETER Experiment Name: At_Germinating_Seeds_cDNA_P Parameter: Tissue Value: Germinating Seeds
  misc_feature: MA Experiment ID: 108469 Result: Up-regulated in Transcription
  misc_feature: MA Experiment ID: 108594 Result: Down-regulated in Transcription
  misc_feature: MA Experiment 108594 PARAMETER Experiment Name: At_Ler-rhl_Root_cDNA_P Parameter: Plant Line Value: null
  misc_feature: MA Experiment ID: 108595 Result: Down-regulated in Transcription
  misc_feature: MA Experiment 108595 PARAMETER Experiment Name: At_Ler-pi_Ovule_cDNA_P Parameter: Plant Line Value: null
  misc_feature: MA Experiment ID: 108608 Result: Up-regulated in Transcription
  misc_feature: MA Experiment 108608 PARAMETER Experiment Name: At_100uM_ABA_cDNA_P Parameter: Timepoint (hr) Value: 1
  misc_feature: MA Experiment 108608 PARAMETER Experiment Name: At_100uM_ABA_cDNA_P Parameter: Tissue Value: Aerial
  misc_feature: MA Experiment 108608 PARAMETER Experiment Name: At_100uM_ABA_cDNA_P Parameter: Treatment Value: 100uM ABA vs. No Treatment
  misc_feature: MA Experiment ID: 108668 Result: Up-regulated in Transcription
  misc_feature: MA Experiment 108668 PARAMETER Experiment Name: At_2mM_SA_cDNA_P Parameter: Plant Line Value: WS
  misc_feature: MA Experiment 108668 PARAMETER Experiment Name: At_2mM_SA_cDNA_P Parameter: Timepoint (hr) Value: 6
  misc_feature: MA Experiment 108668 PARAMETER Experiment Name: At_2mM_SA_cDNA_P Parameter: Treatment Value: 2mM SA vs. No Treatment
  misc_feature: MA Experiment ID: 20000068 Result: Down-regulated in Transcription
  misc_feature: MA Experiment ID: 20000089 Result: Up-regulated in Transcription
  misc_feature: MA Experiment ID: 20000090 Result: Up-regulated in Transcription
  misc_feature: MA Experiment ID: 20000166 Result: Up-regulated in Transcription
  misc_feature: MA Experiment 20000166 PARAMETER Experiment Name: At_100uM_ABA_P Parameter: Age (day) Value: 14
  misc_feature: MA Experiment 20000166 PARAMETER Experiment Name: At_100uM_ABA_P Parameter: Organism Value: A. thaliana
  misc_feature: MA Experiment 20000166 PARAMETER Experiment Name: At_100uM_ABA_P Parameter: Plant Line Value: WS
  misc_feature: MA Experiment 20000166 PARAMETER Experiment Name: At_100uM_ABA_P Parameter: Timepoint (hr) Value: 1
  misc_feature: MA Experiment 20000166 PARAMETER Experiment Name: At_100uM_ABA_P Parameter: Tissue Value: Aerial
  misc_feature: MA Experiment 20000166 PARAMETER Experiment Name: At_100uM_ABA_P Parameter: Treatment Value: 100uM ABA vs. No Treatment
  misc_feature: MA Experiment ID: 20000173 Result: Down-regulated in Transcription
  misc_feature: MA Experiment 20000173 PARAMETER Experiment Name: At_42deg_Heat_P Parameter: Age (day) Value: 14
  misc_feature: MA Experiment 20000173 PARAMETER Experiment Name: At_42deg_Heat_P Parameter: Organism Value: A. thaliana
  misc_feature: MA Experiment 20000173 PARAMETER Experiment Name: At_42deg_Heat_P Parameter: Plant Line Value: WS
  misc_feature: MA Experiment 20000173 PARAMETER Experiment Name: At_42deg_Heat_P Parameter: Temperature (deg C) Value: 42 vs. 22
  misc_feature: MA Experiment 20000173 PARAMETER Experiment Name: At_42deg_Heat_P Parameter: Timepoint (hr) Value: 6
  misc_feature: MA Experiment 20000173 PARAMETER Experiment Name: At_42deg_Heat_P Parameter: Tissue Value: Aerial
  misc_feature: MA Experiment ID: 20000180 Result: Up-regulated in Transcription
  misc_feature: MA Experiment 20000180 PARAMETER Experiment Name: At_Germinating_Seeds_P Parameter: Age (hr) Value: 24 vs. 0
  misc_feature: MA Experiment 20000180 PARAMETER Experiment Name: At_Germinating_Seeds_P Parameter: Tissue Value: Germinating Seeds
  misc_feature: MA Experiment ID: 20000182 Result: Up-regulated in Transcription
  misc_feature: MA Experiment 20000182 PARAMETER Experiment Name: At_2mM_SA_P Parameter: Age (day) Value: 14
  misc_feature: MA Experiment 20000182 PARAMETER Experiment Name: At_2mM_SA_P Parameter: Organism Value: A. thaliana
  misc_feature: MA Experiment 20000182 PARAMETER Experiment Name: At_2mM_SA_P Parameter: Plant Line Value: WS
  misc_feature: MA Experiment 20000182 PARAMETER Experiment Name: At_2mM_SA_P Parameter: Timepoint (hr) Value: 6
  misc_feature: MA Experiment 20000182 PARAMETER Experiment Name: At_2mM_SA_P Parameter: Tissue Value: Aerial
  misc_feature: MA Experiment 20000182 PARAMETER Experiment Name: At_2mM_SA_P Parameter: Treatment Value: 2mM SA vs. No Treatment
  misc_feature: MA Experiment ID: 20000184 Result: Down-regulated in Transcription
  misc_feature: MA Experiment 20000184 PARAMETER Experiment Name: At_Shoots__P Parameter: Age (day) Value: 7
  misc_feature: MA Experiment 20000184 PARAMETER Experiment Name: At_Shoots__P Parameter: Tissue Value: Shoots vs. Whole Plant
  misc_feature: MA Experiment ID: 20000224 Result: Up-regulated in Transcription
  misc_feature: MA Experiment ID: 20000227 Result: Down-regulated in Transcription
  misc_feature: MA Experiment 20000227 PARAMETER Experiment Name: At_Root-Tips-vs-Tops_P Parameter: Tissue Value: Root Tips vs. Root Tops
  misc_feature: MA Experiment ID: 20000234 Result: Down-regulated in Transcription
  misc_feature: MA Experiment 20000234 PARAMETER Experiment Name: At_Siliques_P Parameter: Age (day) Value: 21
  misc_feature: MA Experiment 20000234 PARAMETER Experiment Name: At_Siliques_P Parameter: Organism Value: A. thaliana
  misc_feature: MA Experiment 20000234 PARAMETER Experiment Name: At_Siliques_P Parameter: Plant Line Value: WS
  misc_feature: MA Experiment 20000234 PARAMETER Experiment Name: At_Siliques_P Parameter: Tissue Value: Less Than 5mm Siliques vs. Whole Plant
  misc_feature: MA Experiment ID: 20000264 Result: Down-regulated in Transcription
  misc_feature: MA Experiment 20000264 PARAMETER Experiment Name: At_Open_Flower_P Parameter: Age (day) Value: 21
  misc_feature: MA Experiment 20000264 PARAMETER Experiment Name: At_Open_Flower_P Parameter: Plant Line Value: WS
  misc_feature: MA Experiment 20000264 PARAMETER Experiment Name: At_Open_Flower_P Parameter: Tissue Value: Open Flower vs. Whole Plant
  misc_feature: MA Experiment ID: 20000265 Result: Down-regulated in Transcription
  misc_feature: MA Experiment 20000265 PARAMETER Experiment Name: At_Open_Flower_P Parameter: Age (day) Value: 21
  misc_feature: MA Experiment 20000265 PARAMETER Experiment Name: At_Open_Flower_P Parameter: Plant Line Value: WS
  misc_feature: MA Experiment 20000265 PARAMETER Experiment Name: At_Open_Flower_P Parameter: Tissue Value: Closed Flower vs. Whole Plant
  misc_feature: MA Experiment ID: 20000286 Result: Down-regulated in Transcription
  misc_feature: MA Experiment 20000286 PARAMETER Experiment Name: At_Open_Flower_P Parameter: Age (day) Value: 21
  misc_feature: MA Experiment 20000286 PARAMETER Experiment Name: At_Open_Flower_P Parameter: Plant Line Value: WS
  misc_feature: MA Experiment 20000286 PARAMETER Experiment Name: At_Open_Flower_P Parameter: Tissue Value: Half Open vs. Whole Plant
  misc_feature: MA Experiment ID: 20000438 Result: Down-regulated in Transcription
  misc_feature: MA Experiment 20000438 PARAMETER Experiment Name: At_Shoots__P Parameter: Age (day) Value: 14
  misc_feature: MA Experiment 20000438 PARAMETER Experiment Name: At_Shoots__P Parameter: Tissue Value: Shoots vs. Whole Plant
  misc_feature: MA Experiment ID: 20000527 Result: Down-regulated in Transcription
  misc_feature: MA Experiment 20000527 PARAMETER Experiment Name: At_10percent_PEG_P Parameter: Age (day) Value: 20
  misc_feature: MA Experiment 20000527 PARAMETER Experiment Name: At_10percent_PEG_P Parameter: Organism Value: A. thaliana
  misc_feature: MA Experiment 20000527 PARAMETER Experiment Name: At_10percent_PEG_P Parameter: Plant Line Value: WS
  misc_feature: MA Experiment 20000527 PARAMETER Experiment Name: At_10percent_PEG_P Parameter: Timepoint (day) Value: 20
  misc_feature: MA Experiment 20000527 PARAMETER Experiment Name: At_10percent_PEG_P Parameter: Tissue Value: Whole Plant
  misc_feature: MA Experiment 20000527 PARAMETER Experiment Name: At_10percent_PEG_P Parameter: Treatment Value: 10percent PEG vs. No Treatment
  misc_feature: MA Experiment ID: 20000794 Result: Down-regulated in Transcription
  misc_feature: MA Experiment 20000794 PARAMETER Experiment Name: At_Petals_P Parameter: Age (day) Value: 23-25 days
  misc_feature: MA Experiment 20000794 PARAMETER Experiment Name: At_Petals_P Parameter: Plant Line Value: WS
  misc_feature: MA Experiment 20000794 PARAMETER Experiment Name: At_Petals_P Parameter: Tissue Value: Petals vs. Whole plant
  misc_feature: MA Experiment ID: 20001554 Result: Down-regulated in Transcription
  misc_feature: MA Experiment 20001554 PARAMETER Experiment Name: At_Drought_Soil_Dry_P Parameter: Age (day) Value: 21
  misc_feature: MA Experiment 20001554 PARAMETER Experiment Name: At_Drought_Soil_Dry_P Parameter: Organism Value: A. thaliana
  misc_feature: MA Experiment 20001554 PARAMETER Experiment Name: At_Drought_Soil_Dry_P Parameter: Plant Line Value: WS
  misc_feature: MA Experiment 20001554 PARAMETER Experiment Name: At_Drought_Soil_Dry_P Parameter: Post Timepoint (hr) Value: None
  misc_feature: MA Experiment 20001554 PARAMETER Experiment Name: At_Drought_Soil_Dry_P Parameter: Post-Treatment Value: None
  misc_feature: MA Experiment 20001554 PARAMETER Experiment Name: At_Drought_Soil_Dry_P Parameter: Timepoint (day) Value: 7
  misc_feature: MA Experiment 20001554 PARAMETER Experiment Name: At_Drought_Soil_Dry_P Parameter: Treatment Value: Drought vs. No Drought
  misc_feature: MA Experiment ID: 20001555 Result: Down-regulated in Transcription
  misc_feature: MA Experiment 20001555 PARAMETER Experiment Name: At_Drought_Soil_Dry_P Parameter: Age (day) Value: 24
  misc_feature: MA Experiment 20001555 PARAMETER Experiment Name: At_Drought_Soil_Dry_P Parameter: Organism Value: A. thaliana
  misc_feature: MA Experiment 20001555 PARAMETER Experiment Name: At_Drought_Soil_Dry_P Parameter: Plant Line Value: WS
  misc_feature: MA Experiment 20001555 PARAMETER Experiment Name: At_Drought_Soil_Dry_P Parameter: Post Timepoint (hr) Value: None
  misc_feature: MA Experiment 20001555 PARAMETER Experiment Name: At_Drought_Soil_Dry_P Parameter: Post-Treatment Value: None
  misc_feature: MA Experiment 20001555 PARAMETER Experiment Name: At_Drought_Soil_Dry_P Parameter: Timepoint (day) Value: 10
  misc_feature: MA Experiment 20001555 PARAMETER Experiment Name: At_Drought_Soil_Dry_P Parameter: Treatment Value: Drought vs. No Drought
  misc_feature: MA Experiment ID: 20001556 Result: Down-regulated in Transcription
  misc_feature: MA Experiment 20001556 PARAMETER Experiment Name: At_Drought_Soil_Dry_P Parameter: Age (day) Value: 26
  misc_feature: MA Experiment 20001556 PARAMETER Experiment Name: At_Drought_Soil_Dry_P Parameter: Organism Value: A. thaliana
  misc_feature: MA Experiment 20001556 PARAMETER Experiment Name: At_Drought_Soil_Dry_P Parameter: Plant Line Value: WS
  misc_feature: MA Experiment 20001556 PARAMETER Experiment Name: At_Drought_Soil_Dry_P Parameter: Post Timepoint (hr) Value: None
  misc_feature: MA Experiment 20001556 PARAMETER Experiment Name: At_Drought_Soil_Dry_P Parameter: Post-Treatment Value: None
  misc_feature: MA Experiment 20001556 PARAMETER Experiment Name: At_Drought_Soil_Dry_P Parameter: Timepoint (day) Value: 12
  misc_feature: MA Experiment 20001556 PARAMETER Experiment Name: At_Drought_Soil_Dry_P Parameter: Treatment Value: Drought vs. No Drought
  misc_feature: MA Experiment ID: 20001557 Result: Down-regulated in Transcription
  misc_feature: MA Experiment 20001557 PARAMETER Experiment Name: At_Drought_Soil_Dry_P Parameter: Age (day) Value: 27
  misc_feature: MA Experiment 20001557 PARAMETER Experiment Name: At_Drought_Soil_Dry_P Parameter: Organism Value: A. thaliana
  misc_feature: MA Experiment 20001557 PARAMETER Experiment Name: At_Drought_Soil_Dry_P Parameter: Plant Line Value: WS
  misc_feature: MA Experiment 20001557 PARAMETER Experiment Name: At_Drought_Soil_Dry_P Parameter: Post Timepoint (hr) Value: 3
  misc_feature: MA Experiment 20001557 PARAMETER Experiment Name: At_Drought_Soil_Dry_P Parameter: Post-Treatment Value: Re-Water vs. No Drought
  misc_feature: MA Experiment 20001557 PARAMETER Experiment Name: At_Drought_Soil_Dry_P Parameter: Timepoint (day) Value: 13
  misc_feature: MA Experiment 20001557 PARAMETER Experiment Name: At_Drought_Soil_Dry_P Parameter: Treatment Value: Drought vs. No Drought
  misc_feature: MA Experiment ID: 20001559 Result: Down-regulated in Transcription
  misc_feature: MA Experiment 20001559 PARAMETER Experiment Name: At_Drought_Soil_Dry_P Parameter: Age (day) Value: 28
  misc_feature: MA Experiment 20001559 PARAMETER Experiment Name: At_Drought_Soil_Dry_P Parameter: Organism Value: A. thaliana
  misc_feature: MA Experiment 20001559 PARAMETER Experiment Name: At_Drought_Soil_Dry_P Parameter: Plant Line Value: WS
  misc_feature: MA Experiment 20001559 PARAMETER Experiment Name: At_Drought_Soil_Dry_P Parameter: Post Timepoint (hr) Value: 29
  misc_feature: MA Experiment 20001559 PARAMETER Experiment Name: At_Drought_Soil_Dry_P Parameter: Post-Treatment Value: Re-Water vs. No Drought
  misc_feature: MA Experiment 20001559 PARAMETER Experiment Name: At_Drought_Soil_Dry_P Parameter: Timepoint (day) Value: 14
  misc_feature: MA Experiment 20001559 PARAMETER Experiment Name: At_Drought_Soil_Dry_P Parameter: Treatment Value: Drought vs. No Drought
  misc_feature: MA Experiment ID: 20001560 Result: Down-regulated in Transcription
  misc_feature: MA Experiment 20001560 PARAMETER Experiment Name: At_Drought_Soil_Dry_P Parameter: Age (day) Value: 28
  misc_feature: MA Experiment 20001560 PARAMETER Experiment Name: At_Drought_Soil_Dry_P Parameter: Organism Value: A. thaliana
  misc_feature: MA Experiment 20001560 PARAMETER Experiment Name: At_Drought_Soil_Dry_P Parameter: Plant Line Value: WS
  misc_feature: MA Experiment 20001560 PARAMETER Experiment Name: At_Drought_Soil_Dry_P Parameter: Post Timepoint (hr) Value: None
  misc_feature: MA Experiment 20001560 PARAMETER Experiment Name: At_Drought_Soil_Dry_P Parameter: Post-Treatment Value: None
  misc_feature: MA Experiment 20001560 PARAMETER Experiment Name: At_Drought_Soil_Dry_P Parameter: Timepoint (day) Value: 14
  misc_feature: MA Experiment 20001560 PARAMETER Experiment Name: At_Drought_Soil_Dry_P Parameter: Treatment Value: Drought vs. No Drought
  misc_feature: MA Experiment ID: 20001773 Result: Down-regulated in Transcription
  misc_feature: MA Experiment 20001773 PARAMETER Experiment Name: At_Far-red-enriched-adult_P Parameter: Age (day) Value: 30
  misc_feature: MA Experiment 20001773 PARAMETER Experiment Name: At_Far-red-enriched-adult_P Parameter: Light Value: Far-red enriched vs. White
  misc_feature: MA Experiment 20001773 PARAMETER Experiment Name: At_Far-red-enriched-adult_P Parameter: Organism Value: A. thaliana
  misc_feature: MA Experiment 20001773 PARAMETER Experiment Name: At_Far-red-enriched-adult_P Parameter: Plant Line Value: Columbia
  misc_feature: MA Experiment 20001773 PARAMETER Experiment Name: At_Far-red-enriched-adult_P Parameter: Timepoint (hr) Value: 48
  misc_feature: MA Experiment 20001773 PARAMETER Experiment Name: At_Far-red-enriched-adult_P Parameter: Tissue Value: Aerial
actcaaagtcgagccttccttcctttatctcttataccctttttgattcttcttcaattttctgacatcaaatggcggcaaagctgatatccaccggtttccgtcatactactttgccggaaaactatgtccggccaatctccgaccgtccacgactctctgaagtctctcaactcgaagatttccctctcatcgatctctcttccactgatcgatcttttctcatccaacaaatccaccaagcttgtgcccgattcggattttttcaggtcataaatcacggagttaacaaacaaataatagatgagatggtgagtgttgcgcgtgagttctttagcatgtctatggaagaaaaaatgaagctatattcagacgatccaacgaagacaacaagattatcgacgagcttcaatgtgaagaaagaagaagtcaacaattggagagactatctaagactccattgttatcctatccacaagtatgtcaatgagtggccgtcaaaccctccttctttcaaggaaatagtaagtaaatacagtagagaagtaagagaagtgggatttaaaatagaggaattaatatcagagagcttaggtttagaaaaagattacatgaagaaagtgcttggtgaacaaggtcaacacatggcagtcaactattatcctccatgtcctgaacctgagctcacttacggtttacctgctcataccgacccaaacgccctaaccattcttcttcaagacactactgtttgcggtctccagatcttgatcgacggtcagtggttcgccgttaatccacatcctgatgcttttgtcatcaacataggtgaccagttacaggcattaagtaatggagtatacaaaagtgtttggcatcgcgctgtaacaaacacagaaaatccgagactatcggtcgcatcgtttctgtgcccagctgactgtgctgtcatgagcccggccaagcccttgtgggaagctgaggacgatgaaacgaaaccagtctacaaagatttcacttatgcagagtattacaagaagttttggagtaggaatctggaccaagaacattgcctcgagaattttctaaacaactaagatacatatatctttggcctttgtgtttgtctagtaggcatatatatacaagtcaataacagcattgatgttcgattctacattcctaccaacattttgttctagacgtatgataatagtaggaatcatgatcatatgtcttgataataactatcatgggcatatttgtttgtgtgttaaataatttcttaccttttatttttctatatgcttcaaaacttttaacttt

SEQ ID NO: 42614 - protein, 341 aa, Arabidopsis thaliana
  peptide (1)..(341): Ceres Seq. ID no. 13497101
  misc_feature (188)..(288): Pfam Name: 2OG-Fe(II) oxygenase superfamily Pfam Description: 2OG-Fe(II) oxygenase superfamily
  misc_feature (15)..(336): Homolog of NCBI NO: 7433240 NR Description: probable flavonol synthase [imported] -
  misc_feature (14)..(320): Homolog of NCBI NO: 21327037 NR Description: putative flavanone 3-hydroxylase [Saussurea
  misc_feature (149)..(338): Homolog of NCBI NO: 25446682 NR Description: Putative flavanone 3-hydroxylase
  misc_feature (15)..(341): Homolog of NCBI NO: 38345873 NR Description: OSJNBa0064M23.15 [Oryza sativa (japonica
  misc_feature (3)..(338): Homolog of NCBI NO: 15235126 NR Description: oxidoreductase, 2OG-Fe(II) oxygenase family
  misc_feature (2)..(338): Homolog of NCBI NO: 15235124 NR Description: oxidoreductase, 2OG-Fe(II) oxygenase family
  misc_feature (4)..(338): Homolog of NCBI NO: 38345872 NR Description: OSJNBa0064M23.14 [Oryza sativa (japonica
  misc_feature (4)..(338): Homolog of NCBI NO: 37536444 NR Description: unknown protein [Oryza sativa (japonica
  misc_feature (1)..(341): Homolog of NCBI NO: 21553527 NR Description: flavanone 3-hydroxylase-like protein [Arabidopsis
  misc_feature (1)..(341): Homolog of NCBI NO: 15238567 NR Description: oxidoreductase, 2OG-Fe(II) oxygenase family
MAAKLISTGFRHTTLPENYVRPISDRPRLSEVSQLEDFPLIDLSSTDRSFLIQQIHQACARFGFFQVINHGVNKQIIDEMVSVAREFFSMSMEEKMKLYSDDPTKTTRLSTSFNVKKEEVNNWRDYLRLHCYPIHKYVNEWPSNPPSFKEIVSKYSREVREVGFKIEELISESLGLEKDYMKKVLGEQGQHMAVNYYPPCPEPELTYGLPAHTDPNALTILLQDTTVCGLQILIDGQWFAVNPHPDAFVINIGDQLQALSNGVYKSVWHRAVTNTENPRLSVASFLCPADCAVMSPAKPLWEAEDDETKPVYKDFTYAEYYKKFWSRNLDQEHCLENFLNN

SEQ ID NO: 42615 - protein, 262 aa, Arabidopsis thaliana
  peptide (1)..(262): Ceres Seq. ID no. 13497102
  misc_feature (109)..(209): Pfam Name: 2OG-Fe(II) oxygenase superfamily Pfam Description: 2OG-Fe(II) oxygenase superfamily
  misc_feature (1)..(257): Homolog of NCBI NO: 7433240 NR Description: probable flavonol synthase [imported] -
  misc_feature (1)..(241): Homolog of NCBI NO: 21327037 NR Description: putative flavanone 3-hydroxylase [Saussurea
  misc_feature (70)..(259): Homolog of NCBI NO: 25446682 NR Description: Putative flavanone 3-hydroxylase
  misc_feature (1)..(262): Homolog of NCBI NO: 38345873 NR Description: OSJNBa0064M23.15 [Oryza sativa (japonica
  misc_feature (1)..(259): Homolog of NCBI NO: 15235126 NR Description: oxidoreductase, 2OG-Fe(II) oxygenase family
  misc_feature (1)..(259): Homolog of NCBI NO: 15235124 NR Description: oxidoreductase, 2OG-Fe(II) oxygenase family
  misc_feature (1)..(259): Homolog of NCBI NO: 38345872 NR Description: OSJNBa0064M23.14 [Oryza sativa (japonica
  misc_feature (1)..(259): Homolog of NCBI NO: 37536444 NR Description: unknown protein [Oryza sativa (japonica
  misc_feature (1)..(262): Homolog of NCBI NO: 21553527 NR Description: flavanone 3-hydroxylase-like protein [Arabidopsis
  misc_feature (1)..(262): Homolog of NCBI NO: 15238567 NR Description: oxidoreductase, 2OG-Fe(II) oxygenase family
MVSVAREFFSMSMEEKMKLYSDDPTKTTRLSTSFNVKKEEVNNWRDYLRLHCYPIHKYVNEWPSNPPSFKEIVSKYSREVREVGFKIEELISESLGLEKDYMKKVLGEQGQHMAVNYYPPCPEPELTYGLPAHTDPNALTILLQDTTVCGLQILIDGQWFAVNPHPDAFVINIGDQLQALSNGVYKSVWHRAVTNTENPRLSVASFLCPADCAVMSPAKPLWEAEDDETKPVYKDFTYAEYYKKFWSRNLDQEHCLENFLNN

SEQ ID NO: 42616 - protein, 252 aa, Arabidopsis thaliana
  peptide (1)..(252): Ceres Seq. ID no. 13497103
  misc_feature (99)..(199): Pfam Name: 2OG-Fe(II) oxygenase superfamily Pfam Description: 2OG-Fe(II) oxygenase superfamily
  misc_feature (1)..(247): Homolog of NCBI NO: 7433240 NR Description: probable flavonol synthase [imported] -
  misc_feature (1)..(231): Homolog of NCBI NO: 21327037 NR Description: putative flavanone 3-hydroxylase [Saussurea
  misc_feature (60)..(249): Homolog of NCBI NO: 25446682 NR Description: Putative flavanone 3-hydroxylase
  misc_feature (1)..(252): Homolog of NCBI NO: 38345873 NR Description: OSJNBa0064M23.15 [Oryza sativa (japonica
  misc_feature (1)..(249): Homolog of NCBI NO: 15235126 NR Description: oxidoreductase, 2OG-Fe(II) oxygenase family
  misc_feature (1)..(249): Homolog of NCBI NO: 15235124 NR Description: oxidoreductase, 2OG-Fe(II) oxygenase family
  misc_feature (1)..(249): Homolog of NCBI NO: 38345872 NR Description: OSJNBa0064M23.14 [Oryza sativa (japonica
  misc_feature (1)..(249): Homolog of NCBI NO: 37536444 NR Description: unknown protein [Oryza sativa (japonica
  misc_feature (1)..(252): Homolog of NCBI NO: 21553527 NR Description: flavanone 3-hydroxylase-like protein [Arabidopsis
  misc_feature (1)..(252): Homolog of NCBI NO: 15238567 NR Description: oxidoreductase, 2OG-Fe(II) oxygenase family
MSMEEKMKLYSDDPTKTTRLSTSFNVKKEEVNNWRDYLRLHCYPIHKYVNEWPSNPPSFKEIVSKYSREVREVGFKIEELISESLGLEKDYMKKVLGEQGQHMAVNYYPPCPEPELTYGLPAHTDPNALTILLQDTTVCGLQILIDGQWFAVNPHPDAFVINIGDQLQALSNGVYKSVWHRAVTNTENPRLSVASFLCPADCAVMSPAKPLWEAEDDETKPVYKDFTYAEYYKKFWSRNLDQEHCLENFLNN

SEQ ID NO: 42617 - DNA, 1471 bp, Arabidopsis thaliana
  misc_feature (1)..(1471): Ceres Seq. ID no. 13493970
  misc_feature: MA Experiment ID: 108434 Result: Down-regulated in Transcription
  misc_feature: MA Experiment 108434 PARAMETER Experiment Name: At_Root_Tips_cDNA_P Parameter: Tissue Value: Root Tips
  misc_feature: MA Experiment ID: 108464 Result: Up-regulated in Transcription
  misc_feature: MA Experiment 108464 PARAMETER Experiment Name: At_Germinating_Seeds_cDNA_P Parameter: Age (day) Value: 4 vs. 0
  misc_feature: MA Experiment 108464 PARAMETER Experiment Name: At_Germinating_Seeds_cDNA_P Parameter: Tissue Value: Germinating Seeds
  misc_feature: MA Experiment ID: 108473 Result: Up-regulated in Transcription
  misc_feature: MA Experiment 108473 PARAMETER Experiment Name: At_Drought_Flowers_cDNA_P Parameter: Timepoint (hr) Value: 7 d
  misc_feature: MA Experiment 108473 PARAMETER Experiment Name: At_Drought_Flowers_cDNA_P Parameter: Tissue Value: Flower
  misc_feature: MA Experiment 108473 PARAMETER Experiment Name: At_Drought_Flowers_cDNA_P Parameter: Treatment Value: Drought vs. No Drought
  misc_feature: MA Experiment ID: 108489 Result: Up-regulated in Transcription
  misc_feature: MA Experiment ID: 108573 Result: Up-regulated in Transcription
  misc_feature: MA Experiment 108573 PARAMETER Experiment Name: At_Drought_cDNA_P Parameter: Timepoint (hr) Value: 6
  misc_feature: MA Experiment 108573 PARAMETER Experiment Name: At_Drought_cDNA_P Parameter: Tissue Value: Aerial
  misc_feature: MA Experiment 108573 PARAMETER Experiment Name: At_Drought_cDNA_P Parameter: Treatment Value: Drought vs. No Drought
  misc_feature: MA Experiment ID: 108574 Result: Up-regulated in Transcription
  misc_feature: MA Experiment 108574 PARAMETER Experiment Name: At_Wounding__cDNA_P Parameter: Timepoint (hr) Value: 1
  misc_feature: MA Experiment 108574 PARAMETER Experiment Name: At_Wounding__cDNA_P Parameter: Tissue Value: Aerial
  misc_feature: MA Experiment 108574 PARAMETER Experiment Name: At_Wounding__cDNA_P Parameter: Treatment Value: Wounding vs. No Wounding
  misc_feature: MA Experiment ID: 108594 Result: Up-regulated in Transcription
  misc_feature: MA Experiment 108594 PARAMETER Experiment Name: At_Ler-rhl_Root_cDNA_P Parameter: Plant Line Value: null
  misc_feature: MA Experiment ID: 108595 Result: Up-regulated in Transcription
  misc_feature: MA Experiment 108595 PARAMETER Experiment Name: At_Ler-pi_Ovule_cDNA_P Parameter: Plant Line Value: null
  misc_feature: MA Experiment ID: 108667 Result: Up-regulated in Transcription
  misc_feature: MA Experiment 108667 PARAMETER Experiment Name: At_2mM_SA_cDNA_P Parameter: Plant Line Value: WS
  misc_feature: MA Experiment 108667 PARAMETER Experiment Name: At_2mM_SA_cDNA_P Parameter: Timepoint (hr) Value: 1
  misc_feature: MA Experiment 108667 PARAMETER Experiment Name: At_2mM_SA_cDNA_P Parameter: Treatment Value: 2mM SA vs. No Treatment
  misc_feature: MA Experiment ID: 20000069 Result: Up-regulated in Transcription
  misc_feature: MA Experiment 20000069 PARAMETER Experiment Name: At_100uM_ABA_Mutants_cDNA_P Parameter: Plant Line Value: CS23
  misc_feature: MA Experiment 20000069 PARAMETER Experiment Name: At_100uM_ABA_Mutants_cDNA_P Parameter: Timepoint (hr) Value: 6
  misc_feature: MA Experiment 20000069 PARAMETER Experiment Name: At_100uM_ABA_Mutants_cDNA_P Parameter: Tissue Value: Aerial
  misc_feature: MA Experiment 20000069 PARAMETER Experiment Name: At_100uM_ABA_Mutants_cDNA_P Parameter: Treatment Value: 100uM ABA vs. No Treatment
  misc_feature: MA Experiment ID: 20000071 Result: Up-regulated in Transcription
  misc_feature: MA Experiment 20000071 PARAMETER Experiment Name: At_100uM_ABA_Mutants_cDNA_P Parameter: Plant Line Value: CS8104
  misc_feature: MA Experiment 20000071 PARAMETER Experiment Name: At_100uM_ABA_Mutants_cDNA_P Parameter: Timepoint (hr) Value: 6
  misc_feature: MA Experiment 20000071 PARAMETER Experiment Name: At_100uM_ABA_Mutants_cDNA_P Parameter: Tissue Value: Aerial
  misc_feature: MA Experiment 20000071 PARAMETER Experiment Name: At_100uM_ABA_Mutants_cDNA_P Parameter: Treatment Value: 100uM ABA vs. No Treatment
  misc_feature: MA Experiment ID: 20000072 Result: Up-regulated in Transcription
  misc_feature: MA Experiment 20000072 PARAMETER Experiment Name: At_100uM_ABA_Mutants_cDNA_P Parameter: Plant Line Value: CS8105
  misc_feature: MA Experiment 20000072 PARAMETER Experiment Name: At_100uM_ABA_Mutants_cDNA_P Parameter: Timepoint (hr) Value: 6
  misc_feature: MA Experiment 20000072 PARAMETER Experiment Name: At_100uM_ABA_Mutants_cDNA_P Parameter: Tissue Value: Aerial
  misc_feature: MA Experiment 20000072 PARAMETER Experiment Name: At_100uM_ABA_Mutants_cDNA_P Parameter: Treatment Value: 100uM ABA vs. No Treatment
  misc_feature: MA Experiment ID: 20000087 Result: Up-regulated in Transcription
  misc_feature: MA Experiment 20000087 PARAMETER Experiment Name: At_100uM_ABA_Mutants_cDNA_P Parameter: Plant Line Value: WS
  misc_feature: MA Experiment 20000087 PARAMETER Experiment Name: At_100uM_ABA_Mutants_cDNA_P Parameter: Timepoint (hr) Value: 6
  misc_feature: MA Experiment 20000087 PARAMETER Experiment Name: At_100uM_ABA_Mutants_cDNA_P Parameter: Tissue Value: Aerial
  misc_feature: MA Experiment 20000087 PARAMETER Experiment Name: At_100uM_ABA_Mutants_cDNA_P Parameter: Treatment Value: 100uM ABA vs. No Treatment
  misc_feature: MA Experiment ID: 20000111 Result: Up-regulated in Transcription
  misc_feature: MA Experiment 20000111 PARAMETER Experiment Name: At_42deg_Heat_cDNA_P Parameter: Temperature (deg C) Value: 42 vs. 22
  misc_feature: MA Experiment 20000111 PARAMETER Experiment Name: At_42deg_Heat_cDNA_P Parameter: Timepoint (hr) Value: 6
  misc_feature: MA Experiment 20000111 PARAMETER Experiment Name: At_42deg_Heat_cDNA_P Parameter: Tissue Value: Aerial
  misc_feature: MA Experiment ID: 20000113 Result: Up-regulated in Transcription
  misc_feature: MA Experiment 20000113 PARAMETER Experiment Name: At_42deg_Heat_cDNA_P Parameter: Temperature (deg C) Value: 42 vs. 22
  misc_feature: MA Experiment 20000113 PARAMETER Experiment Name: At_42deg_Heat_cDNA_P Parameter: Timepoint (hr) Value: 8
  misc_feature: MA Experiment 20000113 PARAMETER Experiment Name: At_42deg_Heat_cDNA_P Parameter: Tissue Value: Aerial
  misc_feature: MA Experiment ID: 20000144 Result: Up-regulated in Transcription
  misc_feature: MA Experiment 20000144 PARAMETER Experiment Name: At_42deg_Heat_cDNA_P Parameter: Temperature (deg C) Value: 42 vs. 22
  misc_feature: MA Experiment 20000144 PARAMETER Experiment Name: At_42deg_Heat_cDNA_P Parameter: Timepoint (hr) Value: 1
  misc_feature: MA Experiment 20000144 PARAMETER Experiment Name: At_42deg_Heat_cDNA_P Parameter: Tissue Value: Aerial
  misc_feature: MA Experiment ID: 20000173 Result: Up-regulated in Transcription
  misc_feature: MA Experiment 20000173 PARAMETER Experiment Name: At_42deg_Heat_P Parameter: Age (day) Value: 14
  misc_feature: MA Experiment 20000173 PARAMETER Experiment Name: At_42deg_Heat_P Parameter: Organism Value: A. thaliana
  misc_feature: MA Experiment 20000173 PARAMETER Experiment Name: At_42deg_Heat_P Parameter: Plant Line Value: WS
  misc_feature: MA Experiment 20000173 PARAMETER Experiment Name: At_42deg_Heat_P Parameter: Temperature (deg C) Value: 42 vs. 22
  misc_feature: MA Experiment 20000173 PARAMETER Experiment Name: At_42deg_Heat_P Parameter: Timepoint (hr) Value: 6
  misc_feature: MA Experiment 20000173 PARAMETER Experiment Name: At_42deg_Heat_P Parameter: Tissue Value: Aerial
  misc_feature: MA Experiment ID: 20000184 Result: Down-regulated in Transcription
  misc_feature: MA Experiment 20000184 PARAMETER Experiment Name: At_Shoots__P Parameter: Age (day) Value: 7
  misc_feature: MA Experiment 20000184 PARAMETER Experiment Name: At_Shoots__P Parameter: Tissue Value: Shoots vs. Whole Plant
  misc_feature: MA Experiment ID: 20000185 Result: Down-regulated in Transcription
  misc_feature: MA Experiment 20000185 PARAMETER Experiment Name: At_Roots__P Parameter: Age (day) Value: 7 vs. 21
  misc_feature: MA Experiment 20000185 PARAMETER Experiment Name: At_Roots__P Parameter: Organism Value: A. thaliana
  misc_feature: MA Experiment 20000185 PARAMETER Experiment Name: At_Roots__P Parameter: Tissue Value: Roots vs. Whole Plant
  misc_feature: MA Experiment ID: 20000234 Result: Down-regulated in Transcription
  misc_feature: MA Experiment 20000234 PARAMETER Experiment Name: At_Siliques_P Parameter: Age (day) Value: 21
  misc_feature: MA Experiment 20000234 PARAMETER Experiment Name: At_Siliques_P Parameter: Organism Value: A. thaliana
  misc_feature: MA Experiment 20000234 PARAMETER Experiment Name: At_Siliques_P Parameter: Plant Line Value: WS
  misc_feature: MA Experiment 20000234 PARAMETER Experiment Name: At_Siliques_P Parameter: Tissue Value: Less Than 5mm Siliques vs. Whole Plant
  misc_feature: MA Experiment ID: 20000235 Result: Down-regulated in Transcription
  misc_feature: MA Experiment 20000235 PARAMETER Experiment Name: At_Siliques_P Parameter: Age (day) Value: 21
  misc_feature: MA Experiment 20000235 PARAMETER Experiment Name: At_Siliques_P Parameter: Organism Value: A. thaliana
  misc_feature: MA Experiment 20000235 PARAMETER Experiment Name: At_Siliques_P Parameter: Plant Line Value: WS
  misc_feature: MA Experiment 20000235 PARAMETER Experiment Name: At_Siliques_P Parameter: Tissue Value: 5-10mm Siliques vs. Whole Plant
  misc_feature: MA Experiment ID: 20000264 Result: Down-regulated in Transcription
  misc_feature: MA Experiment 20000264 PARAMETER Experiment Name: At_Open_Flower_P Parameter: Age (day) Value: 21
  misc_feature: MA Experiment 20000264 PARAMETER Experiment Name: At_Open_Flower_P Parameter: Plant Line Value: WS
  misc_feature: MA Experiment 20000264 PARAMETER Experiment Name: At_Open_Flower_P Parameter: Tissue Value: Open Flower vs. Whole Plant
  misc_feature: MA Experiment ID: 20000265 Result: Down-regulated in Transcription
  misc_feature: MA Experiment 20000265 PARAMETER Experiment Name: At_Open_Flower_P Parameter: Age (day) Value: 21
  misc_feature: MA Experiment 20000265 PARAMETER Experiment Name: At_Open_Flower_P Parameter: Plant Line Value: WS
  misc_feature: MA Experiment 20000265 PARAMETER Experiment Name: At_Open_Flower_P Parameter: Tissue Value: Closed Flower vs. Whole Plant
  misc_feature: MA Experiment ID: 20000267 Result: Up-regulated in Transcription
  misc_feature: MA Experiment 20000267 PARAMETER Experiment Name: At_Drought_P Parameter: Age (day) Value: 7
  misc_feature: MA Experiment 20000267 PARAMETER Experiment Name: At_Drought_P Parameter: Organism Value: A. thaliana
  misc_feature: MA Experiment 20000267 PARAMETER Experiment Name: At_Drought_P Parameter: Plant Line Value: WS
  misc_feature: MA Experiment 20000267 PARAMETER Experiment Name: At_Drought_P Parameter: Timepoint (hr) Value: 6
  misc_feature: MA Experiment 20000267 PARAMETER Experiment Name: At_Drought_P Parameter: Tissue Value: Whole Plant
  misc_feature: MA Experiment 20000267 PARAMETER Experiment Name: At_Drought_P Parameter: Treatment Value: Drought vs. No Drought
  misc_feature: MA Experiment ID: 20000286 Result: Down-regulated in Transcription
  misc_feature: MA Experiment 20000286 PARAMETER Experiment Name: At_Open_Flower_P Parameter: Age (day) Value: 21
  misc_feature: MA Experiment 20000286 PARAMETER Experiment Name: At_Open_Flower_P Parameter: Plant Line Value: WS
  misc_feature: MA Experiment 20000286 PARAMETER Experiment Name: At_Open_Flower_P Parameter: Tissue Value: Half Open vs. Whole Plant
  misc_feature: MA Experiment ID: 20000436 Result: Up-regulated in Transcription
  misc_feature: MA Experiment 20000436 PARAMETER Experiment Name: At_Drought_P Parameter: Age (day) Value: 7
  misc_feature: MA Experiment 20000436 PARAMETER Experiment Name: At_Drought_P Parameter: Organism Value: A. thaliana
  misc_feature: MA Experiment 20000436 PARAMETER Experiment Name: At_Drought_P Parameter: Plant Line Value: WS
  misc_feature: MA Experiment 20000436 PARAMETER Experiment Name: At_Drought_P Parameter: Timepoint (hr) Value: 12
  misc_feature: MA Experiment 20000436 PARAMETER Experiment Name: At_Drought_P Parameter: Tissue Value: Whole Plant
  misc_feature: MA Experiment 20000436 PARAMETER Experiment Name: At_Drought_P Parameter: Treatment Value: Drought vs. No Drought
  misc_feature: MA Experiment ID: 20000437 Result: Up-regulated in Transcription
  misc_feature: MA Experiment 20000437 PARAMETER Experiment Name: At_Drought_P Parameter: Age (day) Value: 8
  misc_feature: MA Experiment 20000437 PARAMETER Experiment Name: At_Drought_P Parameter: Organism Value: A. thaliana
  misc_feature: MA Experiment 20000437 PARAMETER Experiment Name: At_Drought_P Parameter: Plant Line Value: WS
  misc_feature: MA Experiment 20000437 PARAMETER Experiment Name: At_Drought_P Parameter: Timepoint (hr) Value: 24
  misc_feature: MA Experiment 20000437 PARAMETER Experiment Name: At_Drought_P Parameter: Tissue Value: Whole Plant
  misc_feature: MA Experiment 20000437 PARAMETER Experiment Name: At_Drought_P Parameter: Treatment Value: Drought vs. No Drought
  misc_feature: MA Experiment ID: 20000438 Result: Down-regulated in Transcription
  misc_feature: MA Experiment 20000438 PARAMETER Experiment Name: At_Shoots__P Parameter: Age (day) Value: 14
  misc_feature: MA Experiment 20000438 PARAMETER Experiment Name: At_Shoots__P Parameter: Tissue Value: Shoots vs. Whole Plant
  misc_feature: MA Experiment ID: 20000439 Result: Down-regulated in Transcription
  misc_feature: MA Experiment 20000439 PARAMETER Experiment Name: At_Roots__P Parameter: Age (day) Value: 14 vs. 21
  misc_feature: MA Experiment 20000439 PARAMETER Experiment Name: At_Roots__P Parameter: Organism Value: A. thaliana
  misc_feature: MA Experiment 20000439 PARAMETER Experiment Name: At_Roots__P Parameter: Tissue Value: Roots vs. Whole Plant
  misc_feature: MA Experiment ID: 20000441 Result: Up-regulated in Transcription
  misc_feature: MA Experiment 20000441 PARAMETER Experiment Name: At_1uM_BR-BRZ__P Parameter: Tissue Value: Shoot Apices
  misc_feature: MA Experiment 20000441 PARAMETER Experiment Name: At_1uM_BR-BRZ__P Parameter: Treatment Value: 1uM BR vs. No Treatment
  misc_feature: MA Experiment ID: 20000451 Result: Down-regulated in Transcription
  misc_feature: MA Experiment 20000451 PARAMETER Experiment Name: At_CS6879_Shoots-Roots_P Parameter: Age (day) Value: 14
  misc_feature: MA Experiment 20000451 PARAMETER Experiment Name: At_CS6879_Shoots-Roots_P Parameter: Organism Value: A. thaliana
  misc_feature: MA Experiment 20000451 PARAMETER Experiment Name: At_CS6879_Shoots-Roots_P Parameter: Plant Line Value: CS6879 vs. WS
  misc_feature: MA Experiment 20000451 PARAMETER Experiment Name: At_CS6879_Shoots-Roots_P Parameter: Tissue Value: Roots
  misc_feature: MA Experiment ID: 20000460 Result: Up-regulated in Transcription
  misc_feature: MA Experiment 20000460 PARAMETER Experiment Name: At_10percent_PEG_P Parameter: Age (day) Value: 12
  misc_feature: MA Experiment 20000460 PARAMETER Experiment Name: At_10percent_PEG_P Parameter: Organism Value: A. thaliana
  misc_feature: MA Experiment 20000460 PARAMETER Experiment Name: At_10percent_PEG_P Parameter: Plant Line Value: WS
  misc_feature: MA Experiment 20000460 PARAMETER Experiment Name: At_10percent_PEG_P Parameter: Timepoint (day) Value: 12
  misc_feature: MA Experiment 20000460 PARAMETER Experiment Name: At_10percent_PEG_P Parameter: Tissue Value: Whole Plant
  misc_feature: MA Experiment 20000460 PARAMETER Experiment Name: At_10percent_PEG_P Parameter: Treatment Value: 10percent PEG vs. No Treatment
  misc_feature: MA Experiment ID: 20000527 Result: Up-regulated in Transcription
  misc_feature: MA Experiment 20000527 PARAMETER Experiment Name: At_10percent_PEG_P Parameter: Age (day) Value: 20
  misc_feature: MA Experiment 20000527 PARAMETER Experiment Name: At_10percent_PEG_P Parameter: Organism Value: A. thaliana
  misc_feature: MA Experiment 20000527 PARAMETER Experiment Name: At_10percent_PEG_P Parameter: Plant Line Value: WS
  misc_feature: MA Experiment 20000527 PARAMETER Experiment Name: At_10percent_PEG_P Parameter: Timepoint (day) Value: 20
  misc_feature: MA Experiment 20000527 PARAMETER Experiment Name: At_10percent_PEG_P Parameter: Tissue Value: Whole Plant
  misc_feature: MA Experiment 20000527 PARAMETER Experiment Name: At_10percent_PEG_P Parameter: Treatment Value: 10percent PEG vs. No Treatment
  misc_feature: MA Experiment ID: 20000573 Result: Down-regulated in Transcription
  misc_feature: MA Experiment 20000573 PARAMETER Experiment Name: At_100uM_ABA_Mutants__P Parameter: Organism Value: A. thaliana
  misc_feature: MA Experiment 20000573 PARAMETER Experiment Name: At_100uM_ABA_Mutants__P Parameter: Plant Line Value: CS22 vs. Ler wt
  misc_feature: MA Experiment 20000573 PARAMETER Experiment Name: At_100uM_ABA_Mutants__P Parameter: Timepoint (hr) Value: N/A
  misc_feature: MA Experiment 20000573 PARAMETER Experiment Name: At_100uM_ABA_Mutants__P Parameter: Tissue Value: Whole Plant
  misc_feature: MA Experiment 20000573 PARAMETER Experiment Name: At_100uM_ABA_Mutants__P Parameter: Treatment Value: None
  misc_feature: MA Experiment ID: 20000574 Result: Down-regulated in Transcription
  misc_feature: MA Experiment 20000574 PARAMETER Experiment Name: At_100uM_ABA_Mutants__P Parameter: Organism Value: A. thaliana
  misc_feature: MA Experiment 20000574 PARAMETER Experiment Name: At_100uM_ABA_Mutants__P Parameter: Plant Line Value: CS23 vs. Ler wt
  misc_feature: MA Experiment 20000574 PARAMETER Experiment Name: At_100uM_ABA_Mutants__P Parameter: Timepoint (hr) Value: N/A
  misc_feature: MA Experiment 20000574 PARAMETER Experiment Name: At_100uM_ABA_Mutants__P Parameter: Tissue Value: Whole Plant
  misc_feature: MA Experiment 20000574 PARAMETER Experiment Name: At_100uM_ABA_Mutants__P Parameter: Treatment Value: None
  misc_feature: MA Experiment ID: 20000606 Result: Up-regulated in Transcription
  misc_feature: MA Experiment 20000606 PARAMETER Experiment Name: At_CS8548_Mutant_P Parameter: Age (day) Value: 14
  misc_feature: MA Experiment 20000606 PARAMETER Experiment Name: At_CS8548_Mutant_P Parameter: Plant Line Value: CS8548 vs. wt
  misc_feature: MA Experiment 20000606 PARAMETER Experiment Name: At_CS8548_Mutant_P Parameter: Tissue Value: Whole Plant
  misc_feature: MA Experiment ID: 20000709 Result: Up-regulated in Transcription
  misc_feature: MA Experiment 20000709 PARAMETER Experiment Name: At_15mM_NH4NO3_L-to-H_P Parameter: Age (hr) Value: 14
  misc_feature: MA Experiment 20000709 PARAMETER Experiment Name: At_15mM_NH4NO3_L-to-H_P Parameter: Organism Value: A. thaliana
  misc_feature: MA Experiment 20000709 PARAMETER Experiment Name: At_15mM_NH4NO3_L-to-H_P Parameter: Plant Line Value: WS
  misc_feature: MA Experiment 20000709 PARAMETER Experiment Name: At_15mM_NH4NO3_L-to-H_P Parameter: Timepoint (hr) Value: 4
  misc_feature: MA Experiment 20000709 PARAMETER Experiment Name: At_15mM_NH4NO3_L-to-H_P Parameter: Tissue Value: Aerial
  misc_feature: MA Experiment 20000709 PARAMETER Experiment Name: At_15mM_NH4NO3_L-to-H_P Parameter: Treatment Value: 15mM NH4NO3 vs. 30mM Mannitol
  misc_feature: MA Experiment ID: 20000794 Result: Down-regulated in Transcription
  misc_feature: MA Experiment 20000794 PARAMETER Experiment Name: At_Petals_P Parameter: Age (day) Value: 23-25 days
  misc_feature: MA Experiment 20000794 PARAMETER Experiment Name: At_Petals_P Parameter: Plant Line Value: WS
  misc_feature: MA Experiment 20000794 PARAMETER Experiment Name: At_Petals_P Parameter: Tissue Value: Petals vs. Whole plant
  misc_feature: MA Experiment ID: 20001247 Result: Up-regulated in Transcription
  misc_feature: MA Experiment 20001247 PARAMETER Experiment Name: At_Far-red-induction_P Parameter: Age (day) Value: 7
  misc_feature: MA Experiment 20001247 PARAMETER Experiment Name: At_Far-red-induction_P Parameter: Light Value: Far-red vs. White
  misc_feature: MA Experiment 20001247 PARAMETER Experiment Name: At_Far-red-induction_P Parameter: Organism Value: A. thaliana
  misc_feature: MA Experiment 20001247 PARAMETER Experiment Name: At_Far-red-induction_P Parameter: Plant Line Value: Columbia
  misc_feature: MA Experiment 20001247 PARAMETER Experiment Name: At_Far-red-induction_P Parameter: Timepoint (hr) Value: 1
  misc_feature: MA Experiment 20001247 PARAMETER Experiment Name: At_Far-red-induction_P Parameter: Tissue Value: Whole Plant
  misc_feature: MA Experiment ID: 20001450 Result: Up-regulated in Transcription
  misc_feature: MA Experiment 20001450 PARAMETER Experiment Name: At_Far-red-induction_P Parameter: Age (day) Value: 7
  misc_feature: MA Experiment 20001450 PARAMETER Experiment Name: At_Far-red-induction_P Parameter: Light Value: Far-red vs. White
  misc_feature: MA Experiment 20001450 PARAMETER Experiment Name: At_Far-red-induction_P Parameter: Organism Value: A. thaliana
  misc_feature: MA Experiment 20001450 PARAMETER Experiment Name: At_Far-red-induction_P Parameter: Plant Line Value: Columbia
  misc_feature: MA Experiment 20001450 PARAMETER Experiment Name: At_Far-red-induction_P Parameter: Timepoint (hr) Value: 8
  misc_feature: MA Experiment 20001450 PARAMETER Experiment Name: At_Far-red-induction_P Parameter: Tissue Value: Whole Plant
  misc_feature: MA Experiment ID: 20001451 Result: Up-regulated in Transcription
  misc_feature: MA Experiment 20001451 PARAMETER Experiment Name: At_Far-red-induction_P Parameter: Age (day) Value: 7
  misc_feature: MA Experiment 20001451 PARAMETER Experiment Name: At_Far-red-induction_P Parameter: Light Value: Far-red vs. White
  misc_feature: MA Experiment 20001451 PARAMETER Experiment Name: At_Far-red-induction_P Parameter: Organism Value: A. thaliana
  misc_feature: MA Experiment 20001451 PARAMETER Experiment Name: At_Far-red-induction_P Parameter: Plant Line Value: Columbia
  misc_feature: MA Experiment 20001451 PARAMETER Experiment Name: At_Far-red-induction_P Parameter: Timepoint (hr) Value: 24
  misc_feature: MA Experiment 20001451 PARAMETER Experiment Name: At_Far-red-induction_P Parameter: Tissue Value: Whole Plant
  misc_feature: MA Experiment ID: 20001554 Result: Up-regulated in Transcription
  misc_feature: MA Experiment 20001554 PARAMETER Experiment Name: At_Drought_Soil_Dry_P Parameter: Age (day) Value: 21
  misc_feature: MA Experiment 20001554 PARAMETER Experiment Name: At_Drought_Soil_Dry_P Parameter: Organism Value: A. thaliana
  misc_feature: MA Experiment 20001554 PARAMETER Experiment Name: At_Drought_Soil_Dry_P Parameter: Plant Line Value: WS
  misc_feature: MA Experiment 20001554 PARAMETER Experiment Name: At_Drought_Soil_Dry_P Parameter: Post Timepoint (hr) Value: None
  misc_feature: MA Experiment 20001554 PARAMETER Experiment Name: At_Drought_Soil_Dry_P Parameter: Post-Treatment Value: None
  misc_feature: MA Experiment 20001554 PARAMETER Experiment Name: At_Drought_Soil_Dry_P Parameter: Timepoint (day) Value: 7
  misc_feature: MA Experiment 20001554 PARAMETER Experiment Name: At_Drought_Soil_Dry_P Parameter: Treatment Value: Drought vs. No Drought
  misc_feature: MA Experiment ID: 20001557 Result: Up-regulated in Transcription
  misc_feature: MA Experiment 20001557 PARAMETER Experiment Name: At_Drought_Soil_Dry_P Parameter: Age (day) Value: 27
  misc_feature: MA Experiment 20001557 PARAMETER Experiment Name: At_Drought_Soil_Dry_P Parameter: Organism Value: A. thaliana
  misc_feature: MA Experiment 20001557 PARAMETER Experiment Name: At_Drought_Soil_Dry_P Parameter: Plant Line Value: WS
  misc_feature: MA Experiment 20001557 PARAMETER Experiment Name: At_Drought_Soil_Dry_P Parameter: Post Timepoint (hr) Value: 3
  misc_feature: MA Experiment 20001557 PARAMETER Experiment Name: At_Drought_Soil_Dry_P Parameter: Post-Treatment Value: Re-Water vs. No Drought
  misc_feature: MA Experiment 20001557 PARAMETER Experiment Name: At_Drought_Soil_Dry_P Parameter: Timepoint (day) Value: 13
  misc_feature: MA Experiment 20001557 PARAMETER Experiment Name: At_Drought_Soil_Dry_P Parameter: Treatment Value: Drought vs. No Drought
  misc_feature: MA Experiment ID: 20001905 Result: Up-regulated in Transcription
  misc_feature: MA Experiment 20001905 PARAMETER Experiment Name: At_Drought_Reproduction_P Parameter: Age (day) Value: 40
  misc_feature: MA Experiment 20001905 PARAMETER Experiment Name: At_Drought_Reproduction_P Parameter: Organism Value: A. thaliana
  misc_feature: MA Experiment 20001905 PARAMETER Experiment Name: At_Drought_Reproduction_P Parameter: Plant Line Value: WS
  misc_feature: MA Experiment 20001905 PARAMETER Experiment Name: At_Drought_Reproduction_P Parameter: Timepoint (day) Value: 10
  misc_feature: MA Experiment 20001905 PARAMETER Experiment Name: At_Drought_Reproduction_P Parameter: Tissue Value: Rosettes
  misc_feature: MA Experiment 20001905 PARAMETER Experiment Name: At_Drought_Reproduction_P Parameter: Treatment Value: Drought vs. No Drought
  misc_feature: MA Experiment ID: 20001911 Result: Up-regulated in Transcription
  misc_feature: MA Experiment 20001911 PARAMETER Experiment Name: At_Drought_Reproduction_P Parameter: Age (day) Value: 40
  misc_feature: MA Experiment 20001911 PARAMETER Experiment Name: At_Drought_Reproduction_P Parameter: Organism Value: A. thaliana
  misc_feature: MA Experiment 20001911 PARAMETER Experiment Name: At_Drought_Reproduction_P Parameter: Plant Line Value: WS
  misc_feature: MA Experiment 20001911 PARAMETER Experiment Name: At_Drought_Reproduction_P Parameter: Timepoint (day) Value: 10
  misc_feature: MA Experiment 20001911 PARAMETER Experiment Name: At_Drought_Reproduction_P Parameter: Tissue Value: Flowers
  misc_feature: MA Experiment 20001911 PARAMETER Experiment Name: At_Drought_Reproduction_P Parameter: Treatment Value: Drought vs. No Drought
aaatatattcatcaaataaacaaaaatctctgtatttttttttaaaaaagatggctgatttggatttacagaggaagatggtatctccgaagctccacgtcaccattcctgagccgtgtaagctctcctccgtctcttctccaatctcctcctcttcttccgccgcttgctctgcttacgagctttacctccgtttgcctgaacttagaaacctctggtcctctctctatttccctcactggatctccgagcccgttctcaaaccagctcttcaagctcttgagatcactttccggttaatcctcaccgttgcttctgacacacgtccttacatcaaccgccgcgaatggatccgacggttggattccctcactaccagccagataaaaatcgtggcggctatctgcggagatgaagacaactacgaagagaacgtatcggcggctccggtcagcaatggctggagctcgttgagtttgctttcggagatcgccacgtgtcgtacatcggagagtgttggacagaagatcttgtctacgatcgagaatgagatgcgttggtgtaagtatacgctcggtttaggagaaccaaacctcgccggaaaaccgtatcttcaatacgacgccgtttgtctcccggaggagctacatagcctcaagaacaatccttacgcagatcacatcgagaaccaagagaatcaaatgctctacactagtcatcagattcttgaatcgtggatttacgtttctgtgaatcttttatatagaatcgaatcgagaatcgaagagggaaaattcgaaaaagcttcttcagacgtctacttgttggagagaatctggaagcttctatcagagattgaagatttacacattcttatggatcctgaagatttcttgaaggtgaagaaacagttacaaatcaaatcgacgtttccaaacgacgcattttgttttaggtcaaagggcttagtagagatggcgaagatgtccaaagagctgagacagaaagtgccagctgttcttgaggtggaggtggatcccaccggaggtccgaggttgcaagaggcggcgatgaagctttactcgaggaaaacagagtacgagaagatacatttgcttcagggaatgcaggccgtggagtctgcagccaagagattcttcttcggataccagaagttggttgcagcgatgattgggaatgcagaggcgaatgcaaatagaacggtggcgaatcacgagtcctatgattcactgactcaggtgtttatggagccaccgtattacccgagcctagacgccgcaaagacatttctgggagagttctggagccaattgtgatgcaatggaagatattgacacaactacttaacaaacactatcaacagatgtaacactactgaaatttttggaagcatctaacgatcagtgtatgaatatatgtaactcattttttagcacaaaacaatattttc

SEQ ID NO: 42618 - protein, 444 aa, Arabidopsis thaliana
  peptide (1)..(444): Ceres Seq. ID no. 13493971
  misc_feature (17)..(444): Homolog of NCBI NO: 15225612 NR Description: nematode-resistance protein -related [Arabidopsis
  misc_feature (17)..(444): Homolog of NCBI NO: 27311581 NR Description: Unknown protein [Arabidopsis thaliana]
  misc_feature (17)..(444): Homolog of NCBI NO: 21593007 NR Description: putative nematode-resistance protein [Arabidopsis
  misc_feature (17)..(444): Homolog of NCBI NO: 21553529 NR Description: nematode resistance protein-like protein
  misc_feature (17)..(444): Homolog of NCBI NO: 15228750 NR Description: nematode resistance protein-related protein
IYSSNKQKSLYFFLKKMADLDLQRKMVSPKLHVTIPEPCKLSSVSSPISSSSSAACSAYELYLRLPELRNLWSSLYFPHWISEPVLKPALQALEITFRLILTVASDTRPYINRREWIRRLDSLTTSQIKIVAAICGDEDNYEENVSAAPVSNGWSSLSLLSEIATCRTSESVGQKILSTIENEMRWCKYTLGLGEPNLAGKPYLQYDAVCLPEELHSLKNNPYADHIENQENQMLYTSHQILESWIYVSVNLLYRIESRIEEGKFEKASSDVYLLERIWKLLSEIEDLHILMDPEDFLKVKKQLQIKSTFPNDAFCFRSKGLVEMAKMSKELRQKVPAVLEVEVDPTGGPRLQEAAMKLYSRKTEYEKIHLLQGMQAVESAAKRFFFGYQKLVAAMIGNAEANANRTVANHESYDSLTQVFMEPPYYPSLDAAKTFLGEFWSQL

SEQ ID NO: 42619 - protein, 428 aa, Arabidopsis thaliana
  peptide (1)..(428): Ceres Seq. ID no. 13493972
  misc_feature (1)..(428): Homolog of NCBI NO: 15225612 NR Description: nematode-resistance protein -related [Arabidopsis
  misc_feature (1)..(428): Homolog of NCBI NO: 27311581 NR Description: Unknown protein [Arabidopsis thaliana]
  misc_feature (1)..(428): Homolog of NCBI NO: 21593007 NR Description: putative nematode-resistance protein [Arabidopsis
  misc_feature (1)..(428): Homolog of NCBI NO: 21553529 NR Description: nematode resistance protein-like protein
  misc_feature (1)..(428): Homolog of NCBI NO: 15228750 NR Description: nematode resistance protein-related protein
MADLDLQRKMVSPKLHVTIPEPCKLSSVSSPISSSSSAACSAYELYLRLPELRNLWSSLYFPHWISEPVLKPALQALEITFRLILTVASDTRPYINRREWIRRLDSLTTSQIKIVAAICGDEDNYEENVSAAPVSNGWSSLSLLSEIATCRTSESVGQKILSTIENEMRWCKYTLGLGEPNLAGKPYLQYDAVCLPEELHSLKNNPYADHIENQENQMLYTSHQILESWIYVSVNLLYRIESRIEEGKFEKASSDVYLLERIWKLLSEIEDLHILMDPEDFLKVKKQLQIKSTFPNDAFCFRSKGLVEMAKMSKELRQKVPAVLEVEVDPTGGPRLQEAAMKLYSRKTEYEKIHLLQGMQAVESAAKRFFFGYQKLVAAMIGNAEANANRTVANHESYDSLTQVFMEPPYYPSLDAAKTFLGEFWSQL

SEQ ID NO: 42620 - protein, 419 aa, Arabidopsis thaliana
  peptide (1)..(419): Ceres Seq. ID no. 13493973
  misc_feature (1)..(419): Homolog of NCBI NO: 15225612 NR Description: nematode-resistance protein -related [Arabidopsis
  misc_feature (1)..(419): Homolog of NCBI NO: 27311581 NR Description: Unknown protein [Arabidopsis thaliana]
  misc_feature (1)..(419): Homolog of NCBI NO: 21593007 NR Description: putative nematode-resistance protein [Arabidopsis
  misc_feature (1)..(419): Homolog of NCBI NO: 21553529 NR Description: nematode resistance protein-like protein
  misc_feature (1)..(419): Homolog of NCBI NO: 15228750 NR Description: nematode resistance protein-related protein
MVSPKLHVTIPEPCKLSSVSSPISSSSSAACSAYELYLRLPELRNLWSSLYFPHWISEPVLKPALQALEITFRLILTVASDTRPYINRREWIRRLDSLTTSQIKIVAAICGDEDNYEENVSAAPVSNGWSSLSLLSEIATCRTSESVGQKILSTIENEMRWCKYTLGLGEPNLAGKPYLQYDAVCLPEELHSLKNNPYADHIENQENQMLYTSHQILESWIYVSVNLLYRIESRIEEGKFEKASSDVYLLERIWKLLSEIEDLHILMDPEDFLKVKKQLQIKSTFPNDAFCFRSKGLVEMAKMSKELRQKVPAVLEVEVDPTGGPRLQEAAMKLYSRKTEYEKIHLLQGMQAVESAAKRFFFGYQKLVAAMIGNAEANANRTVANHESYDSLTQVFMEPPYYPSLDAAKTFLGEFWSQL

SEQ ID NO: 42621 - DNA, 1365 bp, Arabidopsis thaliana
  misc_feature (1)..(1365): Ceres Seq. ID no. 12331103
  misc_feature: MA Experiment ID: 108434 Result: Down-regulated in Transcription
  misc_feature: MA Experiment 108434 PARAMETER Experiment Name: At_Root_Tips_cDNA_P Parameter: Tissue Value: Root Tips
  misc_feature: MA Experiment ID: 108462 Result: Up-regulated in Transcription
  misc_feature: MA Experiment 108462 PARAMETER Experiment Name: At_Germinating_Seeds_cDNA_P Parameter: Age (day) Value: 2 vs. 0
  misc_feature: MA Experiment 108462 PARAMETER Experiment Name: At_Germinating_Seeds_cDNA_P Parameter: Tissue Value: Germinating Seeds
  misc_feature: MA Experiment ID: 108488 Result: Down-regulated in Transcription
  misc_feature: MA Experiment ID: 108489 Result: Up-regulated in Transcription
  misc_feature: MA Experiment ID: 20000068 Result: Up-regulated in Transcription
  misc_feature: MA Experiment ID: 20000113 Result: Down-regulated in Transcription
  misc_feature: MA Experiment 20000113 PARAMETER Experiment Name: At_42deg_Heat_cDNA_P Parameter: Temperature (deg C) Value: 42 vs. 22
  misc_feature: MA Experiment 20000113 PARAMETER Experiment Name: At_42deg_Heat_cDNA_P Parameter: Timepoint (hr) Value: 8
  misc_feature: MA Experiment 20000113 PARAMETER Experiment Name: At_42deg_Heat_cDNA_P Parameter: Tissue Value: Aerial
  misc_feature: MA Experiment ID: 20000234 Result: Down-regulated in Transcription
  misc_feature: MA Experiment 20000234 PARAMETER Experiment Name: At_Siliques_P Parameter: Age (day) Value: 21
  misc_feature: MA Experiment 20000234 PARAMETER Experiment Name: At_Siliques_P Parameter: Organism Value: A. thaliana
  misc_feature: MA Experiment 20000234 PARAMETER Experiment Name: At_Siliques_P Parameter: Plant Line Value: WS
  misc_feature: MA Experiment 20000234 PARAMETER Experiment Name: At_Siliques_P Parameter: Tissue Value: Less Than 5mm Siliques vs. Whole Plant
  misc_feature: MA Experiment ID: 20000235 Result: Down-regulated in Transcription
  misc_feature: MA Experiment 20000235 PARAMETER Experiment Name: At_Siliques_P Parameter: Age (day) Value: 21
  misc_feature: MA Experiment 20000235 PARAMETER Experiment Name: At_Siliques_P Parameter: Organism Value: A. thaliana
  misc_feature: MA Experiment 20000235 PARAMETER Experiment Name: At_Siliques_P Parameter: Plant Line Value: WS
  misc_feature: MA Experiment 20000235 PARAMETER Experiment Name: At_Siliques_P Parameter: Tissue Value: 5-10mm Siliques vs. Whole Plant
  misc_feature: MA Experiment ID: 20000265 Result: Down-regulated in Transcription
  misc_feature: MA Experiment 20000265 PARAMETER Experiment Name: At_Open_Flower_P Parameter: Age (day) Value: 21
  misc_feature: MA Experiment 20000265 PARAMETER Experiment Name: At_Open_Flower_P Parameter: Plant Line Value: WS
  misc_feature: MA Experiment 20000265 PARAMETER Experiment Name: At_Open_Flower_P Parameter: Tissue Value: Closed Flower vs. Whole Plant
  misc_feature: MA Experiment ID: 20000286 Result: Down-regulated in Transcription
  misc_feature: MA Experiment 20000286 PARAMETER Experiment Name: At_Open_Flower_P Parameter: Age (day) Value: 21
  misc_feature: MA Experiment 20000286 PARAMETER Experiment Name: At_Open_Flower_P Parameter: Plant Line Value: WS
  misc_feature: MA Experiment 20000286 PARAMETER Experiment Name: At_Open_Flower_P Parameter: Tissue Value: Half Open vs. Whole Plant
  misc_feature: MA Experiment ID: 20000438 Result: Down-regulated in Transcription
  misc_feature: MA Experiment 20000438 PARAMETER Experiment Name: At_Shoots__P Parameter: Age (day) Value: 14
  misc_feature: MA Experiment 20000438 PARAMETER Experiment Name: At_Shoots__P Parameter: Tissue Value: Shoots vs. Whole Plant
  misc_feature: MA Experiment ID: 20000453 Result: Down-regulated in Transcription
  misc_feature: MA Experiment 20000453 PARAMETER Experiment Name: At_100uM_ABA_P Parameter: Age (day) Value: 15
  misc_feature: MA Experiment 20000453 PARAMETER Experiment Name: At_100uM_ABA_P Parameter: Organism Value: A. thaliana
  misc_feature: MA Experiment 20000453 PARAMETER Experiment Name: At_100uM_ABA_P Parameter: Plant Line Value: WS
  misc_feature: MA Experiment 20000453 PARAMETER Experiment Name: At_100uM_ABA_P Parameter: Timepoint (hr) Value: 24
  misc_feature: MA Experiment 20000453 PARAMETER Experiment Name: At_100uM_ABA_P Parameter: Tissue Value: Aerial
  misc_feature: MA Experiment 20000453 PARAMETER Experiment Name: At_100uM_ABA_P Parameter: Treatment Value: 100uM ABA vs. No Treatment
  misc_feature: MA Experiment ID: 20000527 Result: Down-regulated in Transcription
  misc_feature: MA Experiment 20000527 PARAMETER Experiment Name: At_10percent_PEG_P Parameter: Age (day) Value: 20
  misc_feature: MA Experiment 20000527 PARAMETER Experiment Name: At_10percent_PEG_P Parameter: Organism Value: A. thaliana
  misc_feature: MA Experiment 20000527 PARAMETER Experiment Name: At_10percent_PEG_P Parameter: Plant Line Value: WS
  misc_feature: MA Experiment 20000527 PARAMETER Experiment Name: At_10percent_PEG_P Parameter: Timepoint (day) Value: 20
  misc_feature: MA Experiment 20000527 PARAMETER Experiment Name: At_10percent_PEG_P Parameter: Tissue Value: Whole Plant
  misc_feature: MA Experiment 20000527 PARAMETER Experiment Name: At_10percent_PEG_P Parameter: Treatment Value: 10percent PEG vs. No Treatment
  misc_feature: MA Experiment ID: 20000573 Result: Down-regulated in Transcription
  misc_feature: MA Experiment 20000573 PARAMETER Experiment Name: At_100uM_ABA_Mutants__P Parameter: Organism Value: A. thaliana
  misc_feature: MA Experiment 20000573 PARAMETER Experiment Name: At_100uM_ABA_Mutants__P Parameter: Plant Line Value: CS22 vs. Ler wt
  misc_feature: MA Experiment 20000573 PARAMETER Experiment Name: At_100uM_ABA_Mutants__P Parameter: Timepoint (hr) Value: N/A
  misc_feature: MA Experiment 20000573 PARAMETER Experiment Name: At_100uM_ABA_Mutants__P Parameter: Tissue Value: Whole Plant
  misc_feature: MA Experiment 20000573 PARAMETER Experiment Name: At_100uM_ABA_Mutants__P Parameter: Treatment Value: None
  misc_feature: MA Experiment ID: 20000574 Result: Down-regulated in Transcription
  misc_feature: MA Experiment 20000574 PARAMETER Experiment Name: At_100uM_ABA_Mutants__P Parameter: Organism Value: A. thaliana
  misc_feature: MA Experiment 20000574 PARAMETER Experiment Name: At_100uM_ABA_Mutants__P Parameter: Plant Line Value: CS23 vs. Ler wt
  misc_feature: MA Experiment 20000574 PARAMETER Experiment Name: At_100uM_ABA_Mutants__P Parameter: Timepoint (hr) Value: N/A
  misc_feature: MA Experiment 20000574 PARAMETER Experiment Name: At_100uM_ABA_Mutants__P Parameter: Tissue Value: Whole Plant
  misc_feature: MA Experiment 20000574 PARAMETER Experiment Name: At_100uM_ABA_Mutants__P Parameter: Treatment Value: None
  misc_feature: MA Experiment ID: 20001451 Result: Up-regulated in Transcription
  misc_feature: MA Experiment 20001451 PARAMETER Experiment Name: At_Far-red-induction_P Parameter: Age (day) Value: 7
  misc_feature: MA Experiment 20001451 PARAMETER Experiment Name: At_Far-red-induction_P Parameter: Light Value: Far-red vs. White
  misc_feature: MA Experiment 20001451 PARAMETER Experiment Name: At_Far-red-induction_P Parameter: Organism Value: A. thaliana
  misc_feature: MA Experiment 20001451 PARAMETER Experiment Name: At_Far-red-induction_P Parameter: Plant Line Value: Columbia
  misc_feature: MA Experiment 20001451 PARAMETER Experiment Name: At_Far-red-induction_P Parameter: Timepoint (hr) Value: 24
  misc_feature: MA Experiment 20001451 PARAMETER Experiment Name: At_Far-red-induction_P Parameter: Tissue Value: Whole Plant
  misc_feature: MA Experiment ID: 20001555 Result: Up-regulated in Transcription
  misc_feature: MA Experiment 20001555 PARAMETER Experiment Name: At_Drought_Soil_Dry_P Parameter: Age (day) Value: 24
  misc_feature: MA Experiment 20001555 PARAMETER Experiment Name: At_Drought_Soil_Dry_P Parameter: Organism Value: A. thaliana
  misc_feature: MA Experiment 20001555 PARAMETER Experiment Name: At_Drought_Soil_Dry_P Parameter: Plant Line Value: WS
  misc_feature: MA Experiment 20001555 PARAMETER Experiment Name: At_Drought_Soil_Dry_P Parameter: Post Timepoint (hr) Value: None
  misc_feature: MA Experiment 20001555 PARAMETER Experiment Name: At_Drought_Soil_Dry_P Parameter: Post-Treatment Value: None
  misc_feature: MA Experiment 20001555 PARAMETER Experiment Name: At_Drought_Soil_Dry_P Parameter: Timepoint (day) Value: 10
  misc_feature: MA Experiment 20001555 PARAMETER Experiment Name: At_Drought_Soil_Dry_P Parameter: Treatment Value: Drought vs. No Drought
  misc_feature: MA Experiment ID: 20001556 Result: Up-regulated in Transcription
  misc_feature: MA Experiment 20001556 PARAMETER Experiment Name: At_Drought_Soil_Dry_P Parameter: Age (day) Value: 26
  misc_feature: MA Experiment 20001556 PARAMETER Experiment Name: At_Drought_Soil_Dry_P Parameter: Organism Value: A. thaliana
  misc_feature: MA Experiment 20001556 PARAMETER Experiment Name: At_Drought_Soil_Dry_P Parameter: Plant Line Value: WS
  misc_feature: MA Experiment 20001556 PARAMETER Experiment Name: At_Drought_Soil_Dry_P Parameter: Post Timepoint (hr) Value: None
  misc_feature: MA Experiment 20001556 PARAMETER Experiment Name: At_Drought_Soil_Dry_P Parameter: Post-Treatment Value: None
  misc_feature: MA Experiment 20001556 PARAMETER Experiment Name: At_Drought_Soil_Dry_P Parameter: Timepoint (day) Value: 12
  misc_feature: MA Experiment 20001556 PARAMETER Experiment Name: At_Drought_Soil_Dry_P Parameter: Treatment Value: Drought vs. No Drought
  misc_feature: MA Experiment ID: 20001559 Result: Up-regulated in Transcription
  misc_feature: MA Experiment 20001559 PARAMETER Experiment Name: At_Drought_Soil_Dry_P Parameter: Age (day) Value: 28
  misc_feature: MA Experiment 20001559 PARAMETER Experiment Name: At_Drought_Soil_Dry_P Parameter: Organism Value: A. thaliana
  misc_feature: MA Experiment 20001559 PARAMETER Experiment Name: At_Drought_Soil_Dry_P Parameter: Plant Line Value: WS
  misc_feature: MA Experiment 20001559 PARAMETER Experiment Name: At_Drought_Soil_Dry_P Parameter: Post Timepoint (hr) Value: 29
  misc_feature: MA Experiment 20001559 PARAMETER Experiment Name: At_Drought_Soil_Dry_P Parameter: Post-Treatment Value: Re-Water vs. No Drought
  misc_feature: MA Experiment 20001559 PARAMETER Experiment Name: At_Drought_Soil_Dry_P Parameter: Timepoint (day) Value: 14
  misc_feature: MA Experiment 20001559 PARAMETER Experiment Name: At_Drought_Soil_Dry_P Parameter: Treatment Value: Drought vs. No Drought
  misc_feature: MA Experiment ID: 20001761 Result: Down-regulated in Transcription
  misc_feature: MA Experiment 20001761 PARAMETER Experiment Name: At_50mM_NH4NO3_L-to-H_P Parameter: Timepoint (hr) Value: 4
  misc_feature: MA Experiment 20001761 PARAMETER Experiment Name: At_50mM_NH4NO3_L-to-H_P Parameter: Tissue Value: Siliques
  misc_feature: MA Experiment 20001761 PARAMETER Experiment Name: At_50mM_NH4NO3_L-to-H_P Parameter: Treatment Value: 50mM NH4NO3 vs 100mM Mannitol
  misc_feature: MA Experiment ID: 20001904 Result: Up-regulated in Transcription
  misc_feature: MA Experiment 20001904 PARAMETER Experiment Name: At_Drought_Reproduction_P Parameter: Age (day) Value: 37
  misc_feature: MA Experiment 20001904 PARAMETER Experiment Name: At_Drought_Reproduction_P Parameter: Organism Value: A. thaliana
  misc_feature: MA Experiment 20001904 PARAMETER Experiment Name: At_Drought_Reproduction_P Parameter: Plant Line Value: WS
  misc_feature: MA Experiment 20001904 PARAMETER Experiment Name: At_Drought_Reproduction_P Parameter: Timepoint (day) Value: 7
  misc_feature: MA Experiment 20001904 PARAMETER Experiment Name: At_Drought_Reproduction_P Parameter: Tissue Value: Rosettes
  misc_feature: MA Experiment 20001904 PARAMETER Experiment Name: At_Drought_Reproduction_P Parameter: Treatment Value: Drought vs. No Drought
  misc_feature: MA Experiment ID: 20001905 Result: Up-regulated in Transcription
  misc_feature: MA Experiment 20001905 PARAMETER Experiment Name: At_Drought_Reproduction_P Parameter: Age (day) Value: 40
  misc_feature: MA Experiment 20001905 PARAMETER Experiment Name: At_Drought_Reproduction_P Parameter: Organism Value: A. thaliana
  misc_feature: MA Experiment 20001905 PARAMETER Experiment Name: At_Drought_Reproduction_P Parameter: Plant Line Value: WS
  misc_feature: MA Experiment 20001905 PARAMETER Experiment Name: At_Drought_Reproduction_P Parameter: Timepoint (day) Value: 10
  misc_feature: MA Experiment 20001905 PARAMETER Experiment Name: At_Drought_Reproduction_P Parameter: Tissue Value: Rosettes
  misc_feature: MA Experiment 20001905 PARAMETER Experiment Name: At_Drought_Reproduction_P Parameter: Treatment Value: Drought vs. No Drought
gagattggtgagttggctgtggcgtctggagttttacaaagctgtaaactaagacagctaaaggatcaagtctgaagaatggtttagccaaaaagcatcagaagaggaatattttgctcgattctttattccttcaaattcaatacaccaacgacgaggctacttgcttttccttcgagtagccatcttcgttatcaatcatcgtcatcatctagtttatataaagatcaaacctttgaccatttataccgtttttgtgtcccagactcaaagcaattattttatcctttgtgttactgaatcagggttgatgggggattctcctagttcaaatagagttaagcttcgggatgggagattcttagcttataaagaaagaggagttccaaaggaaaaggccaaatacaagatcattcttgttcatggctttggaagctccaaagatatgaacttctctgcctcaaaagagcttatagaagaacttgaggtgtacttgctattctacgaccgttctggatatggagaatcagattcaaacacaaaacgttcgttggaaagcgaagttgaagacatagcagaacttgcagatcagctggagttaggacctaagttttatctaattggaatttccatgggatcttaccctacttggggttgcctaagacacatacctcacaggttatccggcgtggcttttgttgctccggtggttaattatcgatggccttcacttccgaagaagctaatcaaaaaagattataggacaggtattatcaaatggggtttgaggatatcaaaatatgcacctggactgttacattggtggatcattcaaaagctcttcgcttcaactagttcggtccttgaaagcaatccggtctacttcaacagccacgacatagaagtgctcaagcgaaaaactggttttcccatgcttactaaggaaaagctacgggaaagaaatgttttcgatactctaagggacgattttatggtttgtttcgggcaatgggacttcgaacccgcggatctaagcatcagtacaaagagctatattcacatctggcatggtaaggaagacaaagttgttccatttcaacttcaaagatgcattctgcagaaacaacctttgatcaactaccacgaaatcccccaaggcggacatctgatcgtacactacgatggcatttgcgatacgattctacgtgcactattgctcaaggaagaacaacaaaagctgtataaaataaattgatttgtaacagattctgtgtttgattgattgattcagttctacaaaacaaagtatgttcaaagtgtacattgtacaatgacaatatatatgtgtataatataaagtgtttg

SEQ ID NO: 42622 - protein, 314 aa, Arabidopsis thaliana
  peptide (1)..(314): Ceres Seq. ID no. 12331104
  misc_feature (60)..(306): Pfam Name: alpha/beta hydrolase fold Pfam Description: alpha/beta hydrolase fold
  misc_feature (2)..(310): Homolog of NCBI NO: 34908462 NR Description: P0683F02.22 [Oryza sativa (japonica
  misc_feature (2)..(306): Homolog of NCBI NO: 15228377 NR Description: putative protein
  misc_feature (2)..(303): Homolog of NCBI NO: 15242253 NR Description: putative protein
  misc_feature (123)..(189): Homolog of NCBI NO: 6664302 NR Description: T27G7.1 [Arabidopsis thaliana]
  misc_feature (11)..(107): Homolog of NCBI NO: 6664302 NR Description: T27G7.1 [Arabidopsis thaliana]
  misc_feature (212)..(314): Homolog of NCBI NO: 6664302 NR Description: T27G7.1 [Arabidopsis thaliana]
  misc_feature (1)..(107): Homolog of NCBI NO: 25407040 NR Description: protein T23G18.18 [imported] - Arabidopsis
  misc_feature (123)..(310): Homolog of NCBI NO: 25407040 NR Description: protein T23G18.18 [imported] - Arabidopsis
  misc_feature (1)..(107): Homolog of NCBI NO: 15223177 NR Description: unknown protein; protein id: At1g08310.1
  misc_feature (123)..(314): Homolog of NCBI NO: 15223177 NR Description: unknown protein; protein id: At1g08310.1
MGDSPSSNRVKLRDGRFLAYKERGVPKEKAKYKIILVHGFGSSKDMNFSASKELIEELEVYLLFYDRSGYGESDSNTKRSLESEVEDIAELADQLELGPKFYLIGISMGSYPTWGCLRHIPHRLSGVAFVAPVVNYRWPSLPKKLIKKDYRTGIIKWGLRISKYAPGLLHWWIIQKLFASTSSVLESNPVYFNSHDIEVLKRKTGFPMLTKEKLRERNVFDTLRDDFMVCFGQWDFEPADLSISTKSYIHIWHGKEDKVVPFQLQRCILQKQPLINYHEIPQGGHLIVHYDGICDTILRALLLKEEQQKLYKIN

SEQ ID NO: 42623 - protein, 269 aa, Arabidopsis thaliana
  peptide (1)..(269): Ceres Seq. ID no. 12331105
  misc_feature (15)..(261): Pfam Name: alpha/beta hydrolase fold Pfam Description: alpha/beta hydrolase fold
  misc_feature (1)..(265): Homolog of NCBI NO: 34908462 NR Description: P0683F02.22 [Oryza sativa (japonica
  misc_feature (1)..(261): Homolog of NCBI NO: 15228377 NR Description: putative protein
  misc_feature (1)..(258): Homolog of NCBI NO: 15242253 NR Description: putative protein
  misc_feature (78)..(144): Homolog of NCBI NO: 6664302 NR Description: T27G7.1 [Arabidopsis thaliana]
  misc_feature (1)..(62): Homolog of NCBI NO: 6664302 NR Description: T27G7.1 [Arabidopsis thaliana]
  misc_feature (167)..(269): Homolog of NCBI NO: 6664302 NR Description: T27G7.1 [Arabidopsis thaliana]
  misc_feature (1)..(62): Homolog of NCBI NO: 25407040 NR Description: protein T23G18.18 [imported] - Arabidopsis
  misc_feature (78)..(265): Homolog of NCBI NO: 25407040 NR Description: protein T23G18.18 [imported] - Arabidopsis
  misc_feature (1)..(62): Homolog of NCBI NO: 15223177 NR Description: unknown protein; protein id: At1g08310.1
  misc_feature (78)..(269): Homolog of NCBI NO: 15223177 NR Description: unknown protein; protein id: At1g08310.1
MNFSASKELIEELEVYLLFYDRSGYGESDSNTKRSLESEVEDIAELADQLELGPKFYLIGISMGSYPTWGCLRHIPHRLSGVAFVAPVVNYRWPSLPKKLIKKDYRTGIIKWGLRISKYAPGLLHWWIIQKLFASTSSVLESNPVYFNSHDIEVLKRKTGFPMLTKEKLRERNVFDTLRDDFMVCFGQWDFEPADLSISTKSYIHIWHGKEDKVVPFQLQRCILQKQPLINYHEIPQGGHLIVHYDGICDTILRALLLKEEQQKLYKIN

SEQ ID NO: 42624 - protein, 207 aa, Arabidopsis thaliana
  peptide (1)..(207): Ceres Seq. ID no. 12331106
  misc_feature (1)..(199): Pfam Name: alpha/beta hydrolase fold Pfam Description: alpha/beta hydrolase fold
  misc_feature (1)..(202): Homolog of NCBI NO: 18404095 NR Description: expressed protein
  misc_feature (1)..(194): Homolog of NCBI NO: 37536162 NR Description: putative alpha/beta hydrolase
  misc_feature (1)..(194): Homolog of NCBI NO: 22122901 NR Description: hypothetical protein [Oryza sativa (japonica
  misc_feature (1)..(203): Homolog of NCBI NO: 34908462 NR Description: P0683F02.22 [Oryza sativa (japonica
  misc_feature (1)..(199): Homolog of NCBI NO: 15228377 NR Description: putative protein
  misc_feature (1)..(196): Homolog of NCBI NO: 15242253 NR Description: putative protein
  misc_feature (16)..(82): Homolog of NCBI NO: 6664302 NR Description: T27G7.1 [Arabidopsis thaliana]
  misc_feature (105)..(207): Homolog of NCBI NO: 6664302 NR Description: T27G7.1 [Arabidopsis thaliana]
  misc_feature (16)..(203): Homolog of NCBI NO: 25407040 NR Description: protein T23G18.18 [imported] - Arabidopsis
  misc_feature (16)..(207): Homolog of NCBI NO: 15223177 NR Description: unknown protein; protein id: At1g08310.1
MGSYPTWGCLRHIPHRLSGVAFVAPVVNYRWPSLPKKLIKKDYRTGIIKWGLRISKYAPGLLHWWIIQKLFASTSSVLESNPVYFNSHDIEVLKRKTGFPMLTKEKLRERNVFDTLRDDFMVCFGQWDFEPADLSISTKSYIHIWHGKEDKVVPFQLQRCILQKQPLINYHEIPQGGHLIVHYDGICDTILRALLLKEEQQKLYKIN

SEQ ID NO: 42625 - DNA, 1106 bp, Arabidopsis thaliana
  misc_feature (1)..(1106): Ceres Seq. ID no. 13645980
  misc_feature: MA Experiment ID: 20000180 Result: Up-regulated in Transcription
  misc_feature: MA Experiment 20000180 PARAMETER Experiment Name: At_Germinating_Seeds_P Parameter: Age (hr) Value: 24 vs. 0
  misc_feature: MA Experiment 20000180 PARAMETER Experiment Name: At_Germinating_Seeds_P Parameter: Tissue Value: Germinating Seeds
  misc_feature: MA Experiment ID: 20001911 Result: Down-regulated in Transcription
  misc_feature: MA Experiment 20001911 PARAMETER Experiment Name: At_Drought_Reproduction_P Parameter: Age (day) Value: 40
  misc_feature: MA Experiment 20001911 PARAMETER Experiment Name: At_Drought_Reproduction_P Parameter: Organism Value: A. thaliana
  misc_feature: MA Experiment 20001911 PARAMETER Experiment Name: At_Drought_Reproduction_P Parameter: Plant Line Value: WS
  misc_feature: MA Experiment 20001911 PARAMETER Experiment Name: At_Drought_Reproduction_P Parameter: Timepoint (day) Value: 10
  misc_feature: MA Experiment 20001911 PARAMETER Experiment Name: At_Drought_Reproduction_P Parameter: Tissue Value: Flowers
  misc_feature: MA Experiment 20001911 PARAMETER Experiment Name: At_Drought_Reproduction_P Parameter: Treatment Value: Drought vs. No Drought
agggtttataagacccaaacaaaaaacattcatcagtctcaattcaaaatcctccatcaatggagaaatacgagaagctcgaaaaggtcggtgaaggaacctatggaaaagtctacaaagcaatggagaaaaccaccggaaaactcgtcgctctgaagaaaactaggctcgaaatggacgaagaaggtataccaccaacggctctccgtgagatctctcttctccaaatgctttctcaatcaatctacatcgttcgtctcctctgcgtcgaacatgttattcaatcgaaagattcgactgtttctcactctcccaaatccaatctctatctcgtttttgagtatctcgacactgatctcaagaaatttatagattctcatagaaagggctcgaatcctagaccgcttgaggcttctcttgtgcagaggtttatgtttcagctttttaaaggtgtggctcattgtcatagccatggtgtgcttcaccgtgatcttaaaccgcagaatcttctattggataaggataaagggattcttaagattgctgatttgggtcttagtcgtgcttttactgtgcctcttaaggcttatacacatgagattgttactctttggtatagagctcctgaagttttgcttggttctactcattactctactgctgttgatatttggtctgttggatgcatctttgccgagatgattaggaggcaagctcttttccctggtgattctgagtttcagcaactacttcatattttcagattgttaggaacaccaactgagcagcaatggccgggtgtaatggcattgcgtgactggcatgtctatccaaagtgggagccgcaagacttatcacgtgctgttccatctctatctcctgaaggaattgatcttctcacgcaaatgttgaagtacaatccagcagaaagaatttcagcaaaagcagctctcgatcatccctactttgacagccttgacaaatctcagttctgacctctgccaaattactgatcaggcttctctttggagttctgaagctgatggctcaagtttattgtcttggtgtcttatgctgtgtgctttagaaagatttgtacttaaact

SEQ ID NO: 42626 - protein, 311 aa, Arabidopsis thaliana
  peptide (1)..(311): Ceres Seq. ID no. 13645981
  misc_feature (4)..(303): Pfam Name: Protein kinase domain Pfam Description: Protein kinase domain
  misc_feature (1)..(311): Homolog of NCBI NO: 27542763 NR Description: cyclin-dependent kinase-like protein [Sorghum
  misc_feature (1)..(311): Homolog of NCBI NO: 34907628 NR Description: putative cyclin-dependent kinase B1-1
  misc_feature (1)..(311): Homolog of NCBI NO: 5921446 NR Description: CELL DIVISION CONTROL PROTEIN 2 HOMOLOG C
  misc_feature (2)..(311): Homolog of NCBI NO: 25989353 NR Description: cyclin-dependent kinase [Helianthus tuberosus]
  misc_feature (1)..(311): Homolog of NCBI NO: 11125683 NR Description: B1-type cyclin dependent kinase [Lycopersicon
  misc_feature (1)..(311): Homolog of NCBI NO: 9885801 NR Description: cyclin-dependent kinase B1-2 [Nicotiana tabacum]
  misc_feature (1)..(311): Homolog of NCBI NO: 9885799 NR Description: cyclin-dependent kinase B1-1 [Nicotiana tabacum]
  misc_feature (1)..(311): Homolog of NCBI NO: 7434326 NR Description: probable cdc2-like protein kinase cdc2MsD -
  misc_feature (1)..(311): Homolog of NCBI NO: 15232441 NR Description: cell division control protein 2 homolog B (CDC2B)
  misc_feature (1)..(311): Homolog of NCBI NO: 15224912 NR Description: cell divsion control protein, putative
MEKYEKLEKVGEGTYGKVYKAMEKTTGKLVALKKTRLEMDEEGIPPTALREISLLQMLSQSIYIVRLLCVEHVIQSKDSTVSHSPKSNLYLVFEYLDTDLKKFIDSHRKGSNPRPLEASLVQRFMFQLFKGVAHCHSHGVLHRDLKPQNLLLDKDKGILKIADLGLSRAFTVPLKAYTHEIVTLWYRAPEVLLGSTHYSTAVDIWSVGCIFAEMIRRQALFPGDSEFQQLLHIFRLLGTPTEQQWPGVMALRDWHVYPKWEPQDLSRAVPSLSPEGIDLLTQMLKYNPAERISAKAALDHPYFDSLDKSQF

SEQ ID NO: 42627 - protein, 290 aa, Arabidopsis thaliana
  peptide (1)..(290): Ceres Seq. ID no. 13645982
  misc_feature (1)..(282): Pfam Name: Protein kinase domain Pfam Description: Protein kinase domain
  misc_feature (1)..(290): Homolog of NCBI NO: 27542763 NR Description: cyclin-dependent kinase-like protein [Sorghum
  misc_feature (1)..(290): Homolog of NCBI NO: 34907628 NR Description: putative cyclin-dependent kinase B1-1
  misc_feature (1)..(290): Homolog of NCBI NO: 5921446 NR Description: CELL DIVISION CONTROL PROTEIN 2 HOMOLOG C
  misc_feature (1)..(290): Homolog of NCBI NO: 25989353 NR Description: cyclin-dependent kinase [Helianthus tuberosus]
  misc_feature (1)..(290): Homolog of NCBI NO: 11125683 NR Description: B1-type cyclin dependent kinase [Lycopersicon
  misc_feature (1)..(290): Homolog of NCBI NO: 9885801 NR Description: cyclin-dependent kinase B1-2 [Nicotiana tabacum]
  misc_feature (1)..(290): Homolog of NCBI NO: 9885799 NR Description: cyclin-dependent kinase B1-1 [Nicotiana tabacum]
  misc_feature (1)..(290): Homolog of NCBI NO: 7434326 NR Description: probable cdc2-like protein kinase cdc2MsD -
  misc_feature (1)..(290): Homolog of NCBI NO: 15232441 NR Description: cell division control protein 2 homolog B (CDC2B)
  misc_feature (1)..(290): Homolog of NCBI NO: 15224912 NR Description: cell divsion control protein, putative
MEKTTGKLVALKKTRLEMDEEGIPPTALREISLLQMLSQSIYIVRLLCVEHVIQSKDSTVSHSPKSNLYLVFEYLDTDLKKFIDSHRKGSNPRPLEASLVQRFMFQLFKGVAHCHSHGVLHRDLKPQNLLLDKDKGILKIADLGLSRAFTVPLKAYTHEIVTLWYRAPEVLLGSTHYSTAVDIWSVGCIFAEMIRRQALFPGDSEFQQLLHIFRLLGTPTEQQWPGVMALRDWHVYPKWEPQDLSRAVPSLSPEGIDLLTQMLKYNPAERISAKAALDHPYFDSLDKSQF

SEQ ID NO: 42628 - protein, 273 aa, Arabidopsis thaliana
  peptide (1)..(273): Ceres Seq. ID no. 13645983
  misc_feature (1)..(265): Pfam Name: Protein kinase domain Pfam Description: Protein kinase domain
  misc_feature (1)..(273): Homolog of NCBI NO: 27542763 NR Description: cyclin-dependent kinase-like protein [Sorghum
  misc_feature (1)..(273): Homolog of NCBI NO: 34907628 NR Description: putative cyclin-dependent kinase B1-1
  misc_feature (1)..(273): Homolog of NCBI NO: 5921446 NR Description: CELL DIVISION CONTROL PROTEIN 2 HOMOLOG C
  misc_feature (1)..(273): Homolog of NCBI NO: 25989353 NR Description: cyclin-dependent kinase [Helianthus tuberosus]
  misc_feature (1)..(273): Homolog of NCBI NO: 11125683 NR Description: B1-type cyclin dependent kinase [Lycopersicon
  misc_feature (1)..(273): Homolog of NCBI NO: 9885801 NR Description: cyclin-dependent kinase B1-2 [Nicotiana tabacum]
  misc_feature (1)..(273): Homolog of NCBI NO: 9885799 NR Description: cyclin-dependent kinase B1-1 [Nicotiana tabacum]
  misc_feature (1)..(273): Homolog of NCBI NO: 7434326 NR Description: probable cdc2-like protein kinase cdc2MsD -
  misc_feature (1)..(273): Homolog of NCBI NO: 15232441 NR Description: cell division control protein 2 homolog B (CDC2B)
  misc_feature (1)..(273): Homolog of NCBI NO: 15224912 NR Description: cell divsion control protein, putative
MDEEGIPPTALREISLLQMLSQSIYIVRLLCVEHVIQSKDSTVSHSPKSNLYLVFEYLDTDLKKFIDSHRKGSNPRPLEASLVQRFMFQLFKGVAHCHSHGVLHRDLKPQNLLLDKDKGILKIADLGLSRAFTVPLKAYTHEIVTLWYRAPEVLLGSTHYSTAVDIWSVGCIFAEMIRRQALFPGDSEFQQLLHIFRLLGTPTEQQWPGVMALRDWHVYPKWEPQDLSRAVPSLSPEGIDLLTQMLKYNPAERISAKAALDHPYFDSLDKSQF

SEQ ID NO: 42629 - DNA, 1697 bp, Arabidopsis thaliana
  misc_feature (1)..(1697): Ceres Seq. ID no. 12602431
  misc_feature: MA Experiment ID: 20000794 Result: Up-regulated in Transcription
  misc_feature: MA Experiment 20000794 PARAMETER Experiment Name: At_Petals_P Parameter: Age (day) Value: 23-25 days
  misc_feature: MA Experiment 20000794 PARAMETER Experiment Name: At_Petals_P Parameter: Plant Line Value: WS
  misc_feature: MA Experiment 20000794 PARAMETER Experiment Name: At_Petals_P Parameter: Tissue Value: Petals vs. Whole plant
  misc_feature: MA Experiment ID: 20001451 Result: Down-regulated in Transcription
  misc_feature: MA Experiment 20001451 PARAMETER Experiment Name: At_Far-red-induction_P Parameter: Age (day) Value: 7
  misc_feature: MA Experiment 20001451 PARAMETER Experiment Name: At_Far-red-induction_P Parameter: Light Value: Far-red vs. White
  misc_feature: MA Experiment 20001451 PARAMETER Experiment Name: At_Far-red-induction_P Parameter: Organism Value: A. thaliana
  misc_feature: MA Experiment 20001451 PARAMETER Experiment Name: At_Far-red-induction_P Parameter: Plant Line Value: Columbia
  misc_feature: MA Experiment 20001451 PARAMETER Experiment Name: At_Far-red-induction_P Parameter: Timepoint (hr) Value: 24
  misc_feature: MA Experiment 20001451 PARAMETER Experiment Name: At_Far-red-induction_P Parameter: Tissue Value: Whole Plant
ttttgagttttctctctctttctcttctctaaaactacttaagctaaagaatcaaacacttctcaacgtttctccaaagcctctgattagtaaacacataaagagatctatagagagagagagagtagagataaaaggtgatgaatagaggtgtgttggagagttcgccggttcagcagctgatggcagccggaaaccctaattggtggaacgtaagcggcggcatgaggccaccaccaccgttgatgggtcatcagcaggcgccgttgccaccacatatgactcctaataacaattatctccgaccacggatgatgcccactcccttcccgcacttcttgccatctccggcgacttcttcttcttcctcttcttcttcaccgtctttgcctaataaccctaatctctcttcttggcttgaaagcaatgatctccctcctgagtcttggagccttagccaacttcttttgggtggattgatgatgggagaggaagagagattggagatgatgaaccatcataatcatcatgatgaacaacaacaccatggttttcaagggaagataagattggagaattgggaagaacaagtgttaagccaccaacaagcttccatggtggctgttgacatcaaacaagagggtaacattaacaacaacaatggctatgtcatatcttccccgaactcacctcctaacaaatcttgtgttacaacaactaccacaacaagcctcaatagtaacgacgataacatcaacaacaataataatatgttggatttctctagcaatcacaatggtcttcacttgtcagaagggagacacactcctccggatcgatcctctgagtgtaacagcttagagattggtgggtctactaataagaagccaaggctccaaccttctccttcgtcacaatcaaccctcaaggtgagaaaggagaaactaggaggccgaatcgcagcgcttcatcagctagtatctccatttggaaagactgacacagcctctgtcctgtcggaagctattggatacattagattccttcagagtcaaattgaggctctgagtcatccatactttggtacgactgcctcggggaatatgaggcaccaacaacatttgcaaggagataggagttgcatatttcctgaggaccctggtcagctcgtgaacgatcagtgcatgaagagaagaggagcttcgtcgtcatctacggacaatcaaaatgcaagtgaagagcctaagaaagatctgagaagtcgaggtttatgtcttgtcccaatctcatgcacactccaagtaggcagcgacaacggcgcggactattgggctccagcacttggctccgccggtttccattgagccaatgaaattacgccacgtggaattccagcgttagagaaaaatgatataacatcacgagcagtcagtctactgagaaaacaacaaattgagtttccaaggctgattgctcatgatgctatacaaagttcttcgtttaaaactttgctagagaatttgcgtctggcgtctgatgaatatgcgtttggcgtttcatcatttgatgcgttatcagatgatatgaccaagtgatcaatttatgttcttgctttaggaaactgtttgttttcttttaccggttaattgtaatttgtggttaagtacttattttaattacttccacgtggtttgtat

SEQ ID NO: 42630 - protein, 407 aa, Arabidopsis thaliana
  peptide (1)..(407): Ceres Seq. ID no. 12602432
  misc_feature (265)..(303): Pfam Name: Helix-loop-helix DNA-binding domain Pfam Description: Helix-loop-helix DNA-binding domain
  misc_feature (265)..(303): Pfam Name: Helix-loop-helix DNA-binding domain Pfam Description: Helix-loop-helix DNA-binding domain
  misc_feature (248)..(313): Homolog of NCBI NO: 21536756 NR Description: unknown [Arabidopsis thaliana]
  misc_feature (248)..(313): Homolog of NCBI NO: 18402256 NR Description: expressed protein
  misc_feature (364)..(400): Homolog of NCBI NO: 21740790 NR Description: OSJNBb0091E11.4 [Oryza sativa (japonica
  misc_feature (211)..(313): Homolog of NCBI NO: 21740790 NR Description: OSJNBb0091E11.4 [Oryza sativa (japonica
  misc_feature (1)..(280): Homolog of NCBI NO: 33111977 NR Description: putative bHLH133 transcription factor
  misc_feature (248)..(313): Homolog of NCBI NO: 21536756 NR Description: unknown [Arabidopsis thaliana]
  misc_feature (364)..(400): Homolog of NCBI NO: 21740790 NR Description: OSJNBb0091E11.4 [Oryza sativa (japonica
  misc_feature (1)..(280): Homolog of NCBI NO: 33111977 NR Description: putative bHLH133 transcription factor
  misc_feature (1)..(407): Homolog of NCBI NO: 15233452 NR Description: putative protein
  misc_feature (42)..(407): Homolog of NCBI NO: 11045087 NR Description: putative protein [Brassica napus]
  misc_feature (1)..(209): Homolog of NCBI NO: 11045087 NR Description: putative protein [Brassica napus]
  misc_feature (137)..(403): Homolog of NCBI NO: 33111977 NR Description: putative bHLH133 transcription factor
  misc_feature (1)..(228): Homolog of NCBI NO: 15225300 NR Description: unknown protein; protein id: At2g20090.1
  misc_feature (211)..(313): Homolog of NCBI NO: 21740790 NR Description: OSJNBb0091E11.4 [Oryza sativa (japonica
  misc_feature (248)..(313): Homolog of NCBI NO: 18402256 NR Description: expressed protein
  misc_feature (1)..(228): Homolog of NCBI NO: 15225300 NR Description: unknown protein; protein id: At2g20090.1
  misc_feature (137)..(403): Homolog of NCBI NO: 33111977 NR Description: putative bHLH133 transcription factor
  misc_feature (1)..(209): Homolog of NCBI NO: 11045087 NR Description: putative protein [Brassica napus]
  misc_feature (42)..(407): Homolog of NCBI NO: 11045087 NR Description: putative protein [Brassica napus]
  misc_feature (1)..(407): Homolog of NCBI NO: 15233452 NR Description: putative protein
MNRGVLESSPVQQLMAAGNPNWWNVSGGMRPPPPLMGHQQAPLPPHMTPNNNYLRPRMMPTPFPHFLPSPATSSSSSSSSPSLPNNPNLSSWLESNDLPPESWSLSQLLLGGLMMGEEERLEMMNHHNHHDEQQHHGFQGKIRLENWEEQVLSHQQASMVAVDIKQEGNINNNNGYVISSPNSPPNKSCVTTTTTTSLNSNDDNINNNNNMLDFSSNHNGLHLSEGRHTPPDRSSECNSLEIGGSTNKKPRLQPSPSSQSTLKVRKEKLGGRIAALHQLVSPFGKTDTASVLSEAIGYIRFLQSQIEALSHPYFGTTASGNMRHQQHLQGDRSCIFPEDPGQLVNDQCMKRRGASSSSTDNQNASEEPKKDLRSRGLCLVPISCTLQVGSDNGADYWAPALGSAGFH

SEQ ID NO: 42631 - protein, 393 aa, Arabidopsis thaliana
  peptide (1)..(393): Ceres Seq. ID no. 12602433
  misc_feature (251)..(289): Pfam Name: Helix-loop-helix DNA-binding domain Pfam Description: Helix-loop-helix DNA-binding domain
  misc_feature (251)..(289): Pfam Name: Helix-loop-helix DNA-binding domain Pfam Description: Helix-loop-helix DNA-binding domain
  misc_feature (234)..(299): Homolog of NCBI NO: 21536756 NR Description: unknown [Arabidopsis thaliana]
  misc_feature (234)..(299): Homolog of NCBI NO: 18402256 NR Description: expressed protein
  misc_feature (350)..(386): Homolog of NCBI NO: 21740790 NR Description: OSJNBb0091E11.4 [Oryza sativa (japonica
  misc_feature (197)..(299): Homolog of NCBI NO: 21740790 NR Description: OSJNBb0091E11.4 [Oryza sativa (japonica
  misc_feature (1)..(266): Homolog of NCBI NO: 33111977 NR Description: putative bHLH133 transcription factor
  misc_feature (234)..(299): Homolog of NCBI NO: 21536756 NR Description: unknown [Arabidopsis thaliana]
  misc_feature (350)..(386): Homolog of NCBI NO: 21740790 NR Description: OSJNBb0091E11.4 [Oryza sativa (japonica
  misc_feature (1)..(266): Homolog of NCBI NO: 33111977 NR Description: putative bHLH133 transcription factor
  misc_feature (1)..(393): Homolog of NCBI NO: 15233452 NR Description: putative protein
  misc_feature (28)..(393): Homolog of NCBI NO: 11045087 NR Description: putative protein [Brassica napus]
  misc_feature (1)..(195): Homolog of NCBI NO: 11045087 NR Description: putative protein [Brassica napus]
  misc_feature (123)..(389): Homolog of NCBI NO: 33111977 NR Description: putative bHLH133 transcription factor
  misc_feature (1)..(214): Homolog of NCBI NO: 15225300 NR Description: unknown protein; protein id: At2g20090.1
  misc_feature (197)..(299): Homolog of NCBI NO: 21740790 NR Description: OSJNBb0091E11.4 [Oryza sativa (japonica
  misc_feature (234)..(299): Homolog of NCBI NO: 18402256 NR Description: expressed protein
  misc_feature (1)..(214): Homolog of NCBI NO: 15225300 NR Description: unknown protein; protein id: At2g20090.1
  misc_feature (123)..(389): Homolog of NCBI NO: 33111977 NR Description: putative bHLH133 transcription factor
  misc_feature (1)..(195): Homolog of NCBI NO: 11045087 NR Description: putative protein [Brassica napus]
  misc_feature (28)..(393): Homolog of NCBI NO: 11045087 NR Description: putative protein [Brassica napus]
  misc_feature (1)..(393): Homolog of NCBI NO: 15233452 NR Description: putative protein
MAAGNPNWWNVSGGMRPPPPLMGHQQAPLPPHMTPNNNYLRPRMMPTPFPHFLPSPATSSSSSSSSPSLPNNPNLSSWLESNDLPPESWSLSQLLLGGLMMGEEERLEMMNHHNHHDEQQHHGFQGKIRLENWEEQVLSHQQASMVAVDIKQEGNINNNNGYVISSPNSPPNKSCVTTTTTTSLNSNDDNINNNNNMLDFSSNHNGLHLSEGRHTPPDRSSECNSLEIGGSTNKKPRLQPSPSSQSTLKVRKEKLGGRIAALHQLVSPFGKTDTASVLSEAIGYIRFLQSQIEALSHPYFGTTASGNMRHQQHLQGDRSCIFPEDPGQLVNDQCMKRRGASSSSTDNQNASEEPKKDLRSRGLCLVPISCTLQVGSDNGADYWAPALGSAGFH

SEQ ID NO: 42632 - protein, 379 aa, Arabidopsis thaliana
  peptide (1)..(379): Ceres Seq. ID no. 12602434
  misc_feature (237)..(275): Pfam Name: Helix-loop-helix DNA-binding domain Pfam Description: Helix-loop-helix DNA-binding domain
  misc_feature (237)..(275): Pfam Name: Helix-loop-helix DNA-binding domain Pfam Description: Helix-loop-helix DNA-binding domain
  misc_feature (220)..(285): Homolog of NCBI NO: 21536756 NR Description: unknown [Arabidopsis thaliana]
  misc_feature (220)..(285): Homolog of NCBI NO: 18402256 NR Description: expressed protein
  misc_feature (336)..(372): Homolog of NCBI NO: 21740790 NR Description: OSJNBb0091E11.4 [Oryza sativa (japonica
  misc_feature (183)..(285): Homolog of NCBI NO: 21740790 NR Description: OSJNBb0091E11.4 [Oryza sativa (japonica
  misc_feature (1)..(252): Homolog of NCBI NO: 33111977 NR Description: putative bHLH133 transcription factor
  misc_feature (220)..(285): Homolog of NCBI NO: 21536756 NR Description: unknown [Arabidopsis thaliana]
  misc_feature (336)..(372): Homolog of NCBI NO: 21740790 NR Description: OSJNBb0091E11.4 [Oryza sativa (japonica
  misc_feature (1)..(252): Homolog of NCBI NO: 33111977 NR Description: putative bHLH133 transcription factor
  misc_feature (1)..(379): Homolog of NCBI NO: 15233452 NR Description: putative protein
  misc_feature (14)..(379): Homolog of NCBI NO: 11045087 NR Description: putative protein [Brassica napus]
  misc_feature (1)..(181): Homolog of NCBI NO: 11045087 NR Description: putative protein [Brassica napus]
  misc_feature (109)..(375): Homolog of NCBI NO: 33111977 NR Description: putative bHLH133 transcription factor
  misc_feature (1)..(200): Homolog of NCBI NO: 15225300 NR Description: unknown protein; protein id: At2g20090.1
  misc_feature (183)..(285): Homolog of NCBI NO: 21740790 NR Description: OSJNBb0091E11.4 [Oryza sativa (japonica
  misc_feature (220)..(285): Homolog of NCBI NO: 18402256 NR Description: expressed protein
  misc_feature (1)..(200): Homolog of NCBI NO: 15225300 NR Description: unknown protein; protein id: At2g20090.1
  misc_feature (109)..(375): Homolog of NCBI NO: 33111977 NR Description: putative bHLH133 transcription factor
  misc_feature (1)..(181): Homolog of NCBI NO: 11045087 NR Description: putative protein [Brassica napus]
  misc_feature (14)..(379): Homolog of NCBI NO: 11045087 NR Description: putative protein [Brassica napus]
  misc_feature (1)..(379): Homolog of NCBI NO: 15233452 NR Description: putative protein
MRPPPPLMGHQQAPLPPHMTPNNNYLRPRMMPTPFPHFLPSPATSSSSSSSSPSLPNNPNLSSWLESNDLPPESWSLSQLLLGGLMMGEEERLEMMNHHNHHDEQQHHGFQGKIRLENWEEQVLSHQQASMVAVDIKQEGNINNNNGYVISSPNSPPNKSCVTTTTTTSLNSNDDNINNNNNMLDFSSNHNGLHLSEGRHTPPDRSSECNSLEIGGSTNKKPRLQPSPSSQSTLKVRKEKLGGRIAALHQLVSPFGKTDTASVLSEAIGYIRFLQSQIEALSHPYFGTTASGNMRHQQHLQGDRSCIFPEDPGQLVNDQCMKRRGASSSSTDNQNASEEPKKDLRSRGLCLVPISCTLQVGSDNGADYWAPALGSAGFH

SEQ ID NO: 42633 - DNA, 1371 bp, Arabidopsis thaliana
  misc_feature (1)..(1371): Ceres Seq. ID no. 12604741
  misc_feature: MA Experiment ID: 20000307 Result: Up-regulated in Transcription
  misc_feature: MA Experiment 20000307 PARAMETER Experiment Name: At_Germinating_Seeds_Sub_P Parameter: Age (hr) Value: 24 vs. 0
  misc_feature: MA Experiment 20000307 PARAMETER Experiment Name: At_Germinating_Seeds_Sub_P Parameter: Organism Value: A. thaliana
  misc_feature: MA Experiment 20000307 PARAMETER Experiment Name: At_Germinating_Seeds_Sub_P Parameter: Plant Line Value: WS
  misc_feature: MA Experiment 20000307 PARAMETER Experiment Name: At_Germinating_Seeds_Sub_P Parameter: Tissue Value: Germinating Seeds
  misc_feature: MA Experiment ID: 20000329 Result: Up-regulated in Transcription
  misc_feature: MA Experiment 20000329 PARAMETER Experiment Name: At_4deg_Cold_Sub_P Parameter: Age (day) Value: 14
  misc_feature: MA Experiment 20000329 PARAMETER Experiment Name: At_4deg_Cold_Sub_P Parameter: Organism Value: A. thaliana
  misc_feature: MA Experiment 20000329 PARAMETER Experiment Name: At_4deg_Cold_Sub_P Parameter: Plant Line Value: WS
  misc_feature: MA Experiment 20000329 PARAMETER Experiment Name: At_4deg_Cold_Sub_P Parameter: Temperature (deg C) Value: 4 vs. 22
  misc_feature: MA Experiment 20000329 PARAMETER Experiment Name: At_4deg_Cold_Sub_P Parameter: Timepoint (hr) Value: 6
  misc_feature: MA Experiment 20000329 PARAMETER Experiment Name: At_4deg_Cold_Sub_P Parameter: Tissue Value: Aerial
  misc_feature: MA Experiment ID: 20000348 Result: Down-regulated in Transcription
  misc_feature: MA Experiment 20000348 PARAMETER Experiment Name: At_100uM_ABA_Sub_P Parameter: Age (day) Value: 14
  misc_feature: MA Experiment 20000348 PARAMETER Experiment Name: At_100uM_ABA_Sub_P Parameter: Organism Value: A. thaliana
  misc_feature: MA Experiment 20000348 PARAMETER Experiment Name: At_100uM_ABA_Sub_P Parameter: Plant Line Value: WS
  misc_feature: MA Experiment 20000348 PARAMETER Experiment Name: At_100uM_ABA_Sub_P Parameter: Timepoint (hr) Value: 1
  misc_feature: MA Experiment 20000348 PARAMETER Experiment Name: At_100uM_ABA_Sub_P Parameter: Tissue Value: Aerial
  misc_feature: MA Experiment 20000348 PARAMETER Experiment Name: At_100uM_ABA_Sub_P Parameter: Treatment Value: 100uM ABA vs. No Treatment
  misc_feature: MA Experiment ID: 20000355 Result: Down-regulated in Transcription
  misc_feature: MA Experiment 20000355 PARAMETER Experiment Name: At_Siliques_Sub_P Parameter: Age (day) Value: 21
  misc_feature: MA Experiment 20000355 PARAMETER Experiment Name: At_Siliques_Sub_P Parameter: Organism Value: A. thaliana
  misc_feature: MA Experiment 20000355 PARAMETER Experiment Name: At_Siliques_Sub_P Parameter: Plant Line Value: WS
  misc_feature: MA Experiment 20000355 PARAMETER Experiment Name: At_Siliques_Sub_P Parameter: Tissue Value: Less Than 5mm Siliques vs. Whole Plant
  misc_feature: MA Experiment ID: 20000440 Result: Down-regulated in Transcription
  misc_feature: MA Experiment 20000440 PARAMETER Experiment Name: At_Closed-Flower__Sub_P Parameter: Tissue Value: Closed Flower vs. Whole Plant
aacttattcaaaccaattcacatcttcccaaacccaactactacaacttgtattaagaaaaagatatattcccttagcttctttgatcaatatattcgtcagggttctcgtcaaagtcctcagcatcttcatcatatgtccggaggaataatggatgaagagatcgagattcctccgttcttcctttgtcctatctctttggagatcatgaaagatccagtgatagtctctaccggaataacctacgacagagacagcatcgagaaatggctatttgcaggcaagaaaaactcgtgtccggtcaccaaacaagacataaccgacgcggatctcaccccgaatcacactctacgccgtctcatccaatcttggtgcaccctaaacgcctcctacggcgtcgagaggatccctaccccaagacctccgatttgtaaatctgagatcgaaaagctcattagagattcagcctcttcccatgaaaaccaagtcaagtgtctcaaacgacttcgtcagattgtgtcggagaacgcgaccaacaagcggtgtttagaggcagcgggagtaccggagttcttggccaacatcgtaagcaacgactcagaaaatgggagtttgaccgacgaagccctcaacttactttaccacctcgagacctcagagacagtcctcaagaatcttttaaacaacaagaaagataacaatatcgtaaagtcgttgacgaagatcatgcagcgtgggatgtacgagtccagagtctatgccactttgcttctcaagaacattctcgaagtagcggatccaatgcagagtatgactctcaagccagaggttttcactgaggtcgtccagatcttggacgaccggatctcgcagaaggcgaccaaagctgccatgcatatattggtgaacatatgcccatggggaaggaacagacacaaggccgtggaagctggagtaatctctgtgatcatcgagcttctcatggacgagagcttcacatcagagaggagaggtccagagatggcgatggtggttcttgatctgttgtgtcagtgtgcggagggacgagccgagttcttgaaccacggagcagccatagcggtggtgtgcaagaagatacttagggtttcacagacagcaagcgatagagcggttagggttttgttgtcggtgggaaggttctgcgcaacgcctgctttgttgcacgagatgttacagttgggggttgtagcgaagctttgtcttgtgcttcaagtaagctgtggaggtaagaccaaagagaaggcaaaggagttgcttaagttgcacgctagggtctggaaggactcgccttgtctcccaaaaaacatgattcttgcatatccctgctga

SEQ ID NO: 42634 - protein, 456 aa, Arabidopsis thaliana
  peptide (1)..(456): Ceres Seq. ID no. 12604742
  misc_feature (56)..(131): Pfam Name: U-box domain Pfam Description: U-box domain
  misc_feature (38)..(435): Homolog of NCBI NO: 14582200 NR Description: immediate-early fungal elicitor protein CMPG1
  misc_feature (50)..(446): Homolog of NCBI NO: 30013683 NR Description: Avr9/Cf-9 rapidly elicited protein 74 [Nicotiana
  misc_feature (51)..(442): Homolog of NCBI NO: 18402223 NR Description: expressed protein
  misc_feature (51)..(234): Homolog of NCBI NO: 15231222 NR Description: putative protein; protein id: At3g52450.1
  misc_feature (56)..(455): Homolog of NCBI NO: 34908566 NR Description: P0505D12.10 [Oryza sativa (japonica
  misc_feature (51)..(455): Homolog of NCBI NO: 21741126 NR Description: OSJNBa0070M12.4 [Oryza sativa (japonica
  misc_feature (150)..(455): Homolog of NCBI NO: 15231222 NR Description: putative protein; protein id: At3g52450.1
  misc_feature (51)..(456): Homolog of NCBI NO: 25408431 NR Description: hypothetical protein At2g35930 [imported] -
  misc_feature (46)..(456): Homolog of NCBI NO: 30686609 NR Description: expressed protein [Arabidopsis thaliana]
NLFKPIHIFPNPTTTTCIKKKIYSLSFFDQYIRQGSRQSPQHLHHMSGGIMDEEIEIPPFFLCPISLEIMKDPVIVSTGITYDRDSIEKWLFAGKKNSCPVTKQDITDADLTPNHTLRRLIQSWCTLNASYGVERIPTPRPPICKSEIEKLIRDSASSHENQVKCLKRLRQIVSENATNKRCLEAAGVPEFLANIVSNDSENGSLTDEALNLLYHLETSETVLKNLLNNKKDNNIVKSLTKIMQRGMYESRVYATLLLKNILEVADPMQSMTLKPEVFTEVVQILDDRISQKATKAAMHILVNICPWGRNRHKAVEAGVISVIIELLMDESFTSERRGPEMAMVVLDLLCQCAEGRAEFLNHGAAIAVVCKKILRVSQTASDRAVRVLLSVGRFCATPALLHEMLQLGVVAKLCLVLQVSCGGKTKEKAKELLKLHARVWKDSPCLPKNMILAYPC

SEQ ID NO: 42635 - protein, 411 aa, Arabidopsis thaliana
  peptide (1)..(411): Ceres Seq. ID no. 12604743
  misc_feature (11)..(86): Pfam Name: U-box domain Pfam Description: U-box domain
  misc_feature (1)..(390): Homolog of NCBI NO: 14582200 NR Description: immediate-early fungal elicitor protein CMPG1
  misc_feature (5)..(401): Homolog of NCBI NO: 30013683 NR Description: Avr9/Cf-9 rapidly elicited protein 74 [Nicotiana
  misc_feature (6)..(397): Homolog of NCBI NO: 18402223 NR Description: expressed protein
  misc_feature (6)..(189): Homolog of NCBI NO: 15231222 NR Description: putative protein; protein id: At3g52450.1
  misc_feature (11)..(410): Homolog of NCBI NO: 34908566 NR Description: P0505D12.10 [Oryza sativa (japonica
  misc_feature (6)..(410): Homolog of NCBI NO: 21741126 NR Description: OSJNBa0070M12.4 [Oryza sativa (japonica
  misc_feature (105)..(410): Homolog of NCBI NO: 15231222 NR Description: putative protein; protein id: At3g52450.1
  misc_feature (6)..(411): Homolog of NCBI NO: 25408431 NR Description: hypothetical protein At2g35930 [imported] -
  misc_feature (1)..(411): Homolog of NCBI NO: 30686609 NR Description: expressed protein [Arabidopsis thaliana]
MSGGIMDEEIEIPPFFLCPISLEIMKDPVIVSTGITYDRDSIEKWLFAGKKNSCPVTKQDITDADLTPNHTLRRLIQSWCTLNASYGVERIPTPRPPICKSEIEKLIRDSASSHENQVKCLKRLRQIVSENATNKRCLEAAGVPEFLANIVSNDSENGSLTDEALNLLYHLETSETVLKNLLNNKKDNNIVKSLTKIMQRGMYESRVYATLLLKNILEVADPMQSMTLKPEVFTEVVQILDDRISQKATKAAMHILVNICPWGRNRHKAVEAGVISVIIELLMDESFTSERRGPEMAMVVLDLLCQCAEGRAEFLNHGAAIAVVCKKILRVSQTASDRAVRVLLSVGRFCATPALLHEMLQLGVVAKLCLVLQVSCGGKTKEKAKELLKLHARVWKDSPCLPKNMILAYPC

SEQ ID NO: 42636 - protein, 406 aa, Arabidopsis thaliana
  peptide (1)..(406): Ceres Seq. ID no. 12604744
  misc_feature (6)..(81): Pfam Name: U-box domain Pfam Description: U-box domain
  misc_feature (1)..(385): Homolog of NCBI NO: 14582200 NR Description: immediate-early fungal elicitor protein CMPG1
  misc_feature (1)..(396): Homolog of NCBI NO: 30013683 NR Description: Avr9/Cf-9 rapidly elicited protein 74 [Nicotiana
  misc_feature (1)..(392): Homolog of NCBI NO: 18402223 NR Description: expressed protein
  misc_feature (1)..(184): Homolog of NCBI NO: 15231222 NR Description: putative protein; protein id: At3g52450.1
  misc_feature (6)..(405): Homolog of NCBI NO: 34908566 NR Description: P0505D12.10 [Oryza sativa (japonica
  misc_feature (1)..(405): Homolog of NCBI NO: 21741126 NR Description: OSJNBa0070M12.4 [Oryza sativa (japonica
  misc_feature (100)..(405): Homolog of NCBI NO: 15231222 NR Description: putative protein; protein id: At3g52450.1
  misc_feature (1)..(406): Homolog of NCBI NO: 25408431 NR Description: hypothetical protein At2g35930 [imported] -
  misc_feature (1)..(406): Homolog of NCBI NO: 30686609 NR Description: expressed protein [Arabidopsis thaliana]
MDEEIEIPPFFLCPISLEIMKDPVIVSTGITYDRDSIEKWLFAGKKNSCPVTKQDITDADLTPNHTLRRLIQSWCTLNASYGVERIPTPRPPICKSEIEKLIRDSASSHENQVKCLKRLRQIVSENATNKRCLEAAGVPEFLANIVSNDSENGSLTDEALNLLYHLETSETVLKNLLNNKKDNNIVKSLTKIMQRGMYESRVYATLLLKNILEVADPMQSMTLKPEVFTEVVQILDDRISQKATKAAMHILVNICPWGRNRHKAVEAGVISVIIELLMDESFTSERRGPEMAMVVLDLLCQCAEGRAEFLNHGAAIAVVCKKILRVSQTASDRAVRVLLSVGRFCATPALLHEMLQLGVVAKLCLVLQVSCGGKTKEKAKELLKLHARVWKDSPCLPKNMILAYPC

SEQ ID NO: 42637 - DNA, 786 bp, Arabidopsis thaliana
  misc_feature (1)..(786): Ceres Seq. ID no. 12738597
  misc_feature: MA Experiment ID: 108595 Result: Down-regulated in Transcription
  misc_feature: MA Experiment 108595 PARAMETER Experiment Name: At_Ler-pi_Ovule_cDNA_P Parameter: Plant Line Value: null
  misc_feature: MA Experiment ID: 20000185 Result: Down-regulated in Transcription
  misc_feature: MA Experiment 20000185 PARAMETER Experiment Name: At_Roots__P Parameter: Age (day) Value: 7 vs. 21
  misc_feature: MA Experiment 20000185 PARAMETER Experiment Name: At_Roots__P Parameter: Organism Value: A. thaliana
  misc_feature: MA Experiment 20000185 PARAMETER Experiment Name: At_Roots__P Parameter: Tissue Value: Roots vs. Whole Plant
  misc_feature: MA Experiment ID: 20000286 Result: Down-regulated in Transcription
  misc_feature: MA Experiment 20000286 PARAMETER Experiment Name: At_Open_Flower_P Parameter: Age (day) Value: 21
  misc_feature: MA Experiment 20000286 PARAMETER Experiment Name: At_Open_Flower_P Parameter: Plant Line Value: WS
  misc_feature: MA Experiment 20000286 PARAMETER Experiment Name: At_Open_Flower_P Parameter: Tissue Value: Half Open vs. Whole Plant
  misc_feature: MA Experiment ID: 20001451 Result: Up-regulated in Transcription
  misc_feature: MA Experiment 20001451 PARAMETER Experiment Name: At_Far-red-induction_P Parameter: Age (day) Value: 7
  misc_feature: MA Experiment 20001451 PARAMETER Experiment Name: At_Far-red-induction_P Parameter: Light Value: Far-red vs. White
  misc_feature: MA Experiment 20001451 PARAMETER Experiment Name: At_Far-red-induction_P Parameter: Organism Value: A. thaliana
  misc_feature: MA Experiment 20001451 PARAMETER Experiment Name: At_Far-red-induction_P Parameter: Plant Line Value: Columbia
  misc_feature: MA Experiment 20001451 PARAMETER Experiment Name: At_Far-red-induction_P Parameter: Timepoint (hr) Value: 24
  misc_feature: MA Experiment 20001451 PARAMETER Experiment Name: At_Far-red-induction_P Parameter: Tissue Value: Whole Plant
  misc_feature: MA Experiment ID: 20001911 Result: Up-regulated in Transcription
  misc_feature: MA Experiment 20001911 PARAMETER Experiment Name: At_Drought_Reproduction_P Parameter: Age (day) Value: 40
  misc_feature: MA Experiment 20001911 PARAMETER Experiment Name: At_Drought_Reproduction_P Parameter: Organism Value: A. thaliana
  misc_feature: MA Experiment 20001911 PARAMETER Experiment Name: At_Drought_Reproduction_P Parameter: Plant Line Value: WS
  misc_feature: MA Experiment 20001911 PARAMETER Experiment Name: At_Drought_Reproduction_P Parameter: Timepoint (day) Value: 10
  misc_feature: MA Experiment 20001911 PARAMETER Experiment Name: At_Drought_Reproduction_P Parameter: Tissue Value: Flowers
  misc_feature: MA Experiment 20001911 PARAMETER Experiment Name: At_Drought_Reproduction_P Parameter: Treatment Value: Drought vs. No Drought
aaacgttctagcaggaaagaagaagaacagagtatctgtgacggtcccatctatcagcacaaatgctcttggttatggtgcatttcttggaatatatgccaacttgagatatcagctgttatgtggatttgaaagaggagtgagcagtcactttgacgtcataggagtagcactcttcttcggcactgccttgaggattatgaatgtgcaattaggggaaaagtcaagacaagtatggctaggtgtagaggcagacccactggcgcagtcagatgatctgctggcaaaagcatacaaccgaccctcagaggaagcagtagcaaagccatcttcaaaatggttcatctcaaagaatgcaattgtctcagggctactcgggaagaagcaagaagattcagtttcagattctccacctccaaaggctcgggcgaaaaaggatagtgaggaagaaggtggctgcatctgcctcttaaataaccaacaaaacctctaaaatgtcacaattttcagagtccatggaagaacaacagtgaggttttgttgttcatttgaggcacacatgaaaaaagttttgttgccagaggaaggaagaagggatcaccaaacttggaggaattgaaaaacagctctatagcttcttttttttttttttactttatgactcgttctctctagttttaagtgcttttggaaagacatttctatttttaggtgtggtgataaagatgcttatctctggttaaaattctgtattttctcaatgtttctaataaatagccacatctt

SEQ ID NO: 42638 - protein, 163 aa, Arabidopsis thaliana
  peptide (1)..(163): Ceres Seq. ID no. 12738598
  misc_feature (1)..(145): Homolog of NCBI NO: 22327037 NR Description: putative protein
  misc_feature (1)..(145): Homolog of NCBI NO: 9759209 NR Description: gb|AAD25674.1~gene_id:MXC17.8~similar to unknown
NVLAGKKKNRVSVTVPSISTNALGYGAFLGIYANLRYQLLCGFERGVSSHFDVIGVALFFGTALRIMNVQLGEKSRQVWLGVEADPLAQSDDLLAKAYNRPSEEAVAKPSSKWFISKNAIVSGLLGKKQEDSVSDSPPPKARAKKDSEEEGGCICLLNNQQNL

SEQ ID NO: 42639 - protein, 97 aa, Arabidopsis thaliana
  peptide (1)..(97): Ceres Seq. ID no. 12738599
  misc_feature (1)..(79): Homolog of NCBI NO: 22327037 NR Description: putative protein
  misc_feature (1)..(79): Homolog of NCBI NO: 9759209 NR Description: gb|AAD25674.1~gene_id:MXC17.8~similar to unknown
MNVQLGEKSRQVWLGVEADPLAQSDDLLAKAYNRPSEEAVAKPSSKWFISKNAIVSGLLGKKQEDSVSDSPPPKARAKKDSEEEGGCICLLNNQQNL

SEQ ID NO: 42640 - DNA, 1475 bp, Arabidopsis thaliana
  misc_feature (1)..(1475): Ceres Seq. ID no. 12330833
  misc_feature: MA Experiment ID: 108434 Result: Down-regulated in Transcription
  misc_feature: MA Experiment 108434 PARAMETER Experiment Name: At_Root_Tips_cDNA_P Parameter: Tissue Value: Root Tips
  misc_feature: MA Experiment ID: 108435 Result: Up-regulated in Transcription
  misc_feature: MA Experiment 108435 PARAMETER Experiment Name: At_stm_Mutants_cDNA_P Parameter: Plant Line Value: wt Landsburg vs stm
  misc_feature: MA Experiment 108435 PARAMETER Experiment Name: At_stm_Mutants_cDNA_P Parameter: Tissue Value: Shoot Apical Meristem Region
  misc_feature: MA Experiment ID: 108463 Result: Up-regulated in Transcription
  misc_feature: MA Experiment 108463 PARAMETER Experiment Name: At_Germinating_Seeds_cDNA_P Parameter: Age (day) Value: 3 vs. 0
  misc_feature: MA Experiment 108463 PARAMETER Experiment Name: At_Germinating_Seeds_cDNA_P Parameter: Tissue Value: Germinating Seeds
  misc_feature: MA Experiment ID: 108464 Result: Up-regulated in Transcription
  misc_feature: MA Experiment 108464 PARAMETER Experiment Name: At_Germinating_Seeds_cDNA_P Parameter: Age (day) Value: 4 vs. 0
  misc_feature: MA Experiment 108464 PARAMETER Experiment Name: At_Germinating_Seeds_cDNA_P Parameter: Tissue Value: Germinating Seeds
  misc_feature: MA Experiment ID: 108501 Result: Down-regulated in Transcription
  misc_feature: MA Experiment 108501 PARAMETER Experiment Name: At_ap2_floral_buds_cDNA_P Parameter: Plant Line Value: ap2 (Ler.)
  misc_feature: MA Experiment 108501 PARAMETER Experiment Name: At_ap2_floral_buds_cDNA_P Parameter: Tissue Value: Closed Flower
  misc_feature: MA Experiment ID: 108561 Result: Up-regulated in Transcription
  misc_feature: MA Experiment 108561 PARAMETER Experiment Name: At_100uM_ABA_cDNA_P Parameter: Timepoint (hr) Value: 6
  misc_feature: MA Experiment 108561 PARAMETER Experiment Name: At_100uM_ABA_cDNA_P Parameter: Tissue Value: Aerial
  misc_feature: MA Experiment 108561 PARAMETER Experiment Name: At_100uM_ABA_cDNA_P Parameter: Treatment Value: 100uM ABA vs. No Treatment
  misc_feature: MA Experiment ID: 108576 Result: Down-regulated in Transcription
  misc_feature: MA Experiment 108576 PARAMETER Experiment Name: At_42deg_Heat_cDNA_P Parameter: Temperature (deg C) Value: 42 vs. 22
  misc_feature: MA Experiment 108576 PARAMETER Experiment Name: At_42deg_Heat_cDNA_P Parameter: Timepoint (hr) Value: 1
  misc_feature: MA Experiment 108576 PARAMETER Experiment Name: At_42deg_Heat_cDNA_P Parameter: Tissue Value: Aerial
  misc_feature: MA Experiment ID: 108585 Result: Up-regulated in Transcription
  misc_feature: MA Experiment 108585 PARAMETER Experiment Name: At_5mM_NaNP_cDNA_P Parameter: Timepoint (hr) Value: 6
  misc_feature: MA Experiment 108585 PARAMETER Experiment Name: At_5mM_NaNP_cDNA_P Parameter: Tissue Value: Aerial
  misc_feature: MA Experiment 108585 PARAMETER Experiment Name: At_5mM_NaNP_cDNA_P Parameter: Treatment Value: null
  misc_feature: MA Experiment ID: 108607 Result: Up-regulated in Transcription
  misc_feature: MA Experiment 108607 PARAMETER Experiment Name: At_100uM_ABA_cDNA_P Parameter: Timepoint (hr) Value: 4
  misc_feature: MA Experiment 108607 PARAMETER Experiment Name: At_100uM_ABA_cDNA_P Parameter: Tissue Value: Aerial
  misc_feature: MA Experiment 108607 PARAMETER Experiment Name: At_100uM_ABA_cDNA_P Parameter: Treatment Value: 100uM ABA vs. No Treatment
  misc_feature: MA Experiment ID: 20000070 Result: Up-regulated in Transcription
  misc_feature: MA Experiment 20000070 PARAMETER Experiment Name: At_100uM_ABA_Mutants_cDNA_P Parameter: Plant Line Value: CS24
  misc_feature: MA Experiment 20000070 PARAMETER Experiment Name: At_100uM_ABA_Mutants_cDNA_P Parameter: Timepoint (hr) Value: 6
  misc_feature: MA Experiment 20000070 PARAMETER Experiment Name: At_100uM_ABA_Mutants_cDNA_P Parameter: Tissue Value: Aerial
  misc_feature: MA Experiment 20000070 PARAMETER Experiment Name: At_100uM_ABA_Mutants_cDNA_P Parameter: Treatment Value: 100uM ABA vs. No Treatment
  misc_feature: MA Experiment ID: 20000072 Result: Up-regulated in Transcription
  misc_feature: MA Experiment 20000072 PARAMETER Experiment Name: At_100uM_ABA_Mutants_cDNA_P Parameter: Plant Line Value: CS8105
  misc_feature: MA Experiment 20000072 PARAMETER Experiment Name: At_100uM_ABA_Mutants_cDNA_P Parameter: Timepoint (hr) Value: 6
  misc_feature: MA Experiment 20000072 PARAMETER Experiment Name: At_100uM_ABA_Mutants_cDNA_P Parameter: Tissue Value: Aerial
  misc_feature: MA Experiment 20000072 PARAMETER Experiment Name: At_100uM_ABA_Mutants_cDNA_P Parameter: Treatment Value: 100uM ABA vs. No Treatment
  misc_feature: MA Experiment ID: 20000086 Result: Up-regulated in Transcription
  misc_feature: MA Experiment 20000086 PARAMETER Experiment Name: At_100uM_ABA_Mutants_cDNA_P Parameter: Plant Line Value: CS22
  misc_feature: MA Experiment 20000086 PARAMETER Experiment Name: At_100uM_ABA_Mutants_cDNA_P Parameter: Timepoint (hr) Value: 6
  misc_feature: MA Experiment 20000086 PARAMETER Experiment Name: At_100uM_ABA_Mutants_cDNA_P Parameter: Tissue Value: Aerial
  misc_feature: MA Experiment 20000086 PARAMETER Experiment Name: At_100uM_ABA_Mutants_cDNA_P Parameter: Treatment Value: 100uM ABA vs. No Treatment
  misc_feature: MA Experiment ID: 20000087 Result: Up-regulated in Transcription
  misc_feature: MA Experiment 20000087 PARAMETER Experiment Name: At_100uM_ABA_Mutants_cDNA_P Parameter: Plant Line Value: WS
  misc_feature: MA Experiment 20000087 PARAMETER Experiment Name: At_100uM_ABA_Mutants_cDNA_P Parameter: Timepoint (hr) Value: 6
  misc_feature: MA Experiment 20000087 PARAMETER Experiment Name: At_100uM_ABA_Mutants_cDNA_P Parameter: Tissue Value: Aerial
  misc_feature: MA Experiment 20000087 PARAMETER Experiment Name: At_100uM_ABA_Mutants_cDNA_P Parameter: Treatment Value: 100uM ABA vs. No Treatment
  misc_feature: MA Experiment ID: 20000088 Result: Up-regulated in Transcription
  misc_feature: MA Experiment 20000088 PARAMETER Experiment Name: At_100uM_ABA_Mutants_cDNA_P Parameter: Plant Line Value: Landsberg
  misc_feature: MA Experiment 20000088 PARAMETER Experiment Name: At_100uM_ABA_Mutants_cDNA_P Parameter: Timepoint (hr) Value: 6
  misc_feature: MA Experiment 20000088 PARAMETER Experiment Name: At_100uM_ABA_Mutants_cDNA_P Parameter: Tissue Value: Aerial
  misc_feature: MA Experiment 20000088 PARAMETER Experiment Name: At_100uM_ABA_Mutants_cDNA_P Parameter: Treatment Value: 100uM ABA vs. No Treatment
  misc_feature: MA Experiment ID: 20000111 Result: Down-regulated in Transcription
  misc_feature: MA Experiment 20000111 PARAMETER Experiment Name: At_42deg_Heat_cDNA_P Parameter: Temperature (deg C) Value: 42 vs. 22
  misc_feature: MA Experiment 20000111 PARAMETER Experiment Name: At_42deg_Heat_cDNA_P Parameter: Timepoint (hr) Value: 6
  misc_feature: MA Experiment 20000111 PARAMETER Experiment Name: At_42deg_Heat_cDNA_P Parameter: Tissue Value: Aerial
  misc_feature: MA Experiment ID: 20000112 Result: Down-regulated in Transcription
  misc_feature: MA Experiment 20000112 PARAMETER Experiment Name: At_42deg_Heat_cDNA_P Parameter: Temperature (deg C) Value: 42 vs. 22
  misc_feature: MA Experiment 20000112 PARAMETER Experiment Name: At_42deg_Heat_cDNA_P Parameter: Timepoint (hr) Value: 2
  misc_feature: MA Experiment 20000112 PARAMETER Experiment Name: At_42deg_Heat_cDNA_P Parameter: Tissue Value: Aerial
  misc_feature: MA Experiment ID: 20000144 Result: Down-regulated in Transcription
  misc_feature: MA Experiment 20000144 PARAMETER Experiment Name: At_42deg_Heat_cDNA_P Parameter: Temperature (deg C) Value: 42 vs. 22
  misc_feature: MA Experiment 20000144 PARAMETER Experiment Name: At_42deg_Heat_cDNA_P Parameter: Timepoint (hr) Value: 1
  misc_feature: MA Experiment 20000144 PARAMETER Experiment Name: At_42deg_Heat_cDNA_P Parameter: Tissue Value: Aerial
  misc_feature: MA Experiment ID: 20000185 Result: Up-regulated in Transcription
  misc_feature: MA Experiment 20000185 PARAMETER Experiment Name: At_Roots__P Parameter: Age (day) Value: 7 vs. 21
  misc_feature: MA Experiment 20000185 PARAMETER Experiment Name: At_Roots__P Parameter: Organism Value: A. thaliana
  misc_feature: MA Experiment 20000185 PARAMETER Experiment Name: At_Roots__P Parameter: Tissue Value: Roots vs. Whole Plant
  misc_feature: MA Experiment ID: 20000234 Result: Down-regulated in Transcription
  misc_feature: MA Experiment 20000234 PARAMETER Experiment Name: At_Siliques_P Parameter: Age (day) Value: 21
  misc_feature: MA Experiment 20000234 PARAMETER Experiment Name: At_Siliques_P Parameter: Organism Value: A. thaliana
  misc_feature: MA Experiment 20000234 PARAMETER Experiment Name: At_Siliques_P Parameter: Plant Line Value: WS
  misc_feature: MA Experiment 20000234 PARAMETER Experiment Name: At_Siliques_P Parameter: Tissue Value: Less Than 5mm Siliques vs. Whole Plant
  misc_feature: MA Experiment ID: 20000264 Result: Up-regulated in Transcription
  misc_feature: MA Experiment 20000264 PARAMETER Experiment Name: At_Open_Flower_P Parameter: Age (day) Value: 21
  misc_feature: MA Experiment 20000264 PARAMETER Experiment Name: At_Open_Flower_P Parameter: Plant Line Value: WS
  misc_feature: MA Experiment 20000264 PARAMETER Experiment Name: At_Open_Flower_P Parameter: Tissue Value: Open Flower vs. Whole Plant
  misc_feature: MA Experiment ID: 20000286 Result: Up-regulated in Transcription
  misc_feature: MA Experiment 20000286 PARAMETER Experiment Name: At_Open_Flower_P Parameter: Age (day) Value: 21
  misc_feature: MA Experiment 20000286 PARAMETER Experiment Name: At_Open_Flower_P Parameter: Plant Line Value: WS
  misc_feature: MA Experiment 20000286 PARAMETER Experiment Name: At_Open_Flower_P Parameter: Tissue Value: Half Open vs. Whole Plant
  misc_feature: MA Experiment ID: 20000436 Result: Up-regulated in Transcription
  misc_feature: MA Experiment 20000436 PARAMETER Experiment Name: At_Drought_P Parameter: Age (day) Value: 7
  misc_feature: MA Experiment 20000436 PARAMETER Experiment Name: At_Drought_P Parameter: Organism Value: A. thaliana
  misc_feature: MA Experiment 20000436 PARAMETER Experiment Name: At_Drought_P Parameter: Plant Line Value: WS
  misc_feature: MA Experiment 20000436 PARAMETER Experiment Name: At_Drought_P Parameter: Timepoint (hr) Value: 12
  misc_feature: MA Experiment 20000436 PARAMETER Experiment Name: At_Drought_P Parameter: Tissue Value: Whole Plant
  misc_feature: MA Experiment 20000436 PARAMETER Experiment Name: At_Drought_P Parameter: Treatment Value: Drought vs. No Drought
  misc_feature: MA Experiment ID: 20000439 Result: Up-regulated in Transcription
  misc_feature: MA Experiment 20000439 PARAMETER Experiment Name: At_Roots__P Parameter: Age (day) Value: 14 vs. 21
  misc_feature: MA Experiment 20000439 PARAMETER Experiment Name: At_Roots__P Parameter: Organism Value: A. thaliana
  misc_feature: MA Experiment 20000439 PARAMETER Experiment Name: At_Roots__P Parameter: Tissue Value: Roots vs. Whole Plant
  misc_feature: MA Experiment ID: 20000495 Result: Up-regulated in Transcription
  misc_feature: MA Experiment 20000495 PARAMETER Experiment Name: At_Guard_Cells_P Parameter: Harvest Date Value: 8/2/2002
  misc_feature: MA Experiment 20000495 PARAMETER Experiment Name: At_Guard_Cells_P Parameter: Organism Value: A. thaliana
  misc_feature: MA Experiment 20000495 PARAMETER Experiment Name: At_Guard_Cells_P Parameter: Tissue Value: Guard Cells vs. Leaves
  misc_feature: MA Experiment ID: 20000527 Result: Down-regulated in Transcription
  misc_feature: MA Experiment 20000527 PARAMETER Experiment Name: At_10percent_PEG_P Parameter: Age (day) Value: 20
  misc_feature: MA Experiment 20000527 PARAMETER Experiment Name: At_10percent_PEG_P Parameter: Organism Value: A. thaliana
  misc_feature: MA Experiment 20000527 PARAMETER Experiment Name: At_10percent_PEG_P Parameter: Plant Line Value: WS
  misc_feature: MA Experiment 20000527 PARAMETER Experiment Name: At_10percent_PEG_P Parameter: Timepoint (day) Value: 20
  misc_feature: MA Experiment 20000527 PARAMETER Experiment Name: At_10percent_PEG_P Parameter: Tissue Value: Whole Plant
  misc_feature: MA Experiment 20000527 PARAMETER Experiment Name: At_10percent_PEG_P Parameter: Treatment Value: 10percent PEG vs. No Treatment
  misc_feature: MA Experiment ID: 20000794 Result: Up-regulated in Transcription
  misc_feature: MA Experiment 20000794 PARAMETER Experiment Name: At_Petals_P Parameter: Age (day) Value: 23-25 days
  misc_feature: MA Experiment 20000794 PARAMETER Experiment Name: At_Petals_P Parameter: Plant Line Value: WS
  misc_feature: MA Experiment 20000794 PARAMETER Experiment Name: At_Petals_P Parameter: Tissue Value: Petals vs. Whole plant
  misc_feature: MA Experiment ID: 20001757 Result: Down-regulated in Transcription
  misc_feature: MA Experiment 20001757 PARAMETER Experiment Name: At_50mM_NH4NO3_L-to-H_P Parameter: Timepoint (hr) Value: 6
  misc_feature: MA Experiment 20001757 PARAMETER Experiment Name: At_50mM_NH4NO3_L-to-H_P Parameter: Tissue Value: Leaf
  misc_feature: MA Experiment 20001757 PARAMETER Experiment Name: At_50mM_NH4NO3_L-to-H_P Parameter: Treatment Value: 50mM NH4NO3 vs 100mM Mannitol
  misc_feature: MA Experiment ID: 20001905 Result: Up-regulated in Transcription
  misc_feature: MA Experiment 20001905 PARAMETER Experiment Name: At_Drought_Reproduction_P Parameter: Age (day) Value: 40
  misc_feature: MA Experiment 20001905 PARAMETER Experiment Name: At_Drought_Reproduction_P Parameter: Organism Value: A. thaliana
  misc_feature: MA Experiment 20001905 PARAMETER Experiment Name: At_Drought_Reproduction_P Parameter: Plant Line Value: WS
  misc_feature: MA Experiment 20001905 PARAMETER Experiment Name: At_Drought_Reproduction_P Parameter: Timepoint (day) Value: 10
  misc_feature: MA Experiment 20001905 PARAMETER Experiment Name: At_Drought_Reproduction_P Parameter: Tissue Value: Rosettes
  misc_feature: MA Experiment 20001905 PARAMETER Experiment Name: At_Drought_Reproduction_P Parameter: Treatment Value: Drought vs. No Drought
ctgcctcaaacaaatagagcttatctcatcactcaccaaacaactctcatcaatataaagagaagagagtggtagagttatatattacacacataaacttagatatagtagtgttatattcttgattaagtaataaagatgaaaggtggaagcatggagaaaattaagccgatattggcgataatttcactgcaatttgggtatgcaggcatgtacatcatcaccatggtctcgttcaaacatggcatggaccattgggttcttgctacataccgtcatgtcgtagccacggttgtcatggctccctttgctctcatgttcgagaggaaaattaggcccaagatgacactagcaatattctggaggcttcttgctcttggaatattagagcccctcatggaccagaatttgtactacataggattgaaaaacacatcagcatcgtacacttctgcctttaccaatgcacttcccgccgtcaccttcattctcgccctcattttcaggcttgagacggtgaactttagaaaggtccacagtgttgcaaaagtggtaggaacggtaataacggttggaggagcaatgatcatgactttgtacaaaggtccggccattgagattgtgaaggccgcacataattctttccacggtggttcgagcagcacacccaccggccaacattgggtccttggaaccatagccattatgggcagtatctctacatgggctgctttcttcattttacagtcatacacattaaaagtctatccagctgagctatcactagtaacgttgatatgtgggatagggacgatcctaaacgctattgcttcgctaataatggttcgtgacccgagtgcatggaaaatcggcatggattcagggacactcgccgcggtttactctggagtggtttgttcgggaatagcttattacatacaaagcattgtgattaagcaacgtggaccggtttttacgacgtcgtttagtcctatgtgtatgatcatcactgccttcctcggtgcattggttttggctgagaaaatccatctcggaagcataatcggggcggttttcatagtgcttggactatacagtgtggtatggggtaaaagtaaagacgaagtgaatcctttggatgagaaaatcgtagccaagtcccaagagcttccgattactaacgtagtcaaacaaacgaacggtcacgatgtctcgggagcaccgactaacggtgtggttaccagtacctgatccaagtcccaaaagagaagaaagatacttaaacaaagatctcatctccatgcattggaggtggaagttttgattatctttcttgttttttgtgttttttcttttacattttctaatcgatctacgcttaacttttagtatctttttaccttatgtaatgattttctgcttctactttcttgtatttgaaatttccaaaacgaatgatgaatgcatcatttggt

SEQ ID NO: 42641 - protein, 370 aa, Arabidopsis thaliana
  peptide (1)..(370): Ceres Seq. ID no. 12330834
  misc_feature (20)..(153): Pfam Name: Integral membrane protein DUF6 Pfam Description: Integral membrane protein DUF6
  misc_feature (6)..(368): Homolog of NCBI NO: 21593603 NR Description: nodulin-like protein [Arabidopsis thaliana]
  misc_feature (3)..(370): Homolog of NCBI NO: 34908998 NR Description: nodulin-like protein [Oryza sativa (japonica
  misc_feature (10)..(347): Homolog of NCBI NO: 15225480 NR Description: nodulin-like protein; protein id: At2g39510.1
  misc_feature (1)..(351): Homolog of NCBI NO: 6552743 NR Description: T26F17.11 [Arabidopsis thaliana]
  misc_feature (1)..(351): Homolog of NCBI NO: 17529004 NR Description: putative nodulin protein [Arabidopsis thaliana]
  misc_feature (1)..(351): Homolog of NCBI NO: 15219123 NR Description: nodulin-like protein
  misc_feature (6)..(370): Homolog of NCBI NO: 7486870 NR Description: hypothetical protein T12G13.140 - Arabidopsis
  misc_feature (1)..(370): Homolog of NCBI NO: 30680708 NR Description: nodulin MtN21 family protein [Arabidopsis
  misc_feature (6)..(370): Homolog of NCBI NO: 21553533 NR Description: nodulin protein, putative [Arabidopsis thaliana]
  misc_feature (1)..(370): Homolog of NCBI NO: 15219448 NR Description: nodulin protein, putative
MKGGSMEKIKPILAIISLQFGYAGMYIITMVSFKHGMDHWVLATYRHVVATVVMAPFALMFERKIRPKMTLAIFWRLLALGILEPLMDQNLYYIGLKNTSASYTSAFTNALPAVTFILALIFRLETVNFRKVHSVAKVVGTVITVGGAMIMTLYKGPAIEIVKAAHNSFHGGSSSTPTGQHWVLGTIAIMGSISTWAAFFILQSYTLKVYPAELSLVTLICGIGTILNAIASLIMVRDPSAWKIGMDSGTLAAVYSGVVCSGIAYYIQSIVIKQRGPVFTTSFSPMCMIITAFLGALVLAEKIHLGSIIGAVFIVLGLYSVVWGKSKDEVNPLDEKIVAKSQELPITNVVKQTNGHDVSGAPTNGVVTST

SEQ ID NO: 42642 - protein, 365 aa, Arabidopsis thaliana
  peptide (1)..(365): Ceres Seq. ID no. 12330835
  misc_feature (15)..(148): Pfam Name: Integral membrane protein DUF6 Pfam Description: Integral membrane protein DUF6
  misc_feature (1)..(363): Homolog of NCBI NO: 21593603 NR Description: nodulin-like protein [Arabidopsis thaliana]
  misc_feature (1)..(365): Homolog of NCBI NO: 34908998 NR Description: nodulin-like protein [Oryza sativa (japonica
  misc_feature (5)..(342): Homolog of NCBI NO: 15225480 NR Description: nodulin-like protein; protein id: At2g39510.1
  misc_feature (1)..(346): Homolog of NCBI NO: 6552743 NR Description: T26F17.11 [Arabidopsis thaliana]
  misc_feature (1)..(346): Homolog of NCBI NO: 17529004 NR Description: putative nodulin protein [Arabidopsis thaliana]
  misc_feature (1)..(346): Homolog of NCBI NO: 15219123 NR Description: nodulin-like protein
  misc_feature (1)..(365): Homolog of NCBI NO: 7486870 NR Description: hypothetical protein T12G13.140 - Arabidopsis
  misc_feature (1)..(365): Homolog of NCBI NO: 30680708 NR Description: nodulin MtN21 family protein [Arabidopsis
  misc_feature (1)..(365): Homolog of NCBI NO: 21553533 NR Description: nodulin protein, putative [Arabidopsis thaliana]
  misc_feature (1)..(365): Homolog of NCBI NO: 15219448 NR Description: nodulin protein, putative
MEKIKPILAIISLQFGYAGMYIITMVSFKHGMDHWVLATYRHVVATVVMAPFALMFERKIRPKMTLAIFWRLLALGILEPLMDQNLYYIGLKNTSASYTSAFTNALPAVTFILALIFRLETVNFRKVHSVAKVVGTVITVGGAMIMTLYKGPAIEIVKAAHNSFHGGSSSTPTGQHWVLGTIAIMGSISTWAAFFILQSYTLKVYPAELSLVTLICGIGTILNAIASLIMVRDPSAWKIGMDSGTLAAVYSGVVCSGIAYYIQSIVIKQRGPVFTTSFSPMCMIITAFLGALVLAEKIHLGSIIGAVFIVLGLYSVVWGKSKDEVNPLDEKIVAKSQELPITNVVKQTNGHDVSGAPTNGVVTST

SEQ ID NO: 42643 - protein, 346 aa, Arabidopsis thaliana
  peptide (1)..(346): Ceres Seq. ID no. 12330836
  misc_feature (1)..(129): Pfam Name: Integral membrane protein DUF6 Pfam Description: Integral membrane protein DUF6
  misc_feature (1)..(344): Homolog of NCBI NO: 21593603 NR Description: nodulin-like protein [Arabidopsis thaliana]
  misc_feature (1)..(346): Homolog of NCBI NO: 34908998 NR Description: nodulin-like protein [Oryza sativa (japonica
  misc_feature (1)..(323): Homolog of NCBI NO: 15225480 NR Description: nodulin-like protein; protein id: At2g39510.1
  misc_feature (1)..(327): Homolog of NCBI NO: 6552743 NR Description: T26F17.11 [Arabidopsis thaliana]
  misc_feature (1)..(327): Homolog of NCBI NO: 17529004 NR Description: putative nodulin protein [Arabidopsis thaliana]
  misc_feature (1)..(327): Homolog of NCBI NO: 15219123 NR Description: nodulin-like protein
  misc_feature (1)..(346): Homolog of NCBI NO: 7486870 NR Description: hypothetical protein T12G13.140 - Arabidopsis
  misc_feature (1)..(346): Homolog of NCBI NO: 30680708 NR Description: nodulin MtN21 family protein [Arabidopsis
  misc_feature (1)..(346): Homolog of NCBI NO: 21553533 NR Description: nodulin protein, putative [Arabidopsis thaliana]
  misc_feature (1)..(346): Homolog of NCBI NO: 15219448 NR Description: nodulin protein, putative
MYIITMVSFKHGMDHWVLATYRHVVATVVMAPFALMFERKIRPKMTLAIFWRLLALGILEPLMDQNLYYIGLKNTSASYTSAFTNALPAVTFILALIFRLETVNFRKVHSVAKVVGTVITVGGAMIMTLYKGPAIEIVKAAHNSFHGGSSSTPTGQHWVLGTIAIMGSISTWAAFFILQSYTLKVYPAELSLVTLICGIGTILNAIASLIMVRDPSAWKIGMDSGTLAAVYSGVVCSGIAYYIQSIVIKQRGPVFTTSFSPMCMIITAFLGALVLAEKIHLGSIIGAVFIVLGLYSVVWGKSKDEVNPLDEKIVAKSQELPITNVVKQTNGHDVSGAPTNGVVTST

SEQ ID NO: 42644 - DNA, 1098 bp, Arabidopsis thaliana
  misc_feature (1)..(1098): Ceres Seq. ID no. 13487687
  misc_feature: MA Experiment ID: 20000171 Result: Down-regulated in Transcription
  misc_feature: MA Experiment 20000171 PARAMETER Experiment Name: At_42deg_Heat_P Parameter: Age (day) Value: 14
  misc_feature: MA Experiment 20000171 PARAMETER Experiment Name: At_42deg_Heat_P Parameter: Organism Value: A. thaliana
  misc_feature: MA Experiment 20000171 PARAMETER Experiment Name: At_42deg_Heat_P Parameter: Plant Line Value: WS
  misc_feature: MA Experiment 20000171 PARAMETER Experiment Name: At_42deg_Heat_P Parameter: Temperature (deg C) Value: 42 vs. 22
  misc_feature: MA Experiment 20000171 PARAMETER Experiment Name: At_42deg_Heat_P Parameter: Timepoint (hr) Value: 1
  misc_feature: MA Experiment 20000171 PARAMETER Experiment Name: At_42deg_Heat_P Parameter: Tissue Value: Aerial
  misc_feature: MA Experiment ID: 20000173 Result: Down-regulated in Transcription
  misc_feature: MA Experiment 20000173 PARAMETER Experiment Name: At_42deg_Heat_P Parameter: Age (day) Value: 14
  misc_feature: MA Experiment 20000173 PARAMETER Experiment Name: At_42deg_Heat_P Parameter: Organism Value: A. thaliana
  misc_feature: MA Experiment 20000173 PARAMETER Experiment Name: At_42deg_Heat_P Parameter: Plant Line Value: WS
  misc_feature: MA Experiment 20000173 PARAMETER Experiment Name: At_42deg_Heat_P Parameter: Temperature (deg C) Value: 42 vs. 22
  misc_feature: MA Experiment 20000173 PARAMETER Experiment Name: At_42deg_Heat_P Parameter: Timepoint (hr) Value: 6
  misc_feature: MA Experiment 20000173 PARAMETER Experiment Name: At_42deg_Heat_P Parameter: Tissue Value: Aerial
  misc_feature: MA Experiment ID: 20000184 Result: Down-regulated in Transcription
  misc_feature: MA Experiment 20000184 PARAMETER Experiment Name: At_Shoots__P Parameter: Age (day) Value: 7
  misc_feature: MA Experiment 20000184 PARAMETER Experiment Name: At_Shoots__P Parameter: Tissue Value: Shoots vs. Whole Plant
agagtgtgttttcgtttccgaatgctttcaattcgcagaagcttaactctagcaaaagagccaaaagatttgtttttgtttttgtgtaatctccgagctcgatgtgtatctacagatgactatgatccaccattttcgcctctctctaaacccactaaacctccaaaagagaagaagaagcagaagacgaagaagcaagaccagtcgtcggagctggtaaatgacctgaagattccagtgatttcagacctccctttcgattttaggtattcgtattcagaaactaacccggaaattgaaccgattggattccgtgaaccgaaacggttctctccatttggaccgggtcgattggaccggaaatggactgggactaccgcactggcgtcgccggagattgatcagagtcaatgggtggaggagagagcaagagttctcggcgagactttgacagaggatgaagttacagagcttattgaacggtatcggcatagtgactgtacacgacagattaatctcgggaaaggtggtgtgactcacaatatgatagatgatattcataaccattggaagaaagctgaggcagtgaggatcaaatgcttgggagtaccaactcttgacatggacaacatatgtttccacctcgaggaaaaatccggtggaaagattgtatacagaaacataaacattctagttttgtaccggggaaggaattatgatccgaagagtcgtcccatcattccactcatgttatggaagcctcatccgccaatatacccaagacttgtaaagaatgtggctgatgggttagaatttgaagagaccaaggagatgagaaatcgtgggcttcattctcctgccttaatgaaacttactaggaatggtgtttatgttaatgtcgttggaagagtgagggaagagtttgaaacagaagagattgtgagactagattgcactcatgttgggatgagtgactgcaaacgaattggtgtgaaactaaaggagatggttccatgtgttcccatattgttcaaagatgagcagatcatactctggagagggaagaggactggtgaagaagagcttgttactctatga

SEQ ID NO: 42645 - protein, 365 aa, Arabidopsis thaliana
  peptide (1)..(365): Ceres Seq. ID no. 13487688
  misc_feature (150)..(235): Pfam Name: CRS1 / YhbY domain Pfam Description: CRS1 / YhbY domain
  misc_feature (137)..(364): Homolog of NCBI NO: 18399222 NR Description: expressed protein [Arabidopsis thaliana]
  misc_feature (283)..(354): Homolog of NCBI NO: 34905354 NR Description: OJ1126_G08.1 [Oryza sativa (japonica
  misc_feature (142)..(296): Homolog of NCBI NO: 34905354 NR Description: OJ1126_G08.1 [Oryza sativa (japonica
  misc_feature (142)..(355): Homolog of NCBI NO: 30349369 NR Description: CRS2-associated factor 2 [Zea mays]
  misc_feature (142)..(354): Homolog of NCBI NO: 30349367 NR Description: CRS2-associated factor 1 [Zea mays]
  misc_feature (43)..(275): Homolog of NCBI NO: 14596153 NR Description: Unknown protein [Arabidopsis thaliana]
  misc_feature (43)..(334): Homolog of NCBI NO: 25407702 NR Description: hypothetical protein AT4g31010 [imported] -
  misc_feature (57)..(355): Homolog of NCBI NO: 40253285 NR Description: putative CRS2-associated factor 1
  misc_feature (43)..(355): Homolog of NCBI NO: 22329043 NR Description: expressed protein [Arabidopsis thaliana]
  misc_feature (8)..(365): Homolog of NCBI NO: 15240416 NR Description: expressed protein [Arabidopsis thaliana]
RVCFRFRMLSIRRSLTLAKEPKDLFLFLCNLRARCVSTDDYDPPFSPLSKPTKPPKEKKKQKTKKQDQSSELVNDLKIPVISDLPFDFRYSYSETNPEIEPIGFREPKRFSPFGPGRLDRKWTGTTALASPEIDQSQWVEERARVLGETLTEDEVTELIERYRHSDCTRQINLGKGGVTHNMIDDIHNHWKKAEAVRIKCLGVPTLDMDNICFHLEEKSGGKIVYRNINILVLYRGRNYDPKSRPIIPLMLWKPHPPIYPRLVKNVADGLEFEETKEMRNRGLHSPALMKLTRNGVYVNVVGRVREEFETEEIVRLDCTHVGMSDCKRIGVKLKEMVPCVPILFKDEQIILWRGKRTGEEELVTL

SEQ ID NO: 42646 - protein, 358 aa, Arabidopsis thaliana
  peptide (1)..(358): Ceres Seq. ID no. 13487689
  misc_feature (143)..(228): Pfam Name: CRS1 / YhbY domain Pfam Description: CRS1 / YhbY domain
  misc_feature (130)..(357): Homolog of NCBI NO: 18399222 NR Description: expressed protein [Arabidopsis thaliana]
  misc_feature (276)..(347): Homolog of NCBI NO: 34905354 NR Description: OJ1126_G08.1 [Oryza sativa (japonica
  misc_feature (135)..(289): Homolog of NCBI NO: 34905354 NR Description: OJ1126_G08.1 [Oryza sativa (japonica
  misc_feature (135)..(348): Homolog of NCBI NO: 30349369 NR Description: CRS2-associated factor 2 [Zea mays]
  misc_feature (135)..(347): Homolog of NCBI NO: 30349367 NR Description: CRS2-associated factor 1 [Zea mays]
  misc_feature (36)..(268): Homolog of NCBI NO: 14596153 NR Description: Unknown protein [Arabidopsis thaliana]
  misc_feature (36)..(327): Homolog of NCBI NO: 25407702 NR Description: hypothetical protein AT4g31010 [imported] -
  misc_feature (50)..(348): Homolog of NCBI NO: 40253285 NR Description: putative CRS2-associated factor 1
  misc_feature (36)..(348): Homolog of NCBI NO: 22329043 NR Description: expressed protein [Arabidopsis thaliana]
  misc_feature (1)..(358): Homolog of NCBI NO: 15240416 NR Description: expressed protein [Arabidopsis thaliana]
MLSIRRSLTLAKEPKDLFLFLCNLRARCVSTDDYDPPFSPLSKPTKPPKEKKKQKTKKQDQSSELVNDLKIPVISDLPFDFRYSYSETNPEIEPIGFREPKRFSPFGPGRLDRKWTGTTALASPEIDQSQWVEERARVLGETLTEDEVTELIERYRHSDCTRQINLGKGGVTHNMIDDIHNHWKKAEAVRIKCLGVPTLDMDNICFHLEEKSGGKIVYRNINILVLYRGRNYDPKSRPIIPLMLWKPHPPIYPRLVKNVADGLEFEETKEMRNRGLHSPALMKLTRNGVYVNVVGRVREEFETEEIVRLDCTHVGMSDCKRIGVKLKEMVPCVPILFKDEQIILWRGKRTGEEELVTL

SEQ ID NO: 42647 - protein, 184 aa, Arabidopsis thaliana
  peptide (1)..(184): Ceres Seq. ID no. 13487690
  misc_feature (1)..(54): Pfam Name: CRS1 / YhbY domain Pfam Description: CRS1 / YhbY domain
  misc_feature (1)..(183): Homolog of NCBI NO: 18399222 NR Description: expressed protein [Arabidopsis thaliana]
  misc_feature (102)..(173): Homolog of NCBI NO: 34905354 NR Description: OJ1126_G08.1 [Oryza sativa (japonica
  misc_feature (1)..(115): Homolog of NCBI NO: 34905354 NR Description: OJ1126_G08.1 [Oryza sativa (japonica
  misc_feature (1)..(174): Homolog of NCBI NO: 30349369 NR Description: CRS2-associated factor 2 [Zea mays]
  misc_feature (1)..(173): Homolog of NCBI NO: 30349367 NR Description: CRS2-associated factor 1 [Zea mays]
  misc_feature (1)..(94): Homolog of NCBI NO: 14596153 NR Description: Unknown protein [Arabidopsis thaliana]
  misc_feature (1)..(153): Homolog of NCBI NO: 25407702 NR Description: hypothetical protein AT4g31010 [imported] -
  misc_feature (1)..(174): Homolog of NCBI NO: 40253285 NR Description: putative CRS2-associated factor 1
  misc_feature (1)..(174): Homolog of NCBI NO: 22329043 NR Description: expressed protein [Arabidopsis thaliana]
  misc_feature (1)..(184): Homolog of NCBI NO: 15240416 NR Description: expressed protein [Arabidopsis thaliana]
MIDDIHNHWKKAEAVRIKCLGVPTLDMDNICFHLEEKSGGKIVYRNINILVLYRGRNYDPKSRPIIPLMLWKPHPPIYPRLVKNVADGLEFEETKEMRNRGLHSPALMKLTRNGVYVNVVGRVREEFETEEIVRLDCTHVGMSDCKRIGVKLKEMVPCVPILFKDEQIILWRGKRTGEEELVTL

SEQ ID NO: 42648 - DNA, 1746 bp, Arabidopsis thaliana
  misc_feature (1)..(1746): Ceres Seq. ID no. 13489488
  misc_feature: MA Experiment ID: 20001557 Result: Up-regulated in Transcription
  misc_feature: MA Experiment 20001557 PARAMETER Experiment Name: At_Drought_Soil_Dry_P Parameter: Age (day) Value: 27
  misc_feature: MA Experiment 20001557 PARAMETER Experiment Name: At_Drought_Soil_Dry_P Parameter: Organism Value: A. thaliana
  misc_feature: MA Experiment 20001557 PARAMETER Experiment Name: At_Drought_Soil_Dry_P Parameter: Plant Line Value: WS
  misc_feature: MA Experiment 20001557 PARAMETER Experiment Name: At_Drought_Soil_Dry_P Parameter: Post Timepoint (hr) Value: 3
  misc_feature: MA Experiment 20001557 PARAMETER Experiment Name: At_Drought_Soil_Dry_P Parameter: Post-Treatment Value: Re-Water vs. No Drought
  misc_feature: MA Experiment 20001557 PARAMETER Experiment Name: At_Drought_Soil_Dry_P Parameter: Timepoint (day) Value: 13
  misc_feature: MA Experiment 20001557 PARAMETER Experiment Name: At_Drought_Soil_Dry_P Parameter: Treatment Value: Drought vs. No Drought
acggttccttctcttctctctctctctttctccgtctgtcgctgtctctctcgtcctctcctctgtttcgtagcttctgcagcagatctctctttgtccttctctctccctcagatcactatggcacagcaggaagctagtccttcccctggtgctgaggttgttggtcgtgcctttgtggagcaatactatcatattcttcaccaatctcccggtttagttcatcggttttatcaagattcgagctttttaacccgacctgatgttaccggtgctgtgactactgtcacaactatgcaagcgatcaacgacaagattctgtcgttgaaatatgaagactacacggctgagatagaaactgctgatgctcaggagtctcatgagagaggtgttattgtgctggttacaggacgcttaaccgggaacgataatgttaggaagaagtttagtcaatcttttttcttggctccacaagacaaaggatactttgtcttaaacgacgtgtttcgattccttgaggagaaagaggtgactgcacaagcccgctctgtccccatcaatggaaccactagggatgttcaggctcctattgaaccagaacgtgttgttgttagtcacgagcccgaggtagaacccgagccagttgcttctatcgaggaagaagatcttgacaatgtggcggaagtgtatgatccttctgataaagatgaaggagttgttgttgacgttgagcctattgaacctcccactcaaataagtcataatgaaatcttatcagtgcctcaaggagatgctcctaagcattcttatgcttcaatcctcaagcagatgaaaagcagtccagcaccaacaacacacgttgctagaaacaagccaagaccagctccagtcaaccagaagctgaccgcgcctcctgctgagcctgcagcaagacccgaggcttcagctcatgagaatgttccgaatagtagccatgttgatgtggaagatgatggtcattcgatttatgttcgaaatttgccgtttgactccacaccaacacaacttgaagaggtgttcaagaactttggtgcaatcaagcatgaggggattcaagtcagaagcaacaagcagcaaggtttctgttttggttttgtggaatttgaaacatctagcggaaagcaaagtgccctcgaggcctcaccagttacaattggagatcgtcaagctgttgtagaggagaagaaaacaaatagtcgaggaggaggcaacaatggaggtagcaggggaaggtacttttccggaagaggaagtttccgaaatgaaagcttcaaaggaggacgcggtggtgggggaagaggaggctatggaagaggaggaggtgagttttctggtagaccaaagagctcaaacccacgaaatggaggagaaggttaccaaagggttcctcaaaacggaggaggtggaagaggaggccgcggagaaggaggtcgtggtggagctcgaggtggtggttcatcttgactttgcttttaacgctcctctacaagagagtagttttaatttttgttttgcgtctttctttttgcctactacttgagttgatgtggtattggcttttttgtcggtctagtttttcaatattcttgctttttttcctctcttttttgtttttcatctttcaatctttctttggggtaatgtactcttcataaacaaacattcaatttcataaggaatccattatagagttgtgttctttacgcc

SEQ ID NO: 42649 - protein, 500 aa, Arabidopsis thaliana
  peptide (1)..(500): Ceres Seq. ID no. 13489489
  misc_feature (55)..(171): Pfam Name: Nuclear transport factor 2 (NTF2) domain Pfam Description: Nuclear transport factor 2 (NTF2) domain
  misc_feature (50)..(470): Homolog of NCBI NO: 15222258 NR Description: NTF2-containing RNA-binding protein, putative
  misc_feature (261)..(469): Homolog of NCBI NO: 15240057 NR Description: NTF2-containing RNA-binding protein, putative
  misc_feature (46)..(292): Homolog of NCBI NO: 15240057 NR Description: NTF2-containing RNA-binding protein, putative
  misc_feature (41)..(473): Homolog of NCBI NO: 18394029 NR Description: NTF2-containing RNA-binding protein, putative
  misc_feature (41)..(498): Homolog of NCBI NO: 31126693 NR Description: putative GAP SH3 binding protein
  misc_feature (55)..(500): Homolog of NCBI NO: 9294171 NR Description: RNA-binding protein-like [Arabidopsis thaliana]
  misc_feature (42)..(500): Homolog of NCBI NO: 30687772 NR Description: NTF2-containing RNA-binding protein, putative
  misc_feature (41)..(500): Homolog of NCBI NO: 21553535 NR Description: ras-GTPase-activating protein SH3-domain binding
  misc_feature (41)..(500): Homolog of NCBI NO: 30697452 NR Description: NTF2-containing RNA-binding protein, putative
  misc_feature (41)..(500): Homolog of NCBI NO: 30697455 NR Description: NTF2-containing RNA-binding protein, putative
TVPSLLSLSFSVCRCLSRPLLCFVASAADLSLSFSLPQITMAQQEASPSPGAEVVGRAFVEQYYHILHQSPGLVHRFYQDSSFLTRPDVTGAVTTVTTMQAINDKILSLKYEDYTAEIETADAQESHERGVIVLVTGRLTGNDNVRKKFSQSFFLAPQDKGYFVLNDVFRFLEEKEVTAQARSVPINGTTRDVQAPIEPERVVVSHEPEVEPEPVASIEEEDLDNVAEVYDPSDKDEGVVVDVEPIEPPTQISHNEILSVPQGDAPKHSYASILKQMKSSPAPTTHVARNKPRPAPVNQKLTAPPAEPAARPEASAHENVPNSSHVDVEDDGHSIYVRNLPFDSTPTQLEEVFKNFGAIKHEGIQVRSNKQQGFCFGFVEFETSSGKQSALEASPVTIGDRQAVVEEKKTNSRGGGNNGGSRGRYFSGRGSFRNESFKGGRGGGGRGGYGRGGGEFSGRPKSSNPRNGGEGYQRVPQNGGGGRGGRGEGGRGGARGGGSS

SEQ ID NO: 42650 - protein, 460 aa, Arabidopsis thaliana
  peptide (1)..(460): Ceres Seq. ID no. 13489490
  misc_feature (15)..(131): Pfam Name: Nuclear transport factor 2 (NTF2) domain Pfam Description: Nuclear transport factor 2 (NTF2) domain
  misc_feature (10)..(430): Homolog of NCBI NO: 15222258 NR Description: NTF2-containing RNA-binding protein, putative
  misc_feature (221)..(429): Homolog of NCBI NO: 15240057 NR Description: NTF2-containing RNA-binding protein, putative
  misc_feature (6)..(252): Homolog of NCBI NO: 15240057 NR Description: NTF2-containing RNA-binding protein, putative
  misc_feature (1)..(433): Homolog of NCBI NO: 18394029 NR Description: NTF2-containing RNA-binding protein, putative
  misc_feature (1)..(458): Homolog of NCBI NO: 31126693 NR Description: putative GAP SH3 binding protein
  misc_feature (15)..(460): Homolog of NCBI NO: 9294171 NR Description: RNA-binding protein-like [Arabidopsis thaliana]
  misc_feature (2)..(460): Homolog of NCBI NO: 30687772 NR Description: NTF2-containing RNA-binding protein, putative
  misc_feature (1)..(460): Homolog of NCBI NO: 21553535 NR Description: ras-GTPase-activating protein SH3-domain binding
  misc_feature (1)..(460): Homolog of NCBI NO: 30697452 NR Description: NTF2-containing RNA-binding protein, putative
  misc_feature (1)..(460): Homolog of NCBI NO: 30697455 NR Description: NTF2-containing RNA-binding protein, putative
MAQQEASPSPGAEVVGRAFVEQYYHILHQSPGLVHRFYQDSSFLTRPDVTGAVTTVTTMQAINDKILSLKYEDYTAEIETADAQESHERGVIVLVTGRLTGNDNVRKKFSQSFFLAPQDKGYFVLNDVFRFLEEKEVTAQARSVPINGTTRDVQAPIEPERVVVSHEPEVEPEPVASIEEEDLDNVAEVYDPSDKDEGVVVDVEPIEPPTQISHNEILSVPQGDAPKHSYASILKQMKSSPAPTTHVARNKPRPAPVNQKLTAPPAEPAARPEASAHENVPNSSHVDVEDDGHSIYVRNLPFDSTPTQLEEVFKNFGAIKHEGIQVRSNKQQGFCFGFVEFETSSGKQSALEASPVTIGDRQAVVEEKKTNSRGGGNNGGSRGRYFSGRGSFRNESFKGGRGGGGRGGYGRGGGEFSGRPKSSNPRNGGEGYQRVPQNGGGGRGGRGEGGRGGARGGGSS

SEQ ID NO: 42651 - protein, 402 aa, Arabidopsis thaliana
  peptide (1)..(402): Ceres Seq. ID no. 13489491
  misc_feature (1)..(73): Pfam Name: Nuclear transport factor 2 (NTF2) domain Pfam Description: Nuclear transport factor 2 (NTF2) domain
  misc_feature (1)..(372): Homolog of NCBI NO: 15222258 NR Description: NTF2-containing RNA-binding protein, putative
  misc_feature (163)..(371): Homolog of NCBI NO: 15240057 NR Description: NTF2-containing RNA-binding protein, putative
  misc_feature (1)..(194): Homolog of NCBI NO: 15240057 NR Description: NTF2-containing RNA-binding protein, putative
  misc_feature (1)..(375): Homolog of NCBI NO: 18394029 NR Description: NTF2-containing RNA-binding protein, putative
  misc_feature (1)..(400): Homolog of NCBI NO: 31126693 NR Description: putative GAP SH3 binding protein
  misc_feature (1)..(402): Homolog of NCBI NO: 9294171 NR Description: RNA-binding protein-like [Arabidopsis thaliana]
  misc_feature (1)..(402): Homolog of NCBI NO: 30687772 NR Description: NTF2-containing RNA-binding protein, putative
  misc_feature (1)..(402): Homolog of NCBI NO: 21553535 NR Description: ras-GTPase-activating protein SH3-domain binding
  misc_feature (1)..(402): Homolog of NCBI NO: 30697452 NR Description: NTF2-containing RNA-binding protein, putative
  misc_feature (1)..(402): Homolog of NCBI NO: 30697455 NR Description: NTF2-containing RNA-binding protein, putative
MQAINDKILSLKYEDYTAEIETADAQESHERGVIVLVTGRLTGNDNVRKKFSQSFFLAPQDKGYFVLNDVFRFLEEKEVTAQARSVPINGTTRDVQAPIEPERVVVSHEPEVEPEPVASIEEEDLDNVAEVYDPSDKDEGVVVDVEPIEPPTQISHNEILSVPQGDAPKHSYASILKQMKSSPAPTTHVARNKPRPAPVNQKLTAPPAEPAARPEASAHENVPNSSHVDVEDDGHSIYVRNLPFDSTPTQLEEVFKNFGAIKHEGIQVRSNKQQGFCFGFVEFETSSGKQSALEASPVTIGDRQAVVEEKKTNSRGGGNNGGSRGRYFSGRGSFRNESFKGGRGGGGRGGYGRGGGEFSGRPKSSNPRNGGEGYQRVPQNGGGGRGGRGEGGRGGARGGGSS

SEQ ID NO: 42652 - DNA, 1676 bp, Arabidopsis thaliana
  misc_feature (1)..(1676): Ceres Seq. ID no. 12422280
  misc_feature: MA Experiment ID: 108577 Result: Down-regulated in Transcription
  misc_feature: MA Experiment 108577 PARAMETER Experiment Name: At_42deg_Heat_cDNA_P Parameter: Temperature (deg C) Value: 42 vs. 22
  misc_feature: MA Experiment 108577 PARAMETER Experiment Name: At_42deg_Heat_cDNA_P Parameter: Timepoint (hr) Value: 6
  misc_feature: MA Experiment 108577 PARAMETER Experiment Name: At_42deg_Heat_cDNA_P Parameter: Tissue Value: Aerial
  misc_feature: MA Experiment ID: 20000111 Result: Down-regulated in Transcription
  misc_feature: MA Experiment 20000111 PARAMETER Experiment Name: At_42deg_Heat_cDNA_P Parameter: Temperature (deg C) Value: 42 vs. 22
  misc_feature: MA Experiment 20000111 PARAMETER Experiment Name: At_42deg_Heat_cDNA_P Parameter: Timepoint (hr) Value: 6
  misc_feature: MA Experiment 20000111 PARAMETER Experiment Name: At_42deg_Heat_cDNA_P Parameter: Tissue Value: Aerial
  misc_feature: MA Experiment ID: 20000113 Result: Down-regulated in Transcription
  misc_feature: MA Experiment 20000113 PARAMETER Experiment Name: At_42deg_Heat_cDNA_P Parameter: Temperature (deg C) Value: 42 vs. 22
  misc_feature: MA Experiment 20000113 PARAMETER Experiment Name: At_42deg_Heat_cDNA_P Parameter: Timepoint (hr) Value: 8
  misc_feature: MA Experiment 20000113 PARAMETER Experiment Name: At_42deg_Heat_cDNA_P Parameter: Tissue Value: Aerial
  misc_feature: MA Experiment ID: 20000495 Result: Up-regulated in Transcription
  misc_feature: MA Experiment 20000495 PARAMETER Experiment Name: At_Guard_Cells_P Parameter: Harvest Date Value: 8/2/2002
  misc_feature: MA Experiment 20000495 PARAMETER Experiment Name: At_Guard_Cells_P Parameter: Organism Value: A. thaliana
  misc_feature: MA Experiment 20000495 PARAMETER Experiment Name: At_Guard_Cells_P Parameter: Tissue Value: Guard Cells vs. Leaves
attaagacgggatgttgtaattaaacacctaccaacagacaaaatcaaaagataggaagccacgtatgcatatatttaggtgaagcttttgataaaacaaagcgttgggctcttccaaatatcaaaacaagttttttttgtttgttggcttataattcacctgagaaaaacaatatcaatcggctcgttttctctcctcagtgtttcttcagtagtcctgcgagatcgtataagagattcgaaaccctaatctatcaatttgatcctgtccattctctgttattgtttgagaattgtgcaatccgatggggacgatgcaccggagtggtgctcccagaaggacaaatgaaaatgcgaagcttatcataacgacaatcgtgggagtggtgtttggtttttttgttggtatcacattaccattaggttcctttagaaagattagcttaccttcaggccttatgtcatctcttgatgtagccatgtcagatgggaaattgttttctggtggcagatcacctgaagatattggttcaagaaagtctcctaagatatatgttccaaccaatccgcatggtgcagaactacttcctcctgggattatagtggcagaaacagatttctacttgcgccgattatggggtgaacctagtgaagatttgaagaagaagccaaagtatctcgtaacttttacagttggatttgagcagagaaacaacattaatgcagctgttaagaagttttctgaagatttccaaatattgttattccattatgatggccgaacaactgagtgggaccagtttgagtggtctaaaaatgcaatacatatcagtgcaaaaaagcaaacaaaatggtggtatgcaaagagatttttgcatcctgatgttgtctcagcttatgagtatatatttatatgggatgaagatcttggagtcgagcacttcaatgcagataggtgaattacttgtctgaaattgtagttgcagatcagtgacaatctttacaatttttattttaaattttcaggtacgttgagttagttaagaagcatggtttggagatttctcaaccaggcttagagccaaacaacggacttacatgggaaatgacaaagaggagaggtgaccgagatgtccacaaagaaactaaggaaaaaccaggatggtgcagtgatccacatttacctccatgtgctgcgtttgttgagattatggcacctgtattttctagagaagcatggcgatgtgtatggcatatgattcagaatgatcttgttcatggatggggtctcgattttgctctcagacgatgcgttgagcctgctcatgagaagattggtgtggtagattcacagtggattatccatcaagtgattccttcccttggaagtcagggtgagtcggaggaggggaaatctccatggcaaggggtgagggagagatgcagaaacgaatggacgatgttccagaatcgcgtggcagaagctgataaagcatacatggaacaacacaaggtaaaagaataatttgggcctcttcttactctgtctctgtaaatgaagcttacgtttccctgatcaagtgagtgtgaggagagagatctatgtagtcccctatttagtttaaaacatctcagatatatctacattattagctttttacctaatatatttcttc

SEQ ID NO: 42653 - protein, 217 aa, Arabidopsis thaliana
  peptide (1)..(217): Ceres Seq. ID no. 12422281
  misc_feature (81)..(217): Pfam Name: Protein of unknown function (DUF707) Pfam Description: Protein of unknown function (DUF707)
  misc_feature (7)..(217): Homolog of NCBI NO: 34906848 NR Description: P0470A12.1 [Oryza sativa (japonica
  misc_feature (1)..(217): Homolog of NCBI NO: 18408876 NR Description: F12A21.2; protein id: At1g67850.1, supported by
  misc_feature (11)..(217): Homolog of NCBI NO: 14719314 NR Description: putative protein [Oryza sativa]
  misc_feature (1)..(217): Homolog of NCBI NO: 20466346 NR Description: unknown protein [Arabidopsis thaliana]
  misc_feature (1)..(217): Homolog of NCBI NO: 20197601 NR Description: unknown protein [Arabidopsis thaliana]
  misc_feature (1)..(217): Homolog of NCBI NO: 30683843 NR Description: expressed protein [Arabidopsis thaliana]
  misc_feature (7)..(45): Homolog of NCBI NO: 25407018 NR Description: protein T6D22.12 [imported] - Arabidopsis
  misc_feature (44)..(84): Homolog of NCBI NO: 25407018 NR Description: protein T6D22.12 [imported] - Arabidopsis
  misc_feature (81)..(217): Homolog of NCBI NO: 25407018 NR Description: protein T6D22.12 [imported] - Arabidopsis
  misc_feature (1)..(217): Homolog of NCBI NO: 18390845 NR Description: storage protein, putative
MGTMHRSGAPRRTNENAKLIITTIVGVVFGFFVGITLPLGSFRKISLPSGLMSSLDVAMSDGKLFSGGRSPEDIGSRKSPKIYVPTNPHGAELLPPGIIVAETDFYLRRLWGEPSEDLKKKPKYLVTFTVGFEQRNNINAAVKKFSEDFQILLFHYDGRTTEWDQFEWSKNAIHISAKKQTKWWYAKRFLHPDVVSAYEYIFIWDEDLGVEHFNADR

SEQ ID NO: 42654 - protein, 214 aa, Arabidopsis thaliana
  peptide (1)..(214): Ceres Seq. ID no. 12422282
  misc_feature (78)..(214): Pfam Name: Protein of unknown function (DUF707) Pfam Description: Protein of unknown function (DUF707)
  misc_feature (4)..(214): Homolog of NCBI NO: 34906848 NR Description: P0470A12.1 [Oryza sativa (japonica
  misc_feature (1)..(214): Homolog of NCBI NO: 18408876 NR Description: F12A21.2; protein id: At1g67850.1, supported by
  misc_feature (8)..(214): Homolog of NCBI NO: 14719314 NR Description: putative protein [Oryza sativa]
  misc_feature (1)..(214): Homolog of NCBI NO: 20466346 NR Description: unknown protein [Arabidopsis thaliana]
  misc_feature (1)..(214): Homolog of NCBI NO: 20197601 NR Description: unknown protein [Arabidopsis thaliana]
  misc_feature (1)..(214): Homolog of NCBI NO: 30683843 NR Description: expressed protein [Arabidopsis thaliana]
  misc_feature (4)..(42): Homolog of NCBI NO: 25407018 NR Description: protein T6D22.12 [imported] - Arabidopsis
  misc_feature (41)..(81): Homolog of NCBI NO: 25407018 NR Description: protein T6D22.12 [imported] - Arabidopsis
  misc_feature (78)..(214): Homolog of NCBI NO: 25407018 NR Description: protein T6D22.12 [imported] - Arabidopsis
  misc_feature (1)..(214): Homolog of NCBI NO: 18390845 NR Description: storage protein, putative
MHRSGAPRRTNENAKLIITTIVGVVFGFFVGITLPLGSFRKISLPSGLMSSLDVAMSDGKLFSGGRSPEDIGSRKSPKIYVPTNPHGAELLPPGIIVAETDFYLRRLWGEPSEDLKKKPKYLVTFTVGFEQRNNINAAVKKFSEDFQILLFHYDGRTTEWDQFEWSKNAIHISAKKQTKWWYAKRFLHPDVVSAYEYIFIWDEDLGVEHFNADR

SEQ ID NO: 42655 - protein, 166 aa, Arabidopsis thaliana
  peptide (1)..(166): Ceres Seq. ID no. 12422283
  misc_feature (30)..(166): Pfam Name: Protein of unknown function (DUF707) Pfam Description: Protein of unknown function (DUF707)
  misc_feature (30)..(166): Homolog of NCBI NO: 22331371 NR Description: unknown protein
  misc_feature (1)..(166): Homolog of NCBI NO: 34906848 NR Description: P0470A12.1 [Oryza sativa (japonica
  misc_feature (1)..(166): Homolog of NCBI NO: 18408876 NR Description: F12A21.2; protein id: At1g67850.1, supported by
  misc_feature (1)..(166): Homolog of NCBI NO: 14719314 NR Description: putative protein [Oryza sativa]
  misc_feature (1)..(166): Homolog of NCBI NO: 20466346 NR Description: unknown protein [Arabidopsis thaliana]
  misc_feature (1)..(166): Homolog of NCBI NO: 20197601 NR Description: unknown protein [Arabidopsis thaliana]
  misc_feature (1)..(166): Homolog of NCBI NO: 30683843 NR Description: expressed protein [Arabidopsis thaliana]
  misc_feature (1)..(33): Homolog of NCBI NO: 25407018 NR Description: protein T6D22.12 [imported] - Arabidopsis
  misc_feature (30)..(166): Homolog of NCBI NO: 25407018 NR Description: protein T6D22.12 [imported] - Arabidopsis
  misc_feature (1)..(166): Homolog of NCBI NO: 18390845 NR Description: storage protein, putative
MSSLDVAMSDGKLFSGGRSPEDIGSRKSPKIYVPTNPHGAELLPPGIIVAETDFYLRRLWGEPSEDLKKKPKYLVTFTVGFEQRNNINAAVKKFSEDFQILLFHYDGRTTEWDQFEWSKNAIHISAKKQTKWWYAKRFLHPDVVSAYEYIFIWDEDLGVEHFNADR

SEQ ID NO: 42656 - DNA, 1720 bp, Arabidopsis thaliana
  misc_feature (1)..(1720): Ceres Seq. ID no. 12580003
  misc_feature: MA Experiment ID: 108668 Result: Up-regulated in Transcription
  misc_feature: MA Experiment 108668 PARAMETER Experiment Name: At_2mM_SA_cDNA_P Parameter: Plant Line Value: WS
  misc_feature: MA Experiment 108668 PARAMETER Experiment Name: At_2mM_SA_cDNA_P Parameter: Timepoint (hr) Value: 6
  misc_feature: MA Experiment 108668 PARAMETER Experiment Name: At_2mM_SA_cDNA_P Parameter: Treatment Value: 2mM SA vs. No Treatment
  misc_feature: MA Experiment ID: 20000182 Result: Up-regulated in Transcription
  misc_feature: MA Experiment 20000182 PARAMETER Experiment Name: At_2mM_SA_P Parameter: Age (day) Value: 14
  misc_feature: MA Experiment 20000182 PARAMETER Experiment Name: At_2mM_SA_P Parameter: Organism Value: A. thaliana
  misc_feature: MA Experiment 20000182 PARAMETER Experiment Name: At_2mM_SA_P Parameter: Plant Line Value: WS
  misc_feature: MA Experiment 20000182 PARAMETER Experiment Name: At_2mM_SA_P Parameter: Timepoint (hr) Value: 6
  misc_feature: MA Experiment 20000182 PARAMETER Experiment Name: At_2mM_SA_P Parameter: Tissue Value: Aerial
  misc_feature: MA Experiment 20000182 PARAMETER Experiment Name: At_2mM_SA_P Parameter: Treatment Value: 2mM SA vs. No Treatment
  misc_feature: MA Experiment ID: 20000184 Result: Down-regulated in Transcription
  misc_feature: MA Experiment 20000184 PARAMETER Experiment Name: At_Shoots__P Parameter: Age (day) Value: 7
  misc_feature: MA Experiment 20000184 PARAMETER Experiment Name: At_Shoots__P Parameter: Tissue Value: Shoots vs. Whole Plant
  misc_feature: MA Experiment ID: 20000227 Result: Down-regulated in Transcription
  misc_feature: MA Experiment 20000227 PARAMETER Experiment Name: At_Root-Tips-vs-Tops_P Parameter: Tissue Value: Root Tips vs. Root Tops
  misc_feature: MA Experiment ID: 20000234 Result: Down-regulated in Transcription
  misc_feature: MA Experiment 20000234 PARAMETER Experiment Name: At_Siliques_P Parameter: Age (day) Value: 21
  misc_feature: MA Experiment 20000234 PARAMETER Experiment Name: At_Siliques_P Parameter: Organism Value: A. thaliana
  misc_feature: MA Experiment 20000234 PARAMETER Experiment Name: At_Siliques_P Parameter: Plant Line Value: WS
  misc_feature: MA Experiment 20000234 PARAMETER Experiment Name: At_Siliques_P Parameter: Tissue Value: Less Than 5mm Siliques vs. Whole Plant
  misc_feature: MA Experiment ID: 20000235 Result: Down-regulated in Transcription
  misc_feature: MA Experiment 20000235 PARAMETER Experiment Name: At_Siliques_P Parameter: Age (day) Value: 21
  misc_feature: MA Experiment 20000235 PARAMETER Experiment Name: At_Siliques_P Parameter: Organism Value: A. thaliana
  misc_feature: MA Experiment 20000235 PARAMETER Experiment Name: At_Siliques_P Parameter: Plant Line Value: WS
  misc_feature: MA Experiment 20000235 PARAMETER Experiment Name: At_Siliques_P Parameter: Tissue Value: 5-10mm Siliques vs. Whole Plant
  misc_feature: MA Experiment ID: 20000265 Result: Down-regulated in Transcription
  misc_feature: MA Experiment 20000265 PARAMETER Experiment Name: At_Open_Flower_P Parameter: Age (day) Value: 21
  misc_feature: MA Experiment 20000265 PARAMETER Experiment Name: At_Open_Flower_P Parameter: Plant Line Value: WS
  misc_feature: MA Experiment 20000265 PARAMETER Experiment Name: At_Open_Flower_P Parameter: Tissue Value: Closed Flower vs. Whole Plant
  misc_feature: MA Experiment ID: 20001560 Result: Down-regulated in Transcription
  misc_feature: MA Experiment 20001560 PARAMETER Experiment Name: At_Drought_Soil_Dry_P Parameter: Age (day) Value: 28
  misc_feature: MA Experiment 20001560 PARAMETER Experiment Name: At_Drought_Soil_Dry_P Parameter: Organism Value: A. thaliana
  misc_feature: MA Experiment 20001560 PARAMETER Experiment Name: At_Drought_Soil_Dry_P Parameter: Plant Line Value: WS
  misc_feature: MA Experiment 20001560 PARAMETER Experiment Name: At_Drought_Soil_Dry_P Parameter: Post Timepoint (hr) Value: None
  misc_feature: MA Experiment 20001560 PARAMETER Experiment Name: At_Drought_Soil_Dry_P Parameter: Post-Treatment Value: None
  misc_feature: MA Experiment 20001560 PARAMETER Experiment Name: At_Drought_Soil_Dry_P Parameter: Timepoint (day) Value: 14
  misc_feature: MA Experiment 20001560 PARAMETER Experiment Name: At_Drought_Soil_Dry_P Parameter: Treatment Value: Drought vs. No Drought
attcattcgtcttcagtcttccatttcaacaaatccttaatctgatctcacacacggcgagacacacatatagaatagagatagacagcgactctgatcgcgtaaagccacatgctttttatacaaactctacccaaataccaagtttttttaatctcccatttctgaatccttttctctctctctctctcgattctagcttcatcgctgttccaaatttaggaagtttctgagaaacaggtcacaggtctgtcttacatagttacattgatgggttgctcctggttatcgtgtcacaggagagaagctacagaagttgatggagaaatcgcagcgatagacaatgtaaagatatacaaatatagagagatacgtcaggccactgatgatttcagtgctgaaaataaaattggagaaggagggtttggttctgtgtacaagggctgtcttaaagatggaaaactcgcggctatcaaagtcctctcggctgagtcaagacaaggtgtaaaagaattcttgactgagatcaatgtgatatcagaaatacagcatgagaatttggttaagttgtatggatgctgcgtggaggggaatcataggattcttgtttacaatttccttgagaacaatagtcttgataagacgcttctagctgggggctacactcgtagtgggatacagtttgattggagtagtcgggccaatatttgtgttggggttgctaaaggtcttgcctttcttcatgaggaagtacgcccacacataattcacagagatatcaaagcaagcaacattctacttgacaaatatctatcccccaagatctctgattttggacttgctagacttatgccacctaacatgactcatgttagcactcgtgtcgcgggtacaattggttatttagcaccagagtatgcggttaggggacagttgacgcgtaaagctgatatatacagctttggagtccttctgatggagatagtcagtggaagaagtaacaaaaacacccgattacccactgagtatcaatatcttctggaaagagcttgggaactttatgagcggaatgagctcgtggatcttgttgattcagggttaaatggagtgtttgacgcagaggaagcttgtcggtacctaaaaattggtcttttgtgcacacaagacagtcccaagctaagaccaagtatgtccaccgtagtgaggttgttaacaggggagaaggatatagactacaagaaaataagcagaccgggtttgatttctgatttcatggatttgaaagtgagaggacctgtggcgacgaagacagagcaagtgaacagacaaaactacacaaacccttcttcttcgtctaatggctcatctagagatcactcaaatgcttactcatcaggggcttcatcagctaatgctggtaatacattcagcagtaccatatagaaagaaagaaaaaacctttttaaaatttttgctttttgtttttctgtttttgagatgtaaataagaaaaaagagtttgatgtttctgcagtctctcttctttttttctcgtccatggtttcaaacagaggttttctgttagttgctgaatccatagctgactgcagaaaaggcggtctctgcctcgctcttgttcaagtcagtcttcagttgcaaacagagagatttgagtgttgtatgtatgtatgtaaatatatttatagattgaagttgaatct

SEQ ID NO: 42657 - protein, 390 aa, Arabidopsis thaliana
  peptide (1)..(390): Ceres Seq. ID no. 12580004
  misc_feature (10)..(388): Homolog of NCBI NO: 6403501 NR Description: putative protein kinase [Arabidopsis thaliana]
  misc_feature (10)..(388): Homolog of NCBI NO: 18398327 NR Description: putative receptor ser/thr protein kinase
  misc_feature (10)..(388): Homolog of NCBI NO: 5923666 NR Description: putative receptor ser/thr protein kinase
  misc_feature (25)..(363): Homolog of NCBI NO: 38344039 NR Description: OSJNBb0017I01.6 [Oryza sativa (japonica
  misc_feature (58)..(375): Homolog of NCBI NO: 5679843 NR Description: Putitive Ser/Thr protein kinase
  misc_feature (1)..(165): Homolog of NCBI NO: 5852099 NR Description: zwh22.1 [Oryza sativa (indica cultivar-group)]
  misc_feature (170)..(384): Homolog of NCBI NO: 5852099 NR Description: zwh22.1 [Oryza sativa (indica cultivar-group)]
  misc_feature (1)..(375): Homolog of NCBI NO: 38344329 NR Description: OSJNBa0058K23.11 [Oryza sativa (japonica
  misc_feature (1)..(390): Homolog of NCBI NO: 25287648 NR Description: hypothetical protein F19K19.4 [imported] -
  misc_feature (1)..(390): Homolog of NCBI NO: 18394385 NR Description: receptor-like serine/threonine kinase, putative
MGCSWLSCHRREATEVDGEIAAIDNVKIYKYREIRQATDDFSAENKIGEGGFGSVYKGCLKDGKLAAIKVLSAESRQGVKEFLTEINVISEIQHENLVKLYGCCVEGNHRILVYNFLENNSLDKTLLAGGYTRSGIQFDWSSRANICVGVAKGLAFLHEEVRPHIIHRDIKASNILLDKYLSPKISDFGLARLMPPNMTHVSTRVAGTIGYLAPEYAVRGQLTRKADIYSFGVLLMEIVSGRSNKNTRLPTEYQYLLERAWELYERNELVDLVDSGLNGVFDAEEACRYLKIGLLCTQDSPKLRPSMSTVVRLLTGEKDIDYKKISRPGLISDFMDLKVRGPVATKTEQVNRQNYTNPSSSSNGSSRDHSNAYSSGASSANAGNTFSSTI

SEQ ID NO: 42658 - protein, 197 aa, Arabidopsis thaliana
  peptide (1)..(197): Ceres Seq. ID no. 12580005
  misc_feature (1)..(124): Homolog of NCBI NO: 15222473 NR Description: leucine-rich repeat transmembrane protein kinase,
  misc_feature (1)..(195): Homolog of NCBI NO: 6403501 NR Description: putative protein kinase [Arabidopsis thaliana]
  misc_feature (1)..(195): Homolog of NCBI NO: 18398327 NR Description: putative receptor ser/thr protein kinase
  misc_feature (1)..(195): Homolog of NCBI NO: 5923666 NR Description: putative receptor ser/thr protein kinase
  misc_feature (1)..(170): Homolog of NCBI NO: 38344039 NR Description: OSJNBb0017I01.6 [Oryza sativa (japonica
  misc_feature (1)..(182): Homolog of NCBI NO: 5679843 NR Description: Putitive Ser/Thr protein kinase
  misc_feature (1)..(191): Homolog of NCBI NO: 5852099 NR Description: zwh22.1 [Oryza sativa (indica cultivar-group)]
  misc_feature (1)..(182): Homolog of NCBI NO: 38344329 NR Description: OSJNBa0058K23.11 [Oryza sativa (japonica
  misc_feature (1)..(197): Homolog of NCBI NO: 25287648 NR Description: hypothetical protein F19K19.4 [imported] -
  misc_feature (1)..(197): Homolog of NCBI NO: 18394385 NR Description: receptor-like serine/threonine kinase, putative
MPPNMTHVSTRVAGTIGYLAPEYAVRGQLTRKADIYSFGVLLMEIVSGRSNKNTRLPTEYQYLLERAWELYERNELVDLVDSGLNGVFDAEEACRYLKIGLLCTQDSPKLRPSMSTVVRLLTGEKDIDYKKISRPGLISDFMDLKVRGPVATKTEQVNRQNYTNPSSSSNGSSRDHSNAYSSGASSANAGNTFSSTI

SEQ ID NO: 42659 - DNA, 1169 bp, Arabidopsis thaliana
  misc_feature (1)..(1169): Ceres Seq. ID no. 12338692
  misc_feature: MA Experiment ID: 108434 Result: Up-regulated in Transcription
  misc_feature: MA Experiment 108434 PARAMETER Experiment Name: At_Root_Tips_cDNA_P Parameter: Tissue Value: Root Tips
  misc_feature: MA Experiment ID: 108577 Result: Down-regulated in Transcription
  misc_feature: MA Experiment 108577 PARAMETER Experiment Name: At_42deg_Heat_cDNA_P Parameter: Temperature (deg C) Value: 42 vs. 22
  misc_feature: MA Experiment 108577 PARAMETER Experiment Name: At_42deg_Heat_cDNA_P Parameter: Timepoint (hr) Value: 6
  misc_feature: MA Experiment 108577 PARAMETER Experiment Name: At_42deg_Heat_cDNA_P Parameter: Tissue Value: Aerial
  misc_feature: MA Experiment ID: 20000224 Result: Down-regulated in Transcription
agatcttttatcactttcttcttcccggagaaaatttggccctaaatcactttcccgggaaaatcaaactctggggaaagagttgaaacaatgtcacaaggcgatacagtaccgcttcatccatcgtctcaatcagacattgacgagatcgagaatctgattaacgaaagcgtccaatcaggtcccggaaccgttctcgccgctcgtccaccgagcccaaccagaccttcgattccagtatcttcttcttcttcttcttctccgtttatgcaatcgaatcttccaccgcttcatccgtcgtcatcagctcagaaagtgacacatgtccccgttcctccgcctcttccggcggtaagtaactccagcaatttccaaggagcgagtgcttttggatctccgcctaatacgttgacggagcctgtgtgggatactgtgaagcgagatctgtctcggatcgtgagtaatttgaagcttgtggtgtttcctaatccgtatagggaagatcctgggaaggctcttagagattgggatctttggggtccgtttttcttcattgtgttcttgggtcttactctttcatggtcagcttccgtcaagaagtccgaggtatttgcagtggcatttgcactattagcagccggggcggtgatccttacactaaacgtgcttctcctgggtggacatataatcttcttccaaagcttgagccttctaggttactgtttatttccgctagacgttggagccgtgatctgcatgttgaaagacaatgtgatactgaagatggtggttgtgtctgtaacccttgcctggagctcatgggctgcttacccttttatgagctcagcggttaacccaagaagaaaagcactcgctctataccccgtcttcctcatgtatgtgtcagtcggttttctcatcatagccatcaattgaatccccaattttgagaagaaaaagggaatcatcacaggtattctcaggaatcagcttggatagaaatttttcatacatacacaaaccatcctgagttctgatgatcatgtataaacatgttttgttacccttttttgtgggtttggttaaaaagaagatcatcatttgtatgtgccccgctctatctgcattaagcttacatttatctttttggccataaatacaattttttt

SEQ ID NO: 42660 - protein, 281 aa, Arabidopsis thaliana
  peptide (1)..(281): Ceres Seq. ID no. 12338693
  misc_feature (115)..(262): Pfam Name: Yip1 domain Pfam Description: Yip1 domain
  misc_feature (105)..(278): Homolog of NCBI NO: 26337383 NR Description: unnamed protein product [Mus musculus]
  misc_feature (105)..(278): Homolog of NCBI NO: 28603852 NR Description: hypothetical protein MGC21416 [Homo sapiens]
  misc_feature (98)..(281): Homolog of NCBI NO: 24581631 NR Description: CG3652-PA [Drosophila melanogaster]
  misc_feature (105)..(279): Homolog of NCBI NO: 39580726 NR Description: Hypothetical protein CBG08721 [Caenorhabditis
  misc_feature (85)..(279): Homolog of NCBI NO: 17509487 NR Description: Yeast YIP1 protein like [Caenorhabditis elegans]
  misc_feature (2)..(269): Homolog of NCBI NO: 34908612 NR Description: P0677H08.6 [Oryza sativa (japonica
  misc_feature (1)..(281): Homolog of NCBI NO: 18417560 NR Description: hypothetical protein common family
  misc_feature (1)..(281): Homolog of NCBI NO: 7486761 NR Description: hypothetical protein F9N11.110 - Arabidopsis
  misc_feature (1)..(281): Homolog of NCBI NO: 21553537 NR Description: unknown [Arabidopsis thaliana]
  misc_feature (1)..(281): Homolog of NCBI NO: 18398861 NR Description: Expressed protein
MSQGDTVPLHPSSQSDIDEIENLINESVQSGPGTVLAARPPSPTRPSIPVSSSSSSSPFMQSNLPPLHPSSSAQKVTHVPVPPPLPAVSNSSNFQGASAFGSPPNTLTEPVWDTVKRDLSRIVSNLKLVVFPNPYREDPGKALRDWDLWGPFFFIVFLGLTLSWSASVKKSEVFAVAFALLAAGAVILTLNVLLLGGHIIFFQSLSLLGYCLFPLDVGAVICMLKDNVILKMVVVSVTLAWSSWAAYPFMSSAVNPRRKALALYPVFLMYVSVGFLIIAIN

SEQ ID NO: 42661 - protein, 222 aa, Arabidopsis thaliana
  peptide (1)..(222): Ceres Seq. ID no. 12338694
  misc_feature (56)..(203): Pfam Name: Yip1 domain Pfam Description: Yip1 domain
  misc_feature (46)..(219): Homolog of NCBI NO: 26337383 NR Description: unnamed protein product [Mus musculus]
  misc_feature (46)..(219): Homolog of NCBI NO: 28603852 NR Description: hypothetical protein MGC21416 [Homo sapiens]
  misc_feature (39)..(222): Homolog of NCBI NO: 24581631 NR Description: CG3652-PA [Drosophila melanogaster]
  misc_feature (46)..(220): Homolog of NCBI NO: 39580726 NR Description: Hypothetical protein CBG08721 [Caenorhabditis
  misc_feature (26)..(220): Homolog of NCBI NO: 17509487 NR Description: Yeast YIP1 protein like [Caenorhabditis elegans]
  misc_feature (1)..(210): Homolog of NCBI NO: 34908612 NR Description: P0677H08.6 [Oryza sativa (japonica
  misc_feature (1)..(222): Homolog of NCBI NO: 18417560 NR Description: hypothetical protein common family
  misc_feature (1)..(222): Homolog of NCBI NO: 7486761 NR Description: hypothetical protein F9N11.110 - Arabidopsis
  misc_feature (1)..(222): Homolog of NCBI NO: 21553537 NR Description: unknown [Arabidopsis thaliana]
  misc_feature (1)..(222): Homolog of NCBI NO: 18398861 NR Description: Expressed protein
MQSNLPPLHPSSSAQKVTHVPVPPPLPAVSNSSNFQGASAFGSPPNTLTEPVWDTVKRDLSRIVSNLKLVVFPNPYREDPGKALRDWDLWGPFFFIVFLGLTLSWSASVKKSEVFAVAFALLAAGAVILTLNVLLLGGHIIFFQSLSLLGYCLFPLDVGAVICMLKDNVILKMVVVSVTLAWSSWAAYPFMSSAVNPRRKALALYPVFLMYVSVGFLIIAIN

SEQ ID NO: 42662 - DNA, 741 bp, Arabidopsis thaliana
  misc_feature (1)..(741): Ceres Seq. ID no. 12482601
  misc_feature: MA Experiment ID: 108577 Result: Down-regulated in Transcription
  misc_feature: MA Experiment 108577 PARAMETER Experiment Name: At_42deg_Heat_cDNA_P Parameter: Temperature (deg C) Value: 42 vs. 22
  misc_feature: MA Experiment 108577 PARAMETER Experiment Name: At_42deg_Heat_cDNA_P Parameter: Timepoint (hr) Value: 6
  misc_feature: MA Experiment 108577 PARAMETER Experiment Name: At_42deg_Heat_cDNA_P Parameter: Tissue Value: Aerial
  misc_feature: MA Experiment ID: 20000113 Result: Down-regulated in Transcription
  misc_feature: MA Experiment 20000113 PARAMETER Experiment Name: At_42deg_Heat_cDNA_P Parameter: Temperature (deg C) Value: 42 vs. 22
  misc_feature: MA Experiment 20000113 PARAMETER Experiment Name: At_42deg_Heat_cDNA_P Parameter: Timepoint (hr) Value: 8
  misc_feature: MA Experiment 20000113 PARAMETER Experiment Name: At_42deg_Heat_cDNA_P Parameter: Tissue Value: Aerial
  misc_feature: MA Experiment ID: 20000179 Result: Up-regulated in Transcription
  misc_feature: MA Experiment 20000179 PARAMETER Experiment Name: At_Germinating_Seeds_P Parameter: Age (hr) Value: 6 vs. 0
  misc_feature: MA Experiment 20000179 PARAMETER Experiment Name: At_Germinating_Seeds_P Parameter: Tissue Value: Germinating Seeds
  misc_feature: MA Experiment ID: 20000185 Result: Up-regulated in Transcription
  misc_feature: MA Experiment 20000185 PARAMETER Experiment Name: At_Roots__P Parameter: Age (day) Value: 7 vs. 21
  misc_feature: MA Experiment 20000185 PARAMETER Experiment Name: At_Roots__P Parameter: Organism Value: A. thaliana
  misc_feature: MA Experiment 20000185 PARAMETER Experiment Name: At_Roots__P Parameter: Tissue Value: Roots vs. Whole Plant
  misc_feature: MA Experiment ID: 20000234 Result: Up-regulated in Transcription
  misc_feature: MA Experiment 20000234 PARAMETER Experiment Name: At_Siliques_P Parameter: Age (day) Value: 21
  misc_feature: MA Experiment 20000234 PARAMETER Experiment Name: At_Siliques_P Parameter: Organism Value: A. thaliana
  misc_feature: MA Experiment 20000234 PARAMETER Experiment Name: At_Siliques_P Parameter: Plant Line Value: WS
  misc_feature: MA Experiment 20000234 PARAMETER Experiment Name: At_Siliques_P Parameter: Tissue Value: Less Than 5mm Siliques vs. Whole Plant
  misc_feature: MA Experiment ID: 20000235 Result: Up-regulated in Transcription
  misc_feature: MA Experiment 20000235 PARAMETER Experiment Name: At_Siliques_P Parameter: Age (day) Value: 21
  misc_feature: MA Experiment 20000235 PARAMETER Experiment Name: At_Siliques_P Parameter: Organism Value: A. thaliana
  misc_feature: MA Experiment 20000235 PARAMETER Experiment Name: At_Siliques_P Parameter: Plant Line Value: WS
  misc_feature: MA Experiment 20000235 PARAMETER Experiment Name: At_Siliques_P Parameter: Tissue Value: 5-10mm Siliques vs. Whole Plant
  misc_feature: MA Experiment ID: 20000495 Result: Up-regulated in Transcription
  misc_feature: MA Experiment 20000495 PARAMETER Experiment Name: At_Guard_Cells_P Parameter: Harvest Date Value: 8/2/2002
  misc_feature: MA Experiment 20000495 PARAMETER Experiment Name: At_Guard_Cells_P Parameter: Organism Value: A. thaliana
  misc_feature: MA Experiment 20000495 PARAMETER Experiment Name: At_Guard_Cells_P Parameter: Tissue Value: Guard Cells vs. Leaves
gttttcacttttcgatttgagaaaaaaaaaaacgatcacgaagatggcgaaagcaagctttattctactcggaactctcttcctcttcggagccatagcttcaattcaggcaaaagaagatctcaaggaggttactcacaaggtttacttcgatgtagagatcgacggcaaatccgctggtcgcgttgttataggactatttggcaaggcagttcctaaaactgcagaaaacttcagagctttgtgcacaggggagaaaggtgtagggaagagtgggaaacctctacactacaagggaagcaagttccatcgaatcattcccagctttatgatccagggaggtgacttcacgcatgggaacggtatgggtggagaatcaatctatggtcagaagtttgctgatgagaacttcaagctgaagcacactggaccagacacaaatggttcgcagttttttatcacaacggtgacaacaagctggttagatggaaggcatgtggtgtttgggaaagtggtgcaaggaatggatgtagtttataagattgaagctgagggcaaacaaagcggaactcctaagagcaaagtcgtaattgcagacagtggagaacttcctctctaagaatagcattttaaagttactcttacgagttagttgtaatctaaacacgtcccaaatgctacaagaacagaatggtgtcactggactctgaaatttcgttttcttgcgtaacagacttttcc

SEQ ID NO: 42663 - protein, 205 aa, Arabidopsis thaliana
  peptide (1)..(205): Ceres Seq. ID no. 12482602
  misc_feature (36)..(205): Homolog of NCBI NO: 11270308 NR Description: peptidylprolyl isomerase (EC 5.2.1.8) F27K19.100
  misc_feature (47)..(203): Homolog of NCBI NO: 1480465 NR Description: cyclophilin Ovcyp-2
  misc_feature (47)..(203): Homolog of NCBI NO: 863016 NR Description: cyclophilin
  misc_feature (47)..(203): Homolog of NCBI NO: 17566266 NR Description: CYcloPhilin family CYP-7 (18.4 kD) (cyp-7)
  misc_feature (17)..(203): Homolog of NCBI NO: 5731960 NR Description: cyclophilin B [Dictyostelium discoideum]
  misc_feature (36)..(205): Homolog of NCBI NO: 18410386 NR Description: cyclophilin-like protein
  misc_feature (15)..(205): Homolog of NCBI NO: 15237739 NR Description: cyclophilin ROC7
  misc_feature (15)..(205): Homolog of NCBI NO: 21554007 NR Description: cyclophilin [Arabidopsis thaliana]
  misc_feature (15)..(205): Homolog of NCBI NO: 11270326 NR Description: peptidylprolyl isomerase (EC 5.2.1.8) CYP5
  misc_feature (15)..(205): Homolog of NCBI NO: 15227674 NR Description: cyclophilin
FSLFDLRKKKTITKMAKASFILLGTLFLFGAIASIQAKEDLKEVTHKVYFDVEIDGKSAGRVVIGLFGKAVPKTAENFRALCTGEKGVGKSGKPLHYKGSKFHRIIPSFMIQGGDFTHGNGMGGESIYGQKFADENFKLKHTGPDTNGSQFFITTVTTSWLDGRHVVFGKVVQGMDVVYKIEAEGKQSGTPKSKVVIADSGELPL

SEQ ID NO: 42664 - protein, 191 aa, Arabidopsis thaliana
  peptide (1)..(191): Ceres Seq. ID no. 12482603
  misc_feature (22)..(191): Homolog of NCBI NO: 11270308 NR Description: peptidylprolyl isomerase (EC 5.2.1.8) F27K19.100
  misc_feature (33)..(189): Homolog of NCBI NO: 1480465 NR Description: cyclophilin Ovcyp-2
  misc_feature (33)..(189): Homolog of NCBI NO: 863016 NR Description: cyclophilin
  misc_feature (33)..(189): Homolog of NCBI NO: 17566266 NR Description: CYcloPhilin family CYP-7 (18.4 kD) (cyp-7)
  misc_feature (3)..(189): Homolog of NCBI NO: 5731960 NR Description: cyclophilin B [Dictyostelium discoideum]
  misc_feature (22)..(191): Homolog of NCBI NO: 18410386 NR Description: cyclophilin-like protein
  misc_feature (1)..(191): Homolog of NCBI NO: 15237739 NR Description: cyclophilin ROC7
  misc_feature (1)..(191): Homolog of NCBI NO: 21554007 NR Description: cyclophilin [Arabidopsis thaliana]
  misc_feature (1)..(191): Homolog of NCBI NO: 11270326 NR Description: peptidylprolyl isomerase (EC 5.2.1.8) CYP5
  misc_feature (1)..(191): Homolog of NCBI NO: 15227674 NR Description: cyclophilin
MAKASFILLGTLFLFGAIASIQAKEDLKEVTHKVYFDVEIDGKSAGRVVIGLFGKAVPKTAENFRALCTGEKGVGKSGKPLHYKGSKFHRIIPSFMIQGGDFTHGNGMGGESIYGQKFADENFKLKHTGPDTNGSQFFITTVTTSWLDGRHVVFGKVVQGMDVVYKIEAEGKQSGTPKSKVVIADSGELPL

SEQ ID NO: 42665 - DNA, 1856 bp, Arabidopsis thaliana
  misc_feature (1)..(1856): Ceres Seq. ID no. 12605224
  misc_feature: MA Experiment ID: 108434 Result: Down-regulated in Transcription
  misc_feature: MA Experiment 108434 PARAMETER Experiment Name: At_Root_Tips_cDNA_P Parameter: Tissue Value: Root Tips
  misc_feature: MA Experiment ID: 108463 Result: Up-regulated in Transcription
  misc_feature: MA Experiment 108463 PARAMETER Experiment Name: At_Germinating_Seeds_cDNA_P Parameter: Age (day) Value: 3 vs. 0
  misc_feature: MA Experiment 108463 PARAMETER Experiment Name: At_Germinating_Seeds_cDNA_P Parameter: Tissue Value: Germinating Seeds
  misc_feature: MA Experiment ID: 108464 Result: Up-regulated in Transcription
  misc_feature: MA Experiment 108464 PARAMETER Experiment Name: At_Germinating_Seeds_cDNA_P Parameter: Age (day) Value: 4 vs. 0
  misc_feature: MA Experiment 108464 PARAMETER Experiment Name: At_Germinating_Seeds_cDNA_P Parameter: Tissue Value: Germinating Seeds
  misc_feature: MA Experiment ID: 108473 Result: Down-regulated in Transcription
  misc_feature: MA Experiment 108473 PARAMETER Experiment Name: At_Drought_Flowers_cDNA_P Parameter: Timepoint (hr) Value: 7 d
  misc_feature: MA Experiment 108473 PARAMETER Experiment Name: At_Drought_Flowers_cDNA_P Parameter: Tissue Value: Flower
  misc_feature: MA Experiment 108473 PARAMETER Experiment Name: At_Drought_Flowers_cDNA_P Parameter: Treatment Value: Drought vs. No Drought
  misc_feature: MA Experiment ID: 108488 Result: Down-regulated in Transcription
  misc_feature: MA Experiment ID: 20000117 Result: Up-regulated in Transcription
  misc_feature: MA Experiment 20000117 PARAMETER Experiment Name: At_100uM_ABA_Mutants_cDNA_P Parameter: Plant Line Value: Columbia
  misc_feature: MA Experiment 20000117 PARAMETER Experiment Name: At_100uM_ABA_Mutants_cDNA_P Parameter: Timepoint (hr) Value: 6
  misc_feature: MA Experiment 20000117 PARAMETER Experiment Name: At_100uM_ABA_Mutants_cDNA_P Parameter: Tissue Value: Aerial
  misc_feature: MA Experiment 20000117 PARAMETER Experiment Name: At_100uM_ABA_Mutants_cDNA_P Parameter: Treatment Value: 100uM ABA vs. No Treatment
  misc_feature: MA Experiment ID: 20000182 Result: Down-regulated in Transcription
  misc_feature: MA Experiment 20000182 PARAMETER Experiment Name: At_2mM_SA_P Parameter: Age (day) Value: 14
  misc_feature: MA Experiment 20000182 PARAMETER Experiment Name: At_2mM_SA_P Parameter: Organism Value: A. thaliana
  misc_feature: MA Experiment 20000182 PARAMETER Experiment Name: At_2mM_SA_P Parameter: Plant Line Value: WS
  misc_feature: MA Experiment 20000182 PARAMETER Experiment Name: At_2mM_SA_P Parameter: Timepoint (hr) Value: 6
  misc_feature: MA Experiment 20000182 PARAMETER Experiment Name: At_2mM_SA_P Parameter: Tissue Value: Aerial
  misc_feature: MA Experiment 20000182 PARAMETER Experiment Name: At_2mM_SA_P Parameter: Treatment Value: 2mM SA vs. No Treatment
  misc_feature: MA Experiment ID: 20000184 Result: Up-regulated in Transcription
  misc_feature: MA Experiment 20000184 PARAMETER Experiment Name: At_Shoots__P Parameter: Age (day) Value: 7
  misc_feature: MA Experiment 20000184 PARAMETER Experiment Name: At_Shoots__P Parameter: Tissue Value: Shoots vs. Whole Plant
  misc_feature: MA Experiment ID: 20000185 Result: Down-regulated in Transcription
  misc_feature: MA Experiment 20000185 PARAMETER Experiment Name: At_Roots__P Parameter: Age (day) Value: 7 vs. 21
  misc_feature: MA Experiment 20000185 PARAMETER Experiment Name: At_Roots__P Parameter: Organism Value: A. thaliana
  misc_feature: MA Experiment 20000185 PARAMETER Experiment Name: At_Roots__P Parameter: Tissue Value: Roots vs. Whole Plant
  misc_feature: MA Experiment ID: 20000224 Result: Down-regulated in Transcription
  misc_feature: MA Experiment ID: 20000265 Result: Down-regulated in Transcription
  misc_feature: MA Experiment 20000265 PARAMETER Experiment Name: At_Open_Flower_P Parameter: Age (day) Value: 21
  misc_feature: MA Experiment 20000265 PARAMETER Experiment Name: At_Open_Flower_P Parameter: Plant Line Value: WS
  misc_feature: MA Experiment 20000265 PARAMETER Experiment Name: At_Open_Flower_P Parameter: Tissue Value: Closed Flower vs. Whole Plant
  misc_feature: MA Experiment ID: 20000267 Result: Up-regulated in Transcription
  misc_feature: MA Experiment 20000267 PARAMETER Experiment Name: At_Drought_P Parameter: Age (day) Value: 7
  misc_feature: MA Experiment 20000267 PARAMETER Experiment Name: At_Drought_P Parameter: Organism Value: A. thaliana
  misc_feature: MA Experiment 20000267 PARAMETER Experiment Name: At_Drought_P Parameter: Plant Line Value: WS
  misc_feature: MA Experiment 20000267 PARAMETER Experiment Name: At_Drought_P Parameter: Timepoint (hr) Value: 6
  misc_feature: MA Experiment 20000267 PARAMETER Experiment Name: At_Drought_P Parameter: Tissue Value: Whole Plant
  misc_feature: MA Experiment 20000267 PARAMETER Experiment Name: At_Drought_P Parameter: Treatment Value: Drought vs. No Drought
  misc_feature: MA Experiment ID: 20000268 Result: Down-regulated in Transcription
  misc_feature: MA Experiment 20000268 PARAMETER Experiment Name: At_100mM_NaCl__P Parameter: Age (day) Value: 14
  misc_feature: MA Experiment 20000268 PARAMETER Experiment Name: At_100mM_NaCl__P Parameter: Organism Value: A. thaliana
  misc_feature: MA Experiment 20000268 PARAMETER Experiment Name: At_100mM_NaCl__P Parameter: Plant Line Value: WS
  misc_feature: MA Experiment 20000268 PARAMETER Experiment Name: At_100mM_NaCl__P Parameter: Timepoint (hr) Value: 6
  misc_feature: MA Experiment 20000268 PARAMETER Experiment Name: At_100mM_NaCl__P Parameter: Tissue Value: Whole Plant
  misc_feature: MA Experiment 20000268 PARAMETER Experiment Name: At_100mM_NaCl__P Parameter: Treatment Value: 100mM NaCl vs. No Treatment
  misc_feature: MA Experiment ID: 20000308 Result: Down-regulated in Transcription
  misc_feature: MA Experiment 20000308 PARAMETER Experiment Name: At_100mM_NaCl__P Parameter: Age (day) Value: 17
  misc_feature: MA Experiment 20000308 PARAMETER Experiment Name: At_100mM_NaCl__P Parameter: Organism Value: A. thaliana
  misc_feature: MA Experiment 20000308 PARAMETER Experiment Name: At_100mM_NaCl__P Parameter: Plant Line Value: WS
  misc_feature: MA Experiment 20000308 PARAMETER Experiment Name: At_100mM_NaCl__P Parameter: Timepoint (hr) Value: 72
  misc_feature: MA Experiment 20000308 PARAMETER Experiment Name: At_100mM_NaCl__P Parameter: Tissue Value: Whole Plant
  misc_feature: MA Experiment 20000308 PARAMETER Experiment Name: At_100mM_NaCl__P Parameter: Treatment Value: 100mM NaCl vs. No Treatment
  misc_feature: MA Experiment ID: 20000437 Result: Down-regulated in Transcription
  misc_feature: MA Experiment 20000437 PARAMETER Experiment Name: At_Drought_P Parameter: Age (day) Value: 8
  misc_feature: MA Experiment 20000437 PARAMETER Experiment Name: At_Drought_P Parameter: Organism Value: A. thaliana
  misc_feature: MA Experiment 20000437 PARAMETER Experiment Name: At_Drought_P Parameter: Plant Line Value: WS
  misc_feature: MA Experiment 20000437 PARAMETER Experiment Name: At_Drought_P Parameter: Timepoint (hr) Value: 24
  misc_feature: MA Experiment 20000437 PARAMETER Experiment Name: At_Drought_P Parameter: Tissue Value: Whole Plant
  misc_feature: MA Experiment 20000437 PARAMETER Experiment Name: At_Drought_P Parameter: Treatment Value: Drought vs. No Drought
  misc_feature: MA Experiment ID: 20000439 Result: Down-regulated in Transcription
  misc_feature: MA Experiment 20000439 PARAMETER Experiment Name: At_Roots__P Parameter: Age (day) Value: 14 vs. 21
  misc_feature: MA Experiment 20000439 PARAMETER Experiment Name: At_Roots__P Parameter: Organism Value: A. thaliana
  misc_feature: MA Experiment 20000439 PARAMETER Experiment Name: At_Roots__P Parameter: Tissue Value: Roots vs. Whole Plant
  misc_feature: MA Experiment ID: 20000495 Result: Down-regulated in Transcription
  misc_feature: MA Experiment 20000495 PARAMETER Experiment Name: At_Guard_Cells_P Parameter: Harvest Date Value: 8/2/2002
  misc_feature: MA Experiment 20000495 PARAMETER Experiment Name: At_Guard_Cells_P Parameter: Organism Value: A. thaliana
  misc_feature: MA Experiment 20000495 PARAMETER Experiment Name: At_Guard_Cells_P Parameter: Tissue Value: Guard Cells vs. Leaves
  misc_feature: MA Experiment ID: 20001247 Result: Up-regulated in Transcription
  misc_feature: MA Experiment 20001247 PARAMETER Experiment Name: At_Far-red-induction_P Parameter: Age (day) Value: 7
  misc_feature: MA Experiment 20001247 PARAMETER Experiment Name: At_Far-red-induction_P Parameter: Light Value: Far-red vs. White
  misc_feature: MA Experiment 20001247 PARAMETER Experiment Name: At_Far-red-induction_P Parameter: Organism Value: A. thaliana
  misc_feature: MA Experiment 20001247 PARAMETER Experiment Name: At_Far-red-induction_P Parameter: Plant Line Value: Columbia
  misc_feature: MA Experiment 20001247 PARAMETER Experiment Name: At_Far-red-induction_P Parameter: Timepoint (hr) Value: 1
  misc_feature: MA Experiment 20001247 PARAMETER Experiment Name: At_Far-red-induction_P Parameter: Tissue Value: Whole Plant
  misc_feature: MA Experiment ID: 20001450 Result: Up-regulated in Transcription
  misc_feature: MA Experiment 20001450 PARAMETER Experiment Name: At_Far-red-induction_P Parameter: Age (day) Value: 7
  misc_feature: MA Experiment 20001450 PARAMETER Experiment Name: At_Far-red-induction_P Parameter: Light Value: Far-red vs. White
  misc_feature: MA Experiment 20001450 PARAMETER Experiment Name: At_Far-red-induction_P Parameter: Organism Value: A. thaliana
  misc_feature: MA Experiment 20001450 PARAMETER Experiment Name: At_Far-red-induction_P Parameter: Plant Line Value: Columbia
  misc_feature: MA Experiment 20001450 PARAMETER Experiment Name: At_Far-red-induction_P Parameter: Timepoint (hr) Value: 8
  misc_feature: MA Experiment 20001450 PARAMETER Experiment Name: At_Far-red-induction_P Parameter: Tissue Value: Whole Plant
  misc_feature: MA Experiment ID: 20001451 Result: Up-regulated in Transcription
  misc_feature: MA Experiment 20001451 PARAMETER Experiment Name: At_Far-red-induction_P Parameter: Age (day) Value: 7
  misc_feature: MA Experiment 20001451 PARAMETER Experiment Name: At_Far-red-induction_P Parameter: Light Value: Far-red vs. White
  misc_feature: MA Experiment 20001451 PARAMETER Experiment Name: At_Far-red-induction_P Parameter: Organism Value: A. thaliana
  misc_feature: MA Experiment 20001451 PARAMETER Experiment Name: At_Far-red-induction_P Parameter: Plant Line Value: Columbia
  misc_feature: MA Experiment 20001451 PARAMETER Experiment Name: At_Far-red-induction_P Parameter: Timepoint (hr) Value: 24
  misc_feature: MA Experiment 20001451 PARAMETER Experiment Name: At_Far-red-induction_P Parameter: Tissue Value: Whole Plant
  misc_feature: MA Experiment ID: 20001554 Result: Down-regulated in Transcription
  misc_feature: MA Experiment 20001554 PARAMETER Experiment Name: At_Drought_Soil_Dry_P Parameter: Age (day) Value: 21
  misc_feature: MA Experiment 20001554 PARAMETER Experiment Name: At_Drought_Soil_Dry_P Parameter: Organism Value: A. thaliana
  misc_feature: MA Experiment 20001554 PARAMETER Experiment Name: At_Drought_Soil_Dry_P Parameter: Plant Line Value: WS
  misc_feature: MA Experiment 20001554 PARAMETER Experiment Name: At_Drought_Soil_Dry_P Parameter: Post Timepoint (hr) Value: None
  misc_feature: MA Experiment 20001554 PARAMETER Experiment Name: At_Drought_Soil_Dry_P Parameter: Post-Treatment Value: None
  misc_feature: MA Experiment 20001554 PARAMETER Experiment Name: At_Drought_Soil_Dry_P Parameter: Timepoint (day) Value: 7
  misc_feature: MA Experiment 20001554 PARAMETER Experiment Name: At_Drought_Soil_Dry_P Parameter: Treatment Value: Drought vs. No Drought
  misc_feature: MA Experiment ID: 20001555 Result: Down-regulated in Transcription
  misc_feature: MA Experiment 20001555 PARAMETER Experiment Name: At_Drought_Soil_Dry_P Parameter: Age (day) Value: 24
  misc_feature: MA Experiment 20001555 PARAMETER Experiment Name: At_Drought_Soil_Dry_P Parameter: Organism Value: A. thaliana
  misc_feature: MA Experiment 20001555 PARAMETER Experiment Name: At_Drought_Soil_Dry_P Parameter: Plant Line Value: WS
  misc_feature: MA Experiment 20001555 PARAMETER Experiment Name: At_Drought_Soil_Dry_P Parameter: Post Timepoint (hr) Value: None
  misc_feature: MA Experiment 20001555 PARAMETER Experiment Name: At_Drought_Soil_Dry_P Parameter: Post-Treatment Value: None
  misc_feature: MA Experiment 20001555 PARAMETER Experiment Name: At_Drought_Soil_Dry_P Parameter: Timepoint (day) Value: 10
  misc_feature: MA Experiment 20001555 PARAMETER Experiment Name: At_Drought_Soil_Dry_P Parameter: Treatment Value: Drought vs. No Drought
  misc_feature: MA Experiment ID: 20001556 Result: Down-regulated in Transcription
  misc_feature: MA Experiment 20001556 PARAMETER Experiment Name: At_Drought_Soil_Dry_P Parameter: Age (day) Value: 26
  misc_feature: MA Experiment 20001556 PARAMETER Experiment Name: At_Drought_Soil_Dry_P Parameter: Organism Value: A. thaliana
  misc_feature: MA Experiment 20001556 PARAMETER Experiment Name: At_Drought_Soil_Dry_P Parameter: Plant Line Value: WS
  misc_feature: MA Experiment 20001556 PARAMETER Experiment Name: At_Drought_Soil_Dry_P Parameter: Post Timepoint (hr) Value: None
  misc_feature: MA Experiment 20001556 PARAMETER Experiment Name: At_Drought_Soil_Dry_P Parameter: Post-Treatment Value: None
  misc_feature: MA Experiment 20001556 PARAMETER Experiment Name: At_Drought_Soil_Dry_P Parameter: Timepoint (day) Value: 12
  misc_feature: MA Experiment 20001556 PARAMETER Experiment Name: At_Drought_Soil_Dry_P Parameter: Treatment Value: Drought vs. No Drought
  misc_feature: MA Experiment ID: 20001557 Result: Up-regulated in Transcription
  misc_feature: MA Experiment 20001557 PARAMETER Experiment Name: At_Drought_Soil_Dry_P Parameter: Age (day) Value: 27
  misc_feature: MA Experiment 20001557 PARAMETER Experiment Name: At_Drought_Soil_Dry_P Parameter: Organism Value: A. thaliana
  misc_feature: MA Experiment 20001557 PARAMETER Experiment Name: At_Drought_Soil_Dry_P Parameter: Plant Line Value: WS
  misc_feature: MA Experiment 20001557 PARAMETER Experiment Name: At_Drought_Soil_Dry_P Parameter: Post Timepoint (hr) Value: 3
  misc_feature: MA Experiment 20001557 PARAMETER Experiment Name: At_Drought_Soil_Dry_P Parameter: Post-Treatment Value: Re-Water vs. No Drought
  misc_feature: MA Experiment 20001557 PARAMETER Experiment Name: At_Drought_Soil_Dry_P Parameter: Timepoint (day) Value: 13
  misc_feature: MA Experiment 20001557 PARAMETER Experiment Name: At_Drought_Soil_Dry_P Parameter: Treatment Value: Drought vs. No Drought
  misc_feature: MA Experiment ID: 20001558 Result: Up-regulated in Transcription
  misc_feature: MA Experiment 20001558 PARAMETER Experiment Name: At_Drought_Soil_Dry_P Parameter: Age (day) Value: 27
  misc_feature: MA Experiment 20001558 PARAMETER Experiment Name: At_Drought_Soil_Dry_P Parameter: Organism Value: A. thaliana
  misc_feature: MA Experiment 20001558 PARAMETER Experiment Name: At_Drought_Soil_Dry_P Parameter: Plant Line Value: WS
  misc_feature: MA Experiment 20001558 PARAMETER Experiment Name: At_Drought_Soil_Dry_P Parameter: Post Timepoint (hr) Value: 6
  misc_feature: MA Experiment 20001558 PARAMETER Experiment Name: At_Drought_Soil_Dry_P Parameter: Post-Treatment Value: Re-Water vs. No Drought
  misc_feature: MA Experiment 20001558 PARAMETER Experiment Name: At_Drought_Soil_Dry_P Parameter: Timepoint (day) Value: 13
  misc_feature: MA Experiment 20001558 PARAMETER Experiment Name: At_Drought_Soil_Dry_P Parameter: Treatment Value: Drought vs. No Drought
  misc_feature: MA Experiment ID: 20001559 Result: Down-regulated in Transcription
  misc_feature: MA Experiment 20001559 PARAMETER Experiment Name: At_Drought_Soil_Dry_P Parameter: Age (day) Value: 28
  misc_feature: MA Experiment 20001559 PARAMETER Experiment Name: At_Drought_Soil_Dry_P Parameter: Organism Value: A. thaliana
  misc_feature: MA Experiment 20001559 PARAMETER Experiment Name: At_Drought_Soil_Dry_P Parameter: Plant Line Value: WS
  misc_feature: MA Experiment 20001559 PARAMETER Experiment Name: At_Drought_Soil_Dry_P Parameter: Post Timepoint (hr) Value: 29
  misc_feature: MA Experiment 20001559 PARAMETER Experiment Name: At_Drought_Soil_Dry_P Parameter: Post-Treatment Value: Re-Water vs. No Drought
  misc_feature: MA Experiment 20001559 PARAMETER Experiment Name: At_Drought_Soil_Dry_P Parameter: Timepoint (day) Value: 14
  misc_feature: MA Experiment 20001559 PARAMETER Experiment Name: At_Drought_Soil_Dry_P Parameter: Treatment Value: Drought vs. No Drought
  misc_feature: MA Experiment ID: 20001560 Result: Up-regulated in Transcription
  misc_feature: MA Experiment 20001560 PARAMETER Experiment Name: At_Drought_Soil_Dry_P Parameter: Age (day) Value: 28
  misc_feature: MA Experiment 20001560 PARAMETER Experiment Name: At_Drought_Soil_Dry_P Parameter: Organism Value: A. thaliana
  misc_feature: MA Experiment 20001560 PARAMETER Experiment Name: At_Drought_Soil_Dry_P Parameter: Plant Line Value: WS
  misc_feature: MA Experiment 20001560 PARAMETER Experiment Name: At_Drought_Soil_Dry_P Parameter: Post Timepoint (hr) Value: None
  misc_feature: MA Experiment 20001560 PARAMETER Experiment Name: At_Drought_Soil_Dry_P Parameter: Post-Treatment Value: None
  misc_feature: MA Experiment 20001560 PARAMETER Experiment Name: At_Drought_Soil_Dry_P Parameter: Timepoint (day) Value: 14
  misc_feature: MA Experiment 20001560 PARAMETER Experiment Name: At_Drought_Soil_Dry_P Parameter: Treatment Value: Drought vs. No Drought
  misc_feature: MA Experiment ID: 20001904 Result: Down-regulated in Transcription
  misc_feature: MA Experiment 20001904 PARAMETER Experiment Name: At_Drought_Reproduction_P Parameter: Age (day) Value: 37
  misc_feature: MA Experiment 20001904 PARAMETER Experiment Name: At_Drought_Reproduction_P Parameter: Organism Value: A. thaliana
  misc_feature: MA Experiment 20001904 PARAMETER Experiment Name: At_Drought_Reproduction_P Parameter: Plant Line Value: WS
  misc_feature: MA Experiment 20001904 PARAMETER Experiment Name: At_Drought_Reproduction_P Parameter: Timepoint (day) Value: 7
  misc_feature: MA Experiment 20001904 PARAMETER Experiment Name: At_Drought_Reproduction_P Parameter: Tissue Value: Rosettes
  misc_feature: MA Experiment 20001904 PARAMETER Experiment Name: At_Drought_Reproduction_P Parameter: Treatment Value: Drought vs. No Drought
  misc_feature: MA Experiment ID: 20001905 Result: Down-regulated in Transcription
  misc_feature: MA Experiment 20001905 PARAMETER Experiment Name: At_Drought_Reproduction_P Parameter: Age (day) Value: 40
  misc_feature: MA Experiment 20001905 PARAMETER Experiment Name: At_Drought_Reproduction_P Parameter: Organism Value: A. thaliana
  misc_feature: MA Experiment 20001905 PARAMETER Experiment Name: At_Drought_Reproduction_P Parameter: Plant Line Value: WS
  misc_feature: MA Experiment 20001905 PARAMETER Experiment Name: At_Drought_Reproduction_P Parameter: Timepoint (day) Value: 10
  misc_feature: MA Experiment 20001905 PARAMETER Experiment Name: At_Drought_Reproduction_P Parameter: Tissue Value: Rosettes
  misc_feature: MA Experiment 20001905 PARAMETER Experiment Name: At_Drought_Reproduction_P Parameter: Treatment Value: Drought vs. No Drought
  misc_feature: MA Experiment ID: 20001906 Result: Down-regulated in Transcription
  misc_feature: MA Experiment 20001906 PARAMETER Experiment Name: At_Drought_Reproduction_P Parameter: Age (day) Value: 35
  misc_feature: MA Experiment 20001906 PARAMETER Experiment Name: At_Drought_Reproduction_P Parameter: Organism Value: A. thaliana
  misc_feature: MA Experiment 20001906 PARAMETER Experiment Name: At_Drought_Reproduction_P Parameter: Plant Line Value: WS
  misc_feature: MA Experiment 20001906 PARAMETER Experiment Name: At_Drought_Reproduction_P Parameter: Timepoint (day) Value: 5
  misc_feature: MA Experiment 20001906 PARAMETER Experiment Name: At_Drought_Reproduction_P Parameter: Tissue Value: Siliques
  misc_feature: MA Experiment 20001906 PARAMETER Experiment Name: At_Drought_Reproduction_P Parameter: Treatment Value: Drought vs. No Drought
  misc_feature: MA Experiment ID: 20001907 Result: Down-regulated in Transcription
  misc_feature: MA Experiment 20001907 PARAMETER Experiment Name: At_Drought_Reproduction_P Parameter: Age (day) Value: 37
  misc_feature: MA Experiment 20001907 PARAMETER Experiment Name: At_Drought_Reproduction_P Parameter: Organism Value: A. thaliana
  misc_feature: MA Experiment 20001907 PARAMETER Experiment Name: At_Drought_Reproduction_P Parameter: Plant Line Value: WS
  misc_feature: MA Experiment 20001907 PARAMETER Experiment Name: At_Drought_Reproduction_P Parameter: Timepoint (day) Value: 7
  misc_feature: MA Experiment 20001907 PARAMETER Experiment Name: At_Drought_Reproduction_P Parameter: Tissue Value: Siliques
  misc_feature: MA Experiment 20001907 PARAMETER Experiment Name: At_Drought_Reproduction_P Parameter: Treatment Value: Drought vs. No Drought
  misc_feature: MA Experiment ID: 20001908 Result: Down-regulated in Transcription
  misc_feature: MA Experiment 20001908 PARAMETER Experiment Name: At_Drought_Reproduction_P Parameter: Age (day) Value: 40
  misc_feature: MA Experiment 20001908 PARAMETER Experiment Name: At_Drought_Reproduction_P Parameter: Organism Value: A. thaliana
  misc_feature: MA Experiment 20001908 PARAMETER Experiment Name: At_Drought_Reproduction_P Parameter: Plant Line Value: WS
  misc_feature: MA Experiment 20001908 PARAMETER Experiment Name: At_Drought_Reproduction_P Parameter: Timepoint (day) Value: 10
  misc_feature: MA Experiment 20001908 PARAMETER Experiment Name: At_Drought_Reproduction_P Parameter: Tissue Value: Siliques
  misc_feature: MA Experiment 20001908 PARAMETER Experiment Name: At_Drought_Reproduction_P Parameter: Treatment Value: Drought vs. No Drought
  misc_feature: MA Experiment ID: 20001910 Result: Down-regulated in Transcription
  misc_feature: MA Experiment 20001910 PARAMETER Experiment Name: At_Drought_Reproduction_P Parameter: Age (day) Value: 37
  misc_feature: MA Experiment 20001910 PARAMETER Experiment Name: At_Drought_Reproduction_P Parameter: Organism Value: A. thaliana
  misc_feature: MA Experiment 20001910 PARAMETER Experiment Name: At_Drought_Reproduction_P Parameter: Plant Line Value: WS
  misc_feature: MA Experiment 20001910 PARAMETER Experiment Name: At_Drought_Reproduction_P Parameter: Timepoint (day) Value: 7
  misc_feature: MA Experiment 20001910 PARAMETER Experiment Name: At_Drought_Reproduction_P Parameter: Tissue Value: Flowers
  misc_feature: MA Experiment 20001910 PARAMETER Experiment Name: At_Drought_Reproduction_P Parameter: Treatment Value: Drought vs. No Drought
  misc_feature: MA Experiment ID: 20001911 Result: Down-regulated in Transcription
  misc_feature: MA Experiment 20001911 PARAMETER Experiment Name: At_Drought_Reproduction_P Parameter: Age (day) Value: 40
  misc_feature: MA Experiment 20001911 PARAMETER Experiment Name: At_Drought_Reproduction_P Parameter: Organism Value: A. thaliana
  misc_feature: MA Experiment 20001911 PARAMETER Experiment Name: At_Drought_Reproduction_P Parameter: Plant Line Value: WS
  misc_feature: MA Experiment 20001911 PARAMETER Experiment Name: At_Drought_Reproduction_P Parameter: Timepoint (day) Value: 10
  misc_feature: MA Experiment 20001911 PARAMETER Experiment Name: At_Drought_Reproduction_P Parameter: Tissue Value: Flowers
  misc_feature: MA Experiment 20001911 PARAMETER Experiment Name: At_Drought_Reproduction_P Parameter: Treatment Value: Drought vs. No Drought
agcctgtgtttcctctcccaattctttccatttttataccttctctcttcctcctttcttcttcactcatctcttcttcttcccttcaaccttcataatcagtggctccttcgcttattagtctttgtcaatcttaaatcgttgagtatccaaaaatcttaaactcaatggatccgtgctctttcgtacggatcatagtcggtaacttggccgttaggtttccgtcgtcgtcttcttcttcttcttcctcatcaggaccgtctgtttccggaatcaatccaacggctcctaactgttactgtaaaatcagattcaagaactttcctcgtgagattgtttctgttccggttatgttccgaactgaatctgaatccgagactcgttgctcctcctccggtaacgtatccaccgttgctgcttgtttcagtttaagtaaagctcagatcgaagcgtcgttgaagaaacctaaatttagtgttctctccgttgaggcttattcccgcggaaatagcgacggagacgacggtgttagcggcgcgtcgtgtggactcgctacggcgggtgagaagttgcttggtcgatttgaggtttcgcttgatttgaaatcggcggagacgaagagttttttggcgcataacggttgggttgctttgccgtctaagaaaacgaagagtaaaactggatccgatccggagctccacgttagcgtacgggtcgaacctgacccgagattcgtgtttcagttcgacggtgagcctgagtgtagtcctcaggtttttcaagttcaaggaaacacaaagcaagccgtgttcacttgcaaattcggctctagaaactccaactccggtgatcgaaatcttcttcacagttcttcgatgatgtctgagataagctcaacgagaagttgtatatcgtcgatgaattcggaaaaagaacaaccgtcaaaagagagaaaaggatggtcaataacggtccatgatctctccggttcacccgtggctatggcctctatggtaacacctttcgtaccatctcctggttcgaaccgggtgactcggtcaagtcccggagcgtggcttattcttcgacctgacggttgcacatggaagccatggggaagactagaagcatggcgtgaggctggttactctgacactctaggttatcgtttcgagcttttccaagacggtatagccaccgcagtttctgcatcgtcgtcgatcagtttgaaaaatggcgggagttttgttattgatgttaccggcggtacaagcacaacggcgtctacgccgacaacgagtcctcaaggaagctgggatctcggatccggttcaagcgccggttcaagacccgcgtcgagaccaggatcaggatccgggtcggatttcggatatctactaccgcaacatccgtctgcggccgcgcaaaacagagggttcgttatgtcggctacggttgaaggagttgggaaacgaagcaaaccagaagtagaagtcggtgtgacgcacgtgacatgtacggaggatgcagcagcgcacgtggcattagctgcggcggtggatctgagtttggatgcttgcaggcttttctcacacaagctaaggaaagagctgagacagcaaagccagcttggtgtcgtttgacttgtttcgctttgtcgttttaccaattcatgagttgtcttccactcacatttttttggtttgaattttctatttttttctttttaagatagcgttaggaattagccagccatttttttgagaggtggatgtcatcattattaaaaattgttaatatctttctcagtacagctaagaaatgacagtaacaactaacaaacaactcattatctc

SEQ ID NO: 42666 - protein, 491 aa, Arabidopsis thaliana
  peptide (1)..(491): Ceres Seq. ID no. 12605225
  misc_feature (282)..(487): Pfam Name: Protein of unknown function (DUF1005) Pfam Description: Protein of unknown function (DUF1005)
  misc_feature (282)..(487): Pfam Name: Protein of unknown function (DUF1005) Pfam Description: Protein of unknown function (DUF1005)
  misc_feature (390)..(482): Homolog of NCBI NO: 34896878 NR Description: unknown protein [Oryza sativa (japonica
  misc_feature (82)..(392): Homolog of NCBI NO: 34896878 NR Description: unknown protein [Oryza sativa (japonica
  misc_feature (390)..(482): Homolog of NCBI NO: 36104436 NR Description: unknown protein [Oryza sativa (japonica
  misc_feature (1)..(392): Homolog of NCBI NO: 36104436 NR Description: unknown protein [Oryza sativa (japonica
  misc_feature (282)..(491): Homolog of NCBI NO: 21553542 NR Description: unknown [Arabidopsis thaliana]
  misc_feature (390)..(482): Homolog of NCBI NO: 34896878 NR Description: unknown protein [Oryza sativa (japonica
  misc_feature (390)..(482): Homolog of NCBI NO: 36104436 NR Description: unknown protein [Oryza sativa (japonica
  misc_feature (282)..(491): Homolog of NCBI NO: 21553542 NR Description: unknown [Arabidopsis thaliana]
  misc_feature (1)..(491): Homolog of NCBI NO: 15230917 NR Description: unknown protein
  misc_feature (1)..(491): Homolog of NCBI NO: 18176372 NR Description: unknown protein [Arabidopsis thaliana]
  misc_feature (124)..(491): Homolog of NCBI NO: 15222861 NR Description: hypothetical protein
  misc_feature (79)..(486): Homolog of NCBI NO: 15218372 NR Description: unknown protein; protein id: At1g10020.1
  misc_feature (1)..(103): Homolog of NCBI NO: 15218372 NR Description: unknown protein; protein id: At1g10020.1
  misc_feature (1)..(392): Homolog of NCBI NO: 36104436 NR Description: unknown protein [Oryza sativa (japonica
  misc_feature (82)..(392): Homolog of NCBI NO: 34896878 NR Description: unknown protein [Oryza sativa (japonica
  misc_feature (1)..(103): Homolog of NCBI NO: 15218372 NR Description: unknown protein; protein id: At1g10020.1
  misc_feature (79)..(486): Homolog of NCBI NO: 15218372 NR Description: unknown protein; protein id: At1g10020.1
  misc_feature (124)..(491): Homolog of NCBI NO: 15222861 NR Description: hypothetical protein
  misc_feature (1)..(491): Homolog of NCBI NO: 18176372 NR Description: unknown protein [Arabidopsis thaliana]
  misc_feature (1)..(491): Homolog of NCBI NO: 15230917 NR Description: unknown protein
MDPCSFVRIIVGNLAVRFPSSSSSSSSSSGPSVSGINPTAPNCYCKIRFKNFPREIVSVPVMFRTESESETRCSSSGNVSTVAACFSLSKAQIEASLKKPKFSVLSVEAYSRGNSDGDDGVSGASCGLATAGEKLLGRFEVSLDLKSAETKSFLAHNGWVALPSKKTKSKTGSDPELHVSVRVEPDPRFVFQFDGEPECSPQVFQVQGNTKQAVFTCKFGSRNSNSGDRNLLHSSSMMSEISSTRSCISSMNSEKEQPSKERKGWSITVHDLSGSPVAMASMVTPFVPSPGSNRVTRSSPGAWLILRPDGCTWKPWGRLEAWREAGYSDTLGYRFELFQDGIATAVSASSSISLKNGGSFVIDVTGGTSTTASTPTTSPQGSWDLGSGSSAGSRPASRPGSGSGSDFGYLLPQHPSAAAQNRGFVMSATVEGVGKRSKPEVEVGVTHVTCTEDAAAHVALAAAVDLSLDACRLFSHKLRKELRQQSQLGVV

SEQ ID NO: 42667 - protein, 430 aa, Arabidopsis thaliana
  peptide (1)..(430): Ceres Seq. ID no. 12605226
  misc_feature (221)..(426): Pfam Name: Protein of unknown function (DUF1005) Pfam Description: Protein of unknown function (DUF1005)
  misc_feature (221)..(426): Pfam Name: Protein of unknown function (DUF1005) Pfam Description: Protein of unknown function (DUF1005)
  misc_feature (329)..(421): Homolog of NCBI NO: 34896878 NR Description: unknown protein [Oryza sativa (japonica
  misc_feature (21)..(331): Homolog of NCBI NO: 34896878 NR Description: unknown protein [Oryza sativa (japonica
  misc_feature (329)..(421): Homolog of NCBI NO: 36104436 NR Description: unknown protein [Oryza sativa (japonica
  misc_feature (1)..(331): Homolog of NCBI NO: 36104436 NR Description: unknown protein [Oryza sativa (japonica
  misc_feature (221)..(430): Homolog of NCBI NO: 21553542 NR Description: unknown [Arabidopsis thaliana]
  misc_feature (329)..(421): Homolog of NCBI NO: 34896878 NR Description: unknown protein [Oryza sativa (japonica
  misc_feature (329)..(421): Homolog of NCBI NO: 36104436 NR Description: unknown protein [Oryza sativa (japonica
  misc_feature (221)..(430): Homolog of NCBI NO: 21553542 NR Description: unknown [Arabidopsis thaliana]
  misc_feature (1)..(430): Homolog of NCBI NO: 15230917 NR Description: unknown protein
  misc_feature (1)..(430): Homolog of NCBI NO: 18176372 NR Description: unknown protein [Arabidopsis thaliana]
  misc_feature (63)..(430): Homolog of NCBI NO: 15222861 NR Description: hypothetical protein
  misc_feature (18)..(425): Homolog of NCBI NO: 15218372 NR Description: unknown protein; protein id: At1g10020.1
  misc_feature (1)..(42): Homolog of NCBI NO: 15218372 NR Description: unknown protein; protein id: At1g10020.1
  misc_feature (1)..(331): Homolog of NCBI NO: 36104436 NR Description: unknown protein [Oryza sativa (japonica
  misc_feature (21)..(331): Homolog of NCBI NO: 34896878 NR Description: unknown protein [Oryza sativa (japonica
  misc_feature (1)..(42): Homolog of NCBI NO: 15218372 NR Description: unknown protein; protein id: At1g10020.1
  misc_feature (18)..(425): Homolog of NCBI NO: 15218372 NR Description: unknown protein; protein id: At1g10020.1
  misc_feature (63)..(430): Homolog of NCBI NO: 15222861 NR Description: hypothetical protein
  misc_feature (1)..(430): Homolog of NCBI NO: 18176372 NR Description: unknown protein [Arabidopsis thaliana]
  misc_feature (1)..(430): Homolog of NCBI NO: 15230917 NR Description: unknown protein
MFRTESESETRCSSSGNVSTVAACFSLSKAQIEASLKKPKFSVLSVEAYSRGNSDGDDGVSGASCGLATAGEKLLGRFEVSLDLKSAETKSFLAHNGWVALPSKKTKSKTGSDPELHVSVRVEPDPRFVFQFDGEPECSPQVFQVQGNTKQAVFTCKFGSRNSNSGDRNLLHSSSMMSEISSTRSCISSMNSEKEQPSKERKGWSITVHDLSGSPVAMASMVTPFVPSPGSNRVTRSSPGAWLILRPDGCTWKPWGRLEAWREAGYSDTLGYRFELFQDGIATAVSASSSISLKNGGSFVIDVTGGTSTTASTPTTSPQGSWDLGSGSSAGSRPASRPGSGSGSDFGYLLPQHPSAAAQNRGFVMSATVEGVGKRSKPEVEVGVTHVTCTEDAAAHVALAAAVDLSLDACRLFSHKLRKELRQQSQLGVV

SEQ ID NO: 42668 - protein, 255 aa, Arabidopsis thaliana
  peptide (1)..(255): Ceres Seq. ID no. 12605227
  misc_feature (46)..(251): Pfam Name: Protein of unknown function (DUF1005) Pfam Description: Protein of unknown function (DUF1005)
  misc_feature (46)..(251): Pfam Name: Protein of unknown function (DUF1005) Pfam Description: Protein of unknown function (DUF1005)
  misc_feature (1)..(163): Homolog of NCBI NO: 34909364 NR Description: P0638D12.14 [Oryza sativa (japonica
  misc_feature (154)..(246): Homolog of NCBI NO: 34896878 NR Description: unknown protein [Oryza sativa (japonica
  misc_feature (1)..(156): Homolog of NCBI NO: 34896878 NR Description: unknown protein [Oryza sativa (japonica
  misc_feature (154)..(246): Homolog of NCBI NO: 36104436 NR Description: unknown protein [Oryza sativa (japonica
  misc_feature (1)..(156): Homolog of NCBI NO: 36104436 NR Description: unknown protein [Oryza sativa (japonica
  misc_feature (1)..(163): Homolog of NCBI NO: 34909364 NR Description: P0638D12.14 [Oryza sativa (japonica
  misc_feature (1)..(156): Homolog of NCBI NO: 34896878 NR Description: unknown protein [Oryza sativa (japonica
  misc_feature (1)..(156): Homolog of NCBI NO: 36104436 NR Description: unknown protein [Oryza sativa (japonica
  misc_feature (1)..(255): Homolog of NCBI NO: 15230917 NR Description: unknown protein
  misc_feature (1)..(255): Homolog of NCBI NO: 18176372 NR Description: unknown protein [Arabidopsis thaliana]
  misc_feature (1)..(255): Homolog of NCBI NO: 15222861 NR Description: hypothetical protein
  misc_feature (1)..(250): Homolog of NCBI NO: 15218372 NR Description: unknown protein; protein id: At1g10020.1
  misc_feature (46)..(255): Homolog of NCBI NO: 21553542 NR Description: unknown [Arabidopsis thaliana]
  misc_feature (154)..(246): Homolog of NCBI NO: 36104436 NR Description: unknown protein [Oryza sativa (japonica
  misc_feature (154)..(246): Homolog of NCBI NO: 34896878 NR Description: unknown protein [Oryza sativa (japonica
  misc_feature (46)..(255): Homolog of NCBI NO: 21553542 NR Description: unknown [Arabidopsis thaliana]
  misc_feature (1)..(250): Homolog of NCBI NO: 15218372 NR Description: unknown protein; protein id: At1g10020.1
  misc_feature (1)..(255): Homolog of NCBI NO: 15222861 NR Description: hypothetical protein
  misc_feature (1)..(255): Homolog of NCBI NO: 18176372 NR Description: unknown protein [Arabidopsis thaliana]
  misc_feature (1)..(255): Homolog of NCBI NO: 15230917 NR Description: unknown protein
MMSEISSTRSCISSMNSEKEQPSKERKGWSITVHDLSGSPVAMASMVTPFVPSPGSNRVTRSSPGAWLILRPDGCTWKPWGRLEAWREAGYSDTLGYRFELFQDGIATAVSASSSISLKNGGSFVIDVTGGTSTTASTPTTSPQGSWDLGSGSSAGSRPASRPGSGSGSDFGYLLPQHPSAAAQNRGFVMSATVEGVGKRSKPEVEVGVTHVTCTEDAAAHVALAAAVDLSLDACRLFSHKLRKELRQQSQLGVV

SEQ ID NO: 42669 - DNA, 2127 bp, Arabidopsis thaliana
  misc_feature (1)..(2127): Ceres Seq. ID no. 13646490
  misc_feature: MA Experiment ID: 20000307 Result: Down-regulated in Transcription
  misc_feature: MA Experiment 20000307 PARAMETER Experiment Name: At_Germinating_Seeds_Sub_P Parameter: Age (hr) Value: 24 vs. 0
  misc_feature: MA Experiment 20000307 PARAMETER Experiment Name: At_Germinating_Seeds_Sub_P Parameter: Organism Value: A. thaliana
  misc_feature: MA Experiment 20000307 PARAMETER Experiment Name: At_Germinating_Seeds_Sub_P Parameter: Plant Line Value: WS
  misc_feature: MA Experiment 20000307 PARAMETER Experiment Name: At_Germinating_Seeds_Sub_P Parameter: Tissue Value: Germinating Seeds
  misc_feature: MA Experiment ID: 20000327 Result: Down-regulated in Transcription
  misc_feature: MA Experiment 20000327 PARAMETER Experiment Name: At_42deg_Heat_Sub_P Parameter: Age (day) Value: 14
  misc_feature: MA Experiment 20000327 PARAMETER Experiment Name: At_42deg_Heat_Sub_P Parameter: Organism Value: A. thaliana
  misc_feature: MA Experiment 20000327 PARAMETER Experiment Name: At_42deg_Heat_Sub_P Parameter: Plant Line Value: WS
  misc_feature: MA Experiment 20000327 PARAMETER Experiment Name: At_42deg_Heat_Sub_P Parameter: Temperature (deg C) Value: 42 vs. 22
  misc_feature: MA Experiment 20000327 PARAMETER Experiment Name: At_42deg_Heat_Sub_P Parameter: Timepoint (hr) Value: 1
  misc_feature: MA Experiment 20000327 PARAMETER Experiment Name: At_42deg_Heat_Sub_P Parameter: Tissue Value: Aerial
  misc_feature: MA Experiment ID: 20000328 Result: Down-regulated in Transcription
  misc_feature: MA Experiment 20000328 PARAMETER Experiment Name: At_42deg_Heat_Sub_P Parameter: Age (day) Value: 14
  misc_feature: MA Experiment 20000328 PARAMETER Experiment Name: At_42deg_Heat_Sub_P Parameter: Organism Value: A. thaliana
  misc_feature: MA Experiment 20000328 PARAMETER Experiment Name: At_42deg_Heat_Sub_P Parameter: Plant Line Value: WS
  misc_feature: MA Experiment 20000328 PARAMETER Experiment Name: At_42deg_Heat_Sub_P Parameter: Temperature (deg C) Value: 42 vs. 22
  misc_feature: MA Experiment 20000328 PARAMETER Experiment Name: At_42deg_Heat_Sub_P Parameter: Timepoint (hr) Value: 6
  misc_feature: MA Experiment 20000328 PARAMETER Experiment Name: At_42deg_Heat_Sub_P Parameter: Tissue Value: Aerial
  misc_feature: MA Experiment ID: 20000329 Result: Down-regulated in Transcription
  misc_feature: MA Experiment 20000329 PARAMETER Experiment Name: At_4deg_Cold_Sub_P Parameter: Age (day) Value: 14
  misc_feature: MA Experiment 20000329 PARAMETER Experiment Name: At_4deg_Cold_Sub_P Parameter: Organism Value: A. thaliana
  misc_feature: MA Experiment 20000329 PARAMETER Experiment Name: At_4deg_Cold_Sub_P Parameter: Plant Line Value: WS
  misc_feature: MA Experiment 20000329 PARAMETER Experiment Name: At_4deg_Cold_Sub_P Parameter: Temperature (deg C) Value: 4 vs. 22
  misc_feature: MA Experiment 20000329 PARAMETER Experiment Name: At_4deg_Cold_Sub_P Parameter: Timepoint (hr) Value: 6
  misc_feature: MA Experiment 20000329 PARAMETER Experiment Name: At_4deg_Cold_Sub_P Parameter: Tissue Value: Aerial
  misc_feature: MA Experiment ID: 20000332 Result: Down-regulated in Transcription
  misc_feature: MA Experiment 20000332 PARAMETER Experiment Name: At_4deg_Cold_Sub_P Parameter: Age (day) Value: 14
  misc_feature: MA Experiment 20000332 PARAMETER Experiment Name: At_4deg_Cold_Sub_P Parameter: Organism Value: A. thaliana
  misc_feature: MA Experiment 20000332 PARAMETER Experiment Name: At_4deg_Cold_Sub_P Parameter: Plant Line Value: WS
  misc_feature: MA Experiment 20000332 PARAMETER Experiment Name: At_4deg_Cold_Sub_P Parameter: Temperature (deg C) Value: 4 vs. 22
  misc_feature: MA Experiment 20000332 PARAMETER Experiment Name: At_4deg_Cold_Sub_P Parameter: Timepoint (hr) Value: 2
  misc_feature: MA Experiment 20000332 PARAMETER Experiment Name: At_4deg_Cold_Sub_P Parameter: Tissue Value: Aerial
gataaccttcctctctatttttacaatttattttgttattagaagtggtagtggagtgaaaaaacaaatcctaagcagtcctaaccgatccccgaagctaaagattcttcaccttcccaaataaagcaaaacctagatccgacattgaaggaaaaaccttttagatccatctctgaaaaaaaaccaaccatgaagagagatcatcatcatcatcatcatcaagataagaagactatgatgatgaatgaagaagacgacggtaacggcatggatgagcttctagctgttcttggttacaaggttaggtcatccgaaatggctgatgttgctcagaaactcgagcagcttgaagttatgatgtctaatgttcaagaagacgatctttctcaactcgctactgagactgttcactataatccggcggagctttacacgtggcttgattctatgctcaccgaccttaatcctccgtcgtctaacgccgagtacgatcttaaagctattcccggtgacgcgattctcaatcagttcgctatcgattcggcttcttcgtctaaccaaggcggcggaggagatacgtatactacaaacaagcggttgaaatgctcaaacggcgtcgtggaaaccactacagcgacggctgagtcaactcggcatgttgtcctggttgactcgcaggagaacggtgtgcgtctcgttcacgcgcttttggcttgcgctgaagctgttcagaaagagaatctgactgtagcggaagctctggtgaagcaaatcggattcttagccgtttctcaaatcggagcgatgagaaaagtcgctacttacttcgccgaagctctcgcgcggcggatttaccgtctctctccgtcgcagagtccaatcgaccactctctctccgatactcttcagatgcacttctacgagacttgtccttatctcaagttcgctcacttcacggcgaatcaagcgattctcgaagcttttcaagggaagaaaagagttcatgtcattgatttctctatgagtcaaggtcttcaatggccggcgcttatgcaggctcttgcgcttcgacctggtggtcctcctgttttccggttaaccggaattggtccaccggcaccggataatttcgattatcttcatgaagttgggtgtaagctggctcatttagctgaggcgattcacgttgagtttgagtacagaggatttgtggctaacactttagctgatcttgatgcttcgatgcttgagcttagaccaagtgagattgaatctgttgcggttaactctgttttcgagcttcacaagctcttgggacgacctggtgcgatcgataaggttcttggtgtggtgaatcagattaaaccggagattttcactgtggttgagcaggaatcgaaccataatagtccgattttcttagatcggtttactgagtcgttgcattattactcgacgttgtttgactcgttggaaggtgtaccgagtggtcaagacaaggtcatgtcggaggtttacttgggtaaacagatctgcaacgttgtggcttgtgatggacctgaccgagttgagcgtcatgaaacgttgagtcagtggaggaaccggttcgggtctgctgggtttgcggctgcacatattggttcgaatgcgtttaagcaagcgagtatgcttttggctctgttcaacggcggtgagggttatcgggtggaggagagtgacggctgtctcatgttgggttggcacacacgaccgctcatagccacctcggcttggaaactctccaccaattagatggtggctcaatgaattgatctgttgaaccggttatgatgatagatttccgaccgaagccaaactaaatcctactgtttttccctttgtcacttgttaagatcttatctttcattatattaggtaattgaaaaattttaatctcgctttggagagttttttttttttgcatgtgacattggagggtaaattggataggcagaaatagaagtatgtgttaccaagtatgtgcaattggttgaaataaaatcatcttgagtgtcaccatctataaaattcattgtaatgactaatgagcctgattaaactgtctcttatgataatgtgctgattctc

SEQ ID NO: 42670 - protein, 533 aa, Arabidopsis thaliana
  peptide (1)..(533): Ceres Seq. ID no. 13646491
  misc_feature (143)..(440): Pfam Name: GRAS family transcription factor Pfam Description: GRAS family transcription factor
  misc_feature (143)..(440): Pfam Name: GRAS family transcription factor Pfam Description: GRAS family transcription factor
  misc_feature (143)..(440): Pfam Name: GRAS family transcription factor Pfam Description: GRAS family transcription factor
  misc_feature (98)..(532): Homolog of NCBI NO: 15529230 NR Description: At2g01570/F2I9.19 [Arabidopsis thaliana]
  misc_feature (1)..(94): Homolog of NCBI NO: 2569940 NR Description: GRS protein [Arabidopsis thaliana]
  misc_feature (98)..(532): Homolog of NCBI NO: 2569940 NR Description: GRS protein [Arabidopsis thaliana]
  misc_feature (1)..(94): Homolog of NCBI NO: 15226311 NR Description: gibberellin response modulator (RGA1)
  misc_feature (98)..(532): Homolog of NCBI NO: 15226311 NR Description: gibberellin response modulator (RGA1)
  misc_feature (98)..(532): Homolog of NCBI NO: 15529230 NR Description: At2g01570/F2I9.19 [Arabidopsis thaliana]
  misc_feature (98)..(532): Homolog of NCBI NO: 2569940 NR Description: GRS protein [Arabidopsis thaliana]
  misc_feature (98)..(532): Homolog of NCBI NO: 15226311 NR Description: gibberellin response modulator (RGA1)
  misc_feature (1)..(94): Homolog of NCBI NO: 15226311 NR Description: gibberellin response modulator (RGA1)
  misc_feature (98)..(532): Homolog of NCBI NO: 2569940 NR Description: GRS protein [Arabidopsis thaliana]
  misc_feature (1)..(94): Homolog of NCBI NO: 2569940 NR Description: GRS protein [Arabidopsis thaliana]
  misc_feature (98)..(532): Homolog of NCBI NO: 15529230 NR Description: At2g01570/F2I9.19 [Arabidopsis thaliana]
  misc_feature (1)..(533): Homolog of NCBI NO: 15223951 NR Description: gibberellin response modulator (GAI/RGA2)
  misc_feature (1)..(533): Homolog of NCBI NO: 2569938 NR Description: GAI [Arabidopsis thaliana]
  misc_feature (1)..(533): Homolog of NCBI NO: 2339980 NR Description: RGA2 protein [Arabidopsis thaliana]
  misc_feature (98)..(532): Homolog of NCBI NO: 2339978 NR Description: RGA1 protein [Arabidopsis thaliana]
  misc_feature (1)..(94): Homolog of NCBI NO: 2339978 NR Description: RGA1 protein [Arabidopsis thaliana]
  misc_feature (1)..(533): Homolog of NCBI NO: 15223951 NR Description: gibberellin response modulator (GAI/RGA2)
  misc_feature (1)..(533): Homolog of NCBI NO: 2569938 NR Description: GAI [Arabidopsis thaliana]
  misc_feature (1)..(533): Homolog of NCBI NO: 2339980 NR Description: RGA2 protein [Arabidopsis thaliana]
  misc_feature (98)..(532): Homolog of NCBI NO: 2339978 NR Description: RGA1 protein [Arabidopsis thaliana]
  misc_feature (1)..(94): Homolog of NCBI NO: 2339978 NR Description: RGA1 protein [Arabidopsis thaliana]
  misc_feature (98)..(532): Homolog of NCBI NO: 15226311 NR Description: gibberellin response modulator (RGA1)
  misc_feature (1)..(94): Homolog of NCBI NO: 15226311 NR Description: gibberellin response modulator (RGA1)
  misc_feature (1)..(94): Homolog of NCBI NO: 2569940 NR Description: GRS protein [Arabidopsis thaliana]
  misc_feature (1)..(94): Homolog of NCBI NO: 2339978 NR Description: RGA1 protein [Arabidopsis thaliana]
  misc_feature (98)..(532): Homolog of NCBI NO: 2339978 NR Description: RGA1 protein [Arabidopsis thaliana]
  misc_feature (1)..(533): Homolog of NCBI NO: 2339980 NR Description: RGA2 protein [Arabidopsis thaliana]
  misc_feature (1)..(533): Homolog of NCBI NO: 2569938 NR Description: GAI [Arabidopsis thaliana]
  misc_feature (1)..(533): Homolog of NCBI NO: 15223951 NR Description: gibberellin response modulator (GAI/RGA2)
MKRDHHHHHHQDKKTMMMNEEDDGNGMDELLAVLGYKVRSSEMADVAQKLEQLEVMMSNVQEDDLSQLATETVHYNPAELYTWLDSMLTDLNPPSSNAEYDLKAIPGDAILNQFAIDSASSSNQGGGGDTYTTNKRLKCSNGVVETTTATAESTRHVVLVDSQENGVRLVHALLACAEAVQKENLTVAEALVKQIGFLAVSQIGAMRKVATYFAEALARRIYRLSPSQSPIDHSLSDTLQMHFYETCPYLKFAHFTANQAILEAFQGKKRVHVIDFSMSQGLQWPALMQALALRPGGPPVFRLTGIGPPAPDNFDYLHEVGCKLAHLAEAIHVEFEYRGFVANTLADLDASMLELRPSEIESVAVNSVFELHKLLGRPGAIDKVLGVVNQIKPEIFTVVEQESNHNSPIFLDRFTESLHYYSTLFDSLEGVPSGQDKVMSEVYLGKQICNVVACDGPDRVERHETLSQWRNRFGSAGFAAAHIGSNAFKQASMLLALFNGGEGYRVEESDGCLMLGWHTRPLIATSAWKLSTN

SEQ ID NO: 42671 - protein, 518 aa, Arabidopsis thaliana
  peptide (1)..(518): Ceres Seq. ID no. 13646492
  misc_feature (128)..(425): Pfam Name: GRAS family transcription factor Pfam Description: GRAS family transcription factor
  misc_feature (128)..(425): Pfam Name: GRAS family transcription factor Pfam Description: GRAS family transcription factor
  misc_feature (128)..(425): Pfam Name: GRAS family transcription factor Pfam Description: GRAS family transcription factor
  misc_feature (83)..(517): Homolog of NCBI NO: 15529230 NR Description: At2g01570/F2I9.19 [Arabidopsis thaliana]
  misc_feature (1)..(79): Homolog of NCBI NO: 2569940 NR Description: GRS protein [Arabidopsis thaliana]
  misc_feature (83)..(517): Homolog of NCBI NO: 2569940 NR Description: GRS protein [Arabidopsis thaliana]
  misc_feature (1)..(79): Homolog of NCBI NO: 15226311 NR Description: gibberellin response modulator (RGA1)
  misc_feature (83)..(517): Homolog of NCBI NO: 15226311 NR Description: gibberellin response modulator (RGA1)
  misc_feature (83)..(517): Homolog of NCBI NO: 15529230 NR Description: At2g01570/F2I9.19 [Arabidopsis thaliana]
  misc_feature (83)..(517): Homolog of NCBI NO: 2569940 NR Description: GRS protein [Arabidopsis thaliana]
  misc_feature (83)..(517): Homolog of NCBI NO: 15226311 NR Description: gibberellin response modulator (RGA1)
  misc_feature (1)..(79): Homolog of NCBI NO: 15226311 NR Description: gibberellin response modulator (RGA1)
  misc_feature (83)..(517): Homolog of NCBI NO: 2569940 NR Description: GRS protein [Arabidopsis thaliana]
  misc_feature (1)..(79): Homolog of NCBI NO: 2569940 NR Description: GRS protein [Arabidopsis thaliana]
  misc_feature (83)..(517): Homolog of NCBI NO: 15529230 NR Description: At2g01570/F2I9.19 [Arabidopsis thaliana]
  misc_feature (1)..(518): Homolog of NCBI NO: 15223951 NR Description: gibberellin response modulator (GAI/RGA2)
  misc_feature (1)..(518): Homolog of NCBI NO: 2569938 NR Description: GAI [Arabidopsis thaliana]
  misc_feature (1)..(518): Homolog of NCBI NO: 2339980 NR Description: RGA2 protein [Arabidopsis thaliana]
  misc_feature (83)..(517): Homolog of NCBI NO: 2339978 NR Description: RGA1 protein [Arabidopsis thaliana]
  misc_feature (1)..(79): Homolog of NCBI NO: 2339978 NR Description: RGA1 protein [Arabidopsis thaliana]
  misc_feature (1)..(518): Homolog of NCBI NO: 15223951 NR Description: gibberellin response modulator (GAI/RGA2)
  misc_feature (1)..(518): Homolog of NCBI NO: 2569938 NR Description: GAI [Arabidopsis thaliana]
  misc_feature (1)..(518): Homolog of NCBI NO: 2339980 NR Description: RGA2 protein [Arabidopsis thaliana]
  misc_feature (83)..(517): Homolog of NCBI NO: 2339978 NR Description: RGA1 protein [Arabidopsis thaliana]
  misc_feature (1)..(79): Homolog of NCBI NO: 2339978 NR Description: RGA1 protein [Arabidopsis thaliana]
  misc_feature (83)..(517): Homolog of NCBI NO: 15226311 NR Description: gibberellin response modulator (RGA1)
  misc_feature (1)..(79): Homolog of NCBI NO: 15226311 NR Description: gibberellin response modulator (RGA1)
  misc_feature (1)..(79): Homolog of NCBI NO: 2569940 NR Description: GRS protein [Arabidopsis thaliana]
  misc_feature (1)..(79): Homolog of NCBI NO: 2339978 NR Description: RGA1 protein [Arabidopsis thaliana]
  misc_feature (83)..(517): Homolog of NCBI NO: 2339978 NR Description: RGA1 protein [Arabidopsis thaliana]
  misc_feature (1)..(518): Homolog of NCBI NO: 2339980 NR Description: RGA2 protein [Arabidopsis thaliana]
  misc_feature (1)..(518): Homolog of NCBI NO: 2569938 NR Description: GAI [Arabidopsis thaliana]
  misc_feature (1)..(518): Homolog of NCBI NO: 15223951 NR Description: gibberellin response modulator (GAI/RGA2)
MMMNEEDDGNGMDELLAVLGYKVRSSEMADVAQKLEQLEVMMSNVQEDDLSQLATETVHYNPAELYTWLDSMLTDLNPPSSNAEYDLKAIPGDAILNQFAIDSASSSNQGGGGDTYTTNKRLKCSNGVVETTTATAESTRHVVLVDSQENGVRLVHALLACAEAVQKENLTVAEALVKQIGFLAVSQIGAMRKVATYFAEALARRIYRLSPSQSPIDHSLSDTLQMHFYETCPYLKFAHFTANQAILEAFQGKKRVHVIDFSMSQGLQWPALMQALALRPGGPPVFRLTGIGPPAPDNFDYLHEVGCKLAHLAEAIHVEFEYRGFVANTLADLDASMLELRPSEIESVAVNSVFELHKLLGRPGAIDKVLGVVNQIKPEIFTVVEQESNHNSPIFLDRFTESLHYYSTLFDSLEGVPSGQDKVMSEVYLGKQICNVVACDGPDRVERHETLSQWRNRFGSAGFAAAHIGSNAFKQASMLLALFNGGEGYRVEESDGCLMLGWHTRPLIATSAWKLSTN

SEQ ID NO: 42672 - protein, 517 aa, Arabidopsis thaliana
  peptide (1)..(517): Ceres Seq. ID no. 13646493
  misc_feature (127)..(424): Pfam Name: GRAS family transcription factor Pfam Description: GRAS family transcription factor
  misc_feature (127)..(424): Pfam Name: GRAS family transcription factor Pfam Description: GRAS family transcription factor
  misc_feature (127)..(424): Pfam Name: GRAS family transcription factor Pfam Description: GRAS family transcription factor
  misc_feature (82)..(516): Homolog of NCBI NO: 15529230 NR Description: At2g01570/F2I9.19 [Arabidopsis thaliana]
  misc_feature (1)..(78): Homolog of NCBI NO: 2569940 NR Description: GRS protein [Arabidopsis thaliana]
  misc_feature (82)..(516): Homolog of NCBI NO: 2569940 NR Description: GRS protein [Arabidopsis thaliana]
  misc_feature (1)..(78): Homolog of NCBI NO: 15226311 NR Description: gibberellin response modulator (RGA1)
  misc_feature (82)..(516): Homolog of NCBI NO: 15226311 NR Description: gibberellin response modulator (RGA1)
  misc_feature (82)..(516): Homolog of NCBI NO: 15529230 NR Description: At2g01570/F2I9.19 [Arabidopsis thaliana]
  misc_feature (82)..(516): Homolog of NCBI NO: 2569940 NR Description: GRS protein [Arabidopsis thaliana]
  misc_feature (82)..(516): Homolog of NCBI NO: 15226311 NR Description: gibberellin response modulator (RGA1)
  misc_feature (1)..(78): Homolog of NCBI NO: 15226311 NR Description: gibberellin response modulator (RGA1)
  misc_feature (82)..(516): Homolog of NCBI NO: 2569940 NR Description: GRS protein [Arabidopsis thaliana]
  misc_feature (1)..(78): Homolog of NCBI NO: 2569940 NR Description: GRS protein [Arabidopsis thaliana]
  misc_feature (82)..(516): Homolog of NCBI NO: 15529230 NR Description: At2g01570/F2I9.19 [Arabidopsis thaliana]
  misc_feature (1)..(517): Homolog of NCBI NO: 15223951 NR Description: gibberellin response modulator (GAI/RGA2)
  misc_feature (1)..(517): Homolog of NCBI NO: 2569938 NR Description: GAI [Arabidopsis thaliana]
  misc_feature (1)..(517): Homolog of NCBI NO: 2339980 NR Description: RGA2 protein [Arabidopsis thaliana]
  misc_feature (82)..(516): Homolog of NCBI NO: 2339978 NR Description: RGA1 protein [Arabidopsis thaliana]
  misc_feature (1)..(78): Homolog of NCBI NO: 2339978 NR Description: RGA1 protein [Arabidopsis thaliana]
  misc_feature (1)..(517): Homolog of NCBI NO: 15223951 NR Description: gibberellin response modulator (GAI/RGA2)
  misc_feature (1)..(517): Homolog of NCBI NO: 2569938 NR Description: GAI [Arabidopsis thaliana]
  misc_feature (1)..(517): Homolog of NCBI NO: 2339980 NR Description: RGA2 protein [Arabidopsis thaliana]
  misc_feature (82)..(516): Homolog of NCBI NO: 2339978 NR Description: RGA1 protein [Arabidopsis thaliana]
  misc_feature (1)..(78): Homolog of NCBI NO: 2339978 NR Description: RGA1 protein [Arabidopsis thaliana]
  misc_feature (82)..(516): Homolog of NCBI NO: 15226311 NR Description: gibberellin response modulator (RGA1)
  misc_feature (1)..(78): Homolog of NCBI NO: 15226311 NR Description: gibberellin response modulator (RGA1)
  misc_feature (1)..(78): Homolog of NCBI NO: 2569940 NR Description: GRS protein [Arabidopsis thaliana]
  misc_feature (1)..(78): Homolog of NCBI NO: 2339978 NR Description: RGA1 protein [Arabidopsis thaliana]
  misc_feature (82)..(516): Homolog of NCBI NO: 2339978 NR Description: RGA1 protein [Arabidopsis thaliana]
  misc_feature (1)..(517): Homolog of NCBI NO: 2339980 NR Description: RGA2 protein [Arabidopsis thaliana]
  misc_feature (1)..(517): Homolog of NCBI NO: 2569938 NR Description: GAI [Arabidopsis thaliana]
  misc_feature (1)..(517): Homolog of NCBI NO: 15223951 NR Description: gibberellin response modulator (GAI/RGA2)
MMNEEDDGNGMDELLAVLGYKVRSSEMADVAQKLEQLEVMMSNVQEDDLSQLATETVHYNPAELYTWLDSMLTDLNPPSSNAEYDLKAIPGDAILNQFAIDSASSSNQGGGGDTYTTNKRLKCSNGVVETTTATAESTRHVVLVDSQENGVRLVHALLACAEAVQKENLTVAEALVKQIGFLAVSQIGAMRKVATYFAEALARRIYRLSPSQSPIDHSLSDTLQMHFYETCPYLKFAHFTANQAILEAFQGKKRVHVIDFSMSQGLQWPALMQALALRPGGPPVFRLTGIGPPAPDNFDYLHEVGCKLAHLAEAIHVEFEYRGFVANTLADLDASMLELRPSEIESVAVNSVFELHKLLGRPGAIDKVLGVVNQIKPEIFTVVEQESNHNSPIFLDRFTESLHYYSTLFDSLEGVPSGQDKVMSEVYLGKQICNVVACDGPDRVERHETLSQWRNRFGSAGFAAAHIGSNAFKQASMLLALFNGGEGYRVEESDGCLMLGWHTRPLIATSAWKLSTN

SEQ ID NO: 42673 - DNA, 1854 bp, Arabidopsis thaliana
  misc_feature (1)..(1854): Ceres Seq. ID no. 13489613
  misc_feature: MA Experiment ID: 108434 Result: Up-regulated in Transcription
  misc_feature: MA Experiment 108434 PARAMETER Experiment Name: At_Root_Tips_cDNA_P Parameter: Tissue Value: Root Tips
  misc_feature: MA Experiment ID: 108461 Result: Down-regulated in Transcription
  misc_feature: MA Experiment 108461 PARAMETER Experiment Name: At_Germinating_Seeds_cDNA_P Parameter: Age (day) Value: 1 vs. 0
  misc_feature: MA Experiment 108461 PARAMETER Experiment Name: At_Germinating_Seeds_cDNA_P Parameter: Tissue Value: Germinating Seeds
  misc_feature: MA Experiment ID: 108462 Result: Down-regulated in Transcription
  misc_feature: MA Experiment 108462 PARAMETER Experiment Name: At_Germinating_Seeds_cDNA_P Parameter: Age (day) Value: 2 vs. 0
  misc_feature: MA Experiment 108462 PARAMETER Experiment Name: At_Germinating_Seeds_cDNA_P Parameter: Tissue Value: Germinating Seeds
  misc_feature: MA Experiment ID: 108463 Result: Down-regulated in Transcription
  misc_feature: MA Experiment 108463 PARAMETER Experiment Name: At_Germinating_Seeds_cDNA_P Parameter: Age (day) Value: 3 vs. 0
  misc_feature: MA Experiment 108463 PARAMETER Experiment Name: At_Germinating_Seeds_cDNA_P Parameter: Tissue Value: Germinating Seeds
  misc_feature: MA Experiment ID: 108464 Result: Down-regulated in Transcription
  misc_feature: MA Experiment 108464 PARAMETER Experiment Name: At_Germinating_Seeds_cDNA_P Parameter: Age (day) Value: 4 vs. 0
  misc_feature: MA Experiment 108464 PARAMETER Experiment Name: At_Germinating_Seeds_cDNA_P Parameter: Tissue Value: Germinating Seeds
  misc_feature: MA Experiment ID: 20001557 Result: Up-regulated in Transcription
  misc_feature: MA Experiment 20001557 PARAMETER Experiment Name: At_Drought_Soil_Dry_P Parameter: Age (day) Value: 27
  misc_feature: MA Experiment 20001557 PARAMETER Experiment Name: At_Drought_Soil_Dry_P Parameter: Organism Value: A. thaliana
  misc_feature: MA Experiment 20001557 PARAMETER Experiment Name: At_Drought_Soil_Dry_P Parameter: Plant Line Value: WS
  misc_feature: MA Experiment 20001557 PARAMETER Experiment Name: At_Drought_Soil_Dry_P Parameter: Post Timepoint (hr) Value: 3
  misc_feature: MA Experiment 20001557 PARAMETER Experiment Name: At_Drought_Soil_Dry_P Parameter: Post-Treatment Value: Re-Water vs. No Drought
  misc_feature: MA Experiment 20001557 PARAMETER Experiment Name: At_Drought_Soil_Dry_P Parameter: Timepoint (day) Value: 13
  misc_feature: MA Experiment 20001557 PARAMETER Experiment Name: At_Drought_Soil_Dry_P Parameter: Treatment Value: Drought vs. No Drought
ggaggagccgtcaaattgatttcgccgatttgctcatctctgactctcagttgctttgctccttctcatggagaatccggcggagaaacccgacccgaatccatcaaaacccaaaatcgaatctgaagatgaaagagaagaactaggagatattaacggcgacgaagaagaagaggaagagtatgaggaagaagacgatgggaaacctcgaacgcgagaggatgcaatcgcggataggatcaaagctgagtctctgttccgtcgtatgcgagcaactccggtcgctgtgcgtgttcacgacgtgatcgtcaagggaaacgagaagactaaggatcatgtcatcgaggctgaggtggatgttgtgaggcaagccactacgttgcaggagcttctcaaagcctctaaggttgccaatttcaatctacaagcgcttgatatcttcgattcagtcaaaattacgcttgattctggtcctcctgagcttcctggtaccaccaatgttgttatcgatgttgttgagagcaaaagccctatcaccggtcaaatcggaaccttcactaaagcagaggctcggtcatcaagccttgaaggctctttgaagtacaagaacatatttgggtatggagatatctgggacgggtctcttgcttatggctgtgatcactctgcagaggtcggcttggggatgtatttgccaaggttcagagggcgtcctactccatttacgtcgcgggtttacctttctacccaagattggcttaagttttcgtcttataaagaacgagctcttggtctttccctcgggcttatcgctagcaagtatcatgagctggcctataatattgcatggcgtaacctgatagacccatcgcaaatggcatcaagatcaataaggagacagctgggtcataatttggtttctgctctgaagtacactttcaaatttgaccagagaaactcatctttgaggccaacacgaggttactctttcatctcgacttctcaaataggtggtcttgcacctgatagtcgaactctccgctttttgcgccaggaaatcgaccttcgatatgctgttccactcgggttttatcgtgctgctctgaactttggtatagctgggggaatcacatttccatggggaagcggatacaagagcagagcttcttgtgtacctgagaggttcttcttaggtggaaacatatcgcctgtgtgttctttgggaggaccatctgcattatggggattcaagactaggggattgggtcctaacgaaccaaggagggaagtacaggacgatgagagtggtgacacatatgaacgggattttgtgggaggagatgttgcggttactgcatttgcagacctttcttttgatttcccattgaaatggttcagagacagaggaatccacggacatgtgtttgcatgtgccgggaatatggcggaattatcagagaacaagtataggaacttcacagctccaaagttgttggagacattcagaagctcagttggtgcaggaatcgtggtaccaactagtctatttcgcatggagctcaactactgccacatactgaagaaacaagaacacgatcgagcaaaatctggatttttcatgacattttcaacatcatcttaatgctacttttgatgatatcttaattttggctttgcactcacagtgtcatggcggagtcttttgttttgtttccaggagctttcattgtttaggttgttgtttggaattgaaaactgtgcaaattttagagagagagattacctgatgtgcggattgttcttgggaaggagatagatcaagaaataaaaattaactaaagttgatttgttttg

SEQ ID NO: 42674 - protein, 524 aa, Arabidopsis thaliana
  peptide (1)..(524): Ceres Seq. ID no. 13489614
  misc_feature (74)..(380): Homolog of NCBI NO: 31542301 NR Description: CGI-51 protein [Homo sapiens]
  misc_feature (74)..(380): Homolog of NCBI NO: 4929571 NR Description: CGI-51 protein [Homo sapiens]
  misc_feature (74)..(380): Homolog of NCBI NO: 14043738 NR Description: Unknown (protein for MGC:14085) [Homo sapiens]
  misc_feature (74)..(380): Homolog of NCBI NO: 34867488 NR Description: similar to Protein CGI-51 [Rattus norvegicus]
  misc_feature (74)..(380): Homolog of NCBI NO: 30519943 NR Description: RIKEN cDNA 1110030L07 [Mus musculus]
  misc_feature (72)..(380): Homolog of NCBI NO: 28436784 NR Description: Unknown (protein for MGC:53756) [Xenopus laevis]
  misc_feature (72)..(380): Homolog of NCBI NO: 38511778 NR Description: CGI-51 protein [Silurana tropicalis]
  misc_feature (1)..(524): Homolog of NCBI NO: 15228433 NR Description: expressed protein [Arabidopsis thaliana]
  misc_feature (1)..(524): Homolog of NCBI NO: 21553544 NR Description: unknown [Arabidopsis thaliana]
  misc_feature (1)..(524): Homolog of NCBI NO: 18414910 NR Description: expressed protein [Arabidopsis thaliana]
MENPAEKPDPNPSKPKIESEDEREELGDINGDEEEEEEYEEEDDGKPRTREDAIADRIKAESLFRRMRATPVAVRVHDVIVKGNEKTKDHVIEAEVDVVRQATTLQELLKASKVANFNLQALDIFDSVKITLDSGPPELPGTTNVVIDVVESKSPITGQIGTFTKAEARSSSLEGSLKYKNIFGYGDIWDGSLAYGCDHSAEVGLGMYLPRFRGRPTPFTSRVYLSTQDWLKFSSYKERALGLSLGLIASKYHELAYNIAWRNLIDPSQMASRSIRRQLGHNLVSALKYTFKFDQRNSSLRPTRGYSFISTSQIGGLAPDSRTLRFLRQEIDLRYAVPLGFYRAALNFGIAGGITFPWGSGYKSRASCVPERFFLGGNISPVCSLGGPSALWGFKTRGLGPNEPRREVQDDESGDTYERDFVGGDVAVTAFADLSFDFPLKWFRDRGIHGHVFACAGNMAELSENKYRNFTAPKLLETFRSSVGAGIVVPTSLFRMELNYCHILKKQEHDRAKSGFFMTFSTSS

SEQ ID NO: 42675 - protein, 458 aa, Arabidopsis thaliana
  peptide (1)..(458): Ceres Seq. ID no. 13489615
  misc_feature (8)..(314): Homolog of NCBI NO: 5596714 NR Description: dJ796I17.2 (CGI-51) [Homo sapiens]
  misc_feature (8)..(314): Homolog of NCBI NO: 4929571 NR Description: CGI-51 protein [Homo sapiens]
  misc_feature (8)..(314): Homolog of NCBI NO: 14043738 NR Description: Unknown (protein for MGC:14085) [Homo sapiens]
  misc_feature (8)..(314): Homolog of NCBI NO: 34867488 NR Description: similar to Protein CGI-51 [Rattus norvegicus]
  misc_feature (8)..(314): Homolog of NCBI NO: 30519943 NR Description: RIKEN cDNA 1110030L07 [Mus musculus]
  misc_feature (6)..(314): Homolog of NCBI NO: 28436784 NR Description: Unknown (protein for MGC:53756) [Xenopus laevis]
  misc_feature (6)..(314): Homolog of NCBI NO: 38511778 NR Description: CGI-51 protein [Silurana tropicalis]
  misc_feature (1)..(458): Homolog of NCBI NO: 15228433 NR Description: expressed protein [Arabidopsis thaliana]
  misc_feature (1)..(458): Homolog of NCBI NO: 21553544 NR Description: unknown [Arabidopsis thaliana]
  misc_feature (1)..(458): Homolog of NCBI NO: 18414910 NR Description: expressed protein [Arabidopsis thaliana]
MRATPVAVRVHDVIVKGNEKTKDHVIEAEVDVVRQATTLQELLKASKVANFNLQALDIFDSVKITLDSGPPELPGTTNVVIDVVESKSPITGQIGTFTKAEARSSSLEGSLKYKNIFGYGDIWDGSLAYGCDHSAEVGLGMYLPRFRGRPTPFTSRVYLSTQDWLKFSSYKERALGLSLGLIASKYHELAYNIAWRNLIDPSQMASRSIRRQLGHNLVSALKYTFKFDQRNSSLRPTRGYSFISTSQIGGLAPDSRTLRFLRQEIDLRYAVPLGFYRAALNFGIAGGITFPWGSGYKSRASCVPERFFLGGNISPVCSLGGPSALWGFKTRGLGPNEPRREVQDDESGDTYERDFVGGDVAVTAFADLSFDFPLKWFRDRGIHGHVFACAGNMAELSENKYRNFTAPKLLETFRSSVGAGIVVPTSLFRMELNYCHILKKQEHDRAKSGFFMTFSTSS

SEQ ID NO: 42676 - protein, 318 aa, Arabidopsis thaliana
  peptide (1)..(318): Ceres Seq. ID no. 13489616
  misc_feature (1)..(174): Homolog of NCBI NO: 5596714 NR Description: dJ796I17.2 (CGI-51) [Homo sapiens]
  misc_feature (1)..(174): Homolog of NCBI NO: 4929571 NR Description: CGI-51 protein [Homo sapiens]
  misc_feature (1)..(174): Homolog of NCBI NO: 14043738 NR Description: Unknown (protein for MGC:14085) [Homo sapiens]
  misc_feature (1)..(174): Homolog of NCBI NO: 34867488 NR Description: similar to Protein CGI-51 [Rattus norvegicus]
  misc_feature (1)..(174): Homolog of NCBI NO: 30519943 NR Description: RIKEN cDNA 1110030L07 [Mus musculus]
  misc_feature (1)..(174): Homolog of NCBI NO: 28436784 NR Description: Unknown (protein for MGC:53756) [Xenopus laevis]
  misc_feature (1)..(174): Homolog of NCBI NO: 38511778 NR Description: CGI-51 protein [Silurana tropicalis]
  misc_feature (1)..(318): Homolog of NCBI NO: 15228433 NR Description: expressed protein [Arabidopsis thaliana]
  misc_feature (1)..(318): Homolog of NCBI NO: 21553544 NR Description: unknown [Arabidopsis thaliana]
  misc_feature (1)..(318): Homolog of NCBI NO: 18414910 NR Description: expressed protein [Arabidopsis thaliana]
MYLPRFRGRPTPFTSRVYLSTQDWLKFSSYKERALGLSLGLIASKYHELAYNIAWRNLIDPSQMASRSIRRQLGHNLVSALKYTFKFDQRNSSLRPTRGYSFISTSQIGGLAPDSRTLRFLRQEIDLRYAVPLGFYRAALNFGIAGGITFPWGSGYKSRASCVPERFFLGGNISPVCSLGGPSALWGFKTRGLGPNEPRREVQDDESGDTYERDFVGGDVAVTAFADLSFDFPLKWFRDRGIHGHVFACAGNMAELSENKYRNFTAPKLLETFRSSVGAGIVVPTSLFRMELNYCHILKKQEHDRAKSGFFMTFSTSS

SEQ ID NO: 42677 - DNA, 777 bp, Arabidopsis thaliana
  misc_feature (1)..(777): Ceres Seq. ID no. 13646172
  misc_feature: MA Experiment ID: 20000185 Result: Up-regulated in Transcription
  misc_feature: MA Experiment 20000185 PARAMETER Experiment Name: At_Roots__P Parameter: Age (day) Value: 7 vs. 21
  misc_feature: MA Experiment 20000185 PARAMETER Experiment Name: At_Roots__P Parameter: Organism Value: A. thaliana
  misc_feature: MA Experiment 20000185 PARAMETER Experiment Name: At_Roots__P Parameter: Tissue Value: Roots vs. Whole Plant
  misc_feature: MA Experiment ID: 20000436 Result: Up-regulated in Transcription
  misc_feature: MA Experiment 20000436 PARAMETER Experiment Name: At_Drought_P Parameter: Age (day) Value: 7
  misc_feature: MA Experiment 20000436 PARAMETER Experiment Name: At_Drought_P Parameter: Organism Value: A. thaliana
  misc_feature: MA Experiment 20000436 PARAMETER Experiment Name: At_Drought_P Parameter: Plant Line Value: WS
  misc_feature: MA Experiment 20000436 PARAMETER Experiment Name: At_Drought_P Parameter: Timepoint (hr) Value: 12
  misc_feature: MA Experiment 20000436 PARAMETER Experiment Name: At_Drought_P Parameter: Tissue Value: Whole Plant
  misc_feature: MA Experiment 20000436 PARAMETER Experiment Name: At_Drought_P Parameter: Treatment Value: Drought vs. No Drought
  misc_feature: MA Experiment ID: 20000437 Result: Up-regulated in Transcription
  misc_feature: MA Experiment 20000437 PARAMETER Experiment Name: At_Drought_P Parameter: Age (day) Value: 8
  misc_feature: MA Experiment 20000437 PARAMETER Experiment Name: At_Drought_P Parameter: Organism Value: A. thaliana
  misc_feature: MA Experiment 20000437 PARAMETER Experiment Name: At_Drought_P Parameter: Plant Line Value: WS
  misc_feature: MA Experiment 20000437 PARAMETER Experiment Name: At_Drought_P Parameter: Timepoint (hr) Value: 24
  misc_feature: MA Experiment 20000437 PARAMETER Experiment Name: At_Drought_P Parameter: Tissue Value: Whole Plant
  misc_feature: MA Experiment 20000437 PARAMETER Experiment Name: At_Drought_P Parameter: Treatment Value: Drought vs. No Drought
  misc_feature: MA Experiment ID: 20000439 Result: Up-regulated in Transcription
  misc_feature: MA Experiment 20000439 PARAMETER Experiment Name: At_Roots__P Parameter: Age (day) Value: 14 vs. 21
  misc_feature: MA Experiment 20000439 PARAMETER Experiment Name: At_Roots__P Parameter: Organism Value: A. thaliana
  misc_feature: MA Experiment 20000439 PARAMETER Experiment Name: At_Roots__P Parameter: Tissue Value: Roots vs. Whole Plant
  misc_feature: MA Experiment ID: 20000451 Result: Down-regulated in Transcription
  misc_feature: MA Experiment 20000451 PARAMETER Experiment Name: At_CS6879_Shoots-Roots_P Parameter: Age (day) Value: 14
  misc_feature: MA Experiment 20000451 PARAMETER Experiment Name: At_CS6879_Shoots-Roots_P Parameter: Organism Value: A. thaliana
  misc_feature: MA Experiment 20000451 PARAMETER Experiment Name: At_CS6879_Shoots-Roots_P Parameter: Plant Line Value: CS6879 vs. WS
  misc_feature: MA Experiment 20000451 PARAMETER Experiment Name: At_CS6879_Shoots-Roots_P Parameter: Tissue Value: Roots
  misc_feature: MA Experiment ID: 20000453 Result: Up-regulated in Transcription
  misc_feature: MA Experiment 20000453 PARAMETER Experiment Name: At_100uM_ABA_P Parameter: Age (day) Value: 15
  misc_feature: MA Experiment 20000453 PARAMETER Experiment Name: At_100uM_ABA_P Parameter: Organism Value: A. thaliana
  misc_feature: MA Experiment 20000453 PARAMETER Experiment Name: At_100uM_ABA_P Parameter: Plant Line Value: WS
  misc_feature: MA Experiment 20000453 PARAMETER Experiment Name: At_100uM_ABA_P Parameter: Timepoint (hr) Value: 24
  misc_feature: MA Experiment 20000453 PARAMETER Experiment Name: At_100uM_ABA_P Parameter: Tissue Value: Aerial
  misc_feature: MA Experiment 20000453 PARAMETER Experiment Name: At_100uM_ABA_P Parameter: Treatment Value: 100uM ABA vs. No Treatment
  misc_feature: MA Experiment ID: 20000456 Result: Up-regulated in Transcription
  misc_feature: MA Experiment 20000456 PARAMETER Experiment Name: At_100uM_BA_P Parameter: Age (day) Value: 14
  misc_feature: MA Experiment 20000456 PARAMETER Experiment Name: At_100uM_BA_P Parameter: Organism Value: A. thaliana
  misc_feature: MA Experiment 20000456 PARAMETER Experiment Name: At_100uM_BA_P Parameter: Plant Line Value: WS
  misc_feature: MA Experiment 20000456 PARAMETER Experiment Name: At_100uM_BA_P Parameter: Timepoint (hr) Value: 6
  misc_feature: MA Experiment 20000456 PARAMETER Experiment Name: At_100uM_BA_P Parameter: Tissue Value: Aerial
  misc_feature: MA Experiment 20000456 PARAMETER Experiment Name: At_100uM_BA_P Parameter: Treatment Value: 100uM BA vs. No Treatment
  misc_feature: MA Experiment ID: 20001905 Result: Up-regulated in Transcription
  misc_feature: MA Experiment 20001905 PARAMETER Experiment Name: At_Drought_Reproduction_P Parameter: Age (day) Value: 40
  misc_feature: MA Experiment 20001905 PARAMETER Experiment Name: At_Drought_Reproduction_P Parameter: Organism Value: A. thaliana
  misc_feature: MA Experiment 20001905 PARAMETER Experiment Name: At_Drought_Reproduction_P Parameter: Plant Line Value: WS
  misc_feature: MA Experiment 20001905 PARAMETER Experiment Name: At_Drought_Reproduction_P Parameter: Timepoint (day) Value: 10
  misc_feature: MA Experiment 20001905 PARAMETER Experiment Name: At_Drought_Reproduction_P Parameter: Tissue Value: Rosettes
  misc_feature: MA Experiment 20001905 PARAMETER Experiment Name: At_Drought_Reproduction_P Parameter: Treatment Value: Drought vs. No Drought
  misc_feature: MA Experiment ID: 20001911 Result: Up-regulated in Transcription
  misc_feature: MA Experiment 20001911 PARAMETER Experiment Name: At_Drought_Reproduction_P Parameter: Age (day) Value: 40
  misc_feature: MA Experiment 20001911 PARAMETER Experiment Name: At_Drought_Reproduction_P Parameter: Organism Value: A. thaliana
  misc_feature: MA Experiment 20001911 PARAMETER Experiment Name: At_Drought_Reproduction_P Parameter: Plant Line Value: WS
  misc_feature: MA Experiment 20001911 PARAMETER Experiment Name: At_Drought_Reproduction_P Parameter: Timepoint (day) Value: 10
  misc_feature: MA Experiment 20001911 PARAMETER Experiment Name: At_Drought_Reproduction_P Parameter: Tissue Value: Flowers
  misc_feature: MA Experiment 20001911 PARAMETER Experiment Name: At_Drought_Reproduction_P Parameter: Treatment Value: Drought vs. No Drought
aaaaaagtccattgtttcaagcaatactctcaagtctaaagaagaataaaaaaaatggatgaagaagttgagaacaaagtgatactccatggatcattcgcgagtccttacagcaaaaggattgagttagccctaaggcttaaatccataccttaccaattcgtgcaagaagatctccagaacaagagccaaaccctgctccggtataacccggttcacaagaagatcccggttcttgtccacaacggtaaacccatctctgagtccttgtttatcattgaatacatcgacgaaacgtggagtaacggtccacatattttgccagaagacccttatagaagatctaaagtccggttttgggctaactacatccaattacatctttacgatttggtgataaaagtggtgaaaagcgaaggagaagagcaaaagaaagctctcacagaagtaaaggagaagctgagcgttatagagaaagaagggcttaaggagattttctctgacactgatggtgaaccaactgtgacgaacgagaccatgagcctcgtagacattgtgatgtgcactttgcttagcccttacaaggcacacgaagaagttttgggtctgaaaattattgacccagagatagttcctggtgtctacgggtggatcaatgctataaacgaaaccagcgtggtcaaagatctaagtcctccttatgaacaaatcctagagattcttcgggctttcagacagatgtctctctctcccgttcttgaaacttatcagtcataa

SEQ ID NO: 42678 - protein, 240 aa, Arabidopsis thaliana
  peptide (1)..(240): Ceres Seq. ID no. 13646173
  misc_feature (1)..(71): Homolog of NCBI NO: 30697688 NR Description: glutathione transferase, putative [Arabidopsis
  misc_feature (91)..(240): Homolog of NCBI NO: 30697688 NR Description: glutathione transferase, putative [Arabidopsis
  misc_feature (1)..(240): Homolog of NCBI NO: 30697685 NR Description: glutathione transferase, putative [Arabidopsis
MDEEVENKVILHGSFASPYSKRIELALRLKSIPYQFVQEDLQNKSQTLLRYNPVHKKIPVLVHNGKPISESLFIIEYIDETWSNGPHILPEDPYRRSKVRFWANYIQLHLYDLVIKVVKSEGEEQKKALTEVKEKLSVIEKEGLKEIFSDTDGEPTVTNETMSLVDIVMCTLLSPYKAHEEVLGLKIIDPEIVPGVYGWINAINETSVVKDLSPPYEQILEILRAFRQMSLSPVLETYQS

SEQ ID NO: 42679 - DNA, 1212 bp, Arabidopsis thaliana
  misc_feature (1)..(1212): Ceres Seq. ID no. 12331218
  misc_feature: MA Experiment ID: 108461 Result: Up-regulated in Transcription
  misc_feature: MA Experiment 108461 PARAMETER Experiment Name: At_Germinating_Seeds_cDNA_P Parameter: Age (day) Value: 1 vs. 0
  misc_feature: MA Experiment 108461 PARAMETER Experiment Name: At_Germinating_Seeds_cDNA_P Parameter: Tissue Value: Germinating Seeds
  misc_feature: MA Experiment ID: 108462 Result: Up-regulated in Transcription
  misc_feature: MA Experiment 108462 PARAMETER Experiment Name: At_Germinating_Seeds_cDNA_P Parameter: Age (day) Value: 2 vs. 0
  misc_feature: MA Experiment 108462 PARAMETER Experiment Name: At_Germinating_Seeds_cDNA_P Parameter: Tissue Value: Germinating Seeds
  misc_feature: MA Experiment ID: 108463 Result: Up-regulated in Transcription
  misc_feature: MA Experiment 108463 PARAMETER Experiment Name: At_Germinating_Seeds_cDNA_P Parameter: Age (day) Value: 3 vs. 0
  misc_feature: MA Experiment 108463 PARAMETER Experiment Name: At_Germinating_Seeds_cDNA_P Parameter: Tissue Value: Germinating Seeds
  misc_feature: MA Experiment ID: 108464 Result: Up-regulated in Transcription
  misc_feature: MA Experiment 108464 PARAMETER Experiment Name: At_Germinating_Seeds_cDNA_P Parameter: Age (day) Value: 4 vs. 0
  misc_feature: MA Experiment 108464 PARAMETER Experiment Name: At_Germinating_Seeds_cDNA_P Parameter: Tissue Value: Germinating Seeds
  misc_feature: MA Experiment ID: 20000185 Result: Up-regulated in Transcription
  misc_feature: MA Experiment 20000185 PARAMETER Experiment Name: At_Roots__P Parameter: Age (day) Value: 7 vs. 21
  misc_feature: MA Experiment 20000185 PARAMETER Experiment Name: At_Roots__P Parameter: Organism Value: A. thaliana
  misc_feature: MA Experiment 20000185 PARAMETER Experiment Name: At_Roots__P Parameter: Tissue Value: Roots vs. Whole Plant
  misc_feature: MA Experiment ID: 20000227 Result: Up-regulated in Transcription
  misc_feature: MA Experiment 20000227 PARAMETER Experiment Name: At_Root-Tips-vs-Tops_P Parameter: Tissue Value: Root Tips vs. Root Tops
  misc_feature: MA Experiment ID: 20000439 Result: Up-regulated in Transcription
  misc_feature: MA Experiment 20000439 PARAMETER Experiment Name: At_Roots__P Parameter: Age (day) Value: 14 vs. 21
  misc_feature: MA Experiment 20000439 PARAMETER Experiment Name: At_Roots__P Parameter: Organism Value: A. thaliana
  misc_feature: MA Experiment 20000439 PARAMETER Experiment Name: At_Roots__P Parameter: Tissue Value: Roots vs. Whole Plant
  misc_feature: MA Experiment ID: 20000460 Result: Down-regulated in Transcription
  misc_feature: MA Experiment 20000460 PARAMETER Experiment Name: At_10percent_PEG_P Parameter: Age (day) Value: 12
  misc_feature: MA Experiment 20000460 PARAMETER Experiment Name: At_10percent_PEG_P Parameter: Organism Value: A. thaliana
  misc_feature: MA Experiment 20000460 PARAMETER Experiment Name: At_10percent_PEG_P Parameter: Plant Line Value: WS
  misc_feature: MA Experiment 20000460 PARAMETER Experiment Name: At_10percent_PEG_P Parameter: Timepoint (day) Value: 12
  misc_feature: MA Experiment 20000460 PARAMETER Experiment Name: At_10percent_PEG_P Parameter: Tissue Value: Whole Plant
  misc_feature: MA Experiment 20000460 PARAMETER Experiment Name: At_10percent_PEG_P Parameter: Treatment Value: 10percent PEG vs. No Treatment
  misc_feature: MA Experiment ID: 20000527 Result: Down-regulated in Transcription
  misc_feature: MA Experiment 20000527 PARAMETER Experiment Name: At_10percent_PEG_P Parameter: Age (day) Value: 20
  misc_feature: MA Experiment 20000527 PARAMETER Experiment Name: At_10percent_PEG_P Parameter: Organism Value: A. thaliana
  misc_feature: MA Experiment 20000527 PARAMETER Experiment Name: At_10percent_PEG_P Parameter: Plant Line Value: WS
  misc_feature: MA Experiment 20000527 PARAMETER Experiment Name: At_10percent_PEG_P Parameter: Timepoint (day) Value: 20
  misc_feature: MA Experiment 20000527 PARAMETER Experiment Name: At_10percent_PEG_P Parameter: Tissue Value: Whole Plant
  misc_feature: MA Experiment 20000527 PARAMETER Experiment Name: At_10percent_PEG_P Parameter: Treatment Value: 10percent PEG vs. No Treatment
  misc_feature: MA Experiment ID: 20001451 Result: Up-regulated in Transcription
  misc_feature: MA Experiment 20001451 PARAMETER Experiment Name: At_Far-red-induction_P Parameter: Age (day) Value: 7
  misc_feature: MA Experiment 20001451 PARAMETER Experiment Name: At_Far-red-induction_P Parameter: Light Value: Far-red vs. White
  misc_feature: MA Experiment 20001451 PARAMETER Experiment Name: At_Far-red-induction_P Parameter: Organism Value: A. thaliana
  misc_feature: MA Experiment 20001451 PARAMETER Experiment Name: At_Far-red-induction_P Parameter: Plant Line Value: Columbia
  misc_feature: MA Experiment 20001451 PARAMETER Experiment Name: At_Far-red-induction_P Parameter: Timepoint (hr) Value: 24
  misc_feature: MA Experiment 20001451 PARAMETER Experiment Name: At_Far-red-induction_P Parameter: Tissue Value: Whole Plant
  misc_feature: MA Experiment ID: 20001774 Result: Down-regulated in Transcription
  misc_feature: MA Experiment 20001774 PARAMETER Experiment Name: At_Far-red-enriched-adult_P Parameter: Age (day) Value: 31
  misc_feature: MA Experiment 20001774 PARAMETER Experiment Name: At_Far-red-enriched-adult_P Parameter: Light Value: Far-red enriched vs. White
  misc_feature: MA Experiment 20001774 PARAMETER Experiment Name: At_Far-red-enriched-adult_P Parameter: Organism Value: A. thaliana
  misc_feature: MA Experiment 20001774 PARAMETER Experiment Name: At_Far-red-enriched-adult_P Parameter: Plant Line Value: Columbia
  misc_feature: MA Experiment 20001774 PARAMETER Experiment Name: At_Far-red-enriched-adult_P Parameter: Timepoint (hr) Value: 72
  misc_feature: MA Experiment 20001774 PARAMETER Experiment Name: At_Far-red-enriched-adult_P Parameter: Tissue Value: Aerial
acaacactcgacacaaaagcaaaaacaaaaatgggtgagaaagatattccaaggaacttgaaggaagaagaagaagaagaagaagaaaaccaaagtgaagaaaccaaaagtttgatctcttcacttccttcagacatagattgctcagggaccaagttgtacaagtaccaaggatgttggtacgacaaagatattctccaagcaatcctcaatttcaacaaaaactttcagccacaagaaacggatataattgttgcttctttccccaaatcgggtacgacttggctcaaggcactcacattcgcactcgcgcaaagatcaaaacacacttcagacaatcatcctctgctaactcataatcctcatgagctagtgccgtacctcgagctcgatctttatctcaaaagctcgaaaccggatttgaccaagttgccatcatcatctccgagattgttctcaacccacatgtcctttgatgcgcttaaagtaccgttgaaagagtctccttgcaagatcgtgtacgtgtgcaggaacgtgaatgacgtattgatatcactttggtgtttcgaaaactccatgagtggagaaaacaatttaagtctcgaggctttgttcgagtctttatgtagcggagttaacttatgcggtcccttatgggaaaatgtgttaggctattggagaggaagcttggaagatcctaagcatgtgcttttcttgaggtacgaggagttgaagacggagcctcgtgtgcaaatcaagagacttgcagagttcttagattgtccattcacaaaggaagaagaagatagtggaggtgtagacaagatcttggaactttgttctctaagaaaccttagcggtttggagatcaacaaaacaggaagcttgtcggaaggagtaagtttcaagagttttttccgtaaaggggaagttggtgattggaagagttatatgactcctgaaatggaaaacaaaatcgacatgattgttgaggagaaacttcaaggctctggtttgaaattgtagagttcatatctctatgtatatgtgtgggaacaggtttaatctcaaacctaataatgctggtttgttcttttcttgtatgcaatgtaataaaagttactttgatgtaaggttaagagtttaagattcttagtgatgtgttgttgtttttgtttcgtttgataacgaataaagctagcggcttttctc

SEQ ID NO: 42680 - protein, 341 aa, Arabidopsis thaliana
  peptide (1)..(341): Ceres Seq. ID no. 12331219
  misc_feature (80)..(338): Pfam Name: Sulfotransferase domain Pfam Description: Sulfotransferase domain
  misc_feature (10)..(339): Homolog of NCBI NO: 9759557 NR Description: steroid sulfotransferase-like protein
  misc_feature (27)..(339): Homolog of NCBI NO: 25288806 NR Description: probable steroid sulfotransferase
  misc_feature (27)..(339): Homolog of NCBI NO: 18395604 NR Description: putative steroid sulfotransferase
  misc_feature (11)..(340): Homolog of NCBI NO: 15217849 NR Description: steroid sulfotransferase, putative; protein id:
  misc_feature (11)..(340): Homolog of NCBI NO: 15230603 NR Description: sulfotransferase-like protein; protein id:
  misc_feature (28)..(340): Homolog of NCBI NO: 15239947 NR Description: steroid sulfotransferase-like; protein id:
  misc_feature (29)..(340): Homolog of NCBI NO: 15230602 NR Description: sulfotransferase-like protein; protein id:
  misc_feature (11)..(340): Homolog of NCBI NO: 15226028 NR Description: putative steroid sulfotransferase; protein id:
  misc_feature (11)..(341): Homolog of NCBI NO: 15222843 NR Description: steroid sulfotransferase, putative
  misc_feature (11)..(341): Homolog of NCBI NO: 21553545 NR Description: steroid sulfotransferase, putative [Arabidopsis
TTLDTKAKTKMGEKDIPRNLKEEEEEEEENQSEETKSLISSLPSDIDCSGTKLYKYQGCWYDKDILQAILNFNKNFQPQETDIIVASFPKSGTTWLKALTFALAQRSKHTSDNHPLLTHNPHELVPYLELDLYLKSSKPDLTKLPSSSPRLFSTHMSFDALKVPLKESPCKIVYVCRNVNDVLISLWCFENSMSGENNLSLEALFESLCSGVNLCGPLWENVLGYWRGSLEDPKHVLFLRYEELKTEPRVQIKRLAEFLDCPFTKEEEDSGGVDKILELCSLRNLSGLEINKTGSLSEGVSFKSFFRKGEVGDWKSYMTPEMENKIDMIVEEKLQGSGLKL

SEQ ID NO: 42681 - protein, 331 aa, Arabidopsis thaliana
  peptide (1)..(331): Ceres Seq. ID no. 12331220
  misc_feature (70)..(328): Pfam Name: Sulfotransferase domain Pfam Description: Sulfotransferase domain
  misc_feature (1)..(329): Homolog of NCBI NO: 9759557 NR Description: steroid sulfotransferase-like protein
  misc_feature (17)..(329): Homolog of NCBI NO: 25288806 NR Description: probable steroid sulfotransferase
  misc_feature (17)..(329): Homolog of NCBI NO: 18395604 NR Description: putative steroid sulfotransferase
  misc_feature (1)..(330): Homolog of NCBI NO: 15217849 NR Description: steroid sulfotransferase, putative; protein id:
  misc_feature (1)..(330): Homolog of NCBI NO: 15230603 NR Description: sulfotransferase-like protein; protein id:
  misc_feature (18)..(330): Homolog of NCBI NO: 15239947 NR Description: steroid sulfotransferase-like; protein id:
  misc_feature (19)..(330): Homolog of NCBI NO: 15230602 NR Description: sulfotransferase-like protein; protein id:
  misc_feature (1)..(330): Homolog of NCBI NO: 15226028 NR Description: putative steroid sulfotransferase; protein id:
  misc_feature (1)..(331): Homolog of NCBI NO: 15222843 NR Description: steroid sulfotransferase, putative
  misc_feature (1)..(331): Homolog of NCBI NO: 21553545 NR Description: steroid sulfotransferase, putative [Arabidopsis
MGEKDIPRNLKEEEEEEEENQSEETKSLISSLPSDIDCSGTKLYKYQGCWYDKDILQAILNFNKNFQPQETDIIVASFPKSGTTWLKALTFALAQRSKHTSDNHPLLTHNPHELVPYLELDLYLKSSKPDLTKLPSSSPRLFSTHMSFDALKVPLKESPCKIVYVCRNVNDVLISLWCFENSMSGENNLSLEALFESLCSGVNLCGPLWENVLGYWRGSLEDPKHVLFLRYEELKTEPRVQIKRLAEFLDCPFTKEEEDSGGVDKILELCSLRNLSGLEINKTGSLSEGVSFKSFFRKGEVGDWKSYMTPEMENKIDMIVEEKLQGSGLKL

SEQ ID NO: 42682 - protein, 186 aa, Arabidopsis thaliana
  peptide (1)..(186): Ceres Seq. ID no. 12331221
  misc_feature (1)..(183): Pfam Name: Sulfotransferase domain Pfam Description: Sulfotransferase domain
  misc_feature (1)..(184): Homolog of NCBI NO: 9759557 NR Description: steroid sulfotransferase-like protein
  misc_feature (1)..(184): Homolog of NCBI NO: 25288806 NR Description: probable steroid sulfotransferase
  misc_feature (1)..(184): Homolog of NCBI NO: 18395604 NR Description: putative steroid sulfotransferase
  misc_feature (1)..(185): Homolog of NCBI NO: 15217849 NR Description: steroid sulfotransferase, putative; protein id:
  misc_feature (1)..(185): Homolog of NCBI NO: 15230603 NR Description: sulfotransferase-like protein; protein id:
  misc_feature (1)..(185): Homolog of NCBI NO: 15239947 NR Description: steroid sulfotransferase-like; protein id:
  misc_feature (1)..(185): Homolog of NCBI NO: 15230602 NR Description: sulfotransferase-like protein; protein id:
  misc_feature (1)..(185): Homolog of NCBI NO: 15226028 NR Description: putative steroid sulfotransferase; protein id:
  misc_feature (1)..(186): Homolog of NCBI NO: 15222843 NR Description: steroid sulfotransferase, putative
  misc_feature (1)..(186): Homolog of NCBI NO: 21553545 NR Description: steroid sulfotransferase, putative [Arabidopsis
MSFDALKVPLKESPCKIVYVCRNVNDVLISLWCFENSMSGENNLSLEALFESLCSGVNLCGPLWENVLGYWRGSLEDPKHVLFLRYEELKTEPRVQIKRLAEFLDCPFTKEEEDSGGVDKILELCSLRNLSGLEINKTGSLSEGVSFKSFFRKGEVGDWKSYMTPEMENKIDMIVEEKLQGSGLKL

SEQ ID NO: 42683 - DNA, 1442 bp, Arabidopsis thaliana
  misc_feature (1)..(1442): Ceres Seq. ID no. 12336256
  misc_feature: MA Experiment ID: 108462 Result: Down-regulated in Transcription
  misc_feature: MA Experiment 108462 PARAMETER Experiment Name: At_Germinating_Seeds_cDNA_P Parameter: Age (day) Value: 2 vs. 0
  misc_feature: MA Experiment 108462 PARAMETER Experiment Name: At_Germinating_Seeds_cDNA_P Parameter: Tissue Value: Germinating Seeds
  misc_feature: MA Experiment ID: 108463 Result: Down-regulated in Transcription
  misc_feature: MA Experiment 108463 PARAMETER Experiment Name: At_Germinating_Seeds_cDNA_P Parameter: Age (day) Value: 3 vs. 0
  misc_feature: MA Experiment 108463 PARAMETER Experiment Name: At_Germinating_Seeds_cDNA_P Parameter: Tissue Value: Germinating Seeds
  misc_feature: MA Experiment ID: 108464 Result: Down-regulated in Transcription
  misc_feature: MA Experiment 108464 PARAMETER Experiment Name: At_Germinating_Seeds_cDNA_P Parameter: Age (day) Value: 4 vs. 0
  misc_feature: MA Experiment 108464 PARAMETER Experiment Name: At_Germinating_Seeds_cDNA_P Parameter: Tissue Value: Germinating Seeds
  misc_feature: MA Experiment ID: 20000087 Result: Down-regulated in Transcription
  misc_feature: MA Experiment 20000087 PARAMETER Experiment Name: At_100uM_ABA_Mutants_cDNA_P Parameter: Plant Line Value: WS
  misc_feature: MA Experiment 20000087 PARAMETER Experiment Name: At_100uM_ABA_Mutants_cDNA_P Parameter: Timepoint (hr) Value: 6
  misc_feature: MA Experiment 20000087 PARAMETER Experiment Name: At_100uM_ABA_Mutants_cDNA_P Parameter: Tissue Value: Aerial
  misc_feature: MA Experiment 20000087 PARAMETER Experiment Name: At_100uM_ABA_Mutants_cDNA_P Parameter: Treatment Value: 100uM ABA vs. No Treatment
  misc_feature: MA Experiment ID: 20001557 Result: Up-regulated in Transcription
  misc_feature: MA Experiment 20001557 PARAMETER Experiment Name: At_Drought_Soil_Dry_P Parameter: Age (day) Value: 27
  misc_feature: MA Experiment 20001557 PARAMETER Experiment Name: At_Drought_Soil_Dry_P Parameter: Organism Value: A. thaliana
  misc_feature: MA Experiment 20001557 PARAMETER Experiment Name: At_Drought_Soil_Dry_P Parameter: Plant Line Value: WS
  misc_feature: MA Experiment 20001557 PARAMETER Experiment Name: At_Drought_Soil_Dry_P Parameter: Post Timepoint (hr) Value: 3
  misc_feature: MA Experiment 20001557 PARAMETER Experiment Name: At_Drought_Soil_Dry_P Parameter: Post-Treatment Value: Re-Water vs. No Drought
  misc_feature: MA Experiment 20001557 PARAMETER Experiment Name: At_Drought_Soil_Dry_P Parameter: Timepoint (day) Value: 13
  misc_feature: MA Experiment 20001557 PARAMETER Experiment Name: At_Drought_Soil_Dry_P Parameter: Treatment Value: Drought vs. No Drought
attcattcattcatgtctctacccaaatctatctggtaactcaaaatcatcacttcttctactcaacaatttcacaatcccatccccaattttacaatccctagatctccctccctcttcaattcgctgtagttttcatggaccttgttcgattgagagacataggttcaatttcacctcagagaagaaggaaatggctgattctattagcggttttcggtgtttcgggttacggagtttacagggtttacaattctcaatacatcgctaagaagacgaagcgtcttatgaaactcttctcaggcattgtttcattcgccgaaatggtcatcgattccgcggagacgataagtatcgtttctcgagatttgaaagagtttctcgaatcaaattcccacgaaatccctaatagcttgaaacagctatcgaaaatcaccaaatcaaaagagttcactgattctctagctagggtttctgaagctgtagcgattggtgttttccgtgggtataattccgatccaaacgtcgaaaaagaatcgaatttgagtgtagttgatagagttttctcagaggaaggagctggttttgtttctgttgttgttggtagttttgctaagaatcttgttcttggattttactctggtgagattgagattggtagtgatgattctttaaaacctagatggatgaatttgcttagtgatgataagtgtagagagcttttagcagattgtattgagagattcactagctcagctgtatcggtgtatatcgataaaacggttggtgttaatacttatgatcagatattcgctggtttgacgaatccgaaacatcgagatagtgctcgagatgttcttgtttcggtttgtaatggagctcttgagacgttcatgagaacttctcatgatgtcttcacatcttcaggagagaaaaccgattcctccttgaggaagtcggagaatcgagaaaacggatgggcagaggcgctttcgactactttagcagtgccgagtaataggaagttcatgtttgatgttacgggaagagtgacgctagagacgatgagatcaattcttgagtttgtaatcttgaaaacgtcacaaagttttaagaggagtttggatgtgattcatgaagaagttacagagagaggacgtcaagtagttggatacgttggtgccaaatcttcagtgataatcactgtttgtcttgcggtttactttcacatctttaaccgctttgttcgaggccctccggtttgtttaagccagcaattctagttaatcggatcgatctattagcttgttagagttgttagggacattagatcttcagccttccatattcttattggtaagttggagctgaatagcgtagtagagtcttagcagtgttatgtacccacatattcattattgtttatttatagaggattcttg

SEQ ID NO: 42684 - protein, 381 aa, Arabidopsis thaliana
  peptide (1)..(381): Ceres Seq. ID no. 12336257
  misc_feature (15)..(367): Homolog of NCBI NO: 22093613 NR Description: hypothetical protein~similar to Arabidopsis
  misc_feature (16)..(367): Homolog of NCBI NO: 40539064 NR Description: expressed protein [Oryza sativa (japonica
  misc_feature (16)..(365): Homolog of NCBI NO: 15229610 NR Description: putative protein; protein id: At3g49790.1
  misc_feature (258)..(381): Homolog of NCBI NO: 21554418 NR Description: unknown [Arabidopsis thaliana]
  misc_feature (1)..(284): Homolog of NCBI NO: 21554418 NR Description: unknown [Arabidopsis thaliana]
  misc_feature (258)..(381): Homolog of NCBI NO: 18391117 NR Description: expressed protein
  misc_feature (1)..(284): Homolog of NCBI NO: 18391117 NR Description: expressed protein
  misc_feature (1)..(381): Homolog of NCBI NO: 21553547 NR Description: unknown [Arabidopsis thaliana]
  misc_feature (1)..(374): Homolog of NCBI NO: 14475940 NR Description: unknown protein [Arabidopsis thaliana]
  misc_feature (1)..(381): Homolog of NCBI NO: 18406365 NR Description: expressed protein
MDLVRLRDIGSISPQRRRKWLILLAVFGVSGYGVYRVYNSQYIAKKTKRLMKLFSGIVSFAEMVIDSAETISIVSRDLKEFLESNSHEIPNSLKQLSKITKSKEFTDSLARVSEAVAIGVFRGYNSDPNVEKESNLSVVDRVFSEEGAGFVSVVVGSFAKNLVLGFYSGEIEIGSDDSLKPRWMNLLSDDKCRELLADCIERFTSSAVSVYIDKTVGVNTYDQIFAGLTNPKHRDSARDVLVSVCNGALETFMRTSHDVFTSSGEKTDSSLRKSENRENGWAEALSTTLAVPSNRKFMFDVTGRVTLETMRSILEFVILKTSQSFKRSLDVIHEEVTERGRQVVGYVGAKSSVIITVCLAVYFHIFNRFVRGPPVCLSQQF

SEQ ID NO: 42685 - protein, 331 aa, Arabidopsis thaliana
  peptide (1)..(331): Ceres Seq. ID no. 12336258
  misc_feature (1)..(317): Homolog of NCBI NO: 22093613 NR Description: hypothetical protein~similar to Arabidopsis
  misc_feature (1)..(317): Homolog of NCBI NO: 40539064 NR Description: expressed protein [Oryza sativa (japonica
  misc_feature (1)..(315): Homolog of NCBI NO: 15229610 NR Description: putative protein; protein id: At3g49790.1
  misc_feature (208)..(331): Homolog of NCBI NO: 21554418 NR Description: unknown [Arabidopsis thaliana]
  misc_feature (1)..(234): Homolog of NCBI NO: 21554418 NR Description: unknown [Arabidopsis thaliana]
  misc_feature (208)..(331): Homolog of NCBI NO: 18391117 NR Description: expressed protein
  misc_feature (1)..(234): Homolog of NCBI NO: 18391117 NR Description: expressed protein
  misc_feature (1)..(331): Homolog of NCBI NO: 21553547 NR Description: unknown [Arabidopsis thaliana]
  misc_feature (1)..(324): Homolog of NCBI NO: 14475940 NR Description: unknown protein [Arabidopsis thaliana]
  misc_feature (1)..(331): Homolog of NCBI NO: 18406365 NR Description: expressed protein
MKLFSGIVSFAEMVIDSAETISIVSRDLKEFLESNSHEIPNSLKQLSKITKSKEFTDSLARVSEAVAIGVFRGYNSDPNVEKESNLSVVDRVFSEEGAGFVSVVVGSFAKNLVLGFYSGEIEIGSDDSLKPRWMNLLSDDKCRELLADCIERFTSSAVSVYIDKTVGVNTYDQIFAGLTNPKHRDSARDVLVSVCNGALETFMRTSHDVFTSSGEKTDSSLRKSENRENGWAEALSTTLAVPSNRKFMFDVTGRVTLETMRSILEFVILKTSQSFKRSLDVIHEEVTERGRQVVGYVGAKSSVIITVCLAVYFHIFNRFVRGPPVCLSQQF

SEQ ID NO: 42686 - protein, 319 aa, Arabidopsis thaliana
  peptide (1)..(319): Ceres Seq. ID no. 12336259
  misc_feature (1)..(305): Homolog of NCBI NO: 22093613 NR Description: hypothetical protein~similar to Arabidopsis
  misc_feature (1)..(305): Homolog of NCBI NO: 40539064 NR Description: expressed protein [Oryza sativa (japonica
  misc_feature (1)..(303): Homolog of NCBI NO: 15229610 NR Description: putative protein; protein id: At3g49790.1
  misc_feature (196)..(319): Homolog of NCBI NO: 21554418 NR Description: unknown [Arabidopsis thaliana]
  misc_feature (1)..(222): Homolog of NCBI NO: 21554418 NR Description: unknown [Arabidopsis thaliana]
  misc_feature (196)..(319): Homolog of NCBI NO: 18391117 NR Description: expressed protein
  misc_feature (1)..(222): Homolog of NCBI NO: 18391117 NR Description: expressed protein
  misc_feature (1)..(319): Homolog of NCBI NO: 21553547 NR Description: unknown [Arabidopsis thaliana]
  misc_feature (1)..(312): Homolog of NCBI NO: 14475940 NR Description: unknown protein [Arabidopsis thaliana]
  misc_feature (1)..(319): Homolog of NCBI NO: 18406365 NR Description: expressed protein
MVIDSAETISIVSRDLKEFLESNSHEIPNSLKQLSKITKSKEFTDSLARVSEAVAIGVFRGYNSDPNVEKESNLSVVDRVFSEEGAGFVSVVVGSFAKNLVLGFYSGEIEIGSDDSLKPRWMNLLSDDKCRELLADCIERFTSSAVSVYIDKTVGVNTYDQIFAGLTNPKHRDSARDVLVSVCNGALETFMRTSHDVFTSSGEKTDSSLRKSENRENGWAEALSTTLAVPSNRKFMFDVTGRVTLETMRSILEFVILKTSQSFKRSLDVIHEEVTERGRQVVGYVGAKSSVIITVCLAVYFHIFNRFVRGPPVCLSQQF

SEQ ID NO: 42687 - DNA, 1305 bp, Arabidopsis thaliana
  misc_feature (1)..(1305): Ceres Seq. ID no. 12331210
  misc_feature: MA Experiment ID: 108434 Result: Down-regulated in Transcription
  misc_feature: MA Experiment 108434 PARAMETER Experiment Name: At_Root_Tips_cDNA_P Parameter: Tissue Value: Root Tips
  misc_feature: MA Experiment ID: 108461 Result: Down-regulated in Transcription
  misc_feature: MA Experiment 108461 PARAMETER Experiment Name: At_Germinating_Seeds_cDNA_P Parameter: Age (day) Value: 1 vs. 0
  misc_feature: MA Experiment 108461 PARAMETER Experiment Name: At_Germinating_Seeds_cDNA_P Parameter: Tissue Value: Germinating Seeds
  misc_feature: MA Experiment ID: 108462 Result: Down-regulated in Transcription
  misc_feature: MA Experiment 108462 PARAMETER Experiment Name: At_Germinating_Seeds_cDNA_P Parameter: Age (day) Value: 2 vs. 0
  misc_feature: MA Experiment 108462 PARAMETER Experiment Name: At_Germinating_Seeds_cDNA_P Parameter: Tissue Value: Germinating Seeds
  misc_feature: MA Experiment ID: 108488 Result: Down-regulated in Transcription
  misc_feature: MA Experiment ID: 108501 Result: Down-regulated in Transcription
  misc_feature: MA Experiment 108501 PARAMETER Experiment Name: At_ap2_floral_buds_cDNA_P Parameter: Plant Line Value: ap2 (Ler.)
  misc_feature: MA Experiment 108501 PARAMETER Experiment Name: At_ap2_floral_buds_cDNA_P Parameter: Tissue Value: Closed Flower
  misc_feature: MA Experiment ID: 108561 Result: Up-regulated in Transcription
  misc_feature: MA Experiment 108561 PARAMETER Experiment Name: At_100uM_ABA_cDNA_P Parameter: Timepoint (hr) Value: 6
  misc_feature: MA Experiment 108561 PARAMETER Experiment Name: At_100uM_ABA_cDNA_P Parameter: Tissue Value: Aerial
  misc_feature: MA Experiment 108561 PARAMETER Experiment Name: At_100uM_ABA_cDNA_P Parameter: Treatment Value: 100uM ABA vs. No Treatment
  misc_feature: MA Experiment ID: 108572 Result: Up-regulated in Transcription
  misc_feature: MA Experiment 108572 PARAMETER Experiment Name: At_Drought_cDNA_P Parameter: Timepoint (hr) Value: 1
  misc_feature: MA Experiment 108572 PARAMETER Experiment Name: At_Drought_cDNA_P Parameter: Tissue Value: Aerial
  misc_feature: MA Experiment 108572 PARAMETER Experiment Name: At_Drought_cDNA_P Parameter: Treatment Value: Drought vs. No Drought
  misc_feature: MA Experiment ID: 108573 Result: Up-regulated in Transcription
  misc_feature: MA Experiment 108573 PARAMETER Experiment Name: At_Drought_cDNA_P Parameter: Timepoint (hr) Value: 6
  misc_feature: MA Experiment 108573 PARAMETER Experiment Name: At_Drought_cDNA_P Parameter: Tissue Value: Aerial
  misc_feature: MA Experiment 108573 PARAMETER Experiment Name: At_Drought_cDNA_P Parameter: Treatment Value: Drought vs. No Drought
  misc_feature: MA Experiment ID: 108574 Result: Up-regulated in Transcription
  misc_feature: MA Experiment 108574 PARAMETER Experiment Name: At_Wounding__cDNA_P Parameter: Timepoint (hr) Value: 1
  misc_feature: MA Experiment 108574 PARAMETER Experiment Name: At_Wounding__cDNA_P Parameter: Tissue Value: Aerial
  misc_feature: MA Experiment 108574 PARAMETER Experiment Name: At_Wounding__cDNA_P Parameter: Treatment Value: Wounding vs. No Wounding
  misc_feature: MA Experiment ID: 108605 Result: Up-regulated in Transcription
  misc_feature: MA Experiment 108605 PARAMETER Experiment Name: At_100uM_ABA_cDNA_P Parameter: Timepoint (hr) Value: 6
  misc_feature: MA Experiment 108605 PARAMETER Experiment Name: At_100uM_ABA_cDNA_P Parameter: Tissue Value: Aerial
  misc_feature: MA Experiment 108605 PARAMETER Experiment Name: At_100uM_ABA_cDNA_P Parameter: Treatment Value: 100uM ABA vs. No Treatment
  misc_feature: MA Experiment ID: 108607 Result: Up-regulated in Transcription
  misc_feature: MA Experiment 108607 PARAMETER Experiment Name: At_100uM_ABA_cDNA_P Parameter: Timepoint (hr) Value: 4
  misc_feature: MA Experiment 108607 PARAMETER Experiment Name: At_100uM_ABA_cDNA_P Parameter: Tissue Value: Aerial
  misc_feature: MA Experiment 108607 PARAMETER Experiment Name: At_100uM_ABA_cDNA_P Parameter: Treatment Value: 100uM ABA vs. No Treatment
  misc_feature: MA Experiment ID: 108608 Result: Up-regulated in Transcription
  misc_feature: MA Experiment 108608 PARAMETER Experiment Name: At_100uM_ABA_cDNA_P Parameter: Timepoint (hr) Value: 1
  misc_feature: MA Experiment 108608 PARAMETER Experiment Name: At_100uM_ABA_cDNA_P Parameter: Tissue Value: Aerial
  misc_feature: MA Experiment 108608 PARAMETER Experiment Name: At_100uM_ABA_cDNA_P Parameter: Treatment Value: 100uM ABA vs. No Treatment
  misc_feature: MA Experiment ID: 20000069 Result: Up-regulated in Transcription
  misc_feature: MA Experiment 20000069 PARAMETER Experiment Name: At_100uM_ABA_Mutants_cDNA_P Parameter: Plant Line Value: CS23
  misc_feature: MA Experiment 20000069 PARAMETER Experiment Name: At_100uM_ABA_Mutants_cDNA_P Parameter: Timepoint (hr) Value: 6
  misc_feature: MA Experiment 20000069 PARAMETER Experiment Name: At_100uM_ABA_Mutants_cDNA_P Parameter: Tissue Value: Aerial
  misc_feature: MA Experiment 20000069 PARAMETER Experiment Name: At_100uM_ABA_Mutants_cDNA_P Parameter: Treatment Value: 100uM ABA vs. No Treatment
  misc_feature: MA Experiment ID: 20000070 Result: Up-regulated in Transcription
  misc_feature: MA Experiment 20000070 PARAMETER Experiment Name: At_100uM_ABA_Mutants_cDNA_P Parameter: Plant Line Value: CS24
  misc_feature: MA Experiment 20000070 PARAMETER Experiment Name: At_100uM_ABA_Mutants_cDNA_P Parameter: Timepoint (hr) Value: 6
  misc_feature: MA Experiment 20000070 PARAMETER Experiment Name: At_100uM_ABA_Mutants_cDNA_P Parameter: Tissue Value: Aerial
  misc_feature: MA Experiment 20000070 PARAMETER Experiment Name: At_100uM_ABA_Mutants_cDNA_P Parameter: Treatment Value: 100uM ABA vs. No Treatment
  misc_feature: MA Experiment ID: 20000071 Result: Up-regulated in Transcription
  misc_feature: MA Experiment 20000071 PARAMETER Experiment Name: At_100uM_ABA_Mutants_cDNA_P Parameter: Plant Line Value: CS8104
  misc_feature: MA Experiment 20000071 PARAMETER Experiment Name: At_100uM_ABA_Mutants_cDNA_P Parameter: Timepoint (hr) Value: 6
  misc_feature: MA Experiment 20000071 PARAMETER Experiment Name: At_100uM_ABA_Mutants_cDNA_P Parameter: Tissue Value: Aerial
  misc_feature: MA Experiment 20000071 PARAMETER Experiment Name: At_100uM_ABA_Mutants_cDNA_P Parameter: Treatment Value: 100uM ABA vs. No Treatment
  misc_feature: MA Experiment ID: 20000072 Result: Up-regulated in Transcription
  misc_feature: MA Experiment 20000072 PARAMETER Experiment Name: At_100uM_ABA_Mutants_cDNA_P Parameter: Plant Line Value: CS8105
  misc_feature: MA Experiment 20000072 PARAMETER Experiment Name: At_100uM_ABA_Mutants_cDNA_P Parameter: Timepoint (hr) Value: 6
  misc_feature: MA Experiment 20000072 PARAMETER Experiment Name: At_100uM_ABA_Mutants_cDNA_P Parameter: Tissue Value: Aerial
  misc_feature: MA Experiment 20000072 PARAMETER Experiment Name: At_100uM_ABA_Mutants_cDNA_P Parameter: Treatment Value: 100uM ABA vs. No Treatment
  misc_feature: MA Experiment ID: 20000086 Result: Up-regulated in Transcription
  misc_feature: MA Experiment 20000086 PARAMETER Experiment Name: At_100uM_ABA_Mutants_cDNA_P Parameter: Plant Line Value: CS22
  misc_feature: MA Experiment 20000086 PARAMETER Experiment Name: At_100uM_ABA_Mutants_cDNA_P Parameter: Timepoint (hr) Value: 6
  misc_feature: MA Experiment 20000086 PARAMETER Experiment Name: At_100uM_ABA_Mutants_cDNA_P Parameter: Tissue Value: Aerial
  misc_feature: MA Experiment 20000086 PARAMETER Experiment Name: At_100uM_ABA_Mutants_cDNA_P Parameter: Treatment Value: 100uM ABA vs. No Treatment
  misc_feature: MA Experiment ID: 20000087 Result: Up-regulated in Transcription
  misc_feature: MA Experiment 20000087 PARAMETER Experiment Name: At_100uM_ABA_Mutants_cDNA_P Parameter: Plant Line Value: WS
  misc_feature: MA Experiment 20000087 PARAMETER Experiment Name: At_100uM_ABA_Mutants_cDNA_P Parameter: Timepoint (hr) Value: 6
  misc_feature: MA Experiment 20000087 PARAMETER Experiment Name: At_100uM_ABA_Mutants_cDNA_P Parameter: Tissue Value: Aerial
  misc_feature: MA Experiment 20000087 PARAMETER Experiment Name: At_100uM_ABA_Mutants_cDNA_P Parameter: Treatment Value: 100uM ABA vs. No Treatment
  misc_feature: MA Experiment ID: 20000088 Result: Up-regulated in Transcription
  misc_feature: MA Experiment 20000088 PARAMETER Experiment Name: At_100uM_ABA_Mutants_cDNA_P Parameter: Plant Line Value: Landsberg
  misc_feature: MA Experiment 20000088 PARAMETER Experiment Name: At_100uM_ABA_Mutants_cDNA_P Parameter: Timepoint (hr) Value: 6
  misc_feature: MA Experiment 20000088 PARAMETER Experiment Name: At_100uM_ABA_Mutants_cDNA_P Parameter: Tissue Value: Aerial
  misc_feature: MA Experiment 20000088 PARAMETER Experiment Name: At_100uM_ABA_Mutants_cDNA_P Parameter: Treatment Value: 100uM ABA vs. No Treatment
  misc_feature: MA Experiment ID: 20000117 Result: Up-regulated in Transcription
  misc_feature: MA Experiment 20000117 PARAMETER Experiment Name: At_100uM_ABA_Mutants_cDNA_P Parameter: Plant Line Value: Columbia
  misc_feature: MA Experiment 20000117 PARAMETER Experiment Name: At_100uM_ABA_Mutants_cDNA_P Parameter: Timepoint (hr) Value: 6
  misc_feature: MA Experiment 20000117 PARAMETER Experiment Name: At_100uM_ABA_Mutants_cDNA_P Parameter: Tissue Value: Aerial
  misc_feature: MA Experiment 20000117 PARAMETER Experiment Name: At_100uM_ABA_Mutants_cDNA_P Parameter: Treatment Value: 100uM ABA vs. No Treatment
  misc_feature: MA Experiment ID: 20000166 Result: Up-regulated in Transcription
  misc_feature: MA Experiment 20000166 PARAMETER Experiment Name: At_100uM_ABA_P Parameter: Age (day) Value: 14
  misc_feature: MA Experiment 20000166 PARAMETER Experiment Name: At_100uM_ABA_P Parameter: Organism Value: A. thaliana
  misc_feature: MA Experiment 20000166 PARAMETER Experiment Name: At_100uM_ABA_P Parameter: Plant Line Value: WS
  misc_feature: MA Experiment 20000166 PARAMETER Experiment Name: At_100uM_ABA_P Parameter: Timepoint (hr) Value: 1
  misc_feature: MA Experiment 20000166 PARAMETER Experiment Name: At_100uM_ABA_P Parameter: Tissue Value: Aerial
  misc_feature: MA Experiment 20000166 PARAMETER Experiment Name: At_100uM_ABA_P Parameter: Treatment Value: 100uM ABA vs. No Treatment
  misc_feature: MA Experiment ID: 20000169 Result: Up-regulated in Transcription
  misc_feature: MA Experiment 20000169 PARAMETER Experiment Name: At_100uM_ABA_P Parameter: Age (day) Value: 14
  misc_feature: MA Experiment 20000169 PARAMETER Experiment Name: At_100uM_ABA_P Parameter: Organism Value: A. thaliana
  misc_feature: MA Experiment 20000169 PARAMETER Experiment Name: At_100uM_ABA_P Parameter: Plant Line Value: WS
  misc_feature: MA Experiment 20000169 PARAMETER Experiment Name: At_100uM_ABA_P Parameter: Timepoint (hr) Value: 6
  misc_feature: MA Experiment 20000169 PARAMETER Experiment Name: At_100uM_ABA_P Parameter: Tissue Value: Aerial
  misc_feature: MA Experiment 20000169 PARAMETER Experiment Name: At_100uM_ABA_P Parameter: Treatment Value: 100uM ABA vs. No Treatment
  misc_feature: MA Experiment ID: 20000184 Result: Down-regulated in Transcription
  misc_feature: MA Experiment 20000184 PARAMETER Experiment Name: At_Shoots__P Parameter: Age (day) Value: 7
  misc_feature: MA Experiment 20000184 PARAMETER Experiment Name: At_Shoots__P Parameter: Tissue Value: Shoots vs. Whole Plant
  misc_feature: MA Experiment ID: 20000224 Result: Up-regulated in Transcription
  misc_feature: MA Experiment ID: 20000267 Result: Up-regulated in Transcription
  misc_feature: MA Experiment 20000267 PARAMETER Experiment Name: At_Drought_P Parameter: Age (day) Value: 7
  misc_feature: MA Experiment 20000267 PARAMETER Experiment Name: At_Drought_P Parameter: Organism Value: A. thaliana
  misc_feature: MA Experiment 20000267 PARAMETER Experiment Name: At_Drought_P Parameter: Plant Line Value: WS
  misc_feature: MA Experiment 20000267 PARAMETER Experiment Name: At_Drought_P Parameter: Timepoint (hr) Value: 6
  misc_feature: MA Experiment 20000267 PARAMETER Experiment Name: At_Drought_P Parameter: Tissue Value: Whole Plant
  misc_feature: MA Experiment 20000267 PARAMETER Experiment Name: At_Drought_P Parameter: Treatment Value: Drought vs. No Drought
  misc_feature: MA Experiment ID: 20000436 Result: Up-regulated in Transcription
  misc_feature: MA Experiment 20000436 PARAMETER Experiment Name: At_Drought_P Parameter: Age (day) Value: 7
  misc_feature: MA Experiment 20000436 PARAMETER Experiment Name: At_Drought_P Parameter: Organism Value: A. thaliana
  misc_feature: MA Experiment 20000436 PARAMETER Experiment Name: At_Drought_P Parameter: Plant Line Value: WS
  misc_feature: MA Experiment 20000436 PARAMETER Experiment Name: At_Drought_P Parameter: Timepoint (hr) Value: 12
  misc_feature: MA Experiment 20000436 PARAMETER Experiment Name: At_Drought_P Parameter: Tissue Value: Whole Plant
  misc_feature: MA Experiment 20000436 PARAMETER Experiment Name: At_Drought_P Parameter: Treatment Value: Drought vs. No Drought
  misc_feature: MA Experiment ID: 20000437 Result: Up-regulated in Transcription
  misc_feature: MA Experiment 20000437 PARAMETER Experiment Name: At_Drought_P Parameter: Age (day) Value: 8
  misc_feature: MA Experiment 20000437 PARAMETER Experiment Name: At_Drought_P Parameter: Organism Value: A. thaliana
  misc_feature: MA Experiment 20000437 PARAMETER Experiment Name: At_Drought_P Parameter: Plant Line Value: WS
  misc_feature: MA Experiment 20000437 PARAMETER Experiment Name: At_Drought_P Parameter: Timepoint (hr) Value: 24
  misc_feature: MA Experiment 20000437 PARAMETER Experiment Name: At_Drought_P Parameter: Tissue Value: Whole Plant
  misc_feature: MA Experiment 20000437 PARAMETER Experiment Name: At_Drought_P Parameter: Treatment Value: Drought vs. No Drought
  misc_feature: MA Experiment ID: 20000453 Result: Up-regulated in Transcription
  misc_feature: MA Experiment 20000453 PARAMETER Experiment Name: At_100uM_ABA_P Parameter: Age (day) Value: 15
  misc_feature: MA Experiment 20000453 PARAMETER Experiment Name: At_100uM_ABA_P Parameter: Organism Value: A. thaliana
  misc_feature: MA Experiment 20000453 PARAMETER Experiment Name: At_100uM_ABA_P Parameter: Plant Line Value: WS
  misc_feature: MA Experiment 20000453 PARAMETER Experiment Name: At_100uM_ABA_P Parameter: Timepoint (hr) Value: 24
  misc_feature: MA Experiment 20000453 PARAMETER Experiment Name: At_100uM_ABA_P Parameter: Tissue Value: Aerial
  misc_feature: MA Experiment 20000453 PARAMETER Experiment Name: At_100uM_ABA_P Parameter: Treatment Value: 100uM ABA vs. No Treatment
  misc_feature: MA Experiment ID: 20000794 Result: Up-regulated in Transcription
  misc_feature: MA Experiment 20000794 PARAMETER Experiment Name: At_Petals_P Parameter: Age (day) Value: 23-25 days
  misc_feature: MA Experiment 20000794 PARAMETER Experiment Name: At_Petals_P Parameter: Plant Line Value: WS
  misc_feature: MA Experiment 20000794 PARAMETER Experiment Name: At_Petals_P Parameter: Tissue Value: Petals vs. Whole plant
  misc_feature: MA Experiment ID: 20001247 Result: Up-regulated in Transcription
  misc_feature: MA Experiment 20001247 PARAMETER Experiment Name: At_Far-red-induction_P Parameter: Age (day) Value: 7
  misc_feature: MA Experiment 20001247 PARAMETER Experiment Name: At_Far-red-induction_P Parameter: Light Value: Far-red vs. White
  misc_feature: MA Experiment 20001247 PARAMETER Experiment Name: At_Far-red-induction_P Parameter: Organism Value: A. thaliana
  misc_feature: MA Experiment 20001247 PARAMETER Experiment Name: At_Far-red-induction_P Parameter: Plant Line Value: Columbia
  misc_feature: MA Experiment 20001247 PARAMETER Experiment Name: At_Far-red-induction_P Parameter: Timepoint (hr) Value: 1
  misc_feature: MA Experiment 20001247 PARAMETER Experiment Name: At_Far-red-induction_P Parameter: Tissue Value: Whole Plant
  misc_feature: MA Experiment ID: 20001248 Result: Down-regulated in Transcription
  misc_feature: MA Experiment 20001248 PARAMETER Experiment Name: At_Far-red-induction_P Parameter: Age (day) Value: 7
  misc_feature: MA Experiment 20001248 PARAMETER Experiment Name: At_Far-red-induction_P Parameter: Light Value: Far-red vs. White
  misc_feature: MA Experiment 20001248 PARAMETER Experiment Name: At_Far-red-induction_P Parameter: Organism Value: A. thaliana
  misc_feature: MA Experiment 20001248 PARAMETER Experiment Name: At_Far-red-induction_P Parameter: Plant Line Value: Columbia
  misc_feature: MA Experiment 20001248 PARAMETER Experiment Name: At_Far-red-induction_P Parameter: Timepoint (hr) Value: 4
  misc_feature: MA Experiment 20001248 PARAMETER Experiment Name: At_Far-red-induction_P Parameter: Tissue Value: Whole Plant
  misc_feature: MA Experiment ID: 20001451 Result: Up-regulated in Transcription
  misc_feature: MA Experiment 20001451 PARAMETER Experiment Name: At_Far-red-induction_P Parameter: Age (day) Value: 7
  misc_feature: MA Experiment 20001451 PARAMETER Experiment Name: At_Far-red-induction_P Parameter: Light Value: Far-red vs. White
  misc_feature: MA Experiment 20001451 PARAMETER Experiment Name: At_Far-red-induction_P Parameter: Organism Value: A. thaliana
  misc_feature: MA Experiment 20001451 PARAMETER Experiment Name: At_Far-red-induction_P Parameter: Plant Line Value: Columbia
  misc_feature: MA Experiment 20001451 PARAMETER Experiment Name: At_Far-red-induction_P Parameter: Timepoint (hr) Value: 24
  misc_feature: MA Experiment 20001451 PARAMETER Experiment Name: At_Far-red-induction_P Parameter: Tissue Value: Whole Plant
  misc_feature: MA Experiment ID: 20001554 Result: Up-regulated in Transcription
  misc_feature: MA Experiment 20001554 PARAMETER Experiment Name: At_Drought_Soil_Dry_P Parameter: Age (day) Value: 21
  misc_feature: MA Experiment 20001554 PARAMETER Experiment Name: At_Drought_Soil_Dry_P Parameter: Organism Value: A. thaliana
  misc_feature: MA Experiment 20001554 PARAMETER Experiment Name: At_Drought_Soil_Dry_P Parameter: Plant Line Value: WS
  misc_feature: MA Experiment 20001554 PARAMETER Experiment Name: At_Drought_Soil_Dry_P Parameter: Post Timepoint (hr) Value: None
  misc_feature: MA Experiment 20001554 PARAMETER Experiment Name: At_Drought_Soil_Dry_P Parameter: Post-Treatment Value: None
  misc_feature: MA Experiment 20001554 PARAMETER Experiment Name: At_Drought_Soil_Dry_P Parameter: Timepoint (day) Value: 7
  misc_feature: MA Experiment 20001554 PARAMETER Experiment Name: At_Drought_Soil_Dry_P Parameter: Treatment Value: Drought vs. No Drought
  misc_feature: MA Experiment ID: 20001557 Result: Up-regulated in Transcription
  misc_feature: MA Experiment 20001557 PARAMETER Experiment Name: At_Drought_Soil_Dry_P Parameter: Age (day) Value: 27
  misc_feature: MA Experiment 20001557 PARAMETER Experiment Name: At_Drought_Soil_Dry_P Parameter: Organism Value: A. thaliana
  misc_feature: MA Experiment 20001557 PARAMETER Experiment Name: At_Drought_Soil_Dry_P Parameter: Plant Line Value: WS
  misc_feature: MA Experiment 20001557 PARAMETER Experiment Name: At_Drought_Soil_Dry_P Parameter: Post Timepoint (hr) Value: 3
  misc_feature: MA Experiment 20001557 PARAMETER Experiment Name: At_Drought_Soil_Dry_P Parameter: Post-Treatment Value: Re-Water vs. No Drought
  misc_feature: MA Experiment 20001557 PARAMETER Experiment Name: At_Drought_Soil_Dry_P Parameter: Timepoint (day) Value: 13
  misc_feature: MA Experiment 20001557 PARAMETER Experiment Name: At_Drought_Soil_Dry_P Parameter: Treatment Value: Drought vs. No Drought
  misc_feature: MA Experiment ID: 20001558 Result: Up-regulated in Transcription
  misc_feature: MA Experiment 20001558 PARAMETER Experiment Name: At_Drought_Soil_Dry_P Parameter: Age (day) Value: 27
  misc_feature: MA Experiment 20001558 PARAMETER Experiment Name: At_Drought_Soil_Dry_P Parameter: Organism Value: A. thaliana
  misc_feature: MA Experiment 20001558 PARAMETER Experiment Name: At_Drought_Soil_Dry_P Parameter: Plant Line Value: WS
  misc_feature: MA Experiment 20001558 PARAMETER Experiment Name: At_Drought_Soil_Dry_P Parameter: Post Timepoint (hr) Value: 6
  misc_feature: MA Experiment 20001558 PARAMETER Experiment Name: At_Drought_Soil_Dry_P Parameter: Post-Treatment Value: Re-Water vs. No Drought
  misc_feature: MA Experiment 20001558 PARAMETER Experiment Name: At_Drought_Soil_Dry_P Parameter: Timepoint (day) Value: 13
  misc_feature: MA Experiment 20001558 PARAMETER Experiment Name: At_Drought_Soil_Dry_P Parameter: Treatment Value: Drought vs. No Drought
  misc_feature: MA Experiment ID: 20001560 Result: Up-regulated in Transcription
  misc_feature: MA Experiment 20001560 PARAMETER Experiment Name: At_Drought_Soil_Dry_P Parameter: Age (day) Value: 28
  misc_feature: MA Experiment 20001560 PARAMETER Experiment Name: At_Drought_Soil_Dry_P Parameter: Organism Value: A. thaliana
  misc_feature: MA Experiment 20001560 PARAMETER Experiment Name: At_Drought_Soil_Dry_P Parameter: Plant Line Value: WS
  misc_feature: MA Experiment 20001560 PARAMETER Experiment Name: At_Drought_Soil_Dry_P Parameter: Post Timepoint (hr) Value: None
  misc_feature: MA Experiment 20001560 PARAMETER Experiment Name: At_Drought_Soil_Dry_P Parameter: Post-Treatment Value: None
  misc_feature: MA Experiment 20001560 PARAMETER Experiment Name: At_Drought_Soil_Dry_P Parameter: Timepoint (day) Value: 14
  misc_feature: MA Experiment 20001560 PARAMETER Experiment Name: At_Drought_Soil_Dry_P Parameter: Treatment Value: Drought vs. No Drought
  misc_feature: MA Experiment ID: 20001757 Result: Down-regulated in Transcription
  misc_feature: MA Experiment 20001757 PARAMETER Experiment Name: At_50mM_NH4NO3_L-to-H_P Parameter: Timepoint (hr) Value: 6
  misc_feature: MA Experiment 20001757 PARAMETER Experiment Name: At_50mM_NH4NO3_L-to-H_P Parameter: Tissue Value: Leaf
  misc_feature: MA Experiment 20001757 PARAMETER Experiment Name: At_50mM_NH4NO3_L-to-H_P Parameter: Treatment Value: 50mM NH4NO3 vs 100mM Mannitol
  misc_feature: MA Experiment ID: 20001904 Result: Up-regulated in Transcription
  misc_feature: MA Experiment 20001904 PARAMETER Experiment Name: At_Drought_Reproduction_P Parameter: Age (day) Value: 37
  misc_feature: MA Experiment 20001904 PARAMETER Experiment Name: At_Drought_Reproduction_P Parameter: Organism Value: A. thaliana
  misc_feature: MA Experiment 20001904 PARAMETER Experiment Name: At_Drought_Reproduction_P Parameter: Plant Line Value: WS
  misc_feature: MA Experiment 20001904 PARAMETER Experiment Name: At_Drought_Reproduction_P Parameter: Timepoint (day) Value: 7
  misc_feature: MA Experiment 20001904 PARAMETER Experiment Name: At_Drought_Reproduction_P Parameter: Tissue Value: Rosettes
  misc_feature: MA Experiment 20001904 PARAMETER Experiment Name: At_Drought_Reproduction_P Parameter: Treatment Value: Drought vs. No Drought
  misc_feature: MA Experiment ID: 20001905 Result: Up-regulated in Transcription
  misc_feature: MA Experiment 20001905 PARAMETER Experiment Name: At_Drought_Reproduction_P Parameter: Age (day) Value: 40
  misc_feature: MA Experiment 20001905 PARAMETER Experiment Name: At_Drought_Reproduction_P Parameter: Organism Value: A. thaliana
  misc_feature: MA Experiment 20001905 PARAMETER Experiment Name: At_Drought_Reproduction_P Parameter: Plant Line Value: WS
  misc_feature: MA Experiment 20001905 PARAMETER Experiment Name: At_Drought_Reproduction_P Parameter: Timepoint (day) Value: 10
  misc_feature: MA Experiment 20001905 PARAMETER Experiment Name: At_Drought_Reproduction_P Parameter: Tissue Value: Rosettes
  misc_feature: MA Experiment 20001905 PARAMETER Experiment Name: At_Drought_Reproduction_P Parameter: Treatment Value: Drought vs. No Drought
aacagaaaaatagttcacccaactttctcctattaatacttctctcttctctcttcctacttctaaccttctttttctccttcatcacacacatatacacacgctttcgtttaaactctctctgtttcaatcattaatcagaaagaagcaacacaaatatggatcacgacaagtctacttcttgttgctgcgttcttgatgcttccacttatgttggtttctggattctcaagaaattgcttagcagaggatactctgttcacgcagcgattcgtagaaacggggagagtgaaattgaggagatgatcagagagatggaaacaacagaagagagattagtggtgtacgatgtagatgtgttggattatcaaagcatacttgtctctctcaagacatgtaacgttgtcttctgttgcttagacagccctgaagggtacgatgagaaggaggtggatttggaagtgagaggagcgatcaatgtggtggaagcgtgtggaagaacagagagtatagagaagattgtgttttcttcttcattaacagcttcaatttggagagacaacattggaactcaaaaggatgttgatgagaagtgttggagtgaccaagacttctgtcgcagcaagaagttgtggcatgcactggcaaagatgttgtcggagaaagcagcttgggcattagccatggaccgtaggctcaacatggtctctatcaaccctggtcttgtcgtcggaccatctgtcgcacaacacaacgctaggcccaccatgtcataccttaaaggagctgcacaaatgtatgagaatggtgtgttagcttatgtagacgttaagtttctagcggacgttcatattagagcattcgaggatgtttcagcttgcggtcgatacttctgcttcaaccaaatcgtcaacacagaagaagaagctctcaagctagtggagagtttgtctcctttgattcctatgccaccgaggtatgagaatgagatgcacggaagtgaagtttacgaagaaagattaaggaacaacaaattaagcaagctggtagaagctggctctgcttgttaaagaaagatttcacaatttaaattgaaagagacgagattatacaaaaaaaagttgtaatttgtatattgatcttctcatagatgcatgtgttgcttgtgaactattaaaaagaaagaaaaaaaacccctttcatctcattttataactaatagtatatgagtagttttttttttttttggctgggggcacaatatgaatgttttctaatttttgttaaacatattaaatcttggtg

SEQ ID NO: 42688 - protein, 303 aa, Arabidopsis thaliana
  peptide (1)..(303): Ceres Seq. ID no. 12331211
  misc_feature (11)..(296): Homolog of NCBI NO: 3242328 NR Description: cinnamoyl-CoA reductase [Zea mays]
  misc_feature (11)..(296): Homolog of NCBI NO: 3341511 NR Description: cinnamoyl-CoA reductase [Saccharum officinarum]
  misc_feature (11)..(296): Homolog of NCBI NO: 25140432 NR Description: cinnamoyl CoA reductase [Hordeum vulgare]
  misc_feature (11)..(296): Homolog of NCBI NO: 9964087 NR Description: cinnamoyl CoA reductase [Lolium perenne]
  misc_feature (1)..(297): Homolog of NCBI NO: 37537132 NR Description: putative cinnamoyl-CoA reductase
  misc_feature (1)..(303): Homolog of NCBI NO: 21553382 NR Description: putative cinnamoyl CoA reductase [Arabidopsis
  misc_feature (1)..(303): Homolog of NCBI NO: 18400407 NR Description: putative cinnamoyl CoA reductase
  misc_feature (1)..(303): Homolog of NCBI NO: 25412171 NR Description: probable cinnamoyl CoA reductase [imported] -
  misc_feature (1)..(303): Homolog of NCBI NO: 21553548 NR Description: cinnamoyl-CoA reductase-like protein [Arabidopsis
  misc_feature (1)..(303): Homolog of NCBI NO: 15234751 NR Description: cinnamoyl-CoA reductase - like protein
MDHDKSTSCCCVLDASTYVGFWILKKLLSRGYSVHAAIRRNGESEIEEMIREMETTEERLVVYDVDVLDYQSILVSLKTCNVVFCCLDSPEGYDEKEVDLEVRGAINVVEACGRTESIEKIVFSSSLTASIWRDNIGTQKDVDEKCWSDQDFCRSKKLWHALAKMLSEKAAWALAMDRRLNMVSINPGLVVGPSVAQHNARPTMSYLKGAAQMYENGVLAYVDVKFLADVHIRAFEDVSACGRYFCFNQIVNTEEEALKLVESLSPLIPMPPRYENEMHGSEVYEERLRNNKLSKLVEAGSAC

SEQ ID NO: 42689 - protein, 255 aa, Arabidopsis thaliana
  peptide (1)..(255): Ceres Seq. ID no. 12331212
  misc_feature (1)..(248): Homolog of NCBI NO: 3242328 NR Description: cinnamoyl-CoA reductase [Zea mays]
  misc_feature (1)..(248): Homolog of NCBI NO: 3341511 NR Description: cinnamoyl-CoA reductase [Saccharum officinarum]
  misc_feature (1)..(248): Homolog of NCBI NO: 25140432 NR Description: cinnamoyl CoA reductase [Hordeum vulgare]
  misc_feature (1)..(248): Homolog of NCBI NO: 9964087 NR Description: cinnamoyl CoA reductase [Lolium perenne]
  misc_feature (1)..(249): Homolog of NCBI NO: 37537132 NR Description: putative cinnamoyl-CoA reductase
  misc_feature (1)..(255): Homolog of NCBI NO: 21553382 NR Description: putative cinnamoyl CoA reductase [Arabidopsis
  misc_feature (1)..(255): Homolog of NCBI NO: 18400407 NR Description: putative cinnamoyl CoA reductase
  misc_feature (1)..(255): Homolog of NCBI NO: 25412171 NR Description: probable cinnamoyl CoA reductase [imported] -
  misc_feature (1)..(255): Homolog of NCBI NO: 21553548 NR Description: cinnamoyl-CoA reductase-like protein [Arabidopsis
  misc_feature (1)..(255): Homolog of NCBI NO: 15234751 NR Description: cinnamoyl-CoA reductase - like protein
MIREMETTEERLVVYDVDVLDYQSILVSLKTCNVVFCCLDSPEGYDEKEVDLEVRGAINVVEACGRTESIEKIVFSSSLTASIWRDNIGTQKDVDEKCWSDQDFCRSKKLWHALAKMLSEKAAWALAMDRRLNMVSINPGLVVGPSVAQHNARPTMSYLKGAAQMYENGVLAYVDVKFLADVHIRAFEDVSACGRYFCFNQIVNTEEEALKLVESLSPLIPMPPRYENEMHGSEVYEERLRNNKLSKLVEAGSAC

SEQ ID NO: 42690 - protein, 251 aa, Arabidopsis thaliana
  peptide (1)..(251): Ceres Seq. ID no. 12331213
  misc_feature (1)..(244): Homolog of NCBI NO: 3242328 NR Description: cinnamoyl-CoA reductase [Zea mays]
  misc_feature (1)..(244): Homolog of NCBI NO: 3341511 NR Description: cinnamoyl-CoA reductase [Saccharum officinarum]
  misc_feature (1)..(244): Homolog of NCBI NO: 25140432 NR Description: cinnamoyl CoA reductase [Hordeum vulgare]
  misc_feature (1)..(244): Homolog of NCBI NO: 9964087 NR Description: cinnamoyl CoA reductase [Lolium perenne]
  misc_feature (1)..(245): Homolog of NCBI NO: 37537132 NR Description: putative cinnamoyl-CoA reductase
  misc_feature (1)..(251): Homolog of NCBI NO: 21553382 NR Description: putative cinnamoyl CoA reductase [Arabidopsis
  misc_feature (1)..(251): Homolog of NCBI NO: 18400407 NR Description: putative cinnamoyl CoA reductase
  misc_feature (1)..(251): Homolog of NCBI NO: 25412171 NR Description: probable cinnamoyl CoA reductase [imported] -
  misc_feature (1)..(251): Homolog of NCBI NO: 21553548 NR Description: cinnamoyl-CoA reductase-like protein [Arabidopsis
  misc_feature (1)..(251): Homolog of NCBI NO: 15234751 NR Description: cinnamoyl-CoA reductase - like protein
METTEERLVVYDVDVLDYQSILVSLKTCNVVFCCLDSPEGYDEKEVDLEVRGAINVVEACGRTESIEKIVFSSSLTASIWRDNIGTQKDVDEKCWSDQDFCRSKKLWHALAKMLSEKAAWALAMDRRLNMVSINPGLVVGPSVAQHNARPTMSYLKGAAQMYENGVLAYVDVKFLADVHIRAFEDVSACGRYFCFNQIVNTEEEALKLVESLSPLIPMPPRYENEMHGSEVYEERLRNNKLSKLVEAGSAC

SEQ ID NO: 42691 - DNA, 1125 bp, Arabidopsis thaliana
  misc_feature (1)..(1125): Ceres Seq. ID no. 12738333
  misc_feature: MA Experiment ID: 108462 Result: Up-regulated in Transcription
  misc_feature: MA Experiment 108462 PARAMETER Experiment Name: At_Germinating_Seeds_cDNA_P Parameter: Age (day) Value: 2 vs. 0
  misc_feature: MA Experiment 108462 PARAMETER Experiment Name: At_Germinating_Seeds_cDNA_P Parameter: Tissue Value: Germinating Seeds
  misc_feature: MA Experiment ID: 108463 Result: Up-regulated in Transcription
  misc_feature: MA Experiment 108463 PARAMETER Experiment Name: At_Germinating_Seeds_cDNA_P Parameter: Age (day) Value: 3 vs. 0
  misc_feature: MA Experiment 108463 PARAMETER Experiment Name: At_Germinating_Seeds_cDNA_P Parameter: Tissue Value: Germinating Seeds
  misc_feature: MA Experiment ID: 20000072 Result: Up-regulated in Transcription
  misc_feature: MA Experiment 20000072 PARAMETER Experiment Name: At_100uM_ABA_Mutants_cDNA_P Parameter: Plant Line Value: CS8105
  misc_feature: MA Experiment 20000072 PARAMETER Experiment Name: At_100uM_ABA_Mutants_cDNA_P Parameter: Timepoint (hr) Value: 6
  misc_feature: MA Experiment 20000072 PARAMETER Experiment Name: At_100uM_ABA_Mutants_cDNA_P Parameter: Tissue Value: Aerial
  misc_feature: MA Experiment 20000072 PARAMETER Experiment Name: At_100uM_ABA_Mutants_cDNA_P Parameter: Treatment Value: 100uM ABA vs. No Treatment
  misc_feature: MA Experiment ID: 20000086 Result: Up-regulated in Transcription
  misc_feature: MA Experiment 20000086 PARAMETER Experiment Name: At_100uM_ABA_Mutants_cDNA_P Parameter: Plant Line Value: CS22
  misc_feature: MA Experiment 20000086 PARAMETER Experiment Name: At_100uM_ABA_Mutants_cDNA_P Parameter: Timepoint (hr) Value: 6
  misc_feature: MA Experiment 20000086 PARAMETER Experiment Name: At_100uM_ABA_Mutants_cDNA_P Parameter: Tissue Value: Aerial
  misc_feature: MA Experiment 20000086 PARAMETER Experiment Name: At_100uM_ABA_Mutants_cDNA_P Parameter: Treatment Value: 100uM ABA vs. No Treatment
  misc_feature: MA Experiment ID: 20000314 Result: Up-regulated in Transcription
  misc_feature: MA Experiment 20000314 PARAMETER Experiment Name: At_14day_Shoots-Roots_Sub_P Parameter: Age (day) Value: 14
  misc_feature: MA Experiment 20000314 PARAMETER Experiment Name: At_14day_Shoots-Roots_Sub_P Parameter: Organism Value: A. thaliana
  misc_feature: MA Experiment 20000314 PARAMETER Experiment Name: At_14day_Shoots-Roots_Sub_P Parameter: Plant Line Value: WS
  misc_feature: MA Experiment 20000314 PARAMETER Experiment Name: At_14day_Shoots-Roots_Sub_P Parameter: Tissue Value: Roots vs. Whole Plant
  misc_feature: MA Experiment ID: 20000328 Result: Down-regulated in Transcription
  misc_feature: MA Experiment 20000328 PARAMETER Experiment Name: At_42deg_Heat_Sub_P Parameter: Age (day) Value: 14
  misc_feature: MA Experiment 20000328 PARAMETER Experiment Name: At_42deg_Heat_Sub_P Parameter: Organism Value: A. thaliana
  misc_feature: MA Experiment 20000328 PARAMETER Experiment Name: At_42deg_Heat_Sub_P Parameter: Plant Line Value: WS
  misc_feature: MA Experiment 20000328 PARAMETER Experiment Name: At_42deg_Heat_Sub_P Parameter: Temperature (deg C) Value: 42 vs. 22
  misc_feature: MA Experiment 20000328 PARAMETER Experiment Name: At_42deg_Heat_Sub_P Parameter: Timepoint (hr) Value: 6
  misc_feature: MA Experiment 20000328 PARAMETER Experiment Name: At_42deg_Heat_Sub_P Parameter: Tissue Value: Aerial
  misc_feature: MA Experiment ID: 20000352 Result: Up-regulated in Transcription
  misc_feature: MA Experiment 20000352 PARAMETER Experiment Name: At_Drought_Sub_P Parameter: Age (day) Value: 7
  misc_feature: MA Experiment 20000352 PARAMETER Experiment Name: At_Drought_Sub_P Parameter: Organism Value: A. thaliana
  misc_feature: MA Experiment 20000352 PARAMETER Experiment Name: At_Drought_Sub_P Parameter: Plant Line Value: WS
  misc_feature: MA Experiment 20000352 PARAMETER Experiment Name: At_Drought_Sub_P Parameter: Timepoint (hr) Value: 6
  misc_feature: MA Experiment 20000352 PARAMETER Experiment Name: At_Drought_Sub_P Parameter: Tissue Value: Whole Plant
  misc_feature: MA Experiment 20000352 PARAMETER Experiment Name: At_Drought_Sub_P Parameter: Treatment Value: Drought vs. No Drought
  misc_feature: MA Experiment ID: 20000440 Result: Down-regulated in Transcription
  misc_feature: MA Experiment 20000440 PARAMETER Experiment Name: At_Closed-Flower__Sub_P Parameter: Tissue Value: Closed Flower vs. Whole Plant
  misc_feature: MA Experiment ID: 20000634 Result: Down-regulated in Transcription
  misc_feature: MA Experiment 20000634 PARAMETER Experiment Name: At_10percent_PEG_Sub_P Parameter: Age (day) Value: 12
  misc_feature: MA Experiment 20000634 PARAMETER Experiment Name: At_10percent_PEG_Sub_P Parameter: Organism Value: A. thaliana
  misc_feature: MA Experiment 20000634 PARAMETER Experiment Name: At_10percent_PEG_Sub_P Parameter: Plant Line Value: WS
  misc_feature: MA Experiment 20000634 PARAMETER Experiment Name: At_10percent_PEG_Sub_P Parameter: Timepoint (day) Value: 12
  misc_feature: MA Experiment 20000634 PARAMETER Experiment Name: At_10percent_PEG_Sub_P Parameter: Tissue Value: Whole Plant
  misc_feature: MA Experiment 20000634 PARAMETER Experiment Name: At_10percent_PEG_Sub_P Parameter: Treatment Value: 10% PEG vs. No Treatment
ctctagggaagcttgtgtacgatgttgtagacgccaagaacattcttgagatccctcctgttaccgctcaggtgactaaattcaaatgtggagggtttgttctcggactctgtatgaatcactgtatgttcgatggaattggagctatggagtttgttaactcatggggtcaagtcgctagaggcttaccattaacaactcccccattctcagacagaaccattctcaatgctcgaaaccctccaaagatcgacaatctccaccaagaatttgaagagatcgaagataaatccaacatcaactctctttacaccaaagagccaactctctacagatccttctgctttgatccagagaaaatcaagaaacttaagctccaagcaacagagaacagtgagtctctcctcggtaactcatgcacaagttttgaggctttatctgcttttgtctggagagcaagaaccaagtcgttgaagacgttgagtgatcagaaaacgaagcttctcttcgccgttgatggtagagccaagttcgagcctcaactgccaaaagggtacttcggaaatggaattgttctcacagactccatctgtgaagctggggagcttatcgaaaaaccgttgagtttcgcggtgggattagtcagagaagccattaagatggtaactgatgggtacatgagatctgctattgattacttcgaagtcacgagagcaagaccttctctttcctcgactcttctgatcactacatggtcaagattgggtttccacacgacagatttcggttggggagaaccgattttatccggtccagtagctttgcctgagaaagaagtaactctgtttttgtctcatggagaacagaggagaagcatcaatgtgcttcttggacttcccgctacagccatggatgtgtttcaagaacagtttttacagatataatatgaacaacgacaaaatacaaatatctggcaattattgtcaaaacctattcgttttactctgtttttcttgcttccttttttttttatctttttgatttatgctgaattattattgttatcttcatcttaaacttgtctgtatcttgcatcaagtttcaaccataaatttatattattcc

SEQ ID NO: 42692 - protein, 313 aa, Arabidopsis thaliana
  peptide (1)..(313): Ceres Seq. ID no. 12738334
  misc_feature (1)..(313): Pfam Name: Transferase family Pfam Description: Transferase family
  misc_feature (3)..(308): Homolog of NCBI NO: 22854876 NR Description: benzoyl coenzyme A: benzyl alcohol benzoyl
  misc_feature (1)..(311): Homolog of NCBI NO: 21536883 NR Description: anthranilate N-benzoyltransferase [Arabidopsis
  misc_feature (1)..(311): Homolog of NCBI NO: 15239747 NR Description: anthranilate N-benzoyltransferase
  misc_feature (1)..(307): Homolog of NCBI NO: 20161743 NR Description: N-hydroxycinnamoyl/benzoyltransferase-like
  misc_feature (1)..(308): Homolog of NCBI NO: 34222064 NR Description: At3g48720 [Arabidopsis thaliana]
  misc_feature (1)..(307): Homolog of NCBI NO: 21553692 NR Description: acyltransferase-like protein [Arabidopsis
  misc_feature (1)..(308): Homolog of NCBI NO: 15229017 NR Description: putative protein; protein id: At3g48720.1
  misc_feature (1)..(307): Homolog of NCBI NO: 15242820 NR Description: acyltransferase-like protein
  misc_feature (1)..(313): Homolog of NCBI NO: 30693725 NR Description: transferase family [Arabidopsis thaliana]
  misc_feature (1)..(313): Homolog of NCBI NO: 30693723 NR Description: transferase family [Arabidopsis thaliana]
LGKLVYDVVDAKNILEIPPVTAQVTKFKCGGFVLGLCMNHCMFDGIGAMEFVNSWGQVARGLPLTTPPFSDRTILNARNPPKIDNLHQEFEEIEDKSNINSLYTKEPTLYRSFCFDPEKIKKLKLQATENSESLLGNSCTSFEALSAFVWRARTKSLKTLSDQKTKLLFAVDGRAKFEPQLPKGYFGNGIVLTDSICEAGELIEKPLSFAVGLVREAIKMVTDGYMRSAIDYFEVTRARPSLSSTLLITTWSRLGFHTTDFGWGEPILSGPVALPEKEVTLFLSHGEQRRSINVLLGLPATAMDVFQEQFLQI

SEQ ID NO: 42693 - protein, 276 aa, Arabidopsis thaliana
  peptide (1)..(276): Ceres Seq. ID no. 12738335
  misc_feature (1)..(276): Pfam Name: Transferase family Pfam Description: Transferase family
  misc_feature (1)..(271): Homolog of NCBI NO: 22854876 NR Description: benzoyl coenzyme A: benzyl alcohol benzoyl
  misc_feature (1)..(274): Homolog of NCBI NO: 21536883 NR Description: anthranilate N-benzoyltransferase [Arabidopsis
  misc_feature (1)..(274): Homolog of NCBI NO: 15239747 NR Description: anthranilate N-benzoyltransferase
  misc_feature (1)..(270): Homolog of NCBI NO: 20161743 NR Description: N-hydroxycinnamoyl/benzoyltransferase-like
  misc_feature (1)..(271): Homolog of NCBI NO: 34222064 NR Description: At3g48720 [Arabidopsis thaliana]
  misc_feature (1)..(270): Homolog of NCBI NO: 21553692 NR Description: acyltransferase-like protein [Arabidopsis
  misc_feature (1)..(271): Homolog of NCBI NO: 15229017 NR Description: putative protein; protein id: At3g48720.1
  misc_feature (1)..(270): Homolog of NCBI NO: 15242820 NR Description: acyltransferase-like protein
  misc_feature (1)..(276): Homolog of NCBI NO: 30693725 NR Description: transferase family [Arabidopsis thaliana]
  misc_feature (1)..(276): Homolog of NCBI NO: 30693723 NR Description: transferase family [Arabidopsis thaliana]
MNHCMFDGIGAMEFVNSWGQVARGLPLTTPPFSDRTILNARNPPKIDNLHQEFEEIEDKSNINSLYTKEPTLYRSFCFDPEKIKKLKLQATENSESLLGNSCTSFEALSAFVWRARTKSLKTLSDQKTKLLFAVDGRAKFEPQLPKGYFGNGIVLTDSICEAGELIEKPLSFAVGLVREAIKMVTDGYMRSAIDYFEVTRARPSLSSTLLITTWSRLGFHTTDFGWGEPILSGPVALPEKEVTLFLSHGEQRRSINVLLGLPATAMDVFQEQFLQI

SEQ ID NO: 42694 - protein, 272 aa, Arabidopsis thaliana
  peptide (1)..(272): Ceres Seq. ID no. 12738336
  misc_feature (1)..(272): Pfam Name: Transferase family Pfam Description: Transferase family
  misc_feature (1)..(267): Homolog of NCBI NO: 22854876 NR Description: benzoyl coenzyme A: benzyl alcohol benzoyl
  misc_feature (1)..(270): Homolog of NCBI NO: 21536883 NR Description: anthranilate N-benzoyltransferase [Arabidopsis
  misc_feature (1)..(270): Homolog of NCBI NO: 15239747 NR Description: anthranilate N-benzoyltransferase
  misc_feature (1)..(266): Homolog of NCBI NO: 20161743 NR Description: N-hydroxycinnamoyl/benzoyltransferase-like
  misc_feature (1)..(267): Homolog of NCBI NO: 34222064 NR Description: At3g48720 [Arabidopsis thaliana]
  misc_feature (1)..(266): Homolog of NCBI NO: 21553692 NR Description: acyltransferase-like protein [Arabidopsis
  misc_feature (1)..(267): Homolog of NCBI NO: 15229017 NR Description: putative protein; protein id: At3g48720.1
  misc_feature (1)..(266): Homolog of NCBI NO: 15242820 NR Description: acyltransferase-like protein
  misc_feature (1)..(272): Homolog of NCBI NO: 30693725 NR Description: transferase family [Arabidopsis thaliana]
  misc_feature (1)..(272): Homolog of NCBI NO: 30693723 NR Description: transferase family [Arabidopsis thaliana]
MFDGIGAMEFVNSWGQVARGLPLTTPPFSDRTILNARNPPKIDNLHQEFEEIEDKSNINSLYTKEPTLYRSFCFDPEKIKKLKLQATENSESLLGNSCTSFEALSAFVWRARTKSLKTLSDQKTKLLFAVDGRAKFEPQLPKGYFGNGIVLTDSICEAGELIEKPLSFAVGLVREAIKMVTDGYMRSAIDYFEVTRARPSLSSTLLITTWSRLGFHTTDFGWGEPILSGPVALPEKEVTLFLSHGEQRRSINVLLGLPATAMDVFQEQFLQI

SEQ ID NO: 42695 - DNA, 1648 bp, Arabidopsis thaliana
  misc_feature (1)..(1648): Ceres Seq. ID no. 12330837
  misc_feature: MA Experiment ID: 20000437 Result: Up-regulated in Transcription
  misc_feature: MA Experiment 20000437 PARAMETER Experiment Name: At_Drought_P Parameter: Age (day) Value: 8
  misc_feature: MA Experiment 20000437 PARAMETER Experiment Name: At_Drought_P Parameter: Organism Value: A. thaliana
  misc_feature: MA Experiment 20000437 PARAMETER Experiment Name: At_Drought_P Parameter: Plant Line Value: WS
  misc_feature: MA Experiment 20000437 PARAMETER Experiment Name: At_Drought_P Parameter: Timepoint (hr) Value: 24
  misc_feature: MA Experiment 20000437 PARAMETER Experiment Name: At_Drought_P Parameter: Tissue Value: Whole Plant
  misc_feature: MA Experiment 20000437 PARAMETER Experiment Name: At_Drought_P Parameter: Treatment Value: Drought vs. No Drought
  misc_feature: MA Experiment ID: 20001911 Result: Down-regulated in Transcription
  misc_feature: MA Experiment 20001911 PARAMETER Experiment Name: At_Drought_Reproduction_P Parameter: Age (day) Value: 40
  misc_feature: MA Experiment 20001911 PARAMETER Experiment Name: At_Drought_Reproduction_P Parameter: Organism Value: A. thaliana
  misc_feature: MA Experiment 20001911 PARAMETER Experiment Name: At_Drought_Reproduction_P Parameter: Plant Line Value: WS
  misc_feature: MA Experiment 20001911 PARAMETER Experiment Name: At_Drought_Reproduction_P Parameter: Timepoint (day) Value: 10
  misc_feature: MA Experiment 20001911 PARAMETER Experiment Name: At_Drought_Reproduction_P Parameter: Tissue Value: Flowers
  misc_feature: MA Experiment 20001911 PARAMETER Experiment Name: At_Drought_Reproduction_P Parameter: Treatment Value: Drought vs. No Drought
aaaaaaagaatttataacaactccaaggaaagcatcaatggtgggagaagaagcttgcttgtgataatatattcagctacgtcgagtgaagaaccagtgaagcataagtagcagagacagagagagatacgtgagtgtgtgtctgtgtttttcgctttttggctttcttcgctgattccacgaacggcgtgaatcgacttttctccagatctcatctctttcagtgtttgattctgtcaaaatctgcaagcgaatcgagatttctcagatctcgttttcgcttgcacgagattcagatctgatagtgtcggtgttcaattttctcaaatccaaatggagaaaccggagagcgagaagaaatcggcggtgtctgatgtcggtgcatgggctatgaatgtaatcagctccgttggaatcatcatggctaataaacagctcatgtcttcctctggtttcggttttggctttgctacaacgttaacgggatttcactttgcattcactgctcttgttggtatggtgtcaaacgcaacgggactatcagcttctaagcatgttcctctttgggagcttctctggttctcaattgttgctaatatctctatcgctgctatgaactttagtcttatgctcaactctgttggcttctatcagatttcgaaattgagcatgattccggtggtatgcgtgttggaatggattctacatagcaagcattattgtaaagaagtgaaagcttctgtaatggttgtggttatcggtgttgggatttgtactgtgactgatgtcaaagttaatgccaaaggtttcatttgtgcatgcactgccgttttctccacttctctgcagcagatttctataggctctctgcagaagaagtactcagtaggatcctttgaattgctgagcaaaactgcaccaatccaagccatttcacttctcatctgtggcccctttgttgactatttgttgagcggcaaattcatatctacttaccagatgacttatggtgccatcttctgcattcttctctcctgtgcattagccgttttctgtaacataagccaatatctctgcatcggaagattctcagcgacatctttccaagttctaggccacatgaaaacagtatgcgtcctcacattaggatggcttctctttgattccgagatgacattcaagaacatcgccgggatggccatagccattgttggaatggtgatctatagttgggctgttgatatagagaaacagaggaacgcaaagtcaacgccacacggcaaacacagtatgaccgaagatgagattaagctactcaaagaaggagttgagcatatcgacttgaaagacgttgaactcggtgacactaaaccataagtgggtgcttataacccatttgaaattactcgtcgctactgattcgaattctttatacaaatatttcctttgtgtgccatttactttgttctttccacttcctatatatgtcttagaacattttgggcttttcagaaagcccataaatccttctttgcttgagaagaaggcccgtccttgaatagtaagtgtcctatatagtaaagtaaacagaaatgtcaactgaagcatgtgattttattcatttgattatatatgtctatgaactacc

SEQ ID NO: 42696 - protein, 347 aa, Arabidopsis thaliana
  peptide (1)..(347): Ceres Seq. ID no. 12330838
  misc_feature (5)..(317): Homolog of NCBI NO: 18399097 NR Description: expressed protein
  misc_feature (5)..(317): Homolog of NCBI NO: 15234794 NR Description: hypothetical protein; protein id: At4g09810.1
  misc_feature (5)..(317): Homolog of NCBI NO: 30313364 NR Description: putative transmembrane protein [Oryza sativa]
  misc_feature (5)..(47): Homolog of NCBI NO: 33146838 NR Description: transporter-related-like [Oryza sativa (japonica
  misc_feature (41)..(346): Homolog of NCBI NO: 33146838 NR Description: transporter-related-like [Oryza sativa (japonica
  misc_feature (5)..(346): Homolog of NCBI NO: 15238957 NR Description: putative protein; protein id: At5g42420.1
  misc_feature (36)..(346): Homolog of NCBI NO: 26450366 NR Description: unknown protein [Arabidopsis thaliana]
  misc_feature (1)..(346): Homolog of NCBI NO: 21536703 NR Description: unknown [Arabidopsis thaliana]
  misc_feature (1)..(346): Homolog of NCBI NO: 18394949 NR Description: expressed protein
  misc_feature (1)..(347): Homolog of NCBI NO: 18411172 NR Description: expressed protein
MEKPESEKKSAVSDVGAWAMNVISSVGIIMANKQLMSSSGFGFGFATTLTGFHFAFTALVGMVSNATGLSASKHVPLWELLWFSIVANISIAAMNFSLMLNSVGFYQISKLSMIPVVCVLEWILHSKHYCKEVKASVMVVVIGVGICTVTDVKVNAKGFICACTAVFSTSLQQISIGSLQKKYSVGSFELLSKTAPIQAISLLICGPFVDYLLSGKFISTYQMTYGAIFCILLSCALAVFCNISQYLCIGRFSATSFQVLGHMKTVCVLTLGWLLFDSEMTFKNIAGMAIAIVGMVIYSWAVDIEKQRNAKSTPHGKHSMTEDEIKLLKEGVEHIDLKDVELGDTKP

SEQ ID NO: 42697 - protein, 328 aa, Arabidopsis thaliana
  peptide (1)..(328): Ceres Seq. ID no. 12330839
  misc_feature (1)..(298): Homolog of NCBI NO: 18399097 NR Description: expressed protein
  misc_feature (1)..(298): Homolog of NCBI NO: 15234794 NR Description: hypothetical protein; protein id: At4g09810.1
  misc_feature (1)..(298): Homolog of NCBI NO: 30313364 NR Description: putative transmembrane protein [Oryza sativa]
  misc_feature (1)..(28): Homolog of NCBI NO: 33146838 NR Description: transporter-related-like [Oryza sativa (japonica
  misc_feature (22)..(327): Homolog of NCBI NO: 33146838 NR Description: transporter-related-like [Oryza sativa (japonica
  misc_feature (1)..(327): Homolog of NCBI NO: 15238957 NR Description: putative protein; protein id: At5g42420.1
  misc_feature (17)..(327): Homolog of NCBI NO: 26450366 NR Description: unknown protein [Arabidopsis thaliana]
  misc_feature (1)..(327): Homolog of NCBI NO: 21536703 NR Description: unknown [Arabidopsis thaliana]
  misc_feature (1)..(327): Homolog of NCBI NO: 18394949 NR Description: expressed protein
  misc_feature (1)..(328): Homolog of NCBI NO: 18411172 NR Description: expressed protein
MNVISSVGIIMANKQLMSSSGFGFGFATTLTGFHFAFTALVGMVSNATGLSASKHVPLWELLWFSIVANISIAAMNFSLMLNSVGFYQISKLSMIPVVCVLEWILHSKHYCKEVKASVMVVVIGVGICTVTDVKVNAKGFICACTAVFSTSLQQISIGSLQKKYSVGSFELLSKTAPIQAISLLICGPFVDYLLSGKFISTYQMTYGAIFCILLSCALAVFCNISQYLCIGRFSATSFQVLGHMKTVCVLTLGWLLFDSEMTFKNIAGMAIAIVGMVIYSWAVDIEKQRNAKSTPHGKHSMTEDEIKLLKEGVEHIDLKDVELGDTKP

SEQ ID NO: 42698 - protein, 318 aa, Arabidopsis thaliana
  peptide (1)..(318): Ceres Seq. ID no. 12330840
  misc_feature (1)..(288): Homolog of NCBI NO: 18399097 NR Description: expressed protein
  misc_feature (1)..(288): Homolog of NCBI NO: 15234794 NR Description: hypothetical protein; protein id: At4g09810.1
  misc_feature (1)..(288): Homolog of NCBI NO: 30313364 NR Description: putative transmembrane protein [Oryza sativa]
  misc_feature (1)..(18): Homolog of NCBI NO: 33146838 NR Description: transporter-related-like [Oryza sativa (japonica
  misc_feature (12)..(317): Homolog of NCBI NO: 33146838 NR Description: transporter-related-like [Oryza sativa (japonica
  misc_feature (1)..(317): Homolog of NCBI NO: 15238957 NR Description: putative protein; protein id: At5g42420.1
  misc_feature (7)..(317): Homolog of NCBI NO: 26450366 NR Description: unknown protein [Arabidopsis thaliana]
  misc_feature (1)..(317): Homolog of NCBI NO: 21536703 NR Description: unknown [Arabidopsis thaliana]
  misc_feature (1)..(317): Homolog of NCBI NO: 18394949 NR Description: expressed protein
  misc_feature (1)..(318): Homolog of NCBI NO: 18411172 NR Description: expressed protein
MANKQLMSSSGFGFGFATTLTGFHFAFTALVGMVSNATGLSASKHVPLWELLWFSIVANISIAAMNFSLMLNSVGFYQISKLSMIPVVCVLEWILHSKHYCKEVKASVMVVVIGVGICTVTDVKVNAKGFICACTAVFSTSLQQISIGSLQKKYSVGSFELLSKTAPIQAISLLICGPFVDYLLSGKFISTYQMTYGAIFCILLSCALAVFCNISQYLCIGRFSATSFQVLGHMKTVCVLTLGWLLFDSEMTFKNIAGMAIAIVGMVIYSWAVDIEKQRNAKSTPHGKHSMTEDEIKLLKEGVEHIDLKDVELGDTKP

SEQ ID NO: 42699 - DNA, 1680 bp, Arabidopsis thaliana
  misc_feature (1)..(1680): Ceres Seq. ID no. 12421772
  misc_feature: MA Experiment ID: 108434 Result: Up-regulated in Transcription
  misc_feature: MA Experiment 108434 PARAMETER Experiment Name: At_Root_Tips_cDNA_P Parameter: Tissue Value: Root Tips
  misc_feature: MA Experiment ID: 108595 Result: Up-regulated in Transcription
  misc_feature: MA Experiment 108595 PARAMETER Experiment Name: At_Ler-pi_Ovule_cDNA_P Parameter: Plant Line Value: null
  misc_feature: MA Experiment ID: 20000179 Result: Up-regulated in Transcription
  misc_feature: MA Experiment 20000179 PARAMETER Experiment Name: At_Germinating_Seeds_P Parameter: Age (hr) Value: 6 vs. 0
  misc_feature: MA Experiment 20000179 PARAMETER Experiment Name: At_Germinating_Seeds_P Parameter: Tissue Value: Germinating Seeds
  misc_feature: MA Experiment ID: 20000180 Result: Up-regulated in Transcription
  misc_feature: MA Experiment 20000180 PARAMETER Experiment Name: At_Germinating_Seeds_P Parameter: Age (hr) Value: 24 vs. 0
  misc_feature: MA Experiment 20000180 PARAMETER Experiment Name: At_Germinating_Seeds_P Parameter: Tissue Value: Germinating Seeds
  misc_feature: MA Experiment ID: 20000573 Result: Up-regulated in Transcription
  misc_feature: MA Experiment 20000573 PARAMETER Experiment Name: At_100uM_ABA_Mutants__P Parameter: Organism Value: A. thaliana
  misc_feature: MA Experiment 20000573 PARAMETER Experiment Name: At_100uM_ABA_Mutants__P Parameter: Plant Line Value: CS22 vs. Ler wt
  misc_feature: MA Experiment 20000573 PARAMETER Experiment Name: At_100uM_ABA_Mutants__P Parameter: Timepoint (hr) Value: N/A
  misc_feature: MA Experiment 20000573 PARAMETER Experiment Name: At_100uM_ABA_Mutants__P Parameter: Tissue Value: Whole Plant
  misc_feature: MA Experiment 20000573 PARAMETER Experiment Name: At_100uM_ABA_Mutants__P Parameter: Treatment Value: None
agatttcgagtttcttctttcccgcccgtaagagaaaccctactctgactctccactccatttgagagactgagctcgttccgataaggagaggagatgtctaacgtaaccgtctgtgcgcgattcaggccgcgaagctctaaagagatgcgcgatcccagcagagatggtgtctgtgctcgacccatcgacgctgaaaccttcgttttccaagatgacaaggaagatgaatttacatttagcctcgatagagttttttatgaggactctacccaagctgcggtttatgagtttctggctctccccatcatgagagacgctgtaaatggtataaacggaacaatcatcacttatggacagacaggggctgggaagacttattccatggagggaccaggcatccaggactgtgatgagcacaataaaggacttcttccaagagtggtccatgggatgtttgagcaaatcagctcttccaatgatattgcaagatacactgttaaattgtctatggttgagatctacatggagaaagtcagggacctgttggacttatcaaaagcaaacatacagatcaaggagaacaaaacacaaggaatactcttgtcaggcgttacagaggctagcttcattgtgcctgtatcagattcggtggaggcattacaacatctatgcaccggtttagctaaccgcgcagttggggaaacccaaatgaatatgtccagcagtagaagccactgcgcctacttgttcacagtccaggaggattcagttaaagataaaagggtaaaaacaggaaaactgattcttgtcgacctggctggctcagagaaagcagacaaaactggagcagaaggtagggttcttgaagaagcgaagacgatcaataaatcgctctcagccttggggaacgtgataaacgctctcacaagtgggccatctagcaaagggaatcacataccatatcgtgactccaagcttactcgcatcttacaggatgccctgggtggaaattctcgaatggcgctgctttgctgttgctcaccaagcactttaaatgcatctgagacgctctcaactctcaggtttggcatgagggcaaaacacataaaagcatcaccacgtgctagtgaagtgaaatctgcgaaggcacaggaggaaccctcctcggttaccaaagatgaaaaatgtgggaggatcctagaaaagatgaaagagaggatgagcaacgaagacatcaaaatgctagaagatgtgtttatacaggaagggatcattttcagcctagattcgatggctgaagtggaaaccgtatacgaagatattgtatcaaaaactatacaatccttacagcaggctgttgatgaactccaacagaaagtcaaaaagttagaagcagaaaacataggtattcaggaacaagcattgcgcaatcacgaacctggttcggtcggaaagatgtcaaggttcatcagttcttggtatgcaccgttctttacgtcctaaagatgataaaatgaatatactatcttggtaatttagaagatgtggacaagtagatggtaaagagataagtttctctttttaggtcgtgagagcaaaacagatattaacattcaaaggtatgtaatgaaatagtagataaaaaatggatgggaggaggaataaaagctaattaag

SEQ ID NO: 42700 - protein, 469 aa, Arabidopsis thaliana
  peptide (1)..(469): Ceres Seq. ID no. 12421773
  misc_feature (2)..(354): Homolog of NCBI NO: 17942987 NR Description: Chain A, Structure Of A Fast Kinesin:
  misc_feature (2)..(354): Homolog of NCBI NO: 6016437 NR Description: Kinesin heavy chain
  misc_feature (2)..(339): Homolog of NCBI NO: 6016438 NR Description: KINESIN HEAVY CHAIN (SYNKIN)
  misc_feature (1)..(350): Homolog of NCBI NO: 40074457 NR Description: kinesin family member 3 [Dictyostelium discoideum]
  misc_feature (1)..(350): Homolog of NCBI NO: 27261501 NR Description: kinesin 1 [Dictyostelium discoideum]
  misc_feature (1)..(180): Homolog of NCBI NO: 11358473 NR Description: kinesin heavy chain-like protein - Arabidopsis
  misc_feature (224)..(469): Homolog of NCBI NO: 11358473 NR Description: kinesin heavy chain-like protein - Arabidopsis
  misc_feature (1)..(469): Homolog of NCBI NO: 30695816 NR Description: kinesin heavy chain, putative [Arabidopsis
  misc_feature (1)..(469): Homolog of NCBI NO: 18412812 NR Description: kinesin heavy chain, putative
  misc_feature (1)..(469): Homolog of NCBI NO: 21553553 NR Description: kinesin heavy chain-like protein [Arabidopsis
MSNVTVCARFRPRSSKEMRDPSRDGVCARPIDAETFVFQDDKEDEFTFSLDRVFYEDSTQAAVYEFLALPIMRDAVNGINGTIITYGQTGAGKTYSMEGPGIQDCDEHNKGLLPRVVHGMFEQISSSNDIARYTVKLSMVEIYMEKVRDLLDLSKANIQIKENKTQGILLSGVTEASFIVPVSDSVEALQHLCTGLANRAVGETQMNMSSSRSHCAYLFTVQEDSVKDKRVKTGKLILVDLAGSEKADKTGAEGRVLEEAKTINKSLSALGNVINALTSGPSSKGNHIPYRDSKLTRILQDALGGNSRMALLCCCSPSTLNASETLSTLRFGMRAKHIKASPRASEVKSAKAQEEPSSVTKDEKCGRILEKMKERMSNEDIKMLEDVFIQEGIIFSLDSMAEVETVYEDIVSKTIQSLQQAVDELQQKVKKLEAENIGIQEQALRNHEPGSVGKMSRFISSWYAPFFTS

SEQ ID NO: 42701 - protein, 452 aa, Arabidopsis thaliana
  peptide (1)..(452): Ceres Seq. ID no. 12421774
  misc_feature (1)..(337): Homolog of NCBI NO: 17942987 NR Description: Chain A, Structure Of A Fast Kinesin:
  misc_feature (1)..(337): Homolog of NCBI NO: 6016437 NR Description: Kinesin heavy chain
  misc_feature (1)..(322): Homolog of NCBI NO: 6016438 NR Description: KINESIN HEAVY CHAIN (SYNKIN)
  misc_feature (1)..(333): Homolog of NCBI NO: 40074457 NR Description: kinesin family member 3 [Dictyostelium discoideum]
  misc_feature (1)..(333): Homolog of NCBI NO: 27261501 NR Description: kinesin 1 [Dictyostelium discoideum]
  misc_feature (1)..(163): Homolog of NCBI NO: 11358473 NR Description: kinesin heavy chain-like protein - Arabidopsis
  misc_feature (207)..(452): Homolog of NCBI NO: 11358473 NR Description: kinesin heavy chain-like protein - Arabidopsis
  misc_feature (1)..(452): Homolog of NCBI NO: 30695816 NR Description: kinesin heavy chain, putative [Arabidopsis
  misc_feature (1)..(452): Homolog of NCBI NO: 18412812 NR Description: kinesin heavy chain, putative
  misc_feature (1)..(452): Homolog of NCBI NO: 21553553 NR Description: kinesin heavy chain-like protein [Arabidopsis
MRDPSRDGVCARPIDAETFVFQDDKEDEFTFSLDRVFYEDSTQAAVYEFLALPIMRDAVNGINGTIITYGQTGAGKTYSMEGPGIQDCDEHNKGLLPRVVHGMFEQISSSNDIARYTVKLSMVEIYMEKVRDLLDLSKANIQIKENKTQGILLSGVTEASFIVPVSDSVEALQHLCTGLANRAVGETQMNMSSSRSHCAYLFTVQEDSVKDKRVKTGKLILVDLAGSEKADKTGAEGRVLEEAKTINKSLSALGNVINALTSGPSSKGNHIPYRDSKLTRILQDALGGNSRMALLCCCSPSTLNASETLSTLRFGMRAKHIKASPRASEVKSAKAQEEPSSVTKDEKCGRILEKMKERMSNEDIKMLEDVFIQEGIIFSLDSMAEVETVYEDIVSKTIQSLQQAVDELQQKVKKLEAENIGIQEQALRNHEPGSVGKMSRFISSWYAPFFTS

SEQ ID NO: 42702 - protein, 398 aa, Arabidopsis thaliana
  peptide (1)..(398): Ceres Seq. ID no. 12421775
  misc_feature (1)..(283): Homolog of NCBI NO: 17942987 NR Description: Chain A, Structure Of A Fast Kinesin:
  misc_feature (1)..(283): Homolog of NCBI NO: 6016437 NR Description: Kinesin heavy chain
  misc_feature (1)..(268): Homolog of NCBI NO: 6016438 NR Description: KINESIN HEAVY CHAIN (SYNKIN)
  misc_feature (1)..(279): Homolog of NCBI NO: 40074457 NR Description: kinesin family member 3 [Dictyostelium discoideum]
  misc_feature (1)..(279): Homolog of NCBI NO: 27261501 NR Description: kinesin 1 [Dictyostelium discoideum]
  misc_feature (1)..(109): Homolog of NCBI NO: 11358473 NR Description: kinesin heavy chain-like protein - Arabidopsis
  misc_feature (153)..(398): Homolog of NCBI NO: 11358473 NR Description: kinesin heavy chain-like protein - Arabidopsis
  misc_feature (1)..(398): Homolog of NCBI NO: 30695816 NR Description: kinesin heavy chain, putative [Arabidopsis
  misc_feature (1)..(398): Homolog of NCBI NO: 18412812 NR Description: kinesin heavy chain, putative
  misc_feature (1)..(398): Homolog of NCBI NO: 21553553 NR Description: kinesin heavy chain-like protein [Arabidopsis
MRDAVNGINGTIITYGQTGAGKTYSMEGPGIQDCDEHNKGLLPRVVHGMFEQISSSNDIARYTVKLSMVEIYMEKVRDLLDLSKANIQIKENKTQGILLSGVTEASFIVPVSDSVEALQHLCTGLANRAVGETQMNMSSSRSHCAYLFTVQEDSVKDKRVKTGKLILVDLAGSEKADKTGAEGRVLEEAKTINKSLSALGNVINALTSGPSSKGNHIPYRDSKLTRILQDALGGNSRMALLCCCSPSTLNASETLSTLRFGMRAKHIKASPRASEVKSAKAQEEPSSVTKDEKCGRILEKMKERMSNEDIKMLEDVFIQEGIIFSLDSMAEVETVYEDIVSKTIQSLQQAVDELQQKVKKLEAENIGIQEQALRNHEPGSVGKMSRFISSWYAPFFTS

SEQ ID NO: 42703 - DNA, 1804 bp, Arabidopsis thaliana
  misc_feature (1)..(1804): Ceres Seq. ID no. 12562762
  misc_feature: MA Experiment ID: 20000180 Result: Up-regulated in Transcription
  misc_feature: MA Experiment 20000180 PARAMETER Experiment Name: At_Germinating_Seeds_P Parameter: Age (hr) Value: 24 vs. 0
  misc_feature: MA Experiment 20000180 PARAMETER Experiment Name: At_Germinating_Seeds_P Parameter: Tissue Value: Germinating Seeds
  misc_feature: MA Experiment ID: 20000211 Result: Up-regulated in Transcription
  misc_feature: MA Experiment 20000211 PARAMETER Experiment Name: At_0.001percent_MeJA__P Parameter: Age (day) Value: 14
  misc_feature: MA Experiment 20000211 PARAMETER Experiment Name: At_0.001percent_MeJA__P Parameter: Organism Value: A. thaliana
  misc_feature: MA Experiment 20000211 PARAMETER Experiment Name: At_0.001percent_MeJA__P Parameter: Plant Line Value: WS
  misc_feature: MA Experiment 20000211 PARAMETER Experiment Name: At_0.001percent_MeJA__P Parameter: Timepoint (hr) Value: 1
  misc_feature: MA Experiment 20000211 PARAMETER Experiment Name: At_0.001percent_MeJA__P Parameter: Tissue Value: Aerial
  misc_feature: MA Experiment 20000211 PARAMETER Experiment Name: At_0.001percent_MeJA__P Parameter: Treatment Value: 0.001percent MeJA vs. No Treatment
  misc_feature: MA Experiment ID: 20000265 Result: Up-regulated in Transcription
  misc_feature: MA Experiment 20000265 PARAMETER Experiment Name: At_Open_Flower_P Parameter: Age (day) Value: 21
  misc_feature: MA Experiment 20000265 PARAMETER Experiment Name: At_Open_Flower_P Parameter: Plant Line Value: WS
  misc_feature: MA Experiment 20000265 PARAMETER Experiment Name: At_Open_Flower_P Parameter: Tissue Value: Closed Flower vs. Whole Plant
  misc_feature: MA Experiment ID: 20000286 Result: Up-regulated in Transcription
  misc_feature: MA Experiment 20000286 PARAMETER Experiment Name: At_Open_Flower_P Parameter: Age (day) Value: 21
  misc_feature: MA Experiment 20000286 PARAMETER Experiment Name: At_Open_Flower_P Parameter: Plant Line Value: WS
  misc_feature: MA Experiment 20000286 PARAMETER Experiment Name: At_Open_Flower_P Parameter: Tissue Value: Half Open vs. Whole Plant
  misc_feature: MA Experiment ID: 20000441 Result: Down-regulated in Transcription
  misc_feature: MA Experiment 20000441 PARAMETER Experiment Name: At_1uM_BR-BRZ__P Parameter: Tissue Value: Shoot Apices
  misc_feature: MA Experiment 20000441 PARAMETER Experiment Name: At_1uM_BR-BRZ__P Parameter: Treatment Value: 1uM BR vs. No Treatment
  misc_feature: MA Experiment ID: 20000495 Result: Up-regulated in Transcription
  misc_feature: MA Experiment 20000495 PARAMETER Experiment Name: At_Guard_Cells_P Parameter: Harvest Date Value: 8/2/2002
  misc_feature: MA Experiment 20000495 PARAMETER Experiment Name: At_Guard_Cells_P Parameter: Organism Value: A. thaliana
  misc_feature: MA Experiment 20000495 PARAMETER Experiment Name: At_Guard_Cells_P Parameter: Tissue Value: Guard Cells vs. Leaves
  misc_feature: MA Experiment ID: 20000794 Result: Up-regulated in Transcription
  misc_feature: MA Experiment 20000794 PARAMETER Experiment Name: At_Petals_P Parameter: Age (day) Value: 23-25 days
  misc_feature: MA Experiment 20000794 PARAMETER Experiment Name: At_Petals_P Parameter: Plant Line Value: WS
  misc_feature: MA Experiment 20000794 PARAMETER Experiment Name: At_Petals_P Parameter: Tissue Value: Petals vs. Whole plant
  misc_feature: MA Experiment ID: 20001248 Result: Down-regulated in Transcription
  misc_feature: MA Experiment 20001248 PARAMETER Experiment Name: At_Far-red-induction_P Parameter: Age (day) Value: 7
  misc_feature: MA Experiment 20001248 PARAMETER Experiment Name: At_Far-red-induction_P Parameter: Light Value: Far-red vs. White
  misc_feature: MA Experiment 20001248 PARAMETER Experiment Name: At_Far-red-induction_P Parameter: Organism Value: A. thaliana
  misc_feature: MA Experiment 20001248 PARAMETER Experiment Name: At_Far-red-induction_P Parameter: Plant Line Value: Columbia
  misc_feature: MA Experiment 20001248 PARAMETER Experiment Name: At_Far-red-induction_P Parameter: Timepoint (hr) Value: 4
  misc_feature: MA Experiment 20001248 PARAMETER Experiment Name: At_Far-red-induction_P Parameter: Tissue Value: Whole Plant
  misc_feature: MA Experiment ID: 20001558 Result: Up-regulated in Transcription
  misc_feature: MA Experiment 20001558 PARAMETER Experiment Name: At_Drought_Soil_Dry_P Parameter: Age (day) Value: 27
  misc_feature: MA Experiment 20001558 PARAMETER Experiment Name: At_Drought_Soil_Dry_P Parameter: Organism Value: A. thaliana
  misc_feature: MA Experiment 20001558 PARAMETER Experiment Name: At_Drought_Soil_Dry_P Parameter: Plant Line Value: WS
  misc_feature: MA Experiment 20001558 PARAMETER Experiment Name: At_Drought_Soil_Dry_P Parameter: Post Timepoint (hr) Value: 6
  misc_feature: MA Experiment 20001558 PARAMETER Experiment Name: At_Drought_Soil_Dry_P Parameter: Post-Treatment Value: Re-Water vs. No Drought
  misc_feature: MA Experiment 20001558 PARAMETER Experiment Name: At_Drought_Soil_Dry_P Parameter: Timepoint (day) Value: 13
  misc_feature: MA Experiment 20001558 PARAMETER Experiment Name: At_Drought_Soil_Dry_P Parameter: Treatment Value: Drought vs. No Drought
  misc_feature: MA Experiment ID: 20001910 Result: Down-regulated in Transcription
  misc_feature: MA Experiment 20001910 PARAMETER Experiment Name: At_Drought_Reproduction_P Parameter: Age (day) Value: 37
  misc_feature: MA Experiment 20001910 PARAMETER Experiment Name: At_Drought_Reproduction_P Parameter: Organism Value: A. thaliana
  misc_feature: MA Experiment 20001910 PARAMETER Experiment Name: At_Drought_Reproduction_P Parameter: Plant Line Value: WS
  misc_feature: MA Experiment 20001910 PARAMETER Experiment Name: At_Drought_Reproduction_P Parameter: Timepoint (day) Value: 7
  misc_feature: MA Experiment 20001910 PARAMETER Experiment Name: At_Drought_Reproduction_P Parameter: Tissue Value: Flowers
  misc_feature: MA Experiment 20001910 PARAMETER Experiment Name: At_Drought_Reproduction_P Parameter: Treatment Value: Drought vs. No Drought
aaaaacccatttctaaaatcatctcctcttccttcaaaaactctatctctcactcccacttcttggttctaagaagaatagttaaatttcttttgcgaagaatagttcaggatgcagctgcgactttcgaaaagcttgaagcatatataatggtgtaaagactaaagagtaaagataattaagcatgaagacgatgtggtggagagatatgagaagtctacttatagttccaatgttcaagtgtttggtggctatatgtttggtcatctcactattagttttcgtagaaagtttatatatgaacattgtagtaatctacgtcaagttgtgtaaacgcaaacccgagaagatttacaaatgggaggcaatgcaagaggacttggagctcggaaatcaaaactttcccatggttcttgtccaaatcccaatgtacaacgaacgaggaggtgtttagttatccattggtgctgcttgcagactcatatggccattggatcgactcatcgttcaagttttagatgattccactgatcccaccatcatggaaatggtgagcatagagtgtggaaaatgggcaaccaaaggtattaacataaaatgtgagaggagagacaatagaaatggctataaggctggagctcttaaacaaggtatgaggcatagttacgtcaaaacatgcacctacattgcaatcttcgatgctgatttccagccagagcccgactacctcgaacgcactgtcccatttcttatccacaatcccgaactcgctcttgttcaagctcgatggaaatttgtgaacgcaaagaagtgcttgatgactaggatgcaggagatgtccctcaattaccatttcacggcagagcaagaatctggatccactagacatgccttctttggctttaatgggactgcgggtgtatggagactggcggcgatggaagaagctggtggttggaaagaccggaccaccgtagaggacatggacttggccgttcgtgtaggtctacacggctggaaatttgtctttgtcaacgatgtttcggtgaaaagtgagctaccaagccaatttaaggcattcagattccagcaacatcgatggtcatgcggtccagctaatctcttcagaaaaatgactatggaaattattcgcaataagagagtgacgatttggaagaaattgtatgtgatctatagtttctttttcgtaaggaagatcatagtccatttcttcactttnntcttctattgttgtcattctccctacgagcgtattctttcccgaagtcaacattcccacttggtcaactgtttactttccttttatgatcactctattcaatgccattgccacaccaagatctttctacctcgtgattttttgggtcttgttcgagaatgtaatggctatgcatcggaccaaaggcactttcatcggtttacttgaaggagggagagttaacgaatgggtcgtcaccgagaaattaggtgatgctcttgagactaagttacttccccaagtaagaaaacctcgcaacggggttctcgagaggataaactcaaaagagatgatggtggggatatacatattgtgctgtgcatcatataaccttgtctttgggaagacagtgttatatatctatctttacatgcaggctcttgcttttattattgccggaattggttttataggaacttgataagtgtaattagtaatttatatatccgttagtattctcgttcttttctttttcagatttcagaataagtaggtgaattattttatttaatacaattcttattc

SEQ ID NO: 42704 - protein, 301 aa, Arabidopsis thaliana
  peptide (1)..(301): Ceres Seq. ID no. 12562763
  misc_feature (1)..(136): Pfam Name: Glycosyl transferase Pfam Description: Glycosyl transferase
  misc_feature (1)..(241): Homolog of NCBI NO: 15242959 NR Description: glucosyltransferase-like protein
  misc_feature (1)..(241): Homolog of NCBI NO: 16519223 NR Description: cellulose synthase-like protein OsCslA9 [Oryza
  misc_feature (1)..(241): Homolog of NCBI NO: 21536839 NR Description: putative glucosyltransferase [Arabidopsis
  misc_feature (1)..(241): Homolog of NCBI NO: 18403914 NR Description: putative glucosyltransferase
  misc_feature (1)..(241): Homolog of NCBI NO: 15237519 NR Description: putative protein
  misc_feature (1)..(241): Homolog of NCBI NO: 30688416 NR Description: glycosyltransferase family 2 [Arabidopsis
  misc_feature (1)..(241): Homolog of NCBI NO: 30688411 NR Description: glycosyltransferase family 2 [Arabidopsis
  misc_feature (1)..(241): Homolog of NCBI NO: 28393622 NR Description: putative cellulose synthase [Arabidopsis thaliana]
  misc_feature (1)..(206): Homolog of NCBI NO: 9369401 NR Description: T23E23.23 [Arabidopsis thaliana]
  misc_feature (1)..(241): Homolog of NCBI NO: 15221657 NR Description: glucosyltransferase, putative; protein id:
  misc_feature (233)..(233): Xaa is any aa, unknown or other
  misc_feature (234)..(234): Xaa is any aa, unknown or other
MEMVSIECGKWATKGINIKCERRDNRNGYKAGALKQGMRHSYVKTCTYIAIFDADFQPEPDYLERTVPFLIHNPELALVQARWKFVNAKKCLMTRMQEMSLNYHFTAEQESGSTRHAFFGFNGTAGVWRLAAMEEAGGWKDRTTVEDMDLAVRVGLHGWKFVFVNDVSVKSELPSQFKAFRFQQHRWSCGPANLFRKMTMEIIRNKRVTIWKKLYVIYSFFFVRKIIVHFFTXXFYCCHSPYERILSRSQHSHLVNCLLSFYDHSIQCHCHTKIFLPRDFLGLVRECNGYASDQRHFHRFT

SEQ ID NO: 42705 - protein, 299 aa, Arabidopsis thaliana
  peptide (1)..(299): Ceres Seq. ID no. 12562764
  misc_feature (1)..(134): Pfam Name: Glycosyl transferase Pfam Description: Glycosyl transferase
  misc_feature (1)..(239): Homolog of NCBI NO: 15242959 NR Description: glucosyltransferase-like protein
  misc_feature (1)..(239): Homolog of NCBI NO: 16519223 NR Description: cellulose synthase-like protein OsCslA9 [Oryza
  misc_feature (1)..(239): Homolog of NCBI NO: 21536839 NR Description: putative glucosyltransferase [Arabidopsis
  misc_feature (1)..(239): Homolog of NCBI NO: 18403914 NR Description: putative glucosyltransferase
  misc_feature (1)..(239): Homolog of NCBI NO: 15237519 NR Description: putative protein
  misc_feature (1)..(239): Homolog of NCBI NO: 30688416 NR Description: glycosyltransferase family 2 [Arabidopsis
  misc_feature (1)..(239): Homolog of NCBI NO: 30688411 NR Description: glycosyltransferase family 2 [Arabidopsis
  misc_feature (1)..(239): Homolog of NCBI NO: 28393622 NR Description: putative cellulose synthase [Arabidopsis thaliana]
  misc_feature (1)..(204): Homolog of NCBI NO: 9369401 NR Description: T23E23.23 [Arabidopsis thaliana]
  misc_feature (1)..(239): Homolog of NCBI NO: 15221657 NR Description: glucosyltransferase, putative; protein id:
  misc_feature (231)..(231): Xaa is any aa, unknown or other
  misc_feature (232)..(232): Xaa is any aa, unknown or other
MVSIECGKWATKGINIKCERRDNRNGYKAGALKQGMRHSYVKTCTYIAIFDADFQPEPDYLERTVPFLIHNPELALVQARWKFVNAKKCLMTRMQEMSLNYHFTAEQESGSTRHAFFGFNGTAGVWRLAAMEEAGGWKDRTTVEDMDLAVRVGLHGWKFVFVNDVSVKSELPSQFKAFRFQQHRWSCGPANLFRKMTMEIIRNKRVTIWKKLYVIYSFFFVRKIIVHFFTXXFYCCHSPYERILSRSQHSHLVNCLLSFYDHSIQCHCHTKIFLPRDFLGLVRECNGYASDQRHFHRFT

SEQ ID NO: 42706 - protein, 264 aa, Arabidopsis thaliana
  peptide (1)..(264): Ceres Seq. ID no. 12562765
  misc_feature (1)..(99): Pfam Name: Glycosyl transferase Pfam Description: Glycosyl transferase
  misc_feature (1)..(204): Homolog of NCBI NO: 15242959 NR Description: glucosyltransferase-like protein
  misc_feature (1)..(204): Homolog of NCBI NO: 16519223 NR Description: cellulose synthase-like protein OsCslA9 [Oryza
  misc_feature (1)..(204): Homolog of NCBI NO: 21536839 NR Description: putative glucosyltransferase [Arabidopsis
  misc_feature (1)..(204): Homolog of NCBI NO: 18403914 NR Description: putative glucosyltransferase
  misc_feature (1)..(204): Homolog of NCBI NO: 15237519 NR Description: putative protein
  misc_feature (1)..(204): Homolog of NCBI NO: 30688416 NR Description: glycosyltransferase family 2 [Arabidopsis
  misc_feature (1)..(204): Homolog of NCBI NO: 30688411 NR Description: glycosyltransferase family 2 [Arabidopsis
  misc_feature (1)..(204): Homolog of NCBI NO: 28393622 NR Description: putative cellulose synthase [Arabidopsis thaliana]
  misc_feature (1)..(169): Homolog of NCBI NO: 9369401 NR Description: T23E23.23 [Arabidopsis thaliana]
  misc_feature (1)..(204): Homolog of NCBI NO: 15221657 NR Description: glucosyltransferase, putative; protein id:
  misc_feature (196)..(196): Xaa is any aa, unknown or other
  misc_feature (197)..(197): Xaa is any aa, unknown or other
MRHSYVKTCTYIAIFDADFQPEPDYLERTVPFLIHNPELALVQARWKFVNAKKCLMTRMQEMSLNYHFTAEQESGSTRHAFFGFNGTAGVWRLAAMEEAGGWKDRTTVEDMDLAVRVGLHGWKFVFVNDVSVKSELPSQFKAFRFQQHRWSCGPANLFRKMTMEIIRNKRVTIWKKLYVIYSFFFVRKIIVHFFTXXFYCCHSPYERILSRSQHSHLVNCLLSFYDHSIQCHCHTKIFLPRDFLGLVRECNGYASDQRHFHRFT

SEQ ID NO: 42707 - DNA, 1186 bp, Arabidopsis thaliana
  misc_feature (1)..(1186): Ceres Seq. ID no. 12370296
  misc_feature: MA Experiment ID: 108434 Result: Down-regulated in Transcription
  misc_feature: MA Experiment 108434 PARAMETER Experiment Name: At_Root_Tips_cDNA_P Parameter: Tissue Value: Root Tips
  misc_feature: MA Experiment ID: 108435 Result: Down-regulated in Transcription
  misc_feature: MA Experiment 108435 PARAMETER Experiment Name: At_stm_Mutants_cDNA_P Parameter: Plant Line Value: wt Landsburg vs stm
  misc_feature: MA Experiment 108435 PARAMETER Experiment Name: At_stm_Mutants_cDNA_P Parameter: Tissue Value: Shoot Apical Meristem Region
  misc_feature: MA Experiment ID: 108461 Result: Up-regulated in Transcription
  misc_feature: MA Experiment 108461 PARAMETER Experiment Name: At_Germinating_Seeds_cDNA_P Parameter: Age (day) Value: 1 vs. 0
  misc_feature: MA Experiment 108461 PARAMETER Experiment Name: At_Germinating_Seeds_cDNA_P Parameter: Tissue Value: Germinating Seeds
  misc_feature: MA Experiment ID: 108462 Result: Up-regulated in Transcription
  misc_feature: MA Experiment 108462 PARAMETER Experiment Name: At_Germinating_Seeds_cDNA_P Parameter: Age (day) Value: 2 vs. 0
  misc_feature: MA Experiment 108462 PARAMETER Experiment Name: At_Germinating_Seeds_cDNA_P Parameter: Tissue Value: Germinating Seeds
  misc_feature: MA Experiment ID: 108463 Result: Up-regulated in Transcription
  misc_feature: MA Experiment 108463 PARAMETER Experiment Name: At_Germinating_Seeds_cDNA_P Parameter: Age (day) Value: 3 vs. 0
  misc_feature: MA Experiment 108463 PARAMETER Experiment Name: At_Germinating_Seeds_cDNA_P Parameter: Tissue Value: Germinating Seeds
  misc_feature: MA Experiment ID: 108464 Result: Up-regulated in Transcription
  misc_feature: MA Experiment 108464 PARAMETER Experiment Name: At_Germinating_Seeds_cDNA_P Parameter: Age (day) Value: 4 vs. 0
  misc_feature: MA Experiment 108464 PARAMETER Experiment Name: At_Germinating_Seeds_cDNA_P Parameter: Tissue Value: Germinating Seeds
  misc_feature: MA Experiment ID: 108473 Result: Down-regulated in Transcription
  misc_feature: MA Experiment 108473 PARAMETER Experiment Name: At_Drought_Flowers_cDNA_P Parameter: Timepoint (hr) Value: 7 d
  misc_feature: MA Experiment 108473 PARAMETER Experiment Name: At_Drought_Flowers_cDNA_P Parameter: Tissue Value: Flower
  misc_feature: MA Experiment 108473 PARAMETER Experiment Name: At_Drought_Flowers_cDNA_P Parameter: Treatment Value: Drought vs. No Drought
  misc_feature: MA Experiment ID: 108561 Result: Down-regulated in Transcription
  misc_feature: MA Experiment 108561 PARAMETER Experiment Name: At_100uM_ABA_cDNA_P Parameter: Timepoint (hr) Value: 6
  misc_feature: MA Experiment 108561 PARAMETER Experiment Name: At_100uM_ABA_cDNA_P Parameter: Tissue Value: Aerial
  misc_feature: MA Experiment 108561 PARAMETER Experiment Name: At_100uM_ABA_cDNA_P Parameter: Treatment Value: 100uM ABA vs. No Treatment
  misc_feature: MA Experiment ID: 108572 Result: Down-regulated in Transcription
  misc_feature: MA Experiment 108572 PARAMETER Experiment Name: At_Drought_cDNA_P Parameter: Timepoint (hr) Value: 1
  misc_feature: MA Experiment 108572 PARAMETER Experiment Name: At_Drought_cDNA_P Parameter: Tissue Value: Aerial
  misc_feature: MA Experiment 108572 PARAMETER Experiment Name: At_Drought_cDNA_P Parameter: Treatment Value: Drought vs. No Drought
  misc_feature: MA Experiment ID: 108573 Result: Down-regulated in Transcription
  misc_feature: MA Experiment 108573 PARAMETER Experiment Name: At_Drought_cDNA_P Parameter: Timepoint (hr) Value: 6
  misc_feature: MA Experiment 108573 PARAMETER Experiment Name: At_Drought_cDNA_P Parameter: Tissue Value: Aerial
  misc_feature: MA Experiment 108573 PARAMETER Experiment Name: At_Drought_cDNA_P Parameter: Treatment Value: Drought vs. No Drought
  misc_feature: MA Experiment ID: 108577 Result: Down-regulated in Transcription
  misc_feature: MA Experiment 108577 PARAMETER Experiment Name: At_42deg_Heat_cDNA_P Parameter: Temperature (deg C) Value: 42 vs. 22
  misc_feature: MA Experiment 108577 PARAMETER Experiment Name: At_42deg_Heat_cDNA_P Parameter: Timepoint (hr) Value: 6
  misc_feature: MA Experiment 108577 PARAMETER Experiment Name: At_42deg_Heat_cDNA_P Parameter: Tissue Value: Aerial
  misc_feature: MA Experiment ID: 108579 Result: Up-regulated in Transcription
  misc_feature: MA Experiment 108579 PARAMETER Experiment Name: At_4deg_Cold_cDNA_P Parameter: Temperature (deg C) Value: 4 vs. 22
  misc_feature: MA Experiment 108579 PARAMETER Experiment Name: At_4deg_Cold_cDNA_P Parameter: Timepoint (hr) Value: 6
  misc_feature: MA Experiment 108579 PARAMETER Experiment Name: At_4deg_Cold_cDNA_P Parameter: Tissue Value: Aerial
  misc_feature: MA Experiment ID: 108595 Result: Down-regulated in Transcription
  misc_feature: MA Experiment 108595 PARAMETER Experiment Name: At_Ler-pi_Ovule_cDNA_P Parameter: Plant Line Value: null
  misc_feature: MA Experiment ID: 108668 Result: Down-regulated in Transcription
  misc_feature: MA Experiment 108668 PARAMETER Experiment Name: At_2mM_SA_cDNA_P Parameter: Plant Line Value: WS
  misc_feature: MA Experiment 108668 PARAMETER Experiment Name: At_2mM_SA_cDNA_P Parameter: Timepoint (hr) Value: 6
  misc_feature: MA Experiment 108668 PARAMETER Experiment Name: At_2mM_SA_cDNA_P Parameter: Treatment Value: 2mM SA vs. No Treatment
  misc_feature: MA Experiment ID: 20000069 Result: Down-regulated in Transcription
  misc_feature: MA Experiment 20000069 PARAMETER Experiment Name: At_100uM_ABA_Mutants_cDNA_P Parameter: Plant Line Value: CS23
  misc_feature: MA Experiment 20000069 PARAMETER Experiment Name: At_100uM_ABA_Mutants_cDNA_P Parameter: Timepoint (hr) Value: 6
  misc_feature: MA Experiment 20000069 PARAMETER Experiment Name: At_100uM_ABA_Mutants_cDNA_P Parameter: Tissue Value: Aerial
  misc_feature: MA Experiment 20000069 PARAMETER Experiment Name: At_100uM_ABA_Mutants_cDNA_P Parameter: Treatment Value: 100uM ABA vs. No Treatment
  misc_feature: MA Experiment ID: 20000070 Result: Down-regulated in Transcription
  misc_feature: MA Experiment 20000070 PARAMETER Experiment Name: At_100uM_ABA_Mutants_cDNA_P Parameter: Plant Line Value: CS24
  misc_feature: MA Experiment 20000070 PARAMETER Experiment Name: At_100uM_ABA_Mutants_cDNA_P Parameter: Timepoint (hr) Value: 6
  misc_feature: MA Experiment 20000070 PARAMETER Experiment Name: At_100uM_ABA_Mutants_cDNA_P Parameter: Tissue Value: Aerial
  misc_feature: MA Experiment 20000070 PARAMETER Experiment Name: At_100uM_ABA_Mutants_cDNA_P Parameter: Treatment Value: 100uM ABA vs. No Treatment
  misc_feature: MA Experiment ID: 20000071 Result: Down-regulated in Transcription
  misc_feature: MA Experiment 20000071 PARAMETER Experiment Name: At_100uM_ABA_Mutants_cDNA_P Parameter: Plant Line Value: CS8104
  misc_feature: MA Experiment 20000071 PARAMETER Experiment Name: At_100uM_ABA_Mutants_cDNA_P Parameter: Timepoint (hr) Value: 6
  misc_feature: MA Experiment 20000071 PARAMETER Experiment Name: At_100uM_ABA_Mutants_cDNA_P Parameter: Tissue Value: Aerial
  misc_feature: MA Experiment 20000071 PARAMETER Experiment Name: At_100uM_ABA_Mutants_cDNA_P Parameter: Treatment Value: 100uM ABA vs. No Treatment
  misc_feature: MA Experiment ID: 20000072 Result: Down-regulated in Transcription
  misc_feature: MA Experiment 20000072 PARAMETER Experiment Name: At_100uM_ABA_Mutants_cDNA_P Parameter: Plant Line Value: CS8105
  misc_feature: MA Experiment 20000072 PARAMETER Experiment Name: At_100uM_ABA_Mutants_cDNA_P Parameter: Timepoint (hr) Value: 6
  misc_feature: MA Experiment 20000072 PARAMETER Experiment Name: At_100uM_ABA_Mutants_cDNA_P Parameter: Tissue Value: Aerial
  misc_feature: MA Experiment 20000072 PARAMETER Experiment Name: At_100uM_ABA_Mutants_cDNA_P Parameter: Treatment Value: 100uM ABA vs. No Treatment
  misc_feature: MA Experiment ID: 20000086 Result: Down-regulated in Transcription
  misc_feature: MA Experiment 20000086 PARAMETER Experiment Name: At_100uM_ABA_Mutants_cDNA_P Parameter: Plant Line Value: CS22
  misc_feature: MA Experiment 20000086 PARAMETER Experiment Name: At_100uM_ABA_Mutants_cDNA_P Parameter: Timepoint (hr) Value: 6
  misc_feature: MA Experiment 20000086 PARAMETER Experiment Name: At_100uM_ABA_Mutants_cDNA_P Parameter: Tissue Value: Aerial
  misc_feature: MA Experiment 20000086 PARAMETER Experiment Name: At_100uM_ABA_Mutants_cDNA_P Parameter: Treatment Value: 100uM ABA vs. No Treatment
  misc_feature: MA Experiment ID: 20000087 Result: Down-regulated in Transcription
  misc_feature: MA Experiment 20000087 PARAMETER Experiment Name: At_100uM_ABA_Mutants_cDNA_P Parameter: Plant Line Value: WS
  misc_feature: MA Experiment 20000087 PARAMETER Experiment Name: At_100uM_ABA_Mutants_cDNA_P Parameter: Timepoint (hr) Value: 6
  misc_feature: MA Experiment 20000087 PARAMETER Experiment Name: At_100uM_ABA_Mutants_cDNA_P Parameter: Tissue Value: Aerial
  misc_feature: MA Experiment 20000087 PARAMETER Experiment Name: At_100uM_ABA_Mutants_cDNA_P Parameter: Treatment Value: 100uM ABA vs. No Treatment
  misc_feature: MA Experiment ID: 20000088 Result: Down-regulated in Transcription
  misc_feature: MA Experiment 20000088 PARAMETER Experiment Name: At_100uM_ABA_Mutants_cDNA_P Parameter: Plant Line Value: Landsberg
  misc_feature: MA Experiment 20000088 PARAMETER Experiment Name: At_100uM_ABA_Mutants_cDNA_P Parameter: Timepoint (hr) Value: 6
  misc_feature: MA Experiment 20000088 PARAMETER Experiment Name: At_100uM_ABA_Mutants_cDNA_P Parameter: Tissue Value: Aerial
  misc_feature: MA Experiment 20000088 PARAMETER Experiment Name: At_100uM_ABA_Mutants_cDNA_P Parameter: Treatment Value: 100uM ABA vs. No Treatment
  misc_feature: MA Experiment ID: 20000090 Result: Down-regulated in Transcription
  misc_feature: MA Experiment ID: 20000111 Result: Down-regulated in Transcription
  misc_feature: MA Experiment 20000111 PARAMETER Experiment Name: At_42deg_Heat_cDNA_P Parameter: Temperature (deg C) Value: 42 vs. 22
  misc_feature: MA Experiment 20000111 PARAMETER Experiment Name: At_42deg_Heat_cDNA_P Parameter: Timepoint (hr) Value: 6
  misc_feature: MA Experiment 20000111 PARAMETER Experiment Name: At_42deg_Heat_cDNA_P Parameter: Tissue Value: Aerial
  misc_feature: MA Experiment ID: 20000113 Result: Down-regulated in Transcription
  misc_feature: MA Experiment 20000113 PARAMETER Experiment Name: At_42deg_Heat_cDNA_P Parameter: Temperature (deg C) Value: 42 vs. 22
  misc_feature: MA Experiment 20000113 PARAMETER Experiment Name: At_42deg_Heat_cDNA_P Parameter: Timepoint (hr) Value: 8
  misc_feature: MA Experiment 20000113 PARAMETER Experiment Name: At_42deg_Heat_cDNA_P Parameter: Tissue Value: Aerial
  misc_feature: MA Experiment ID: 20000117 Result: Down-regulated in Transcription
  misc_feature: MA Experiment 20000117 PARAMETER Experiment Name: At_100uM_ABA_Mutants_cDNA_P Parameter: Plant Line Value: Columbia
  misc_feature: MA Experiment 20000117 PARAMETER Experiment Name: At_100uM_ABA_Mutants_cDNA_P Parameter: Timepoint (hr) Value: 6
  misc_feature: MA Experiment 20000117 PARAMETER Experiment Name: At_100uM_ABA_Mutants_cDNA_P Parameter: Tissue Value: Aerial
  misc_feature: MA Experiment 20000117 PARAMETER Experiment Name: At_100uM_ABA_Mutants_cDNA_P Parameter: Treatment Value: 100uM ABA vs. No Treatment
  misc_feature: MA Experiment ID: 20000144 Result: Down-regulated in Transcription
  misc_feature: MA Experiment 20000144 PARAMETER Experiment Name: At_42deg_Heat_cDNA_P Parameter: Temperature (deg C) Value: 42 vs. 22
  misc_feature: MA Experiment 20000144 PARAMETER Experiment Name: At_42deg_Heat_cDNA_P Parameter: Timepoint (hr) Value: 1
  misc_feature: MA Experiment 20000144 PARAMETER Experiment Name: At_42deg_Heat_cDNA_P Parameter: Tissue Value: Aerial
  misc_feature: MA Experiment ID: 20000169 Result: Down-regulated in Transcription
  misc_feature: MA Experiment 20000169 PARAMETER Experiment Name: At_100uM_ABA_P Parameter: Age (day) Value: 14
  misc_feature: MA Experiment 20000169 PARAMETER Experiment Name: At_100uM_ABA_P Parameter: Organism Value: A. thaliana
  misc_feature: MA Experiment 20000169 PARAMETER Experiment Name: At_100uM_ABA_P Parameter: Plant Line Value: WS
  misc_feature: MA Experiment 20000169 PARAMETER Experiment Name: At_100uM_ABA_P Parameter: Timepoint (hr) Value: 6
  misc_feature: MA Experiment 20000169 PARAMETER Experiment Name: At_100uM_ABA_P Parameter: Tissue Value: Aerial
  misc_feature: MA Experiment 20000169 PARAMETER Experiment Name: At_100uM_ABA_P Parameter: Treatment Value: 100uM ABA vs. No Treatment
  misc_feature: MA Experiment ID: 20000180 Result: Up-regulated in Transcription
  misc_feature: MA Experiment 20000180 PARAMETER Experiment Name: At_Germinating_Seeds_P Parameter: Age (hr) Value: 24 vs. 0
  misc_feature: MA Experiment 20000180 PARAMETER Experiment Name: At_Germinating_Seeds_P Parameter: Tissue Value: Germinating Seeds
  misc_feature: MA Experiment ID: 20000182 Result: Down-regulated in Transcription
  misc_feature: MA Experiment 20000182 PARAMETER Experiment Name: At_2mM_SA_P Parameter: Age (day) Value: 14
  misc_feature: MA Experiment 20000182 PARAMETER Experiment Name: At_2mM_SA_P Parameter: Organism Value: A. thaliana
  misc_feature: MA Experiment 20000182 PARAMETER Experiment Name: At_2mM_SA_P Parameter: Plant Line Value: WS
  misc_feature: MA Experiment 20000182 PARAMETER Experiment Name: At_2mM_SA_P Parameter: Timepoint (hr) Value: 6
  misc_feature: MA Experiment 20000182 PARAMETER Experiment Name: At_2mM_SA_P Parameter: Tissue Value: Aerial
  misc_feature: MA Experiment 20000182 PARAMETER Experiment Name: At_2mM_SA_P Parameter: Treatment Value: 2mM SA vs. No Treatment
  misc_feature: MA Experiment ID: 20000184 Result: Up-regulated in Transcription
  misc_feature: MA Experiment 20000184 PARAMETER Experiment Name: At_Shoots__P Parameter: Age (day) Value: 7
  misc_feature: MA Experiment 20000184 PARAMETER Experiment Name: At_Shoots__P Parameter: Tissue Value: Shoots vs. Whole Plant
  misc_feature: MA Experiment ID: 20000185 Result: Down-regulated in Transcription
  misc_feature: MA Experiment 20000185 PARAMETER Experiment Name: At_Roots__P Parameter: Age (day) Value: 7 vs. 21
  misc_feature: MA Experiment 20000185 PARAMETER Experiment Name: At_Roots__P Parameter: Organism Value: A. thaliana
  misc_feature: MA Experiment 20000185 PARAMETER Experiment Name: At_Roots__P Parameter: Tissue Value: Roots vs. Whole Plant
  misc_feature: MA Experiment ID: 20000214 Result: Up-regulated in Transcription
  misc_feature: MA Experiment 20000214 PARAMETER Experiment Name: At_4deg_Cold_P Parameter: Timepoint (hr) Value: 6
  misc_feature: MA Experiment ID: 20000234 Result: Up-regulated in Transcription
  misc_feature: MA Experiment 20000234 PARAMETER Experiment Name: At_Siliques_P Parameter: Age (day) Value: 21
  misc_feature: MA Experiment 20000234 PARAMETER Experiment Name: At_Siliques_P Parameter: Organism Value: A. thaliana
  misc_feature: MA Experiment 20000234 PARAMETER Experiment Name: At_Siliques_P Parameter: Plant Line Value: WS
  misc_feature: MA Experiment 20000234 PARAMETER Experiment Name: At_Siliques_P Parameter: Tissue Value: Less Than 5mm Siliques vs. Whole Plant
  misc_feature: MA Experiment ID: 20000267 Result: Down-regulated in Transcription
  misc_feature: MA Experiment 20000267 PARAMETER Experiment Name: At_Drought_P Parameter: Age (day) Value: 7
  misc_feature: MA Experiment 20000267 PARAMETER Experiment Name: At_Drought_P Parameter: Organism Value: A. thaliana
  misc_feature: MA Experiment 20000267 PARAMETER Experiment Name: At_Drought_P Parameter: Plant Line Value: WS
  misc_feature: MA Experiment 20000267 PARAMETER Experiment Name: At_Drought_P Parameter: Timepoint (hr) Value: 6
  misc_feature: MA Experiment 20000267 PARAMETER Experiment Name: At_Drought_P Parameter: Tissue Value: Whole Plant
  misc_feature: MA Experiment 20000267 PARAMETER Experiment Name: At_Drought_P Parameter: Treatment Value: Drought vs. No Drought
  misc_feature: MA Experiment ID: 20000268 Result: Down-regulated in Transcription
  misc_feature: MA Experiment 20000268 PARAMETER Experiment Name: At_100mM_NaCl__P Parameter: Age (day) Value: 14
  misc_feature: MA Experiment 20000268 PARAMETER Experiment Name: At_100mM_NaCl__P Parameter: Organism Value: A. thaliana
  misc_feature: MA Experiment 20000268 PARAMETER Experiment Name: At_100mM_NaCl__P Parameter: Plant Line Value: WS
  misc_feature: MA Experiment 20000268 PARAMETER Experiment Name: At_100mM_NaCl__P Parameter: Timepoint (hr) Value: 6
  misc_feature: MA Experiment 20000268 PARAMETER Experiment Name: At_100mM_NaCl__P Parameter: Tissue Value: Whole Plant
  misc_feature: MA Experiment 20000268 PARAMETER Experiment Name: At_100mM_NaCl__P Parameter: Treatment Value: 100mM NaCl vs. No Treatment
  misc_feature: MA Experiment ID: 20000286 Result: Up-regulated in Transcription
  misc_feature: MA Experiment 20000286 PARAMETER Experiment Name: At_Open_Flower_P Parameter: Age (day) Value: 21
  misc_feature: MA Experiment 20000286 PARAMETER Experiment Name: At_Open_Flower_P Parameter: Plant Line Value: WS
  misc_feature: MA Experiment 20000286 PARAMETER Experiment Name: At_Open_Flower_P Parameter: Tissue Value: Half Open vs. Whole Plant
  misc_feature: MA Experiment ID: 20000436 Result: Down-regulated in Transcription
  misc_feature: MA Experiment 20000436 PARAMETER Experiment Name: At_Drought_P Parameter: Age (day) Value: 7
  misc_feature: MA Experiment 20000436 PARAMETER Experiment Name: At_Drought_P Parameter: Organism Value: A. thaliana
  misc_feature: MA Experiment 20000436 PARAMETER Experiment Name: At_Drought_P Parameter: Plant Line Value: WS
  misc_feature: MA Experiment 20000436 PARAMETER Experiment Name: At_Drought_P Parameter: Timepoint (hr) Value: 12
  misc_feature: MA Experiment 20000436 PARAMETER Experiment Name: At_Drought_P Parameter: Tissue Value: Whole Plant
  misc_feature: MA Experiment 20000436 PARAMETER Experiment Name: At_Drought_P Parameter: Treatment Value: Drought vs. No Drought
  misc_feature: MA Experiment ID: 20000438 Result: Up-regulated in Transcription
  misc_feature: MA Experiment 20000438 PARAMETER Experiment Name: At_Shoots__P Parameter: Age (day) Value: 14
  misc_feature: MA Experiment 20000438 PARAMETER Experiment Name: At_Shoots__P Parameter: Tissue Value: Shoots vs. Whole Plant
  misc_feature: MA Experiment ID: 20000439 Result: Down-regulated in Transcription
  misc_feature: MA Experiment 20000439 PARAMETER Experiment Name: At_Roots__P Parameter: Age (day) Value: 14 vs. 21
  misc_feature: MA Experiment 20000439 PARAMETER Experiment Name: At_Roots__P Parameter: Organism Value: A. thaliana
  misc_feature: MA Experiment 20000439 PARAMETER Experiment Name: At_Roots__P Parameter: Tissue Value: Roots vs. Whole Plant
  misc_feature: MA Experiment ID: 20000451 Result: Up-regulated in Transcription
  misc_feature: MA Experiment 20000451 PARAMETER Experiment Name: At_CS6879_Shoots-Roots_P Parameter: Age (day) Value: 14
  misc_feature: MA Experiment 20000451 PARAMETER Experiment Name: At_CS6879_Shoots-Roots_P Parameter: Organism Value: A. thaliana
  misc_feature: MA Experiment 20000451 PARAMETER Experiment Name: At_CS6879_Shoots-Roots_P Parameter: Plant Line Value: CS6879 vs. WS
  misc_feature: MA Experiment 20000451 PARAMETER Experiment Name: At_CS6879_Shoots-Roots_P Parameter: Tissue Value: Roots
  misc_feature: MA Experiment ID: 20001247 Result: Up-regulated in Transcription
  misc_feature: MA Experiment 20001247 PARAMETER Experiment Name: At_Far-red-induction_P Parameter: Age (day) Value: 7
  misc_feature: MA Experiment 20001247 PARAMETER Experiment Name: At_Far-red-induction_P Parameter: Light Value: Far-red vs. White
  misc_feature: MA Experiment 20001247 PARAMETER Experiment Name: At_Far-red-induction_P Parameter: Organism Value: A. thaliana
  misc_feature: MA Experiment 20001247 PARAMETER Experiment Name: At_Far-red-induction_P Parameter: Plant Line Value: Columbia
  misc_feature: MA Experiment 20001247 PARAMETER Experiment Name: At_Far-red-induction_P Parameter: Timepoint (hr) Value: 1
  misc_feature: MA Experiment 20001247 PARAMETER Experiment Name: At_Far-red-induction_P Parameter: Tissue Value: Whole Plant
  misc_feature: MA Experiment ID: 20001554 Result: Down-regulated in Transcription
  misc_feature: MA Experiment 20001554 PARAMETER Experiment Name: At_Drought_Soil_Dry_P Parameter: Age (day) Value: 21
  misc_feature: MA Experiment 20001554 PARAMETER Experiment Name: At_Drought_Soil_Dry_P Parameter: Organism Value: A. thaliana
  misc_feature: MA Experiment 20001554 PARAMETER Experiment Name: At_Drought_Soil_Dry_P Parameter: Plant Line Value: WS
  misc_feature: MA Experiment 20001554 PARAMETER Experiment Name: At_Drought_Soil_Dry_P Parameter: Post Timepoint (hr) Value: None
  misc_feature: MA Experiment 20001554 PARAMETER Experiment Name: At_Drought_Soil_Dry_P Parameter: Post-Treatment Value: None
  misc_feature: MA Experiment 20001554 PARAMETER Experiment Name: At_Drought_Soil_Dry_P Parameter: Timepoint (day) Value: 7
  misc_feature: MA Experiment 20001554 PARAMETER Experiment Name: At_Drought_Soil_Dry_P Parameter: Treatment Value: Drought vs. No Drought
  misc_feature: MA Experiment ID: 20001555 Result: Down-regulated in Transcription
  misc_feature: MA Experiment 20001555 PARAMETER Experiment Name: At_Drought_Soil_Dry_P Parameter: Age (day) Value: 24
  misc_feature: MA Experiment 20001555 PARAMETER Experiment Name: At_Drought_Soil_Dry_P Parameter: Organism Value: A. thaliana
  misc_feature: MA Experiment 20001555 PARAMETER Experiment Name: At_Drought_Soil_Dry_P Parameter: Plant Line Value: WS
  misc_feature: MA Experiment 20001555 PARAMETER Experiment Name: At_Drought_Soil_Dry_P Parameter: Post Timepoint (hr) Value: None
  misc_feature: MA Experiment 20001555 PARAMETER Experiment Name: At_Drought_Soil_Dry_P Parameter: Post-Treatment Value: None
  misc_feature: MA Experiment 20001555 PARAMETER Experiment Name: At_Drought_Soil_Dry_P Parameter: Timepoint (day) Value: 10
  misc_feature: MA Experiment 20001555 PARAMETER Experiment Name: At_Drought_Soil_Dry_P Parameter: Treatment Value: Drought vs. No Drought
  misc_feature: MA Experiment ID: 20001556 Result: Down-regulated in Transcription
  misc_feature: MA Experiment 20001556 PARAMETER Experiment Name: At_Drought_Soil_Dry_P Parameter: Age (day) Value: 26
  misc_feature: MA Experiment 20001556 PARAMETER Experiment Name: At_Drought_Soil_Dry_P Parameter: Organism Value: A. thaliana
  misc_feature: MA Experiment 20001556 PARAMETER Experiment Name: At_Drought_Soil_Dry_P Parameter: Plant Line Value: WS
  misc_feature: MA Experiment 20001556 PARAMETER Experiment Name: At_Drought_Soil_Dry_P Parameter: Post Timepoint (hr) Value: None
  misc_feature: MA Experiment 20001556 PARAMETER Experiment Name: At_Drought_Soil_Dry_P Parameter: Post-Treatment Value: None
  misc_feature: MA Experiment 20001556 PARAMETER Experiment Name: At_Drought_Soil_Dry_P Parameter: Timepoint (day) Value: 12
  misc_feature: MA Experiment 20001556 PARAMETER Experiment Name: At_Drought_Soil_Dry_P Parameter: Treatment Value: Drought vs. No Drought
  misc_feature: MA Experiment ID: 20001557 Result: Up-regulated in Transcription
  misc_feature: MA Experiment 20001557 PARAMETER Experiment Name: At_Drought_Soil_Dry_P Parameter: Age (day) Value: 27
  misc_feature: MA Experiment 20001557 PARAMETER Experiment Name: At_Drought_Soil_Dry_P Parameter: Organism Value: A. thaliana
  misc_feature: MA Experiment 20001557 PARAMETER Experiment Name: At_Drought_Soil_Dry_P Parameter: Plant Line Value: WS
  misc_feature: MA Experiment 20001557 PARAMETER Experiment Name: At_Drought_Soil_Dry_P Parameter: Post Timepoint (hr) Value: 3
  misc_feature: MA Experiment 20001557 PARAMETER Experiment Name: At_Drought_Soil_Dry_P Parameter: Post-Treatment Value: Re-Water vs. No Drought
  misc_feature: MA Experiment 20001557 PARAMETER Experiment Name: At_Drought_Soil_Dry_P Parameter: Timepoint (day) Value: 13
  misc_feature: MA Experiment 20001557 PARAMETER Experiment Name: At_Drought_Soil_Dry_P Parameter: Treatment Value: Drought vs. No Drought
  misc_feature: MA Experiment ID: 20001558 Result: Up-regulated in Transcription
  misc_feature: MA Experiment 20001558 PARAMETER Experiment Name: At_Drought_Soil_Dry_P Parameter: Age (day) Value: 27
  misc_feature: MA Experiment 20001558 PARAMETER Experiment Name: At_Drought_Soil_Dry_P Parameter: Organism Value: A. thaliana
  misc_feature: MA Experiment 20001558 PARAMETER Experiment Name: At_Drought_Soil_Dry_P Parameter: Plant Line Value: WS
  misc_feature: MA Experiment 20001558 PARAMETER Experiment Name: At_Drought_Soil_Dry_P Parameter: Post Timepoint (hr) Value: 6
  misc_feature: MA Experiment 20001558 PARAMETER Experiment Name: At_Drought_Soil_Dry_P Parameter: Post-Treatment Value: Re-Water vs. No Drought
  misc_feature: MA Experiment 20001558 PARAMETER Experiment Name: At_Drought_Soil_Dry_P Parameter: Timepoint (day) Value: 13
  misc_feature: MA Experiment 20001558 PARAMETER Experiment Name: At_Drought_Soil_Dry_P Parameter: Treatment Value: Drought vs. No Drought
  misc_feature: MA Experiment ID: 20001560 Result: Up-regulated in Transcription
  misc_feature: MA Experiment 20001560 PARAMETER Experiment Name: At_Drought_Soil_Dry_P Parameter: Age (day) Value: 28
  misc_feature: MA Experiment 20001560 PARAMETER Experiment Name: At_Drought_Soil_Dry_P Parameter: Organism Value: A. thaliana
  misc_feature: MA Experiment 20001560 PARAMETER Experiment Name: At_Drought_Soil_Dry_P Parameter: Plant Line Value: WS
  misc_feature: MA Experiment 20001560 PARAMETER Experiment Name: At_Drought_Soil_Dry_P Parameter: Post Timepoint (hr) Value: None
  misc_feature: MA Experiment 20001560 PARAMETER Experiment Name: At_Drought_Soil_Dry_P Parameter: Post-Treatment Value: None
  misc_feature: MA Experiment 20001560 PARAMETER Experiment Name: At_Drought_Soil_Dry_P Parameter: Timepoint (day) Value: 14
  misc_feature: MA Experiment 20001560 PARAMETER Experiment Name: At_Drought_Soil_Dry_P Parameter: Treatment Value: Drought vs. No Drought
  misc_feature: MA Experiment ID: 20001904 Result: Down-regulated in Transcription
  misc_feature: MA Experiment 20001904 PARAMETER Experiment Name: At_Drought_Reproduction_P Parameter: Age (day) Value: 37
  misc_feature: MA Experiment 20001904 PARAMETER Experiment Name: At_Drought_Reproduction_P Parameter: Organism Value: A. thaliana
  misc_feature: MA Experiment 20001904 PARAMETER Experiment Name: At_Drought_Reproduction_P Parameter: Plant Line Value: WS
  misc_feature: MA Experiment 20001904 PARAMETER Experiment Name: At_Drought_Reproduction_P Parameter: Timepoint (day) Value: 7
  misc_feature: MA Experiment 20001904 PARAMETER Experiment Name: At_Drought_Reproduction_P Parameter: Tissue Value: Rosettes
  misc_feature: MA Experiment 20001904 PARAMETER Experiment Name: At_Drought_Reproduction_P Parameter: Treatment Value: Drought vs. No Drought
  misc_feature: MA Experiment ID: 20001906 Result: Down-regulated in Transcription
  misc_feature: MA Experiment 20001906 PARAMETER Experiment Name: At_Drought_Reproduction_P Parameter: Age (day) Value: 35
  misc_feature: MA Experiment 20001906 PARAMETER Experiment Name: At_Drought_Reproduction_P Parameter: Organism Value: A. thaliana
  misc_feature: MA Experiment 20001906 PARAMETER Experiment Name: At_Drought_Reproduction_P Parameter: Plant Line Value: WS
  misc_feature: MA Experiment 20001906 PARAMETER Experiment Name: At_Drought_Reproduction_P Parameter: Timepoint (day) Value: 5
  misc_feature: MA Experiment 20001906 PARAMETER Experiment Name: At_Drought_Reproduction_P Parameter: Tissue Value: Siliques
  misc_feature: MA Experiment 20001906 PARAMETER Experiment Name: At_Drought_Reproduction_P Parameter: Treatment Value: Drought vs. No Drought
  misc_feature: MA Experiment ID: 20001907 Result: Down-regulated in Transcription
  misc_feature: MA Experiment 20001907 PARAMETER Experiment Name: At_Drought_Reproduction_P Parameter: Age (day) Value: 37
  misc_feature: MA Experiment 20001907 PARAMETER Experiment Name: At_Drought_Reproduction_P Parameter: Organism Value: A. thaliana
  misc_feature: MA Experiment 20001907 PARAMETER Experiment Name: At_Drought_Reproduction_P Parameter: Plant Line Value: WS
  misc_feature: MA Experiment 20001907 PARAMETER Experiment Name: At_Drought_Reproduction_P Parameter: Timepoint (day) Value: 7
  misc_feature: MA Experiment 20001907 PARAMETER Experiment Name: At_Drought_Reproduction_P Parameter: Tissue Value: Siliques
  misc_feature: MA Experiment 20001907 PARAMETER Experiment Name: At_Drought_Reproduction_P Parameter: Treatment Value: Drought vs. No Drought
  misc_feature: MA Experiment ID: 20001908 Result: Down-regulated in Transcription
  misc_feature: MA Experiment 20001908 PARAMETER Experiment Name: At_Drought_Reproduction_P Parameter: Age (day) Value: 40
  misc_feature: MA Experiment 20001908 PARAMETER Experiment Name: At_Drought_Reproduction_P Parameter: Organism Value: A. thaliana
  misc_feature: MA Experiment 20001908 PARAMETER Experiment Name: At_Drought_Reproduction_P Parameter: Plant Line Value: WS
  misc_feature: MA Experiment 20001908 PARAMETER Experiment Name: At_Drought_Reproduction_P Parameter: Timepoint (day) Value: 10
  misc_feature: MA Experiment 20001908 PARAMETER Experiment Name: At_Drought_Reproduction_P Parameter: Tissue Value: Siliques
  misc_feature: MA Experiment 20001908 PARAMETER Experiment Name: At_Drought_Reproduction_P Parameter: Treatment Value: Drought vs. No Drought
  misc_feature: MA Experiment ID: 20001911 Result: Down-regulated in Transcription
  misc_feature: MA Experiment 20001911 PARAMETER Experiment Name: At_Drought_Reproduction_P Parameter: Age (day) Value: 40
  misc_feature: MA Experiment 20001911 PARAMETER Experiment Name: At_Drought_Reproduction_P Parameter: Organism Value: A. thaliana
  misc_feature: MA Experiment 20001911 PARAMETER Experiment Name: At_Drought_Reproduction_P Parameter: Plant Line Value: WS
  misc_feature: MA Experiment 20001911 PARAMETER Experiment Name: At_Drought_Reproduction_P Parameter: Timepoint (day) Value: 10
  misc_feature: MA Experiment 20001911 PARAMETER Experiment Name: At_Drought_Reproduction_P Parameter: Tissue Value: Flowers
  misc_feature: MA Experiment 20001911 PARAMETER Experiment Name: At_Drought_Reproduction_P Parameter: Treatment Value: Drought vs. No Drought
  misc_feature: Phenotype: WHOLE PLANT Other
  misc_feature: Phenotype: WHOLE PLANT Other
  misc_feature: Phenotype: WHOLE PLANT Other
  misc_feature: Phenotype: WHOLE PLANT Other
accatccactctactcaacatggactcctccaaactctcatctctctctctttgcctcttcctcatttgcattatctatctcccccaacattctctcgcatgcggctcttgcaacccacggaagggcggaaagcactcccctaagctaccagttcctccggtgaccgtccctaagctaccagttcctccggtgaccgtccctaagctaccagtccctccggtgaccgtccctaagctacccgttcctcctgtgaccatccctaagctacccgttccaccagtgactgtacctaagctacccgttcctcctgtgaccgtccccaagctacccgttcctccagtgaccgtccccaagctacccgttcctccagtgacagtccctaagctacccgttcccccggtaactgtacctaagctacccgttcctccagtgaccgtccctaagctaccccttcctccgatttcagggctacccatacctccagtggtaggtcccaatctgccattgccacctttgccaattgtaggtcctattcttccaccgggaacaaccccaccagccacaggagggaaggactgtcctccaccgccagggagcgtaaagccaccatcagggggcgggaaggcgacatgtccaatagacacgctgaagttaggtgcttgcgtcgacttgttgggaggtttagtaaagatagggcttggggatccagcagttaacaaatgttgtccgttacttaaaggcctcgttgaaatcgaagccgcggcttgtctctgcactaccctcaagctcaaagctcttgacctcaatctttatgtccctgatgctcttcagcttctccttacctgtggcaaaaatccacctccgggctacacttgttccatatgataaactcactccacttataaaggatgctttggagaaaaaagtgagaagagaatggcagagctccaatctttcctgtcttggtttaccaaatacatcatatcaaatcctatccctttgattctttcctctatcgttcccttatgcttgtatcattaattaatgtgtgctttttagattaatgattcttctcttgtattaaagtatgatttgaaatcctttttttttctctatctctttttattgaattgattgaactgcgttcatgatactgtcaaaaagagagaaaaagagtacaatttt

SEQ ID NO: 42708 - protein, 294 aa, Arabidopsis thaliana
  peptide (1)..(294): Ceres Seq. ID no. 12370297
  misc_feature (211)..(292): Pfam Name: Protease inhibitor/seed storage/LTP family Pfam Description: Protease inhibitor/seed storage/LTP family
  misc_feature (107)..(294): Homolog of NCBI NO: 17154773 NR Description: extensin-like protein [Cucumis sativus]
  misc_feature (46)..(292): Homolog of NCBI NO: 11994733 NR Description: contains similarity to cell wall-plasma membrane
  misc_feature (28)..(292): Homolog of NCBI NO: 1709767 NR Description: 36.4 KD PROLINE-RICH PROTEIN
  misc_feature (28)..(292): Homolog of NCBI NO: 19521 NR Description: proline rich protein [Lycopersicon esculentum]
  misc_feature (47)..(292): Homolog of NCBI NO: 7446486 NR Description: hypothetical protein - carrot
  misc_feature (45)..(292): Homolog of NCBI NO: 1076501 NR Description: cell wall protein - alfalfa
  misc_feature (46)..(292): Homolog of NCBI NO: 7446482 NR Description: probable cell wall-plasma membrane linker protein
  misc_feature (39)..(292): Homolog of NCBI NO: 7446483 NR Description: probable cell wall protein - garden pea
  misc_feature (7)..(222): Homolog of NCBI NO: 24417264 NR Description: unknown [Arabidopsis thaliana]
  misc_feature (7)..(294): Homolog of NCBI NO: 18396941 NR Description: expressed protein
PSTLLNMDSSKLSSLSLCLFLICIIYLPQHSLACGSCNPRKGGKHSPKLPVPPVTVPKLPVPPVTVPKLPVPPVTVPKLPVPPVTIPKLPVPPVTVPKLPVPPVTVPKLPVPPVTVPKLPVPPVTVPKLPVPPVTVPKLPVPPVTVPKLPLPPISGLPIPPVVGPNLPLPPLPIVGPILPPGTTPPATGGKDCPPPPGSVKPPSGGGKATCPIDTLKLGACVDLLGGLVKIGLGDPAVNKCCPLLKGLVEIEAAACLCTTLKLKALDLNLYVPDALQLLLTCGKNPPPGYTCSI

SEQ ID NO: 42709 - protein, 288 aa, Arabidopsis thaliana
  peptide (1)..(288): Ceres Seq. ID no. 12370298
  misc_feature (205)..(286): Pfam Name: Protease inhibitor/seed storage/LTP family Pfam Description: Protease inhibitor/seed storage/LTP family
  misc_feature (101)..(288): Homolog of NCBI NO: 17154773 NR Description: extensin-like protein [Cucumis sativus]
  misc_feature (40)..(286): Homolog of NCBI NO: 11994733 NR Description: contains similarity to cell wall-plasma membrane
  misc_feature (22)..(286): Homolog of NCBI NO: 1709767 NR Description: 36.4 KD PROLINE-RICH PROTEIN
  misc_feature (22)..(286): Homolog of NCBI NO: 19521 NR Description: proline rich protein [Lycopersicon esculentum]
  misc_feature (41)..(286): Homolog of NCBI NO: 7446486 NR Description: hypothetical protein - carrot
  misc_feature (39)..(286): Homolog of NCBI NO: 1076501 NR Description: cell wall protein - alfalfa
  misc_feature (40)..(286): Homolog of NCBI NO: 7446482 NR Description: probable cell wall-plasma membrane linker protein
  misc_feature (33)..(286): Homolog of NCBI NO: 7446483 NR Description: probable cell wall protein - garden pea
  misc_feature (1)..(216): Homolog of NCBI NO: 24417264 NR Description: unknown [Arabidopsis thaliana]
  misc_feature (1)..(288): Homolog of NCBI NO: 18396941 NR Description: expressed protein
MDSSKLSSLSLCLFLICIIYLPQHSLACGSCNPRKGGKHSPKLPVPPVTVPKLPVPPVTVPKLPVPPVTVPKLPVPPVTIPKLPVPPVTVPKLPVPPVTVPKLPVPPVTVPKLPVPPVTVPKLPVPPVTVPKLPVPPVTVPKLPLPPISGLPIPPVVGPNLPLPPLPIVGPILPPGTTPPATGGKDCPPPPGSVKPPSGGGKATCPIDTLKLGACVDLLGGLVKIGLGDPAVNKCCPLLKGLVEIEAAACLCTTLKLKALDLNLYVPDALQLLLTCGKNPPPGYTCSI

SEQ ID NO: 42710 - DNA, 1911 bp, Arabidopsis thaliana
  misc_feature (1)..(1911): Ceres Seq. ID no. 12421765
  misc_feature: MA Experiment ID: 108434 Result: Up-regulated in Transcription
  misc_feature: MA Experiment 108434 PARAMETER Experiment Name: At_Root_Tips_cDNA_P Parameter: Tissue Value: Root Tips
  misc_feature: MA Experiment ID: 108435 Result: Up-regulated in Transcription
  misc_feature: MA Experiment 108435 PARAMETER Experiment Name: At_stm_Mutants_cDNA_P Parameter: Plant Line Value: wt Landsburg vs stm
  misc_feature: MA Experiment 108435 PARAMETER Experiment Name: At_stm_Mutants_cDNA_P Parameter: Tissue Value: Shoot Apical Meristem Region
  misc_feature: MA Experiment ID: 108462 Result: Up-regulated in Transcription
  misc_feature: MA Experiment 108462 PARAMETER Experiment Name: At_Germinating_Seeds_cDNA_P Parameter: Age (day) Value: 2 vs. 0
  misc_feature: MA Experiment 108462 PARAMETER Experiment Name: At_Germinating_Seeds_cDNA_P Parameter: Tissue Value: Germinating Seeds
  misc_feature: MA Experiment ID: 108595 Result: Up-regulated in Transcription
  misc_feature: MA Experiment 108595 PARAMETER Experiment Name: At_Ler-pi_Ovule_cDNA_P Parameter: Plant Line Value: null
  misc_feature: MA Experiment ID: 108668 Result: Down-regulated in Transcription
  misc_feature: MA Experiment 108668 PARAMETER Experiment Name: At_2mM_SA_cDNA_P Parameter: Plant Line Value: WS
  misc_feature: MA Experiment 108668 PARAMETER Experiment Name: At_2mM_SA_cDNA_P Parameter: Timepoint (hr) Value: 6
  misc_feature: MA Experiment 108668 PARAMETER Experiment Name: At_2mM_SA_cDNA_P Parameter: Treatment Value: 2mM SA vs. No Treatment
  misc_feature: MA Experiment ID: 20000069 Result: Down-regulated in Transcription
  misc_feature: MA Experiment 20000069 PARAMETER Experiment Name: At_100uM_ABA_Mutants_cDNA_P Parameter: Plant Line Value: CS23
  misc_feature: MA Experiment 20000069 PARAMETER Experiment Name: At_100uM_ABA_Mutants_cDNA_P Parameter: Timepoint (hr) Value: 6
  misc_feature: MA Experiment 20000069 PARAMETER Experiment Name: At_100uM_ABA_Mutants_cDNA_P Parameter: Tissue Value: Aerial
  misc_feature: MA Experiment 20000069 PARAMETER Experiment Name: At_100uM_ABA_Mutants_cDNA_P Parameter: Treatment Value: 100uM ABA vs. No Treatment
  misc_feature: MA Experiment ID: 20000072 Result: Down-regulated in Transcription
  misc_feature: MA Experiment 20000072 PARAMETER Experiment Name: At_100uM_ABA_Mutants_cDNA_P Parameter: Plant Line Value: CS8105
  misc_feature: MA Experiment 20000072 PARAMETER Experiment Name: At_100uM_ABA_Mutants_cDNA_P Parameter: Timepoint (hr) Value: 6
  misc_feature: MA Experiment 20000072 PARAMETER Experiment Name: At_100uM_ABA_Mutants_cDNA_P Parameter: Tissue Value: Aerial
  misc_feature: MA Experiment 20000072 PARAMETER Experiment Name: At_100uM_ABA_Mutants_cDNA_P Parameter: Treatment Value: 100uM ABA vs. No Treatment
  misc_feature: MA Experiment ID: 20000182 Result: Down-regulated in Transcription
  misc_feature: MA Experiment 20000182 PARAMETER Experiment Name: At_2mM_SA_P Parameter: Age (day) Value: 14
  misc_feature: MA Experiment 20000182 PARAMETER Experiment Name: At_2mM_SA_P Parameter: Organism Value: A. thaliana
  misc_feature: MA Experiment 20000182 PARAMETER Experiment Name: At_2mM_SA_P Parameter: Plant Line Value: WS
  misc_feature: MA Experiment 20000182 PARAMETER Experiment Name: At_2mM_SA_P Parameter: Timepoint (hr) Value: 6
  misc_feature: MA Experiment 20000182 PARAMETER Experiment Name: At_2mM_SA_P Parameter: Tissue Value: Aerial
  misc_feature: MA Experiment 20000182 PARAMETER Experiment Name: At_2mM_SA_P Parameter: Treatment Value: 2mM SA vs. No Treatment
  misc_feature: MA Experiment ID: 20000264 Result: Up-regulated in Transcription
  misc_feature: MA Experiment 20000264 PARAMETER Experiment Name: At_Open_Flower_P Parameter: Age (day) Value: 21
  misc_feature: MA Experiment 20000264 PARAMETER Experiment Name: At_Open_Flower_P Parameter: Plant Line Value: WS
  misc_feature: MA Experiment 20000264 PARAMETER Experiment Name: At_Open_Flower_P Parameter: Tissue Value: Open Flower vs. Whole Plant
  misc_feature: MA Experiment ID: 20000265 Result: Up-regulated in Transcription
  misc_feature: MA Experiment 20000265 PARAMETER Experiment Name: At_Open_Flower_P Parameter: Age (day) Value: 21
  misc_feature: MA Experiment 20000265 PARAMETER Experiment Name: At_Open_Flower_P Parameter: Plant Line Value: WS
  misc_feature: MA Experiment 20000265 PARAMETER Experiment Name: At_Open_Flower_P Parameter: Tissue Value: Closed Flower vs. Whole Plant
  misc_feature: MA Experiment ID: 20000286 Result: Up-regulated in Transcription
  misc_feature: MA Experiment 20000286 PARAMETER Experiment Name: At_Open_Flower_P Parameter: Age (day) Value: 21
  misc_feature: MA Experiment 20000286 PARAMETER Experiment Name: At_Open_Flower_P Parameter: Plant Line Value: WS
  misc_feature: MA Experiment 20000286 PARAMETER Experiment Name: At_Open_Flower_P Parameter: Tissue Value: Half Open vs. Whole Plant
  misc_feature: MA Experiment ID: 20000495 Result: Up-regulated in Transcription
  misc_feature: MA Experiment 20000495 PARAMETER Experiment Name: At_Guard_Cells_P Parameter: Harvest Date Value: 8/2/2002
  misc_feature: MA Experiment 20000495 PARAMETER Experiment Name: At_Guard_Cells_P Parameter: Organism Value: A. thaliana
  misc_feature: MA Experiment 20000495 PARAMETER Experiment Name: At_Guard_Cells_P Parameter: Tissue Value: Guard Cells vs. Leaves
  misc_feature: MA Experiment ID: 20001911 Result: Down-regulated in Transcription
  misc_feature: MA Experiment 20001911 PARAMETER Experiment Name: At_Drought_Reproduction_P Parameter: Age (day) Value: 40
  misc_feature: MA Experiment 20001911 PARAMETER Experiment Name: At_Drought_Reproduction_P Parameter: Organism Value: A. thaliana
  misc_feature: MA Experiment 20001911 PARAMETER Experiment Name: At_Drought_Reproduction_P Parameter: Plant Line Value: WS
  misc_feature: MA Experiment 20001911 PARAMETER Experiment Name: At_Drought_Reproduction_P Parameter: Timepoint (day) Value: 10
  misc_feature: MA Experiment 20001911 PARAMETER Experiment Name: At_Drought_Reproduction_P Parameter: Tissue Value: Flowers
  misc_feature: MA Experiment 20001911 PARAMETER Experiment Name: At_Drought_Reproduction_P Parameter: Treatment Value: Drought vs. No Drought
cacaaagcagcttctgcaacctattcgttggttggttaatagaagctctctttctctgtctgtctttctctctcagagaaatggctcttcttctagtttcttcttcctcctcctatgccctcagagtcaccattttcttgtctttcttcttctttctctgcaatggcttctcttaccctactacttcttctcttttcaacacccatcaccatcgtcaccacttggccaagcacaactacaaagatgctctcactaaatcaatcctcttctttgaaggccaaaggtcagggaaacttccttctaaccagagaatgagttggagaagagactctggtctctctgatggctctgctcttcatgtggatttggttggagggtactatgatgcaggagacaatatcaaatttggtttcccaatggcattcacaaccacaatgctttcatggagtgtaattgaattcggtggactcatgaaatctgaattacaaaacgctaaaatagcgattcgttgggctactgattatctcctcaaagccacttcacaacctgacacaatctatgttcaagttggtgatgctaataaagaccattcttgttgggaaagacctgaagacatggatactgtaagaagtgtgtttaaagttgacaagaacattcctggttctgatgtcgccgctgaaaccgccgctgctctagccgccgccgccattgtattcagaaaatctgatccttcttactccaaagtcctcctcaaacgagccatcagtgtttttgcatttgcggacaaatacagaggaacttatagtgcaggattaaaacctgatgtttgtccattttattgctcttactctggttatcaggatgaattgttgtggggagctgcttggttacaaaaagcgacaaagaatataaaatatttgaattacataaaaatcaatggacaaatccttggagctgctgaatatgataacacttttggttgggataacaagcacgctggtgccagaatccttcttactaaggcatttttggttcagaatgtgaagacacttcatgaatacaaaggtcatgctgataatttcatctgctctgttattcctggagctcctttctcttctactcagtatacaccaggtggattattgtttaaaatggcagacgccaacatgcaatacgtgacgtcaacatcgttcttgctcttaacctatgccaaatacttaacctccgccaaaaccgtcgtccattgcggtggctccgtctacactcccggtcgtcttcgctccatcgccaaaagacaggtggattatcttcttggagacaacccattaagaatgtcttacatggttggttacggtccaaaattcccacggagaatccaccaccgtggctcctcattaccttgtgttgcaagccacccggccaagatccaatgccaccaaggatttgcaatcatgaactctcaatctccaaaccctaacttccttgttggtgcagtcgttggtggtccggaccagcatgatcgcttcccagacgaacggtctgattacgagcagtccgagccggctacttacatcaattcaccactcgttggagctcttgcctacttcgcccacgcctatggtcaactctagtttagtaacgagtgtgttagtttaagtaaaaataaaaatgaaggaagttttatctttgtttttacttttatttgttagtaatgtagtggaccgaaaatcggatcacaagtggacattggtccgagggatggtttatttggttcgttataatataacgtcaagtgtaatcttattgtggttattaatgttatcatcctattaattactatatccatgtcgttaatttttgatatgtttatatgatttttcatatttttgtgaaaaaaaaaaaaaacaaaaa

SEQ ID NO: 42711 - protein, 542 aa, Arabidopsis thaliana
  peptide (1)..(542): Ceres Seq. ID no. 12421766
  misc_feature (78)..(535): Pfam Name: Glycosyl hydrolase family 9 Pfam Description: Glycosyl hydrolase family 9
  misc_feature (40)..(539): Homolog of NCBI NO: 33943180 NR Description: endo-1,4-beta-glucanase [Malus x domestica]
  misc_feature (67)..(536): Homolog of NCBI NO: 1655545 NR Description: endo-beta-1,4-glucanase [Capsicum annuum]
  misc_feature (19)..(539): Homolog of NCBI NO: 11357128 NR Description: cellulase (EC 3.2.1.4) 2 precursor - Monterey
  misc_feature (46)..(538): Homolog of NCBI NO: 7484476 NR Description: cellulase (EC 3.2.1.4) 1 precursor - Monterey
  misc_feature (33)..(542): Homolog of NCBI NO: 1362091 NR Description: cellulase (EC 3.2.1.4) precursor - tomato
  misc_feature (27)..(538): Homolog of NCBI NO: 15218612 NR Description: glycosyl hydrolase family 9
  misc_feature (27)..(538): Homolog of NCBI NO: 25350173 NR Description: cellulase (EC 3.2.1.4) [imported] - Arabidopsis
  misc_feature (43)..(542): Homolog of NCBI NO: 6009979 NR Description: endo-1,4-beta-glucanase [Pisum sativum]
  misc_feature (43)..(542): Homolog of NCBI NO: 11358947 NR Description: endo-1,3(4)-beta-glucanase (EC 3.2.1.6) - garden
  misc_feature (27)..(542): Homolog of NCBI NO: 15235301 NR Description: glycosyl hydrolase family 9
QSSFCNLFVGWLIEALFLCLSFSLREMALLLVSSSSSYALRVTIFLSFFFFLCNGFSYPTTSSLFNTHHHRHHLAKHNYKDALTKSILFFEGQRSGKLPSNQRMSWRRDSGLSDGSALHVDLVGGYYDAGDNIKFGFPMAFTTTMLSWSVIEFGGLMKSELQNAKIAIRWATDYLLKATSQPDTIYVQVGDANKDHSCWERPEDMDTVRSVFKVDKNIPGSDVAAETAAALAAAAIVFRKSDPSYSKVLLKRAISVFAFADKYRGTYSAGLKPDVCPFYCSYSGYQDELLWGAAWLQKATKNIKYLNYIKINGQILGAAEYDNTFGWDNKHAGARILLTKAFLVQNVKTLHEYKGHADNFICSVIPGAPFSSTQYTPGGLLFKMADANMQYVTSTSFLLLTYAKYLTSAKTVVHCGGSVYTPGRLRSIAKRQVDYLLGDNPLRMSYMVGYGPKFPRRIHHRGSSLPCVASHPAKIQCHQGFAIMNSQSPNPNFLVGAVVGGPDQHDRFPDERSDYEQSEPATYINSPLVGALAYFAHAYGQL

SEQ ID NO: 42712 - protein, 516 aa, Arabidopsis thaliana
  peptide (1)..(516): Ceres Seq. ID no. 12421767
  misc_feature (52)..(509): Pfam Name: Glycosyl hydrolase family 9 Pfam Description: Glycosyl hydrolase family 9
  misc_feature (14)..(513): Homolog of NCBI NO: 33943180 NR Description: endo-1,4-beta-glucanase [Malus x domestica]
  misc_feature (41)..(510): Homolog of NCBI NO: 1655545 NR Description: endo-beta-1,4-glucanase [Capsicum annuum]
  misc_feature (1)..(513): Homolog of NCBI NO: 11357128 NR Description: cellulase (EC 3.2.1.4) 2 precursor - Monterey
  misc_feature (20)..(512): Homolog of NCBI NO: 7484476 NR Description: cellulase (EC 3.2.1.4) 1 precursor - Monterey
  misc_feature (7)..(516): Homolog of NCBI NO: 1362091 NR Description: cellulase (EC 3.2.1.4) precursor - tomato
  misc_feature (1)..(512): Homolog of NCBI NO: 15218612 NR Description: glycosyl hydrolase family 9
  misc_feature (1)..(512): Homolog of NCBI NO: 25350173 NR Description: cellulase (EC 3.2.1.4) [imported] - Arabidopsis
  misc_feature (17)..(516): Homolog of NCBI NO: 6009979 NR Description: endo-1,4-beta-glucanase [Pisum sativum]
  misc_feature (17)..(516): Homolog of NCBI NO: 11358947 NR Description: endo-1,3(4)-beta-glucanase (EC 3.2.1.6) - garden
  misc_feature (1)..(516): Homolog of NCBI NO: 15235301 NR Description: glycosyl hydrolase family 9
MALLLVSSSSSYALRVTIFLSFFFFLCNGFSYPTTSSLFNTHHHRHHLAKHNYKDALTKSILFFEGQRSGKLPSNQRMSWRRDSGLSDGSALHVDLVGGYYDAGDNIKFGFPMAFTTTMLSWSVIEFGGLMKSELQNAKIAIRWATDYLLKATSQPDTIYVQVGDANKDHSCWERPEDMDTVRSVFKVDKNIPGSDVAAETAAALAAAAIVFRKSDPSYSKVLLKRAISVFAFADKYRGTYSAGLKPDVCPFYCSYSGYQDELLWGAAWLQKATKNIKYLNYIKINGQILGAAEYDNTFGWDNKHAGARILLTKAFLVQNVKTLHEYKGHADNFICSVIPGAPFSSTQYTPGGLLFKMADANMQYVTSTSFLLLTYAKYLTSAKTVVHCGGSVYTPGRLRSIAKRQVDYLLGDNPLRMSYMVGYGPKFPRRIHHRGSSLPCVASHPAKIQCHQGFAIMNSQSPNPNFLVGAVVGGPDQHDRFPDERSDYEQSEPATYINSPLVGALAYFAHAYGQL

SEQ ID NO: 42713 - protein, 439 aa, Arabidopsis thaliana
  peptide (1)..(439): Ceres Seq. ID no. 12421768
  misc_feature (1)..(432): Pfam Name: Glycosyl hydrolase family 9 Pfam Description: Glycosyl hydrolase family 9
  misc_feature (1)..(436): Homolog of NCBI NO: 33943180 NR Description: endo-1,4-beta-glucanase [Malus x domestica]
  misc_feature (1)..(433): Homolog of NCBI NO: 1655545 NR Description: endo-beta-1,4-glucanase [Capsicum annuum]
  misc_feature (1)..(436): Homolog of NCBI NO: 11357128 NR Description: cellulase (EC 3.2.1.4) 2 precursor - Monterey
  misc_feature (1)..(435): Homolog of NCBI NO: 7484476 NR Description: cellulase (EC 3.2.1.4) 1 precursor - Monterey
  misc_feature (1)..(439): Homolog of NCBI NO: 1362091 NR Description: cellulase (EC 3.2.1.4) precursor - tomato
  misc_feature (1)..(435): Homolog of NCBI NO: 15218612 NR Description: glycosyl hydrolase family 9
  misc_feature (1)..(435): Homolog of NCBI NO: 25350173 NR Description: cellulase (EC 3.2.1.4) [imported] - Arabidopsis
  misc_feature (1)..(439): Homolog of NCBI NO: 6009979 NR Description: endo-1,4-beta-glucanase [Pisum sativum]
  misc_feature (1)..(439): Homolog of NCBI NO: 11358947 NR Description: endo-1,3(4)-beta-glucanase (EC 3.2.1.6) - garden
  misc_feature (1)..(439): Homolog of NCBI NO: 15235301 NR Description: glycosyl hydrolase family 9
MSWRRDSGLSDGSALHVDLVGGYYDAGDNIKFGFPMAFTTTMLSWSVIEFGGLMKSELQNAKIAIRWATDYLLKATSQPDTIYVQVGDANKDHSCWERPEDMDTVRSVFKVDKNIPGSDVAAETAAALAAAAIVFRKSDPSYSKVLLKRAISVFAFADKYRGTYSAGLKPDVCPFYCSYSGYQDELLWGAAWLQKATKNIKYLNYIKINGQILGAAEYDNTFGWDNKHAGARILLTKAFLVQNVKTLHEYKGHADNFICSVIPGAPFSSTQYTPGGLLFKMADANMQYVTSTSFLLLTYAKYLTSAKTVVHCGGSVYTPGRLRSIAKRQVDYLLGDNPLRMSYMVGYGPKFPRRIHHRGSSLPCVASHPAKIQCHQGFAIMNSQSPNPNFLVGAVVGGPDQHDRFPDERSDYEQSEPATYINSPLVGALAYFAHAYGQL

SEQ ID NO: 42714 - DNA, 640 bp, Arabidopsis thaliana; identical to SEQ ID NO: 38920
  misc_feature (1)..(640): Ceres Seq. ID no. 12652846
  misc_feature: MA Experiment ID: 108434 Result: Down-regulated in Transcription
  misc_feature: MA Experiment 108434 PARAMETER Experiment Name: At_Root_Tips_cDNA_P Parameter: Tissue Value: Root Tips
  misc_feature: MA Experiment ID: 108462 Result: Up-regulated in Transcription
  misc_feature: MA Experiment 108462 PARAMETER Experiment Name: At_Germinating_Seeds_cDNA_P Parameter: Age (day) Value: 2 vs. 0
  misc_feature: MA Experiment 108462 PARAMETER Experiment Name: At_Germinating_Seeds_cDNA_P Parameter: Tissue Value: Germinating Seeds
  misc_feature: MA Experiment ID: 108488 Result: Up-regulated in Transcription
  misc_feature: MA Experiment ID: 108605 Result: Up-regulated in Transcription
  misc_feature: MA Experiment 108605 PARAMETER Experiment Name: At_100uM_ABA_cDNA_P Parameter: Timepoint (hr) Value: 6
  misc_feature: MA Experiment 108605 PARAMETER Experiment Name: At_100uM_ABA_cDNA_P Parameter: Tissue Value: Aerial
  misc_feature: MA Experiment 108605 PARAMETER Experiment Name: At_100uM_ABA_cDNA_P Parameter: Treatment Value: 100uM ABA vs. No Treatment
  misc_feature: MA Experiment ID: 20000169 Result: Up-regulated in Transcription
  misc_feature: MA Experiment 20000169 PARAMETER Experiment Name: At_100uM_ABA_P Parameter: Age (day) Value: 14
  misc_feature: MA Experiment 20000169 PARAMETER Experiment Name: At_100uM_ABA_P Parameter: Organism Value: A. thaliana
  misc_feature: MA Experiment 20000169 PARAMETER Experiment Name: At_100uM_ABA_P Parameter: Plant Line Value: WS
  misc_feature: MA Experiment 20000169 PARAMETER Experiment Name: At_100uM_ABA_P Parameter: Timepoint (hr) Value: 6
  misc_feature: MA Experiment 20000169 PARAMETER Experiment Name: At_100uM_ABA_P Parameter: Tissue Value: Aerial
  misc_feature: MA Experiment 20000169 PARAMETER Experiment Name: At_100uM_ABA_P Parameter: Treatment Value: 100uM ABA vs. No Treatment
  misc_feature: MA Experiment ID: 20000180 Result: Up-regulated in Transcription
  misc_feature: MA Experiment 20000180 PARAMETER Experiment Name: At_Germinating_Seeds_P Parameter: Age (hr) Value: 24 vs. 0
  misc_feature: MA Experiment 20000180 PARAMETER Experiment Name: At_Germinating_Seeds_P Parameter: Tissue Value: Germinating Seeds
  misc_feature: MA Experiment ID: 20000184 Result: Up-regulated in Transcription
  misc_feature: MA Experiment 20000184 PARAMETER Experiment Name: At_Shoots__P Parameter: Age (day) Value: 7
  misc_feature: MA Experiment 20000184 PARAMETER Experiment Name: At_Shoots__P Parameter: Tissue Value: Shoots vs. Whole Plant
  misc_feature: MA Experiment ID: 20000227 Result: Down-regulated in Transcription
  misc_feature: MA Experiment 20000227 PARAMETER Experiment Name: At_Root-Tips-vs-Tops_P Parameter: Tissue Value: Root Tips vs. Root Tops
  misc_feature: MA Experiment ID: 20000264 Result: Up-regulated in Transcription
  misc_feature: MA Experiment 20000264 PARAMETER Experiment Name: At_Open_Flower_P Parameter: Age (day) Value: 21
  misc_feature: MA Experiment 20000264 PARAMETER Experiment Name: At_Open_Flower_P Parameter: Plant Line Value: WS
  misc_feature: MA Experiment 20000264 PARAMETER Experiment Name: At_Open_Flower_P Parameter: Tissue Value: Open Flower vs. Whole Plant
  misc_feature: MA Experiment ID: 20000438 Result: Up-regulated in Transcription
  misc_feature: MA Experiment 20000438 PARAMETER Experiment Name: At_Shoots__P Parameter: Age (day) Value: 14
  misc_feature: MA Experiment 20000438 PARAMETER Experiment Name: At_Shoots__P Parameter: Tissue Value: Shoots vs. Whole Plant
  misc_feature: MA Experiment ID: 20000439 Result: Down-regulated in Transcription
  misc_feature: MA Experiment 20000439 PARAMETER Experiment Name: At_Roots__P Parameter: Age (day) Value: 14 vs. 21
  misc_feature: MA Experiment 20000439 PARAMETER Experiment Name: At_Roots__P Parameter: Organism Value: A. thaliana
  misc_feature: MA Experiment 20000439 PARAMETER Experiment Name: At_Roots__P Parameter: Tissue Value: Roots vs. Whole Plant
  misc_feature: MA Experiment ID: 20000451 Result: Up-regulated in Transcription
  misc_feature: MA Experiment 20000451 PARAMETER Experiment Name: At_CS6879_Shoots-Roots_P Parameter: Age (day) Value: 14
  misc_feature: MA Experiment 20000451 PARAMETER Experiment Name: At_CS6879_Shoots-Roots_P Parameter: Organism Value: A. thaliana
  misc_feature: MA Experiment 20000451 PARAMETER Experiment Name: At_CS6879_Shoots-Roots_P Parameter: Plant Line Value: CS6879 vs. WS
  misc_feature: MA Experiment 20000451 PARAMETER Experiment Name: At_CS6879_Shoots-Roots_P Parameter: Tissue Value: Roots
  misc_feature: MA Experiment ID: 20000794 Result: Up-regulated in Transcription
  misc_feature: MA Experiment 20000794 PARAMETER Experiment Name: At_Petals_P Parameter: Age (day) Value: 23-25 days
  misc_feature: MA Experiment 20000794 PARAMETER Experiment Name: At_Petals_P Parameter: Plant Line Value: WS
  misc_feature: MA Experiment 20000794 PARAMETER Experiment Name: At_Petals_P Parameter: Tissue Value: Petals vs. Whole plant
  misc_feature: MA Experiment ID: 20001555 Result: Up-regulated in Transcription
  misc_feature: MA Experiment 20001555 PARAMETER Experiment Name: At_Drought_Soil_Dry_P Parameter: Age (day) Value: 24
  misc_feature: MA Experiment 20001555 PARAMETER Experiment Name: At_Drought_Soil_Dry_P Parameter: Organism Value: A. thaliana
  misc_feature: MA Experiment 20001555 PARAMETER Experiment Name: At_Drought_Soil_Dry_P Parameter: Plant Line Value: WS
  misc_feature: MA Experiment 20001555 PARAMETER Experiment Name: At_Drought_Soil_Dry_P Parameter: Post Timepoint (hr) Value: None
  misc_feature: MA Experiment 20001555 PARAMETER Experiment Name: At_Drought_Soil_Dry_P Parameter: Post-Treatment Value: None
  misc_feature: MA Experiment 20001555 PARAMETER Experiment Name: At_Drought_Soil_Dry_P Parameter: Timepoint (day) Value: 10
  misc_feature: MA Experiment 20001555 PARAMETER Experiment Name: At_Drought_Soil_Dry_P Parameter: Treatment Value: Drought vs. No Drought
  misc_feature: MA Experiment ID: 20001556 Result: Up-regulated in Transcription
  misc_feature: MA Experiment 20001556 PARAMETER Experiment Name: At_Drought_Soil_Dry_P Parameter: Age (day) Value: 26
  misc_feature: MA Experiment 20001556 PARAMETER Experiment Name: At_Drought_Soil_Dry_P Parameter: Organism Value: A. thaliana
  misc_feature: MA Experiment 20001556 PARAMETER Experiment Name: At_Drought_Soil_Dry_P Parameter: Plant Line Value: WS
  misc_feature: MA Experiment 20001556 PARAMETER Experiment Name: At_Drought_Soil_Dry_P Parameter: Post Timepoint (hr) Value: None
  misc_feature: MA Experiment 20001556 PARAMETER Experiment Name: At_Drought_Soil_Dry_P Parameter: Post-Treatment Value: None
  misc_feature: MA Experiment 20001556 PARAMETER Experiment Name: At_Drought_Soil_Dry_P Parameter: Timepoint (day) Value: 12
  misc_feature: MA Experiment 20001556 PARAMETER Experiment Name: At_Drought_Soil_Dry_P Parameter: Treatment Value: Drought vs. No Drought
  misc_feature: MA Experiment ID: 20001559 Result: Up-regulated in Transcription
  misc_feature: MA Experiment 20001559 PARAMETER Experiment Name: At_Drought_Soil_Dry_P Parameter: Age (day) Value: 28
  misc_feature: MA Experiment 20001559 PARAMETER Experiment Name: At_Drought_Soil_Dry_P Parameter: Organism Value: A. thaliana
  misc_feature: MA Experiment 20001559 PARAMETER Experiment Name: At_Drought_Soil_Dry_P Parameter: Plant Line Value: WS
  misc_feature: MA Experiment 20001559 PARAMETER Experiment Name: At_Drought_Soil_Dry_P Parameter: Post Timepoint (hr) Value: 29
  misc_feature: MA Experiment 20001559 PARAMETER Experiment Name: At_Drought_Soil_Dry_P Parameter: Post-Treatment Value: Re-Water vs. No Drought
  misc_feature: MA Experiment 20001559 PARAMETER Experiment Name: At_Drought_Soil_Dry_P Parameter: Timepoint (day) Value: 14
  misc_feature: MA Experiment 20001559 PARAMETER Experiment Name: At_Drought_Soil_Dry_P Parameter: Treatment Value: Drought vs. No Drought
  misc_feature: MA Experiment ID: 20001560 Result: Up-regulated in Transcription
  misc_feature: MA Experiment 20001560 PARAMETER Experiment Name: At_Drought_Soil_Dry_P Parameter: Age (day) Value: 28
  misc_feature: MA Experiment 20001560 PARAMETER Experiment Name: At_Drought_Soil_Dry_P Parameter: Organism Value: A. thaliana
  misc_feature: MA Experiment 20001560 PARAMETER Experiment Name: At_Drought_Soil_Dry_P Parameter: Plant Line Value: WS
  misc_feature: MA Experiment 20001560 PARAMETER Experiment Name: At_Drought_Soil_Dry_P Parameter: Post Timepoint (hr) Value: None
  misc_feature: MA Experiment 20001560 PARAMETER Experiment Name: At_Drought_Soil_Dry_P Parameter: Post-Treatment Value: None
  misc_feature: MA Experiment 20001560 PARAMETER Experiment Name: At_Drought_Soil_Dry_P Parameter: Timepoint (day) Value: 14
  misc_feature: MA Experiment 20001560 PARAMETER Experiment Name: At_Drought_Soil_Dry_P Parameter: Treatment Value: Drought vs. No Drought
  misc_feature: MA Experiment ID: 20001904 Result: Up-regulated in Transcription
  misc_feature: MA Experiment 20001904 PARAMETER Experiment Name: At_Drought_Reproduction_P Parameter: Age (day) Value: 37
  misc_feature: MA Experiment 20001904 PARAMETER Experiment Name: At_Drought_Reproduction_P Parameter: Organism Value: A. thaliana
  misc_feature: MA Experiment 20001904 PARAMETER Experiment Name: At_Drought_Reproduction_P Parameter: Plant Line Value: WS
  misc_feature: MA Experiment 20001904 PARAMETER Experiment Name: At_Drought_Reproduction_P Parameter: Timepoint (day) Value: 7
  misc_feature: MA Experiment 20001904 PARAMETER Experiment Name: At_Drought_Reproduction_P Parameter: Tissue Value: Rosettes
  misc_feature: MA Experiment 20001904 PARAMETER Experiment Name: At_Drought_Reproduction_P Parameter: Treatment Value: Drought vs. No Drought

SEQ ID NO: 42715 - protein, 118 aa, Arabidopsis thaliana; identical to SEQ ID NO: 38921
  peptide (1)..(118): Ceres Seq. ID no. 12652847
  misc_feature (29)..(114): Pfam Name: Protease inhibitor/seed storage/LTP family Pfam Description: Protease inhibitor/seed storage/LTP family
  misc_feature (29)..(114): Pfam Name: Protease inhibitor/seed storage/LTP family Pfam Description: Protease inhibitor/seed storage/LTP family
  misc_feature (29)..(114): Pfam Name: Protease inhibitor/seed storage/LTP family Pfam Description: Protease inhibitor/seed storage/LTP family
  misc_feature (29)..(114): Pfam Name: Protease inhibitor/seed storage/LTP family Pfam Description: Protease inhibitor/seed storage/LTP family
  misc_feature (1)..(118): Homolog of NCBI NO: 5777389 NR Description: non-specific lipid transfer protein [Brassica
  misc_feature (1)..(118): Homolog of NCBI NO: 15224898 NR Description: putative nonspecific lipid-transfer protein
  misc_feature (1)..(118): Homolog of NCBI NO: 2497737 NR Description: NONSPECIFIC LIPID-TRANSFER PROTEIN 3 PRECURSOR
  misc_feature (1)..(118): Homolog of NCBI NO: 2497736 NR Description: NONSPECIFIC LIPID-TRANSFER PROTEIN 2 PRECURSOR
  misc_feature (1)..(118): Homolog of NCBI NO: 2497739 NR Description: NONSPECIFIC LIPID-TRANSFER PROTEIN B PRECURSOR
  misc_feature (1)..(118): Homolog of NCBI NO: 5777389 NR Description: non-specific lipid transfer protein [Brassica
  misc_feature (1)..(118): Homolog of NCBI NO: 2497737 NR Description: NONSPECIFIC LIPID-TRANSFER PROTEIN 3 PRECURSOR
  misc_feature (1)..(118): Homolog of NCBI NO: 2497739 NR Description: NONSPECIFIC LIPID-TRANSFER PROTEIN B PRECURSOR
  misc_feature (1)..(118): Homolog of NCBI NO: 2497736 NR Description: NONSPECIFIC LIPID-TRANSFER PROTEIN 2 PRECURSOR
  misc_feature (1)..(118): Homolog of NCBI NO: 2497737 NR Description: NONSPECIFIC LIPID-TRANSFER PROTEIN 3 PRECURSOR
  misc_feature (1)..(118): Homolog of NCBI NO: 15224898 NR Description: putative nonspecific lipid-transfer protein
  misc_feature (1)..(118): Homolog of NCBI NO: 5777389 NR Description: non-specific lipid transfer protein [Brassica
  misc_feature (1)..(118): Homolog of NCBI NO: 15224899 NR Description: putative nonspecific lipid-transfer protein
  misc_feature (1)..(118): Homolog of NCBI NO: 2497738 NR Description: NONSPECIFIC LIPID-TRANSFER PROTEIN A PRECURSOR
  misc_feature (1)..(118): Homolog of NCBI NO: 11273805 NR Description: lipid transfer protein [imported] - wild cabbage
  misc_feature (1)..(114): Homolog of NCBI NO: 7438295 NR Description: lipid transfer protein wax9C - broccoli
  misc_feature (1)..(118): Homolog of NCBI NO: 2497735 NR Description: NONSPECIFIC LIPID-TRANSFER PROTEIN 1 PRECURSOR
  misc_feature (1)..(118): Homolog of NCBI NO: 15224899 NR Description: putative nonspecific lipid-transfer protein
  misc_feature (1)..(118): Homolog of NCBI NO: 2497738 NR Description: NONSPECIFIC LIPID-TRANSFER PROTEIN A PRECURSOR
  misc_feature (1)..(118): Homolog of NCBI NO: 11273805 NR Description: lipid transfer protein [imported] - wild cabbage
  misc_feature (1)..(114): Homolog of NCBI NO: 7438295 NR Description: lipid transfer protein wax9C - broccoli
  misc_feature (1)..(118): Homolog of NCBI NO: 2497735 NR Description: NONSPECIFIC LIPID-TRANSFER PROTEIN 1 PRECURSOR
  misc_feature (1)..(118): Homolog of NCBI NO: 2497739 NR Description: NONSPECIFIC LIPID-TRANSFER PROTEIN B PRECURSOR
  misc_feature (1)..(118): Homolog of NCBI NO: 2497736 NR Description: NONSPECIFIC LIPID-TRANSFER PROTEIN 2 PRECURSOR
  misc_feature (1)..(118): Homolog of NCBI NO: 2497737 NR Description: NONSPECIFIC LIPID-TRANSFER PROTEIN 3 PRECURSOR
  misc_feature (1)..(118): Homolog of NCBI NO: 15224898 NR Description: putative nonspecific lipid-transfer protein
  misc_feature (1)..(118): Homolog of NCBI NO: 5777389 NR Description: non-specific lipid transfer protein [Brassica
  misc_feature (1)..(118): Homolog of NCBI NO: 15224899 NR Description: putative nonspecific lipid-transfer protein
  misc_feature (1)..(118): Homolog of NCBI NO: 2497738 NR Description: NONSPECIFIC LIPID-TRANSFER PROTEIN A PRECURSOR
  misc_feature (1)..(118): Homolog of NCBI NO: 11273805 NR Description: lipid transfer protein [imported] - wild cabbage
  misc_feature (1)..(114): Homolog of NCBI NO: 7438295 NR Description: lipid transfer protein wax9C - broccoli
  misc_feature (1)..(118): Homolog of NCBI NO: 2497735 NR Description: NONSPECIFIC LIPID-TRANSFER PROTEIN 1 PRECURSOR
  misc_feature (1)..(118): Homolog of NCBI NO: 2497739 NR Description: NONSPECIFIC LIPID-TRANSFER PROTEIN B PRECURSOR
  misc_feature (1)..(118): Homolog of NCBI NO: 2497736 NR Description: NONSPECIFIC LIPID-TRANSFER PROTEIN 2 PRECURSOR
  misc_feature (1)..(118): Homolog of NCBI NO: 15224898 NR Description: putative nonspecific lipid-transfer protein
  misc_feature (1)..(118): Homolog of NCBI NO: 2497735 NR Description: NONSPECIFIC LIPID-TRANSFER PROTEIN 1 PRECURSOR
  misc_feature (1)..(114): Homolog of NCBI NO: 7438295 NR Description: lipid transfer protein wax9C - broccoli
  misc_feature (1)..(118): Homolog of NCBI NO: 11273805 NR Description: lipid transfer protein [imported] - wild cabbage
  misc_feature (1)..(118): Homolog of NCBI NO: 2497738 NR Description: NONSPECIFIC LIPID-TRANSFER PROTEIN A PRECURSOR
  misc_feature (1)..(118): Homolog of NCBI NO: 15224899 NR Description: putative nonspecific lipid-transfer protein

SEQ ID NO: 42716 - protein, 114 aa, Arabidopsis thaliana; identical to SEQ ID NO: 38922
  peptide (1)..(114): Ceres Seq. ID no. 12652848
  misc_feature (25)..(110): Pfam Name: Protease inhibitor/seed storage/LTP family Pfam Description: Protease inhibitor/seed storage/LTP family
  misc_feature (25)..(110): Pfam Name: Protease inhibitor/seed storage/LTP family Pfam Description: Protease inhibitor/seed storage/LTP family
  misc_feature (25)..(110): Pfam Name: Protease inhibitor/seed storage/LTP family Pfam Description: Protease inhibitor/seed storage/LTP family
  misc_feature (25)..(110): Pfam Name: Protease inhibitor/seed storage/LTP family Pfam Description: Protease inhibitor/seed storage/LTP family
  misc_feature (1)..(114): Homolog of NCBI NO: 5777389 NR Description: non-specific lipid transfer protein [Brassica
  misc_feature (1)..(114): Homolog of NCBI NO: 15224898 NR Description: putative nonspecific lipid-transfer protein
  misc_feature (1)..(114): Homolog of NCBI NO: 2497737 NR Description: NONSPECIFIC LIPID-TRANSFER PROTEIN 3 PRECURSOR
  misc_feature (1)..(114): Homolog of NCBI NO: 2497736 NR Description: NONSPECIFIC LIPID-TRANSFER PROTEIN 2 PRECURSOR
  misc_feature (1)..(114): Homolog of NCBI NO: 2497739 NR Description: NONSPECIFIC LIPID-TRANSFER PROTEIN B PRECURSOR
  misc_feature (1)..(114): Homolog of NCBI NO: 5777389 NR Description: non-specific lipid transfer protein [Brassica
  misc_feature (1)..(114): Homolog of NCBI NO: 2497737 NR Description: NONSPECIFIC LIPID-TRANSFER PROTEIN 3 PRECURSOR
  misc_feature (1)..(114): Homolog of NCBI NO: 2497739 NR Description: NONSPECIFIC LIPID-TRANSFER PROTEIN B PRECURSOR
  misc_feature (1)..(114): Homolog of NCBI NO: 2497736 NR Description: NONSPECIFIC LIPID-TRANSFER PROTEIN 2 PRECURSOR
  misc_feature (1)..(114): Homolog of NCBI NO: 2497737 NR Description: NONSPECIFIC LIPID-TRANSFER PROTEIN 3 PRECURSOR
  misc_feature (1)..(114): Homolog of NCBI NO: 15224898 NR Description: putative nonspecific lipid-transfer protein
  misc_feature (1)..(114): Homolog of NCBI NO: 5777389 NR Description: non-specific lipid transfer protein [Brassica
  misc_feature (1)..(114): Homolog of NCBI NO: 15224899 NR Description: putative nonspecific lipid-transfer protein
  misc_feature (1)..(114): Homolog of NCBI NO: 2497738 NR Description: NONSPECIFIC LIPID-TRANSFER PROTEIN A PRECURSOR
  misc_feature (1)..(114): Homolog of NCBI NO: 11273805 NR Description: lipid transfer protein [imported] - wild cabbage
  misc_feature (1)..(110): Homolog of NCBI NO: 7438295 NR Description: lipid transfer protein wax9C - broccoli
  misc_feature (1)..(114): Homolog of NCBI NO: 2497735 NR Description: NONSPECIFIC LIPID-TRANSFER PROTEIN 1 PRECURSOR
  misc_feature (1)..(114): Homolog of NCBI NO: 15224899 NR Description: putative nonspecific lipid-transfer protein
  misc_feature (1)..(114): Homolog of NCBI NO: 2497738 NR Description: NONSPECIFIC LIPID-TRANSFER PROTEIN A PRECURSOR
  misc_feature (1)..(114): Homolog of NCBI NO: 11273805 NR Description: lipid transfer protein [imported] - wild cabbage
  misc_feature (1)..(110): Homolog of NCBI NO: 7438295 NR Description: lipid transfer protein wax9C - broccoli
  misc_feature (1)..(114): Homolog of NCBI NO: 2497735 NR Description: NONSPECIFIC LIPID-TRANSFER PROTEIN 1 PRECURSOR
  misc_feature (1)..(114): Homolog of NCBI NO: 2497739 NR Description: NONSPECIFIC LIPID-TRANSFER PROTEIN B PRECURSOR
  misc_feature (1)..(114): Homolog of NCBI NO: 2497736 NR Description: NONSPECIFIC LIPID-TRANSFER PROTEIN 2 PRECURSOR
  misc_feature (1)..(114): Homolog of NCBI NO: 2497737 NR Description: NONSPECIFIC LIPID-TRANSFER PROTEIN 3 PRECURSOR
  misc_feature (1)..(114): Homolog of NCBI NO: 15224898 NR Description: putative nonspecific lipid-transfer protein
  misc_feature (1)..(114): Homolog of NCBI NO: 5777389 NR Description: non-specific lipid transfer protein [Brassica
  misc_feature (1)..(114): Homolog of NCBI NO: 15224899 NR Description: putative nonspecific lipid-transfer protein
  misc_feature (1)..(114): Homolog of NCBI NO: 2497738 NR Description: NONSPECIFIC LIPID-TRANSFER PROTEIN A PRECURSOR
  misc_feature (1)..(114): Homolog of NCBI NO: 11273805 NR Description: lipid transfer protein [imported] - wild cabbage
  misc_feature (1)..(110): Homolog of NCBI NO: 7438295 NR Description: lipid transfer protein wax9C - broccoli
  misc_feature (1)..(114): Homolog of NCBI NO: 2497735 NR Description: NONSPECIFIC LIPID-TRANSFER PROTEIN 1 PRECURSOR
  misc_feature (1)..(114): Homolog of NCBI NO: 2497739 NR Description: NONSPECIFIC LIPID-TRANSFER PROTEIN B PRECURSOR
  misc_feature (1)..(114): Homolog of NCBI NO: 2497736 NR Description: NONSPECIFIC LIPID-TRANSFER PROTEIN 2 PRECURSOR
  misc_feature (1)..(114): Homolog of NCBI NO: 15224898 NR Description: putative nonspecific lipid-transfer protein
  misc_feature (1)..(114): Homolog of NCBI NO: 2497735 NR Description: NONSPECIFIC LIPID-TRANSFER PROTEIN 1 PRECURSOR
  misc_feature (1)..(110): Homolog of NCBI NO: 7438295 NR Description: lipid transfer protein wax9C - broccoli
  misc_feature (1)..(114): Homolog of NCBI NO: 11273805 NR Description: lipid transfer protein [imported] - wild cabbage
  misc_feature (1)..(114): Homolog of NCBI NO: 2497738 NR Description: NONSPECIFIC LIPID-TRANSFER PROTEIN A PRECURSOR
  misc_feature (1)..(114): Homolog of NCBI NO: 15224899 NR Description: putative nonspecific lipid-transfer protein

SEQ ID NO: 42717 - protein, 104 aa, Arabidopsis thaliana; identical to SEQ ID NO: 38923
  peptide (1)..(104): Ceres Seq. ID no. 12652849
  misc_feature (15)..(100): Pfam Name: Protease inhibitor/seed storage/LTP family Pfam Description: Protease inhibitor/seed storage/LTP family
  misc_feature (15)..(100): Pfam Name: Protease inhibitor/seed storage/LTP family Pfam Description: Protease inhibitor/seed storage/LTP family
  misc_feature (15)..(100): Pfam Name: Protease inhibitor/seed storage/LTP family Pfam Description: Protease inhibitor/seed storage/LTP family
  misc_feature (15)..(100): Pfam Name: Protease inhibitor/seed storage/LTP family Pfam Description: Protease inhibitor/seed storage/LTP family
  misc_feature (1)..(104): Homolog of NCBI NO: 5777389 NR Description: non-specific lipid transfer protein [Brassica
  misc_feature (1)..(104): Homolog of NCBI NO: 15224898 NR Description: putative nonspecific lipid-transfer protein
  misc_feature (1)..(104): Homolog of NCBI NO: 2497737 NR Description: NONSPECIFIC LIPID-TRANSFER PROTEIN 3 PRECURSOR
  misc_feature (1)..(104): Homolog of NCBI NO: 2497736 NR Description: NONSPECIFIC LIPID-TRANSFER PROTEIN 2 PRECURSOR
  misc_feature (1)..(104): Homolog of NCBI NO: 2497739 NR Description: NONSPECIFIC LIPID-TRANSFER PROTEIN B PRECURSOR
  misc_feature (1)..(104): Homolog of NCBI NO: 5777389 NR Description: non-specific lipid transfer protein [Brassica
  misc_feature (1)..(104): Homolog of NCBI NO: 2497737 NR Description: NONSPECIFIC LIPID-TRANSFER PROTEIN 3 PRECURSOR
  misc_feature (1)..(104): Homolog of NCBI NO: 2497739 NR Description: NONSPECIFIC LIPID-TRANSFER PROTEIN B PRECURSOR
  misc_feature (1)..(104): Homolog of NCBI NO: 2497736 NR Description: NONSPECIFIC LIPID-TRANSFER PROTEIN 2 PRECURSOR
  misc_feature (1)..(104): Homolog of NCBI NO: 2497737 NR Description: NONSPECIFIC LIPID-TRANSFER PROTEIN 3 PRECURSOR
  misc_feature (1)..(104): Homolog of NCBI NO: 15224898 NR Description: putative nonspecific lipid-transfer protein
  misc_feature (1)..(104): Homolog of NCBI NO: 5777389 NR Description: non-specific lipid transfer protein [Brassica
  misc_feature (1)..(104): Homolog of NCBI NO: 15224899 NR Description: putative nonspecific lipid-transfer protein
  misc_feature (1)..(104): Homolog of NCBI NO: 2497738 NR Description: NONSPECIFIC LIPID-TRANSFER PROTEIN A PRECURSOR
  misc_feature (1)..(104): Homolog of NCBI NO: 11273805 NR Description: lipid transfer protein [imported] - wild cabbage
  misc_feature (1)..(100): Homolog of NCBI NO: 7438295 NR Description: lipid transfer protein wax9C - broccoli
  misc_feature (1)..(104): Homolog of NCBI NO: 2497735 NR Description: NONSPECIFIC LIPID-TRANSFER PROTEIN 1 PRECURSOR
  misc_feature (1)..(104): Homolog of NCBI NO: 15224899 NR Description: putative nonspecific lipid-transfer protein
  misc_feature (1)..(104): Homolog of NCBI NO: 2497738 NR Description: NONSPECIFIC LIPID-TRANSFER PROTEIN A PRECURSOR
  misc_feature (1)..(104): Homolog of NCBI NO: 11273805 NR Description: lipid transfer protein [imported] - wild cabbage
  misc_feature (1)..(100): Homolog of NCBI NO: 7438295 NR Description: lipid transfer protein wax9C - broccoli
  misc_feature (1)..(104): Homolog of NCBI NO: 2497735 NR Description: NONSPECIFIC LIPID-TRANSFER PROTEIN 1 PRECURSOR
  misc_feature (1)..(104): Homolog of NCBI NO: 2497739 NR Description: NONSPECIFIC LIPID-TRANSFER PROTEIN B PRECURSOR
  misc_feature (1)..(104): Homolog of NCBI NO: 2497736 NR Description: NONSPECIFIC LIPID-TRANSFER PROTEIN 2 PRECURSOR
  misc_feature (1)..(104): Homolog of NCBI NO: 2497737 NR Description: NONSPECIFIC LIPID-TRANSFER PROTEIN 3 PRECURSOR
  misc_feature (1)..(104): Homolog of NCBI NO: 15224898 NR Description: putative nonspecific lipid-transfer protein
  misc_feature (1)..(104): Homolog of NCBI NO: 5777389 NR Description: non-specific lipid transfer protein [Brassica
  misc_feature (1)..(104): Homolog of NCBI NO: 15224899 NR Description: putative nonspecific lipid-transfer protein
  misc_feature (1)..(104): Homolog of NCBI NO: 2497738 NR Description: NONSPECIFIC LIPID-TRANSFER PROTEIN A PRECURSOR
  misc_feature (1)..(104): Homolog of NCBI NO: 11273805 NR Description: lipid transfer protein [imported] - wild cabbage
  misc_feature (1)..(100): Homolog of NCBI NO: 7438295 NR Description: lipid transfer protein wax9C - broccoli
  misc_feature (1)..(104): Homolog of NCBI NO: 2497735 NR Description: NONSPECIFIC LIPID-TRANSFER PROTEIN 1 PRECURSOR
  misc_feature (1)..(104): Homolog of NCBI NO: 2497739 NR Description: NONSPECIFIC LIPID-TRANSFER PROTEIN B PRECURSOR
  misc_feature (1)..(104): Homolog of NCBI NO: 2497736 NR Description: NONSPECIFIC LIPID-TRANSFER PROTEIN 2 PRECURSOR
  misc_feature (1)..(104): Homolog of NCBI NO: 15224898 NR Description: putative nonspecific lipid-transfer protein
  misc_feature (1)..(104): Homolog of NCBI NO: 2497735 NR Description: NONSPECIFIC LIPID-TRANSFER PROTEIN 1 PRECURSOR
  misc_feature (1)..(100): Homolog of NCBI NO: 7438295 NR Description: lipid transfer protein wax9C - broccoli
  misc_feature (1)..(104): Homolog of NCBI NO: 11273805 NR Description: lipid transfer protein [imported] - wild cabbage
  misc_feature (1)..(104): Homolog of NCBI NO: 2497738 NR Description: NONSPECIFIC LIPID-TRANSFER PROTEIN A PRECURSOR
  misc_feature (1)..(104): Homolog of NCBI NO: 15224899 NR Description: putative nonspecific lipid-transfer protein

SEQ ID NO: 42718 - DNA, 1981 bp, Arabidopsis thaliana
  misc_feature (1)..(1981): Ceres Seq. ID no. 12326771
  misc_feature: MA Experiment ID: 108573 Result: Up-regulated in Transcription
  misc_feature: MA Experiment 108573 PARAMETER Experiment Name: At_Drought_cDNA_P Parameter: Timepoint (hr) Value: 6
  misc_feature: MA Experiment 108573 PARAMETER Experiment Name: At_Drought_cDNA_P Parameter: Tissue Value: Aerial
  misc_feature: MA Experiment 108573 PARAMETER Experiment Name: At_Drought_cDNA_P Parameter: Treatment Value: Drought vs. No Drought
aatgatcgatcagatatctcaatttcaggaacccagaaagagggacttgtcttttacctccaaagggttcctgccgtttcttttctacaatttttctcctgctaattatcaaatttttcttctgattttcattgtttgttagagattcttcttctcctctgcttttctattctctgggagctcgatgatggatgataaagctcgcaaagaagaagaacatcatgtgtctcaccaacataatcattctcctctgcaaagggatggaaattctgctgagattgcacaaggacaagagctatcatcaccgggccgagacctatggaggcgaggtcttgtgttagatttaccatcaacaacacctgaagatactacaagagatgatctttttagacgaaatgcatctttaacttcaagtcctgttgccaaaagagtcaacttttctccaatgtccagccctagagtcggacaacgtggtgcatccttgagtccttcttcttctacttcttcttcttcaagaaacaaacctaatagcctgaagaatctaatccccaagttaagctttaagaaccggaacagcaataacgataatgtggatatcgagaaagccgcggatttgggctttgtgtcctccccttcttcaggaaatggcagggacaggtctacatggactctcactaatattttaactccaagattgaagaaaactgagtctcttcctgtaacccctatagctcactcaaatcctgagtccactcacgggagatttgccgttgatctagttacttccacgaaaaaagggcctccactgcctatccaccgttcacgctctgtcccagcattcaacaaagatggaagtcaaaggcaattaggtgttttccgggtgattccaactccaaacatgtctccaaccagaaatactattaaacttaacgacgcgaatgttgatggagctgaagatgttcctgaagaagaagctgtgtgtagaatctgccttgtagaattgggagaagattcagaagccttcaagatggaatgtttgtgtagaggggaactagctcttgcccacaaagaatgtacaatcaaatggttcaccattaaaggaaacagaacatgtgatgtgtgcaagcaagaggttcagaatctccctgtgacccttcttcgcatgcagaattctcggggtagtattggagctccagacgccgaggctgcacactacagtttatggcaggatgttccaattcttgtgattgtaagcatgcttgcatacttctgttttctcgagcagcttctgcttacaaaaatgcaatctggcgccattgcagtttctttaccattctcgtgcgttcttggtctttttgcttcgatgacggcaacaacaatggtgccgaagagatatgtctggatttacgctacaactcagttcggtcttgttgtttttttctctcacattttcttcacattggttcgcatgcagccggttgtggccattctcttagccactatcgttgggtttggactcaccatgagcggtacaacaggtatagtcgagttttcgaaatggaggagaagcaataggacagctgaacttccaagcagtagtcaagtggatcaaccactggttgagacaacagatcagaacatttctggatcaagaaactgaaagccagaggtccgtcaatactaatcatatgttccagtagtggtctatgatctcgatggagatccatctatttagagatgtgagaacagattggtcatgtgagttaagtagtggtagttgacgagattaaggctcgatttttgggggtctcttttgtgtgtgaatgtgagtgtgagtgtgagtgtatgtatatcatctgttgttttcttaaagaaaaacaaaaagaagaagttttgtatcttttagtatattaaactattgggcttttataaagtcttgcaaattcgctacggcccataaagcccaacaagttttaaaatt

SEQ ID NO: 42719 - protein, 491 aa, Arabidopsis thaliana
  peptide (1)..(491): Ceres Seq. ID no. 12326772
  misc_feature (266)..(313): Pfam Name: Zinc finger, C3HC4 type (RING finger) Pfam Description: Zinc finger, C3HC4 type (RING finger)
  misc_feature (14)..(384): Homolog of NCBI NO: 13605863 NR Description: AT5g60580/muf9_230 [Arabidopsis thaliana]
  misc_feature (170)..(473): Homolog of NCBI NO: 32489688 NR Description: OSJNBb0004G23.1 [Oryza sativa (japonica
  misc_feature (14)..(489): Homolog of NCBI NO: 30697388 NR Description: zinc finger (C3HC4-type RING finger) protein
  misc_feature (14)..(489): Homolog of NCBI NO: 18424371 NR Description: putative protein
  misc_feature (282)..(491): Homolog of NCBI NO: 6682253 NR Description: unknown protein [Arabidopsis thaliana]
  misc_feature (66)..(474): Homolog of NCBI NO: 18414148 NR Description: putative protein
  misc_feature (2)..(474): Homolog of NCBI NO: 11290062 NR Description: hypothetical protein F15A17.210 - Arabidopsis
  misc_feature (2)..(474): Homolog of NCBI NO: 9757769 NR Description: gene_id:MOK16.9~unknown protein [Arabidopsis
  misc_feature (25)..(330): Homolog of NCBI NO: 6681342 NR Description: unknown protein, 3' partial [Arabidopsis thaliana]
  misc_feature (1)..(491): Homolog of NCBI NO: 18398630 NR Description: expressed protein
MMDDKARKEEEHHVSHQHNHSPLQRDGNSAEIAQGQELSSPGRDLWRRGLVLDLPSTTPEDTTRDDLFRRNASLTSSPVAKRVNFSPMSSPRVGQRGASLSPSSSTSSSSRNKPNSLKNLIPKLSFKNRNSNNDNVDIEKAADLGFVSSPSSGNGRDRSTWTLTNILTPRLKKTESLPVTPIAHSNPESTHGRFAVDLVTSTKKGPPLPIHRSRSVPAFNKDGSQRQLGVFRVIPTPNMSPTRNTIKLNDANVDGAEDVPEEEAVCRICLVELGEDSEAFKMECLCRGELALAHKECTIKWFTIKGNRTCDVCKQEVQNLPVTLLRMQNSRGSIGAPDAEAAHYSLWQDVPILVIVSMLAYFCFLEQLLLTKMQSGAIAVSLPFSCVLGLFASMTATTMVPKRYVWIYATTQFGLVVFFSHIFFTLVRMQPVVAILLATIVGFGLTMSGTTGIVEFSKWRRSNRTAELPSSSQVDQPLVETTDQNISGSRN

SEQ ID NO: 42720 - protein, 490 aa, Arabidopsis thaliana
  peptide (1)..(490): Ceres Seq. ID no. 12326773
  misc_feature (265)..(312): Pfam Name: Zinc finger, C3HC4 type (RING finger) Pfam Description: Zinc finger, C3HC4 type (RING finger)
  misc_feature (13)..(383): Homolog of NCBI NO: 13605863 NR Description: AT5g60580/muf9_230 [Arabidopsis thaliana]
  misc_feature (169)..(472): Homolog of NCBI NO: 32489688 NR Description: OSJNBb0004G23.1 [Oryza sativa (japonica
  misc_feature (13)..(488): Homolog of NCBI NO: 30697388 NR Description: zinc finger (C3HC4-type RING finger) protein
  misc_feature (13)..(488): Homolog of NCBI NO: 18424371 NR Description: putative protein
  misc_feature (281)..(490): Homolog of NCBI NO: 6682253 NR Description: unknown protein [Arabidopsis thaliana]
  misc_feature (65)..(473): Homolog of NCBI NO: 18414148 NR Description: putative protein
  misc_feature (1)..(473): Homolog of NCBI NO: 11290062 NR Description: hypothetical protein F15A17.210 - Arabidopsis
  misc_feature (1)..(473): Homolog of NCBI NO: 9757769 NR Description: gene_id:MOK16.9~unknown protein [Arabidopsis
  misc_feature (24)..(329): Homolog of NCBI NO: 6681342 NR Description: unknown protein, 3' partial [Arabidopsis thaliana]
  misc_feature (1)..(490): Homolog of NCBI NO: 18398630 NR Description: expressed protein
MDDKARKEEEHHVSHQHNHSPLQRDGNSAEIAQGQELSSPGRDLWRRGLVLDLPSTTPEDTTRDDLFRRNASLTSSPVAKRVNFSPMSSPRVGQRGASLSPSSSTSSSSRNKPNSLKNLIPKLSFKNRNSNNDNVDIEKAADLGFVSSPSSGNGRDRSTWTLTNILTPRLKKTESLPVTPIAHSNPESTHGRFAVDLVTSTKKGPPLPIHRSRSVPAFNKDGSQRQLGVFRVIPTPNMSPTRNTIKLNDANVDGAEDVPEEEAVCRICLVELGEDSEAFKMECLCRGELALAHKECTIKWFTIKGNRTCDVCKQEVQNLPVTLLRMQNSRGSIGAPDAEAAHYSLWQDVPILVIVSMLAYFCFLEQLLLTKMQSGAIAVSLPFSCVLGLFASMTATTMVPKRYVWIYATTQFGLVVFFSHIFFTLVRMQPVVAILLATIVGFGLTMSGTTGIVEFSKWRRSNRTAELPSSSQVDQPLVETTDQNISGSRN

SEQ ID NO: 42721 - protein, 404 aa, Arabidopsis thaliana
  peptide (1)..(404): Ceres Seq. ID no. 12326774
  misc_feature (179)..(226): Pfam Name: Zinc finger, C3HC4 type (RING finger) Pfam Description: Zinc finger, C3HC4 type (RING finger)
  misc_feature (1)..(297): Homolog of NCBI NO: 13605863 NR Description: AT5g60580/muf9_230 [Arabidopsis thaliana]
  misc_feature (83)..(386): Homolog of NCBI NO: 32489688 NR Description: OSJNBb0004G23.1 [Oryza sativa (japonica
  misc_feature (1)..(402): Homolog of NCBI NO: 30697388 NR Description: zinc finger (C3HC4-type RING finger) protein
  misc_feature (1)..(402): Homolog of NCBI NO: 18424371 NR Description: putative protein
  misc_feature (195)..(404): Homolog of NCBI NO: 6682253 NR Description: unknown protein [Arabidopsis thaliana]
  misc_feature (1)..(387): Homolog of NCBI NO: 18414148 NR Description: putative protein
  misc_feature (1)..(387): Homolog of NCBI NO: 11290062 NR Description: hypothetical protein F15A17.210 - Arabidopsis
  misc_feature (1)..(387): Homolog of NCBI NO: 9757769 NR Description: gene_id:MOK16.9~unknown protein [Arabidopsis
  misc_feature (1)..(243): Homolog of NCBI NO: 6681342 NR Description: unknown protein, 3' partial [Arabidopsis thaliana]
  misc_feature (1)..(404): Homolog of NCBI NO: 18398630 NR Description: expressed protein
MSSPRVGQRGASLSPSSSTSSSSRNKPNSLKNLIPKLSFKNRNSNNDNVDIEKAADLGFVSSPSSGNGRDRSTWTLTNILTPRLKKTESLPVTPIAHSNPESTHGRFAVDLVTSTKKGPPLPIHRSRSVPAFNKDGSQRQLGVFRVIPTPNMSPTRNTIKLNDANVDGAEDVPEEEAVCRICLVELGEDSEAFKMECLCRGELALAHKECTIKWFTIKGNRTCDVCKQEVQNLPVTLLRMQNSRGSIGAPDAEAAHYSLWQDVPILVIVSMLAYFCFLEQLLLTKMQSGAIAVSLPFSCVLGLFASMTATTMVPKRYVWIYATTQFGLVVFFSHIFFTLVRMQPVVAILLATIVGFGLTMSGTTGIVEFSKWRRSNRTAELPSSSQVDQPLVETTDQNISGSRN

SEQ ID NO: 42722 - DNA, 1165 bp, Arabidopsis thaliana
  misc_feature (1)..(1165): Ceres Seq. ID no. 12385032
  misc_feature: MA Experiment ID: 108434 Result: Up-regulated in Transcription
  misc_feature: MA Experiment 108434 PARAMETER Experiment Name: At_Root_Tips_cDNA_P Parameter: Tissue Value: Root Tips
  misc_feature: MA Experiment ID: 108462 Result: Down-regulated in Transcription
  misc_feature: MA Experiment 108462 PARAMETER Experiment Name: At_Germinating_Seeds_cDNA_P Parameter: Age (day) Value: 2 vs. 0
  misc_feature: MA Experiment 108462 PARAMETER Experiment Name: At_Germinating_Seeds_cDNA_P Parameter: Tissue Value: Germinating Seeds
  misc_feature: MA Experiment ID: 108463 Result: Down-regulated in Transcription
  misc_feature: MA Experiment 108463 PARAMETER Experiment Name: At_Germinating_Seeds_cDNA_P Parameter: Age (day) Value: 3 vs. 0
  misc_feature: MA Experiment 108463 PARAMETER Experiment Name: At_Germinating_Seeds_cDNA_P Parameter: Tissue Value: Germinating Seeds
  misc_feature: MA Experiment ID: 108464 Result: Down-regulated in Transcription
  misc_feature: MA Experiment 108464 PARAMETER Experiment Name: At_Germinating_Seeds_cDNA_P Parameter: Age (day) Value: 4 vs. 0
  misc_feature: MA Experiment 108464 PARAMETER Experiment Name: At_Germinating_Seeds_cDNA_P Parameter: Tissue Value: Germinating Seeds
  misc_feature: MA Experiment ID: 108577 Result: Up-regulated in Transcription
  misc_feature: MA Experiment 108577 PARAMETER Experiment Name: At_42deg_Heat_cDNA_P Parameter: Temperature (deg C) Value: 42 vs. 22
  misc_feature: MA Experiment 108577 PARAMETER Experiment Name: At_42deg_Heat_cDNA_P Parameter: Timepoint (hr) Value: 6
  misc_feature: MA Experiment 108577 PARAMETER Experiment Name: At_42deg_Heat_cDNA_P Parameter: Tissue Value: Aerial
  misc_feature: MA Experiment ID: 108595 Result: Down-regulated in Transcription
  misc_feature: MA Experiment 108595 PARAMETER Experiment Name: At_Ler-pi_Ovule_cDNA_P Parameter: Plant Line Value: null
  misc_feature: MA Experiment ID: 20000093 Result: Up-regulated in Transcription
  misc_feature: MA Experiment 20000093 PARAMETER Experiment Name: At_42deg_Heat_cDNA_P Parameter: Temperature (deg C) Value: 42 vs. 22
  misc_feature: MA Experiment 20000093 PARAMETER Experiment Name: At_42deg_Heat_cDNA_P Parameter: Timepoint (hr) Value: 0.5
  misc_feature: MA Experiment 20000093 PARAMETER Experiment Name: At_42deg_Heat_cDNA_P Parameter: Tissue Value: Aerial
  misc_feature: MA Experiment ID: 20000111 Result: Up-regulated in Transcription
  misc_feature: MA Experiment 20000111 PARAMETER Experiment Name: At_42deg_Heat_cDNA_P Parameter: Temperature (deg C) Value: 42 vs. 22
  misc_feature: MA Experiment 20000111 PARAMETER Experiment Name: At_42deg_Heat_cDNA_P Parameter: Timepoint (hr) Value: 6
  misc_feature: MA Experiment 20000111 PARAMETER Experiment Name: At_42deg_Heat_cDNA_P Parameter: Tissue Value: Aerial
  misc_feature: MA Experiment ID: 20000113 Result: Up-regulated in Transcription
  misc_feature: MA Experiment 20000113 PARAMETER Experiment Name: At_42deg_Heat_cDNA_P Parameter: Temperature (deg C) Value: 42 vs. 22
  misc_feature: MA Experiment 20000113 PARAMETER Experiment Name: At_42deg_Heat_cDNA_P Parameter: Timepoint (hr) Value: 8
  misc_feature: MA Experiment 20000113 PARAMETER Experiment Name: At_42deg_Heat_cDNA_P Parameter: Tissue Value: Aerial
  misc_feature: MA Experiment ID: 20000224 Result: Down-regulated in Transcription
  misc_feature: MA Experiment ID: 20000794 Result: Down-regulated in Transcription
  misc_feature: MA Experiment 20000794 PARAMETER Experiment Name: At_Petals_P Parameter: Age (day) Value: 23-25 days
  misc_feature: MA Experiment 20000794 PARAMETER Experiment Name: At_Petals_P Parameter: Plant Line Value: WS
  misc_feature: MA Experiment 20000794 PARAMETER Experiment Name: At_Petals_P Parameter: Tissue Value: Petals vs. Whole plant
  misc_feature: MA Experiment ID: 20001557 Result: Up-regulated in Transcription
  misc_feature: MA Experiment 20001557 PARAMETER Experiment Name: At_Drought_Soil_Dry_P Parameter: Age (day) Value: 27
  misc_feature: MA Experiment 20001557 PARAMETER Experiment Name: At_Drought_Soil_Dry_P Parameter: Organism Value: A. thaliana
  misc_feature: MA Experiment 20001557 PARAMETER Experiment Name: At_Drought_Soil_Dry_P Parameter: Plant Line Value: WS
  misc_feature: MA Experiment 20001557 PARAMETER Experiment Name: At_Drought_Soil_Dry_P Parameter: Post Timepoint (hr) Value: 3
  misc_feature: MA Experiment 20001557 PARAMETER Experiment Name: At_Drought_Soil_Dry_P Parameter: Post-Treatment Value: Re-Water vs. No Drought
  misc_feature: MA Experiment 20001557 PARAMETER Experiment Name: At_Drought_Soil_Dry_P Parameter: Timepoint (day) Value: 13
  misc_feature: MA Experiment 20001557 PARAMETER Experiment Name: At_Drought_Soil_Dry_P Parameter: Treatment Value: Drought vs. No Drought
  misc_feature: MA Experiment ID: 20001558 Result: Up-regulated in Transcription
  misc_feature: MA Experiment 20001558 PARAMETER Experiment Name: At_Drought_Soil_Dry_P Parameter: Age (day) Value: 27
  misc_feature: MA Experiment 20001558 PARAMETER Experiment Name: At_Drought_Soil_Dry_P Parameter: Organism Value: A. thaliana
  misc_feature: MA Experiment 20001558 PARAMETER Experiment Name: At_Drought_Soil_Dry_P Parameter: Plant Line Value: WS
  misc_feature: MA Experiment 20001558 PARAMETER Experiment Name: At_Drought_Soil_Dry_P Parameter: Post Timepoint (hr) Value: 6
  misc_feature: MA Experiment 20001558 PARAMETER Experiment Name: At_Drought_Soil_Dry_P Parameter: Post-Treatment Value: Re-Water vs. No Drought
  misc_feature: MA Experiment 20001558 PARAMETER Experiment Name: At_Drought_Soil_Dry_P Parameter: Timepoint (day) Value: 13
  misc_feature: MA Experiment 20001558 PARAMETER Experiment Name: At_Drought_Soil_Dry_P Parameter: Treatment Value: Drought vs. No Drought
  misc_feature: MA Experiment ID: 20001757 Result: Up-regulated in Transcription
  misc_feature: MA Experiment 20001757 PARAMETER Experiment Name: At_50mM_NH4NO3_L-to-H_P Parameter: Timepoint (hr) Value: 6
  misc_feature: MA Experiment 20001757 PARAMETER Experiment Name: At_50mM_NH4NO3_L-to-H_P Parameter: Tissue Value: Leaf
  misc_feature: MA Experiment 20001757 PARAMETER Experiment Name: At_50mM_NH4NO3_L-to-H_P Parameter: Treatment Value: 50mM NH4NO3 vs 100mM Mannitol
acagctcaggatatactcttttaggtttcaacagcagcttagtctctctgatctctctacctccctcacaccctaaaactcagcaacaatggccgttaccttttcagatctacacacagaggagggtgtcaaatccgtggaggagcacctcgccggaaaaacctacatctccggagatcaattgtctgtggatgatgtcaaggtttacgctgccgctccagtgaaacccagcgatgccttccccaatgctagcaagtggtacgagtccgtggcttcccaacttgctaaaagtttccctggaaaggccgttggagtacaattcggtggctctgctgctgctgctccagctgttgaagctgaggtatctttacttgaatgctttattctttattaccatagtcgtagaccttagaaaaagggtaatgaatgtagtttggaactatgatttgaaaggtgatatttccaatcttgtattagggatcacgagctatgtttggtaggggaattgattggagtttggtttggatgttgtgtgtgtgtgtgtgtgtgtttacgctatcttgcataattgtcaacaggcacctgctgcagctgatgatgatgatgacatggatctctttggtgacgagaccgaagaagaaaagaaagctgcagaggagagggaggctgctaagaaggacaccaagaagcctaatgagagtggaaagtcttctgtgctcatggatgttaagccatgggatgatgaaaccgacatgaagaaactggaagaggctgttcgtggtgttgagatgcctggtcttttctggggagcctcaaaacttgtaccagttggttatgggatcaagaaactcacaattatgttcacgattgttgatgacctcgtgtccccggacaacctcattgaagacttcctcacctcagagcctaacaacgagtacatccagagttgtgacattgtcgctttcaacaagatttagagacttcaaatttctccttaccgaaacatatcagaatttcaagttttgttttcgtttgtgttgtttaccgaaatgtttctttcctagttgcaagaccgctttcatgttacaataacactaaattttcaatggttactattccgttgcatcattgttaagaaacatttagatactttgacaaattctcc

SEQ ID NO: 42723 - protein, 122 aa, Arabidopsis thaliana
  peptide (1)..(122): Ceres Seq. ID no. 12385033
  misc_feature (33)..(122): Pfam Name: EF-1 guanine nucleotide exchange domain Pfam Description: EF-1 guanine nucleotide exchange domain
  misc_feature (1)..(122): Homolog of NCBI NO: 3894214 NR Description: elongation factor 1 beta 2
  misc_feature (1)..(122): Homolog of NCBI NO: 38232568 NR Description: translational elongation factor 1 subunit Bbeta
  misc_feature (1)..(122): Homolog of NCBI NO: 6015064 NR Description: ELONGATION FACTOR 1-BETA (EF-1-BETA)
  misc_feature (1)..(122): Homolog of NCBI NO: 34899162 NR Description: putative translation elongation factor eEF-1
  misc_feature (1)..(122): Homolog of NCBI NO: 232031 NR Description: ELONGATION FACTOR 1-BETA' (EF-1-BETA')
  misc_feature (1)..(122): Homolog of NCBI NO: 232033 NR Description: ELONGATION FACTOR 1-BETA' (EF-1-BETA')
  misc_feature (1)..(122): Homolog of NCBI NO: 38175744 NR Description: putative translation elongation factor eEF-1
  misc_feature (1)..(122): Homolog of NCBI NO: 27754711 NR Description: putative elongation factor 1B alpha-subunit
  misc_feature (1)..(122): Homolog of NCBI NO: 15239877 NR Description: elongation factor 1B alpha-subunit
  misc_feature (1)..(122): Homolog of NCBI NO: 30687350 NR Description: elongation factor 1B alpha-subunit [Arabidopsis
MDLFGDETEEEKKAAEEREAAKKDTKKPNESGKSSVLMDVKPWDDETDMKKLEEAVRGVEMPGLFWGASKLVPVGYGIKKLTIMFTIVDDLVSPDNLIEDFLTSEPNNEYIQSCDIVAFNKI

SEQ ID NO: 42724 - protein, 107 aa, Arabidopsis thaliana
  peptide (1)..(107): Ceres Seq. ID no. 12385034
  misc_feature (18)..(65): Pfam Name: Glutathione S-transferase, C-terminal domain Pfam Description: Glutathione S-transferase, C-terminal domain
  misc_feature (1)..(89): Homolog of NCBI NO: 3894214 NR Description: elongation factor 1 beta 2
  misc_feature (1)..(88): Homolog of NCBI NO: 38232568 NR Description: translational elongation factor 1 subunit Bbeta
  misc_feature (1)..(96): Homolog of NCBI NO: 6015064 NR Description: ELONGATION FACTOR 1-BETA (EF-1-BETA)
  misc_feature (1)..(90): Homolog of NCBI NO: 34899162 NR Description: putative translation elongation factor eEF-1
  misc_feature (1)..(90): Homolog of NCBI NO: 232031 NR Description: ELONGATION FACTOR 1-BETA' (EF-1-BETA')
  misc_feature (1)..(91): Homolog of NCBI NO: 232033 NR Description: ELONGATION FACTOR 1-BETA' (EF-1-BETA')
  misc_feature (1)..(90): Homolog of NCBI NO: 38175744 NR Description: putative translation elongation factor eEF-1
  misc_feature (19)..(90): Homolog of NCBI NO: 27754711 NR Description: putative elongation factor 1B alpha-subunit
  misc_feature (1)..(90): Homolog of NCBI NO: 15239877 NR Description: elongation factor 1B alpha-subunit
  misc_feature (1)..(91): Homolog of NCBI NO: 30687350 NR Description: elongation factor 1B alpha-subunit [Arabidopsis
MAVTFSDLHTEEGVKSVEEHLAGKTYISGDQLSVDDVKVYAAAPVKPSDAFPNASKWYESVASQLAKSFPGKAVGVQFGGSAAAAPAVEAEVSLLECFILYYHSRRP

SEQ ID NO: 42725 - protein, 88 aa, Arabidopsis thaliana
  peptide (1)..(88): Ceres Seq. ID no. 12385035
MPSPMLASGTSPWLPNLLKVSLERPLEYNSVALLLLLQLLKLRYLYLNALFFITIVVDLRKRVMNVVWNYDLKGDISNLVLGITSYVW

SEQ ID NO: 42726 - DNA, 1810 bp, Arabidopsis thaliana
  misc_feature (1)..(1810): Ceres Seq. ID no. 13491742
  misc_feature: MA Experiment ID: 20000445 Result: Up-regulated in Transcription
  misc_feature: MA Experiment 20000445 PARAMETER Experiment Name: At_100uM_NAA__P Parameter: Age (day) Value: 14
  misc_feature: MA Experiment 20000445 PARAMETER Experiment Name: At_100uM_NAA__P Parameter: Organism Value: A. thaliana
  misc_feature: MA Experiment 20000445 PARAMETER Experiment Name: At_100uM_NAA__P Parameter: Plant Line Value: WS
  misc_feature: MA Experiment 20000445 PARAMETER Experiment Name: At_100uM_NAA__P Parameter: Timepoint (hr) Value: 6
  misc_feature: MA Experiment 20000445 PARAMETER Experiment Name: At_100uM_NAA__P Parameter: Tissue Value: Aerial
  misc_feature: MA Experiment 20000445 PARAMETER Experiment Name: At_100uM_NAA__P Parameter: Treatment Value: 100uM NAA vs. No Treatment
  misc_feature: MA Experiment ID: 20001450 Result: Up-regulated in Transcription
  misc_feature: MA Experiment 20001450 PARAMETER Experiment Name: At_Far-red-induction_P Parameter: Age (day) Value: 7
  misc_feature: MA Experiment 20001450 PARAMETER Experiment Name: At_Far-red-induction_P Parameter: Light Value: Far-red vs. White
  misc_feature: MA Experiment 20001450 PARAMETER Experiment Name: At_Far-red-induction_P Parameter: Organism Value: A. thaliana
  misc_feature: MA Experiment 20001450 PARAMETER Experiment Name: At_Far-red-induction_P Parameter: Plant Line Value: Columbia
  misc_feature: MA Experiment 20001450 PARAMETER Experiment Name: At_Far-red-induction_P Parameter: Timepoint (hr) Value: 8
  misc_feature: MA Experiment 20001450 PARAMETER Experiment Name: At_Far-red-induction_P Parameter: Tissue Value: Whole Plant
aattctctttgtagagggaagtctgaaaacgccgagaagaagacgaagaagaagaagaagaagaaagcttgagactttctctctgtgtgcaatttcgaaatcgataaagacttcaactttcggttctaacaatgacaatttccgtatagtttgattttgtccacctctttcaccgattacctgatttcatcgctggcgttagtcatcaaatgggagctcgttgctcaaagttctcattctgcttgttcccttctcacttcaaatccgcttcagttctcgagtctcctgatatcgagaatggaggaaaagtgtggccgacttttaaggaattcaaattggagcagctgaaatctgcgaccggaggtttctcttcagacaacattgtatcagaacacggcgagaaagctccaaacgttgtctacagaggaaggcttgatgatggtcgtttgattgctgtcaaacgattcaatcgccttgcttgggctgatcatcgacagttcctggatgaagctaaagctgttgggagcttgaggagtgatagattagcgaatctgattggatgttgctttgaaggagaagagagattactagttgctgagtttatgcctcatgaaacgcttgcaaagcatcttttccactgggagaataatccgatgaaatgggcgatgagattaagagttgcattgtgtttagcacaagcattggaatattgtagtaataaagggagagctttgtatcatgatctcaatgcttacagggttttgtttgacaaggatgggaatcccaggttgtcttgttttggactcatgaaaaatagcagagatgggaagagttatagcacaaacttggcatttactcctccagagtatttgcgaacgggtagagttacaccagagagtgttgtattcagttttggaaccgttttgctcgatctcatgagtggaaaacatattccaccgagtcatgcgcttgacctaatcagaggcaagaactgtgcaatgttaatggattctgctctcgagggtcatttctcaaacgaagacggaactgagctagtacgcttagccacacgttgtctgcagtatgaagctcgagaaagaccaaatgtgaaatctctcgtgacttcacttgtcacactccagaaggaatctgatgtagcttcctacgttcttatgggtataccccatgaaaccgaggctgaagaagagtctccgctttctttgacaccctttggtgatgcatgcttaagagtggatcttacagccatacaggaaatactcagtaagattggatacaaggatgatgaaggaattgccaatgagctctcgtttcaaatgtggaccaatcagatgcaggaatctctcaattcgaagaagcaaggcgacttagctttccgttccaaagattttacaaccgcggtcgattgctacactcagttcatagatgggggaacaatggtgtcaccaacagtacacgcacggcggtgcttgtcatatctgatgaacgacaacgcacaagaggctctgacagatgcattgcaggcacaggttgtgtctccggattggccaaccgccttgtatctgcaagcggcttgcttgttcaagctgggtatggaagccgatgctcagcaagctcttaaggatgggactacattggaagctaagaagagtaacaagcgctgataaaatagcgttttcaaaagcttttgtatatgctttattttgtttcctttctctctatttccatctatatgcgcatacatacacatatgcgggtgtatttattatatatgtgcatatacttttgatgc

SEQ ID NO: 42727 - protein, 490 aa, Arabidopsis thaliana
  peptide (1)..(490): Ceres Seq. ID no. 13491743
  misc_feature (31)..(486): Homolog of NCBI NO: 18418600 NR Description: protein kinase family [Arabidopsis thaliana]
  misc_feature (36)..(488): Homolog of NCBI NO: 37537032 NR Description: putative protein kinase [Oryza sativa (japonica
  misc_feature (1)..(486): Homolog of NCBI NO: 15223469 NR Description: protein kinase family [Arabidopsis thaliana]
  misc_feature (1)..(487): Homolog of NCBI NO: 34897368 NR Description: putative protein kinase [Oryza sativa]
  misc_feature (1)..(485): Homolog of NCBI NO: 7486564 NR Description: hypothetical protein F6N23.9 - Arabidopsis
  misc_feature (1)..(487): Homolog of NCBI NO: 15237604 NR Description: protein kinase family [Arabidopsis thaliana]
  misc_feature (1)..(485): Homolog of NCBI NO: 22328189 NR Description: protein kinase family [Arabidopsis thaliana]
  misc_feature (1)..(490): Homolog of NCBI NO: 22327962 NR Description: protein kinase - related [Arabidopsis thaliana]
  misc_feature (1)..(490): Homolog of NCBI NO: 21553556 NR Description: protein kinase-like protein [Arabidopsis thaliana]
  misc_feature (1)..(490): Homolog of NCBI NO: 15232406 NR Description: protein kinase family [Arabidopsis thaliana]
MGARCSKFSFCLFPSHFKSASVLESPDIENGGKVWPTFKEFKLEQLKSATGGFSSDNIVSEHGEKAPNVVYRGRLDDGRLIAVKRFNRLAWADHRQFLDEAKAVGSLRSDRLANLIGCCFEGEERLLVAEFMPHETLAKHLFHWENNPMKWAMRLRVALCLAQALEYCSNKGRALYHDLNAYRVLFDKDGNPRLSCFGLMKNSRDGKSYSTNLAFTPPEYLRTGRVTPESVVFSFGTVLLDLMSGKHIPPSHALDLIRGKNCAMLMDSALEGHFSNEDGTELVRLATRCLQYEARERPNVKSLVTSLVTLQKESDVASYVLMGIPHETEAEEESPLSLTPFGDACLRVDLTAIQEILSKIGYKDDEGIANELSFQMWTNQMQESLNSKKQGDLAFRSKDFTTAVDCYTQFIDGGTMVSPTVHARRCLSYLMNDNAQEALTDALQAQVVSPDWPTALYLQAACLFKLGMEADAQQALKDGTTLEAKKSNKR

SEQ ID NO: 42728 - protein, 359 aa, Arabidopsis thaliana
  peptide (1)..(359): Ceres Seq. ID no. 13491744
  misc_feature (1)..(355): Homolog of NCBI NO: 18418600 NR Description: protein kinase family [Arabidopsis thaliana]
  misc_feature (1)..(357): Homolog of NCBI NO: 37537032 NR Description: putative protein kinase [Oryza sativa (japonica
  misc_feature (1)..(355): Homolog of NCBI NO: 15223469 NR Description: protein kinase family [Arabidopsis thaliana]
  misc_feature (1)..(356): Homolog of NCBI NO: 34897368 NR Description: putative protein kinase [Oryza sativa]
  misc_feature (1)..(354): Homolog of NCBI NO: 7486564 NR Description: hypothetical protein F6N23.9 - Arabidopsis
  misc_feature (1)..(356): Homolog of NCBI NO: 15237604 NR Description: protein kinase family [Arabidopsis thaliana]
  misc_feature (1)..(354): Homolog of NCBI NO: 22328189 NR Description: protein kinase family [Arabidopsis thaliana]
  misc_feature (1)..(359): Homolog of NCBI NO: 22327962 NR Description: protein kinase - related [Arabidopsis thaliana]
  misc_feature (1)..(359): Homolog of NCBI NO: 21553556 NR Description: protein kinase-like protein [Arabidopsis thaliana]
  misc_feature (1)..(359): Homolog of NCBI NO: 15232406 NR Description: protein kinase family [Arabidopsis thaliana]
MPHETLAKHLFHWENNPMKWAMRLRVALCLAQALEYCSNKGRALYHDLNAYRVLFDKDGNPRLSCFGLMKNSRDGKSYSTNLAFTPPEYLRTGRVTPESVVFSFGTVLLDLMSGKHIPPSHALDLIRGKNCAMLMDSALEGHFSNEDGTELVRLATRCLQYEARERPNVKSLVTSLVTLQKESDVASYVLMGIPHETEAEEESPLSLTPFGDACLRVDLTAIQEILSKIGYKDDEGIANELSFQMWTNQMQESLNSKKQGDLAFRSKDFTTAVDCYTQFIDGGTMVSPTVHARRCLSYLMNDNAQEALTDALQAQVVSPDWPTALYLQAACLFKLGMEADAQQALKDGTTLEAKKSNKR

SEQ ID NO: 42729 - protein, 342 aa, Arabidopsis thaliana
  peptide (1)..(342): Ceres Seq. ID no. 13491745
  misc_feature (1)..(338): Homolog of NCBI NO: 18418600 NR Description: protein kinase family [Arabidopsis thaliana]
  misc_feature (1)..(340): Homolog of NCBI NO: 37537032 NR Description: putative protein kinase [Oryza sativa (japonica
  misc_feature (1)..(338): Homolog of NCBI NO: 15223469 NR Description: protein kinase family [Arabidopsis thaliana]
  misc_feature (1)..(339): Homolog of NCBI NO: 34897368 NR Description: putative protein kinase [Oryza sativa]
  misc_feature (1)..(337): Homolog of NCBI NO: 7486564 NR Description: hypothetical protein F6N23.9 - Arabidopsis
  misc_feature (1)..(339): Homolog of NCBI NO: 15237604 NR Description: protein kinase family [Arabidopsis thaliana]
  misc_feature (1)..(337): Homolog of NCBI NO: 22328189 NR Description: protein kinase family [Arabidopsis thaliana]
  misc_feature (1)..(342): Homolog of NCBI NO: 22327962 NR Description: protein kinase - related [Arabidopsis thaliana]
  misc_feature (1)..(342): Homolog of NCBI NO: 21553556 NR Description: protein kinase-like protein [Arabidopsis thaliana]
  misc_feature (1)..(342): Homolog of NCBI NO: 15232406 NR Description: protein kinase family [Arabidopsis thaliana]
MKWAMRLRVALCLAQALEYCSNKGRALYHDLNAYRVLFDKDGNPRLSCFGLMKNSRDGKSYSTNLAFTPPEYLRTGRVTPESVVFSFGTVLLDLMSGKHIPPSHALDLIRGKNCAMLMDSALEGHFSNEDGTELVRLATRCLQYEARERPNVKSLVTSLVTLQKESDVASYVLMGIPHETEAEEESPLSLTPFGDACLRVDLTAIQEILSKIGYKDDEGIANELSFQMWTNQMQESLNSKKQGDLAFRSKDFTTAVDCYTQFIDGGTMVSPTVHARRCLSYLMNDNAQEALTDALQAQVVSPDWPTALYLQAACLFKLGMEADAQQALKDGTTLEAKKSNKR

SEQ ID NO: 42730 - DNA, 1226 bp, Arabidopsis thaliana
  misc_feature (1)..(1226): Ceres Seq. ID no. 13499672
  misc_feature: MA Experiment ID: 108434 Result: Up-regulated in Transcription
  misc_feature: MA Experiment 108434 PARAMETER Experiment Name: At_Root_Tips_cDNA_P Parameter: Tissue Value: Root Tips
  misc_feature: Phenotype: WHOLE PLANT Size-Small
  misc_feature: Phenotype: WHOLE PLANT Size-Small
  misc_feature: Phenotype: FERTILITY Fertility-Reduced
  misc_feature: Phenotype: ROSETTE LEAVES Other
  misc_feature: Phenotype: WHOLE PLANT Size-Small
  misc_feature: Phenotype: WHOLE PLANT Size-Small
  misc_feature: Phenotype: FERTILITY Fertility-Reduced
  misc_feature: Phenotype: WHOLE PLANT Size-Small
  misc_feature: Phenotype: WHOLE PLANT Size-Small
  misc_feature: Phenotype: INFLORESCENCE Height-Short
  misc_feature: Phenotype: INFLORESCENCE Strength-Strong
  misc_feature: Phenotype: FERTILITY Fertility-Sterile
  misc_feature: Phenotype: WHOLE PLANT Color-Dark Green
  misc_feature: Phenotype: WHOLE PLANT Color-Dark Green
  misc_feature: Phenotype: INFLORESCENCE Height-Short
  misc_feature: Phenotype: INFLORESCENCE Strength-Strong
  misc_feature: Phenotype: INFLORESCENCE Strength-Strong
  misc_feature: Phenotype: WHOLE PLANT Color-Dark Green
  misc_feature: Phenotype: INFLORESCENCE Height-Short
  misc_feature: Phenotype: INFLORESCENCE Strength-Strong
  misc_feature: Phenotype: INFLORESCENCE Strength-Strong
  misc_feature: Phenotype: WHOLE PLANT Color-Dark Green
  misc_feature: Phenotype: INFLORESCENCE Height-Short
  misc_feature: Phenotype: INFLORESCENCE Strength-Strong
  misc_feature: Phenotype: INFLORESCENCE Strength-Strong
gacccacgcgtccgaattcatcaaaggagaagagatcgacaatggcaccttcgtcatcaagcggtttaaccttcaagctacatcctttggtaatcgtcaacatatcggatcactacactagggtcaaaactcagctcaatcctcctgcttcaatctgcgcaagcggccatggctcaaacaacggcgaagcaatgttccagcaaaaccctagggtttacggatgtgtgatcggtgtccagagaggtcgtactgttgagatattcaacagtttcgagcttttatatgatccttctactcaaacccttgatagatctttcctcgagaagaagcaagagctctataagaaggtgttccctgatttctatattctgggatggtactctacgggaagtgatgctgaggaatctgatatgcatatccataaagctttgatggatatcaatgaatctcctgtttatgtgcttttaaaccctgctatcaatcacacacagaaggatcttccagtgactatttatgaaagtgaattgcatgtcattgatggaatcccgcagctaattttcgctcatacaagctacacaatcgagacagttgaagctgaacggatatcagttgatcatgttgcacatcttaaaccatctgacggaggctcagcagcaacccagttggctgctcatcttactggtatacatagtgccatcaagatgcttaatagcagaatcagagtgctttaccaaaatcttgctgcaatgcagaaaggtgataaatcttgtgacaactcagttctgagacaagtatctagcctgctaagaagattgcctgccatggaatcagagagatttcaagataatttcttgatggagtacaacgacaaattactaataacttacctagcgatgattacaaattgttccagcaacatgaacgagatggtcgacaaattcaacaccgcatatgacagaaacactcgaagaggtggaagaactgcattcatgtaaaagatcctttccagcgattctagttctaaagatcttctcttggttcctgaaaccatttttaacattgcctctgtgagaatctataactcagacggcaagactttatcctcttcattgtttctatatctataagaacatctgcttatctatcaaagctcttgtttgatcttgaacaagtttctattgttagtaaaaagattttaaggtttgattctatcagtctctctagtt

SEQ ID NO: 42731 - protein, 330 aa, Arabidopsis thaliana
  peptide (1)..(330): Ceres Seq. ID no. 13499673
  misc_feature (19)..(149): Pfam Name: Mov34/MPN/PAD-1 family Pfam Description: Mov34/MPN/PAD-1 family
  misc_feature (12)..(61): Homolog of NCBI NO: 33563284 NR Description: COP9 signalosome subunit 6
  misc_feature (70)..(319): Homolog of NCBI NO: 33563284 NR Description: COP9 signalosome subunit 6
  misc_feature (14)..(274): Homolog of NCBI NO: 7486780 NR Description: hypothetical protein M3E9.140 - Arabidopsis
  misc_feature (108)..(330): Homolog of NCBI NO: 19347926 NR Description: unknown protein [Arabidopsis thaliana]
  misc_feature (14)..(274): Homolog of NCBI NO: 9758401 NR Description: transcription factor-like
  misc_feature (108)..(330): Homolog of NCBI NO: 28393281 NR Description: putative COP9 complex subunit 6 CSN6 [Arabidopsis
  misc_feature (14)..(330): Homolog of NCBI NO: 17940314 NR Description: COP9 signalosome subunit 6 [Arabidopsis thaliana]
  misc_feature (14)..(330): Homolog of NCBI NO: 18416749 NR Description: COP9 signalosome subunit 6 (CSN6B), CSN complex
  misc_feature (14)..(330): Homolog of NCBI NO: 18056665 NR Description: CSN complex subunit 6A [Arabidopsis thaliana]
  misc_feature (14)..(330): Homolog of NCBI NO: 18423847 NR Description: COP9 complex subunit 6 CSN6, putative
PTRPNSSKEKRSTMAPSSSSGLTFKLHPLVIVNISDHYTRVKTQLNPPASICASGHGSNNGEAMFQQNPRVYGCVIGVQRGRTVEIFNSFELLYDPSTQTLDRSFLEKKQELYKKVFPDFYILGWYSTGSDAEESDMHIHKALMDINESPVYVLLNPAINHTQKDLPVTIYESELHVIDGIPQLIFAHTSYTIETVEAERISVDHVAHLKPSDGGSAATQLAAHLTGIHSAIKMLNSRIRVLYQNLAAMQKGDKSCDNSVLRQVSSLLRRLPAMESERFQDNFLMEYNDKLLITYLAMITNCSSNMNEMVDKFNTAYDRNTRRGGRTAFM

SEQ ID NO: 42732 - protein, 317 aa, Arabidopsis thaliana
  peptide (1)..(317): Ceres Seq. ID no. 13499674
  misc_feature (6)..(136): Pfam Name: Mov34/MPN/PAD-1 family Pfam Description: Mov34/MPN/PAD-1 family
  misc_feature (1)..(48): Homolog of NCBI NO: 33563284 NR Description: COP9 signalosome subunit 6
  misc_feature (57)..(306): Homolog of NCBI NO: 33563284 NR Description: COP9 signalosome subunit 6
  misc_feature (1)..(261): Homolog of NCBI NO: 7486780 NR Description: hypothetical protein M3E9.140 - Arabidopsis
  misc_feature (95)..(317): Homolog of NCBI NO: 19347926 NR Description: unknown protein [Arabidopsis thaliana]
  misc_feature (1)..(261): Homolog of NCBI NO: 9758401 NR Description: transcription factor-like
  misc_feature (95)..(317): Homolog of NCBI NO: 28393281 NR Description: putative COP9 complex subunit 6 CSN6 [Arabidopsis
  misc_feature (1)..(317): Homolog of NCBI NO: 17940314 NR Description: COP9 signalosome subunit 6 [Arabidopsis thaliana]
  misc_feature (1)..(317): Homolog of NCBI NO: 18416749 NR Description: COP9 signalosome subunit 6 (CSN6B), CSN complex
  misc_feature (1)..(317): Homolog of NCBI NO: 18056665 NR Description: CSN complex subunit 6A [Arabidopsis thaliana]
  misc_feature (1)..(317): Homolog of NCBI NO: 18423847 NR Description: COP9 complex subunit 6 CSN6, putative
MAPSSSSGLTFKLHPLVIVNISDHYTRVKTQLNPPASICASGHGSNNGEAMFQQNPRVYGCVIGVQRGRTVEIFNSFELLYDPSTQTLDRSFLEKKQELYKKVFPDFYILGWYSTGSDAEESDMHIHKALMDINESPVYVLLNPAINHTQKDLPVTIYESELHVIDGIPQLIFAHTSYTIETVEAERISVDHVAHLKPSDGGSAATQLAAHLTGIHSAIKMLNSRIRVLYQNLAAMQKGDKSCDNSVLRQVSSLLRRLPAMESERFQDNFLMEYNDKLLITYLAMITNCSSNMNEMVDKFNTAYDRNTRRGGRTAFM

SEQ ID NO: 42733 - protein, 267 aa, Arabidopsis thaliana
  peptide (1)..(267): Ceres Seq. ID no. 13499675
  misc_feature (1)..(86): Pfam Name: Mov34/MPN/PAD-1 family Pfam Description: Mov34/MPN/PAD-1 family
  misc_feature (7)..(256): Homolog of NCBI NO: 34147637 NR Description: COP9 subunit 6 (MOV34 homolog, 34 kD) [Homo
  misc_feature (7)..(256): Homolog of NCBI NO: 33563284 NR Description: COP9 signalosome subunit 6
  misc_feature (1)..(211): Homolog of NCBI NO: 7486780 NR Description: hypothetical protein M3E9.140 - Arabidopsis
  misc_feature (45)..(267): Homolog of NCBI NO: 19347926 NR Description: unknown protein [Arabidopsis thaliana]
  misc_feature (1)..(211): Homolog of NCBI NO: 9758401 NR Description: transcription factor-like
  misc_feature (45)..(267): Homolog of NCBI NO: 28393281 NR Description: putative COP9 complex subunit 6 CSN6 [Arabidopsis
  misc_feature (1)..(267): Homolog of NCBI NO: 17940314 NR Description: COP9 signalosome subunit 6 [Arabidopsis thaliana]
  misc_feature (1)..(267): Homolog of NCBI NO: 18416749 NR Description: COP9 signalosome subunit 6 (CSN6B), CSN complex
  misc_feature (1)..(267): Homolog of NCBI NO: 18056665 NR Description: CSN complex subunit 6A [Arabidopsis thaliana]
  misc_feature (1)..(267): Homolog of NCBI NO: 18423847 NR Description: COP9 complex subunit 6 CSN6, putative
MFQQNPRVYGCVIGVQRGRTVEIFNSFELLYDPSTQTLDRSFLEKKQELYKKVFPDFYILGWYSTGSDAEESDMHIHKALMDINESPVYVLLNPAINHTQKDLPVTIYESELHVIDGIPQLIFAHTSYTIETVEAERISVDHVAHLKPSDGGSAATQLAAHLTGIHSAIKMLNSRIRVLYQNLAAMQKGDKSCDNSVLRQVSSLLRRLPAMESERFQDNFLMEYNDKLLITYLAMITNCSSNMNEMVDKFNTAYDRNTRRGGRTAFM

SEQ ID NO: 42734 - DNA, 1524 bp, Arabidopsis thaliana
  misc_feature (1)..(1524): Ceres Seq. ID no. 13488327
  misc_feature: MA Experiment ID: 108434 Result: Down-regulated in Transcription
  misc_feature: MA Experiment 108434 PARAMETER Experiment Name: At_Root_Tips_cDNA_P Parameter: Tissue Value: Root Tips
  misc_feature: MA Experiment ID: 108462 Result: Up-regulated in Transcription
  misc_feature: MA Experiment 108462 PARAMETER Experiment Name: At_Germinating_Seeds_cDNA_P Parameter: Age (day) Value: 2 vs. 0
  misc_feature: MA Experiment 108462 PARAMETER Experiment Name: At_Germinating_Seeds_cDNA_P Parameter: Tissue Value: Germinating Seeds
  misc_feature: MA Experiment ID: 108463 Result: Up-regulated in Transcription
  misc_feature: MA Experiment 108463 PARAMETER Experiment Name: At_Germinating_Seeds_cDNA_P Parameter: Age (day) Value: 3 vs. 0
  misc_feature: MA Experiment 108463 PARAMETER Experiment Name: At_Germinating_Seeds_cDNA_P Parameter: Tissue Value: Germinating Seeds
  misc_feature: MA Experiment ID: 108464 Result: Up-regulated in Transcription
  misc_feature: MA Experiment 108464 PARAMETER Experiment Name: At_Germinating_Seeds_cDNA_P Parameter: Age (day) Value: 4 vs. 0
  misc_feature: MA Experiment 108464 PARAMETER Experiment Name: At_Germinating_Seeds_cDNA_P Parameter: Tissue Value: Germinating Seeds
  misc_feature: MA Experiment ID: 108469 Result: Up-regulated in Transcription
  misc_feature: MA Experiment ID: 108488 Result: Down-regulated in Transcription
  misc_feature: MA Experiment ID: 108489 Result: Up-regulated in Transcription
  misc_feature: MA Experiment ID: 108573 Result: Up-regulated in Transcription
  misc_feature: MA Experiment 108573 PARAMETER Experiment Name: At_Drought_cDNA_P Parameter: Timepoint (hr) Value: 6
  misc_feature: MA Experiment 108573 PARAMETER Experiment Name: At_Drought_cDNA_P Parameter: Tissue Value: Aerial
  misc_feature: MA Experiment 108573 PARAMETER Experiment Name: At_Drought_cDNA_P Parameter: Treatment Value: Drought vs. No Drought
  misc_feature: MA Experiment ID: 108585 Result: Up-regulated in Transcription
  misc_feature: MA Experiment 108585 PARAMETER Experiment Name: At_5mM_NaNP_cDNA_P Parameter: Timepoint (hr) Value: 6
  misc_feature: MA Experiment 108585 PARAMETER Experiment Name: At_5mM_NaNP_cDNA_P Parameter: Tissue Value: Aerial
  misc_feature: MA Experiment 108585 PARAMETER Experiment Name: At_5mM_NaNP_cDNA_P Parameter: Treatment Value: null
  misc_feature: MA Experiment ID: 108668 Result: Up-regulated in Transcription
  misc_feature: MA Experiment 108668 PARAMETER Experiment Name: At_2mM_SA_cDNA_P Parameter: Plant Line Value: WS
  misc_feature: MA Experiment 108668 PARAMETER Experiment Name: At_2mM_SA_cDNA_P Parameter: Timepoint (hr) Value: 6
  misc_feature: MA Experiment 108668 PARAMETER Experiment Name: At_2mM_SA_cDNA_P Parameter: Treatment Value: 2mM SA vs. No Treatment
  misc_feature: MA Experiment ID: 20000069 Result: Up-regulated in Transcription
  misc_feature: MA Experiment 20000069 PARAMETER Experiment Name: At_100uM_ABA_Mutants_cDNA_P Parameter: Plant Line Value: CS23
  misc_feature: MA Experiment 20000069 PARAMETER Experiment Name: At_100uM_ABA_Mutants_cDNA_P Parameter: Timepoint (hr) Value: 6
  misc_feature: MA Experiment 20000069 PARAMETER Experiment Name: At_100uM_ABA_Mutants_cDNA_P Parameter: Tissue Value: Aerial
  misc_feature: MA Experiment 20000069 PARAMETER Experiment Name: At_100uM_ABA_Mutants_cDNA_P Parameter: Treatment Value: 100uM ABA vs. No Treatment
  misc_feature: MA Experiment ID: 20000071 Result: Up-regulated in Transcription
  misc_feature: MA Experiment 20000071 PARAMETER Experiment Name: At_100uM_ABA_Mutants_cDNA_P Parameter: Plant Line Value: CS8104
  misc_feature: MA Experiment 20000071 PARAMETER Experiment Name: At_100uM_ABA_Mutants_cDNA_P Parameter: Timepoint (hr) Value: 6
  misc_feature: MA Experiment 20000071 PARAMETER Experiment Name: At_100uM_ABA_Mutants_cDNA_P Parameter: Tissue Value: Aerial
  misc_feature: MA Experiment 20000071 PARAMETER Experiment Name: At_100uM_ABA_Mutants_cDNA_P Parameter: Treatment Value: 100uM ABA vs. No Treatment
  misc_feature: MA Experiment ID: 20000072 Result: Up-regulated in Transcription
  misc_feature: MA Experiment 20000072 PARAMETER Experiment Name: At_100uM_ABA_Mutants_cDNA_P Parameter: Plant Line Value: CS8105
  misc_feature: MA Experiment 20000072 PARAMETER Experiment Name: At_100uM_ABA_Mutants_cDNA_P Parameter: Timepoint (hr) Value: 6
  misc_feature: MA Experiment 20000072 PARAMETER Experiment Name: At_100uM_ABA_Mutants_cDNA_P Parameter: Tissue Value: Aerial
  misc_feature: MA Experiment 20000072 PARAMETER Experiment Name: At_100uM_ABA_Mutants_cDNA_P Parameter: Treatment Value: 100uM ABA vs. No Treatment
  misc_feature: MA Experiment ID: 20000086 Result: Up-regulated in Transcription
  misc_feature: MA Experiment 20000086 PARAMETER Experiment Name: At_100uM_ABA_Mutants_cDNA_P Parameter: Plant Line Value: CS22
  misc_feature: MA Experiment 20000086 PARAMETER Experiment Name: At_100uM_ABA_Mutants_cDNA_P Parameter: Timepoint (hr) Value: 6
  misc_feature: MA Experiment 20000086 PARAMETER Experiment Name: At_100uM_ABA_Mutants_cDNA_P Parameter: Tissue Value: Aerial
  misc_feature: MA Experiment 20000086 PARAMETER Experiment Name: At_100uM_ABA_Mutants_cDNA_P Parameter: Treatment Value: 100uM ABA vs. No Treatment
  misc_feature: MA Experiment ID: 20000087 Result: Up-regulated in Transcription
  misc_feature: MA Experiment 20000087 PARAMETER Experiment Name: At_100uM_ABA_Mutants_cDNA_P Parameter: Plant Line Value: WS
  misc_feature: MA Experiment 20000087 PARAMETER Experiment Name: At_100uM_ABA_Mutants_cDNA_P Parameter: Timepoint (hr) Value: 6
  misc_feature: MA Experiment 20000087 PARAMETER Experiment Name: At_100uM_ABA_Mutants_cDNA_P Parameter: Tissue Value: Aerial
  misc_feature: MA Experiment 20000087 PARAMETER Experiment Name: At_100uM_ABA_Mutants_cDNA_P Parameter: Treatment Value: 100uM ABA vs. No Treatment
  misc_feature: MA Experiment ID: 20000182 Result: Up-regulated in Transcription
  misc_feature: MA Experiment 20000182 PARAMETER Experiment Name: At_2mM_SA_P Parameter: Age (day) Value: 14
  misc_feature: MA Experiment 20000182 PARAMETER Experiment Name: At_2mM_SA_P Parameter: Organism Value: A. thaliana
  misc_feature: MA Experiment 20000182 PARAMETER Experiment Name: At_2mM_SA_P Parameter: Plant Line Value: WS
  misc_feature: MA Experiment 20000182 PARAMETER Experiment Name: At_2mM_SA_P Parameter: Timepoint (hr) Value: 6
  misc_feature: MA Experiment 20000182 PARAMETER Experiment Name: At_2mM_SA_P Parameter: Tissue Value: Aerial
  misc_feature: MA Experiment 20000182 PARAMETER Experiment Name: At_2mM_SA_P Parameter: Treatment Value: 2mM SA vs. No Treatment
  misc_feature: MA Experiment ID: 20000185 Result: Up-regulated in Transcription
  misc_feature: MA Experiment 20000185 PARAMETER Experiment Name: At_Roots__P Parameter: Age (day) Value: 7 vs. 21
  misc_feature: MA Experiment 20000185 PARAMETER Experiment Name: At_Roots__P Parameter: Organism Value: A. thaliana
  misc_feature: MA Experiment 20000185 PARAMETER Experiment Name: At_Roots__P Parameter: Tissue Value: Roots vs. Whole Plant
  misc_feature: MA Experiment ID: 20000265 Result: Down-regulated in Transcription
  misc_feature: MA Experiment 20000265 PARAMETER Experiment Name: At_Open_Flower_P Parameter: Age (day) Value: 21
  misc_feature: MA Experiment 20000265 PARAMETER Experiment Name: At_Open_Flower_P Parameter: Plant Line Value: WS
  misc_feature: MA Experiment 20000265 PARAMETER Experiment Name: At_Open_Flower_P Parameter: Tissue Value: Closed Flower vs. Whole Plant
  misc_feature: MA Experiment ID: 20000267 Result: Up-regulated in Transcription
  misc_feature: MA Experiment 20000267 PARAMETER Experiment Name: At_Drought_P Parameter: Age (day) Value: 7
  misc_feature: MA Experiment 20000267 PARAMETER Experiment Name: At_Drought_P Parameter: Organism Value: A. thaliana
  misc_feature: MA Experiment 20000267 PARAMETER Experiment Name: At_Drought_P Parameter: Plant Line Value: WS
  misc_feature: MA Experiment 20000267 PARAMETER Experiment Name: At_Drought_P Parameter: Timepoint (hr) Value: 6
  misc_feature: MA Experiment 20000267 PARAMETER Experiment Name: At_Drought_P Parameter: Tissue Value: Whole Plant
  misc_feature: MA Experiment 20000267 PARAMETER Experiment Name: At_Drought_P Parameter: Treatment Value: Drought vs. No Drought
  misc_feature: MA Experiment ID: 20000436 Result: Up-regulated in Transcription
  misc_feature: MA Experiment 20000436 PARAMETER Experiment Name: At_Drought_P Parameter: Age (day) Value: 7
  misc_feature: MA Experiment 20000436 PARAMETER Experiment Name: At_Drought_P Parameter: Organism Value: A. thaliana
  misc_feature: MA Experiment 20000436 PARAMETER Experiment Name: At_Drought_P Parameter: Plant Line Value: WS
  misc_feature: MA Experiment 20000436 PARAMETER Experiment Name: At_Drought_P Parameter: Timepoint (hr) Value: 12
  misc_feature: MA Experiment 20000436 PARAMETER Experiment Name: At_Drought_P Parameter: Tissue Value: Whole Plant
  misc_feature: MA Experiment 20000436 PARAMETER Experiment Name: At_Drought_P Parameter: Treatment Value: Drought vs. No Drought
  misc_feature: MA Experiment ID: 20000437 Result: Up-regulated in Transcription
  misc_feature: MA Experiment 20000437 PARAMETER Experiment Name: At_Drought_P Parameter: Age (day) Value: 8
  misc_feature: MA Experiment 20000437 PARAMETER Experiment Name: At_Drought_P Parameter: Organism Value: A. thaliana
  misc_feature: MA Experiment 20000437 PARAMETER Experiment Name: At_Drought_P Parameter: Plant Line Value: WS
  misc_feature: MA Experiment 20000437 PARAMETER Experiment Name: At_Drought_P Parameter: Timepoint (hr) Value: 24
  misc_feature: MA Experiment 20000437 PARAMETER Experiment Name: At_Drought_P Parameter: Tissue Value: Whole Plant
  misc_feature: MA Experiment 20000437 PARAMETER Experiment Name: At_Drought_P Parameter: Treatment Value: Drought vs. No Drought
  misc_feature: MA Experiment ID: 20000439 Result: Up-regulated in Transcription
  misc_feature: MA Experiment 20000439 PARAMETER Experiment Name: At_Roots__P Parameter: Age (day) Value: 14 vs. 21
  misc_feature: MA Experiment 20000439 PARAMETER Experiment Name: At_Roots__P Parameter: Organism Value: A. thaliana
  misc_feature: MA Experiment 20000439 PARAMETER Experiment Name: At_Roots__P Parameter: Tissue Value: Roots vs. Whole Plant
  misc_feature: MA Experiment ID: 20000453 Result: Up-regulated in Transcription
  misc_feature: MA Experiment 20000453 PARAMETER Experiment Name: At_100uM_ABA_P Parameter: Age (day) Value: 15
  misc_feature: MA Experiment 20000453 PARAMETER Experiment Name: At_100uM_ABA_P Parameter: Organism Value: A. thaliana
  misc_feature: MA Experiment 20000453 PARAMETER Experiment Name: At_100uM_ABA_P Parameter: Plant Line Value: WS
  misc_feature: MA Experiment 20000453 PARAMETER Experiment Name: At_100uM_ABA_P Parameter: Timepoint (hr) Value: 24
  misc_feature: MA Experiment 20000453 PARAMETER Experiment Name: At_100uM_ABA_P Parameter: Tissue Value: Aerial
  misc_feature: MA Experiment 20000453 PARAMETER Experiment Name: At_100uM_ABA_P Parameter: Treatment Value: 100uM ABA vs. No Treatment
  misc_feature: MA Experiment ID: 20001557 Result: Up-regulated in Transcription
  misc_feature: MA Experiment 20001557 PARAMETER Experiment Name: At_Drought_Soil_Dry_P Parameter: Age (day) Value: 27
  misc_feature: MA Experiment 20001557 PARAMETER Experiment Name: At_Drought_Soil_Dry_P Parameter: Organism Value: A. thaliana
  misc_feature: MA Experiment 20001557 PARAMETER Experiment Name: At_Drought_Soil_Dry_P Parameter: Plant Line Value: WS
  misc_feature: MA Experiment 20001557 PARAMETER Experiment Name: At_Drought_Soil_Dry_P Parameter: Post Timepoint (hr) Value: 3
  misc_feature: MA Experiment 20001557 PARAMETER Experiment Name: At_Drought_Soil_Dry_P Parameter: Post-Treatment Value: Re-Water vs. No Drought
  misc_feature: MA Experiment 20001557 PARAMETER Experiment Name: At_Drought_Soil_Dry_P Parameter: Timepoint (day) Value: 13
  misc_feature: MA Experiment 20001557 PARAMETER Experiment Name: At_Drought_Soil_Dry_P Parameter: Treatment Value: Drought vs. No Drought
  misc_feature: MA Experiment ID: 20001906 Result: Up-regulated in Transcription
  misc_feature: MA Experiment 20001906 PARAMETER Experiment Name: At_Drought_Reproduction_P Parameter: Age (day) Value: 35
  misc_feature: MA Experiment 20001906 PARAMETER Experiment Name: At_Drought_Reproduction_P Parameter: Organism Value: A. thaliana
  misc_feature: MA Experiment 20001906 PARAMETER Experiment Name: At_Drought_Reproduction_P Parameter: Plant Line Value: WS
  misc_feature: MA Experiment 20001906 PARAMETER Experiment Name: At_Drought_Reproduction_P Parameter: Timepoint (day) Value: 5
  misc_feature: MA Experiment 20001906 PARAMETER Experiment Name: At_Drought_Reproduction_P Parameter: Tissue Value: Siliques
  misc_feature: MA Experiment 20001906 PARAMETER Experiment Name: At_Drought_Reproduction_P Parameter: Treatment Value: Drought vs. No Drought
  misc_feature: MA Experiment ID: 20001908 Result: Up-regulated in Transcription
  misc_feature: MA Experiment 20001908 PARAMETER Experiment Name: At_Drought_Reproduction_P Parameter: Age (day) Value: 40
  misc_feature: MA Experiment 20001908 PARAMETER Experiment Name: At_Drought_Reproduction_P Parameter: Organism Value: A. thaliana
  misc_feature: MA Experiment 20001908 PARAMETER Experiment Name: At_Drought_Reproduction_P Parameter: Plant Line Value: WS
  misc_feature: MA Experiment 20001908 PARAMETER Experiment Name: At_Drought_Reproduction_P Parameter: Timepoint (day) Value: 10
  misc_feature: MA Experiment 20001908 PARAMETER Experiment Name: At_Drought_Reproduction_P Parameter: Tissue Value: Siliques
  misc_feature: MA Experiment 20001908 PARAMETER Experiment Name: At_Drought_Reproduction_P Parameter: Treatment Value: Drought vs. No Drought
  misc_feature: MA Experiment ID: 20001911 Result: Up-regulated in Transcription
  misc_feature: MA Experiment 20001911 PARAMETER Experiment Name: At_Drought_Reproduction_P Parameter: Age (day) Value: 40
  misc_feature: MA Experiment 20001911 PARAMETER Experiment Name: At_Drought_Reproduction_P Parameter: Organism Value: A. thaliana
  misc_feature: MA Experiment 20001911 PARAMETER Experiment Name: At_Drought_Reproduction_P Parameter: Plant Line Value: WS
  misc_feature: MA Experiment 20001911 PARAMETER Experiment Name: At_Drought_Reproduction_P Parameter: Timepoint (day) Value: 10
  misc_feature: MA Experiment 20001911 PARAMETER Experiment Name: At_Drought_Reproduction_P Parameter: Tissue Value: Flowers
  misc_feature: MA Experiment 20001911 PARAMETER Experiment Name: At_Drought_Reproduction_P Parameter: Treatment Value: Drought vs. No Drought
acttttatttctctgctttaactgcccaaaagattctctcccagctagctttctcaattcatttttctttcttcatcttcttcttgtgtgatctctctttccaaataagcttatcattcttacaaaaatatttctgggtttctgatattgttcttgttctcttgaatctttattacttgaaaaacatataaagtgatggcggttgtggttgaagaaggtgtggtgttgaatcatggaggtgaagagcttgtggatttgccacctggtttcaggtttcatccaacagacgaagagatcataacatgttaccttaaggagaaggttttaaacagccgattcacggctgtggccatgggagaagctgatctcaacaagtgtgagccttgggatttgccaaagagggcaaagatgggggagaaagagttctacttcttctgtcaaagggacaggaagtatccgactgggatgaggacgaaccgtgcgacggagtcaggatactggaaagccaccgggaaggataaggagatcttcaaaggcaaaggttgtctcgttgggatgaagaaaacacttgtgttttatagaggaagagctccaaaaggtgaaaagactaattgggtcatgcatgaatatcgtcttgaaggcaaatattcgtattacaatctcccaaaatctgcaagggacgaatgggtcgtgtgtagggtttttcacaagaacaatccttctaccacaacccaaccaatgacgagaatacccgttgaagatttcacaaggatggattctctagagaacattgatcatctcctagacttctcatctcttcctcctctcatagacccgagtttcatgagtcaaaccgaacaaccaaacttcaaacccatcaaccctccaacttacgatatctcatcaccaatccaaccccatcatttcaattcttaccaatcaatctttaaccaccaggtttttggttctgcttcgggctctacgtacaacaacaacaacgagatgatcaagatggagcaatcacttgttagtgtatctcaagaaacatgcctaagctcagatgtgaacgcgaacatgactacaaccacggaggtatcttcgggtcctgtaatgaaacaagaaatggggatgatgggaatggtgaatggtagcaagtcgtatgaagatctatgtgacttgaggggggacttgtgggacttctaattaatcatttgacttggtgaaagagtatatttgttgggatttaaatcatgttagttaatacatatacatataggatttactagaggcttaatcctagttaactattttcacttcattgatattatttaattagttgattgtttaattagtttatactttatagtgtggttaaaaaagaaaagaaaggattgtgataatttgggattttagtgcataagttatatctcaatgtaaactgtatttgtatacatataattagtcttctcatagagttttaattattaagatttacgatatatatatatatattctaacgttgtt

SEQ ID NO: 42735 - protein, 335 aa, Arabidopsis thaliana
  peptide (1)..(335): Ceres Seq. ID no. 13488328
  misc_feature (21)..(148): Pfam Name: No apical meristem (NAM) protein Pfam Description: No apical meristem (NAM) protein
  misc_feature (10)..(227): Homolog of NCBI NO: 30682048 NR Description: NAM (no apical meristem)-related protein
  misc_feature (19)..(309): Homolog of NCBI NO: 21537315 NR Description: NAM, no apical meristem,-like protein
  misc_feature (16)..(309): Homolog of NCBI NO: 15240252 NR Description: NAM, no apical meristem, - like protein
  misc_feature (4)..(334): Homolog of NCBI NO: 15229219 NR Description: NAM-related protein (no apical meristem)
  misc_feature (1)..(335): Homolog of NCBI NO: 30686737 NR Description: NAM (no apical meristem)-related protein
  misc_feature (1)..(335): Homolog of NCBI NO: 9758909 NR Description: NAM (no apical meristem)-like protein
MAVVVEEGVVLNHGGEELVDLPPGFRFHPTDEEIITCYLKEKVLNSRFTAVAMGEADLNKCEPWDLPKRAKMGEKEFYFFCQRDRKYPTGMRTNRATESGYWKATGKDKEIFKGKGCLVGMKKTLVFYRGRAPKGEKTNWVMHEYRLEGKYSYYNLPKSARDEWVVCRVFHKNNPSTTTQPMTRIPVEDFTRMDSLENIDHLLDFSSLPPLIDPSFMSQTEQPNFKPINPPTYDISSPIQPHHFNSYQSIFNHQVFGSASGSTYNNNNEMIKMEQSLVSVSQETCLSSDVNANMTTTTEVSSGPVMKQEMGMMGMVNGSKSYEDLCDLRGDLWDF

SEQ ID NO: 42736 - protein, 283 aa, Arabidopsis thaliana
  peptide (1)..(283): Ceres Seq. ID no. 13488329
  misc_feature (1)..(96): Pfam Name: No apical meristem (NAM) protein Pfam Description: No apical meristem (NAM) protein
  misc_feature (1)..(175): Homolog of NCBI NO: 30682048 NR Description: NAM (no apical meristem)-related protein
  misc_feature (1)..(257): Homolog of NCBI NO: 21537315 NR Description: NAM, no apical meristem,-like protein
  misc_feature (1)..(257): Homolog of NCBI NO: 15240252 NR Description: NAM, no apical meristem, - like protein
  misc_feature (1)..(282): Homolog of NCBI NO: 15229219 NR Description: NAM-related protein (no apical meristem)
  misc_feature (1)..(283): Homolog of NCBI NO: 30686737 NR Description: NAM (no apical meristem)-related protein
  misc_feature (1)..(283): Homolog of NCBI NO: 9758909 NR Description: NAM (no apical meristem)-like protein
MGEADLNKCEPWDLPKRAKMGEKEFYFFCQRDRKYPTGMRTNRATESGYWKATGKDKEIFKGKGCLVGMKKTLVFYRGRAPKGEKTNWVMHEYRLEGKYSYYNLPKSARDEWVVCRVFHKNNPSTTTQPMTRIPVEDFTRMDSLENIDHLLDFSSLPPLIDPSFMSQTEQPNFKPINPPTYDISSPIQPHHFNSYQSIFNHQVFGSASGSTYNNNNEMIKMEQSLVSVSQETCLSSDVNANMTTTTEVSSGPVMKQEMGMMGMVNGSKSYEDLCDLRGDLWDF

SEQ ID NO: 42737 - protein, 264 aa, Arabidopsis thaliana
  peptide (1)..(264): Ceres Seq. ID no. 13488330
  misc_feature (1)..(77): Pfam Name: No apical meristem (NAM) protein Pfam Description: No apical meristem (NAM) protein
  misc_feature (1)..(156): Homolog of NCBI NO: 30682048 NR Description: NAM (no apical meristem)-related protein
  misc_feature (1)..(238): Homolog of NCBI NO: 21537315 NR Description: NAM, no apical meristem,-like protein
  misc_feature (1)..(238): Homolog of NCBI NO: 15240252 NR Description: NAM, no apical meristem, - like protein
  misc_feature (1)..(263): Homolog of NCBI NO: 15229219 NR Description: NAM-related protein (no apical meristem)
  misc_feature (1)..(264): Homolog of NCBI NO: 30686737 NR Description: NAM (no apical meristem)-related protein
  misc_feature (1)..(264): Homolog of NCBI NO: 9758909 NR Description: NAM (no apical meristem)-like protein
MGEKEFYFFCQRDRKYPTGMRTNRATESGYWKATGKDKEIFKGKGCLVGMKKTLVFYRGRAPKGEKTNWVMHEYRLEGKYSYYNLPKSARDEWVVCRVFHKNNPSTTTQPMTRIPVEDFTRMDSLENIDHLLDFSSLPPLIDPSFMSQTEQPNFKPINPPTYDISSPIQPHHFNSYQSIFNHQVFGSASGSTYNNNNEMIKMEQSLVSVSQETCLSSDVNANMTTTTEVSSGPVMKQEMGMMGMVNGSKSYEDLCDLRGDLWDF

SEQ ID NO: 42738 - DNA, 1170 bp, Arabidopsis thaliana
  misc_feature (1)..(1170): Ceres Seq. ID no. 12336260
  misc_feature: MA Experiment ID: 108595 Result: Down-regulated in Transcription
  misc_feature: MA Experiment 108595 PARAMETER Experiment Name: At_Ler-pi_Ovule_cDNA_P Parameter: Plant Line Value: null
  misc_feature: MA Experiment ID: 20000185 Result: Up-regulated in Transcription
  misc_feature: MA Experiment 20000185 PARAMETER Experiment Name: At_Roots__P Parameter: Age (day) Value: 7 vs. 21
  misc_feature: MA Experiment 20000185 PARAMETER Experiment Name: At_Roots__P Parameter: Organism Value: A. thaliana
  misc_feature: MA Experiment 20000185 PARAMETER Experiment Name: At_Roots__P Parameter: Tissue Value: Roots vs. Whole Plant
atcttgtttcttactcatttctctaacaattttccaaattaaatacgtttataggatcattgtggatggataatataatgcaatcgtcaatgccaccgggattccgatttcatccgacagaggaagagcttgtgggttattacctagataggaagatcaattcaatgaagagtgctttagatgtcattgtagagattgatctctacaaaatggagccatgggatatacaagcgaggtgtaaactagggtatgaagagcaaaacgagtggtacttctttagtcataaggacaggaagtaccctaccgggactaggaccaaccgagccaccgcggctgggttctggaaagccacgggtagagacaaggcggtactatcaaagaacagtgtcatcggaatgcggaagacacttgtctactacaagggtcgagctcctaatggaagaaagtccgattggatcatgcacgaataccgtctccaaaactccgagcttgccccggttcaggaggaaggctgggtggtgtgtcgagcatttaggaagccaattccaaaccagaggccattagggtacgagccatggcagaaccagctctaccacgtcgaaagtagtaacaactactcatcttcagtgacaatgaacacgagtcatcatatcggtgcatcttcatcaagtcataaccttaatcaaatgctcatgagcaataaccactacaatcctaataatacatcctcatcgatgcatcaatatggcaacattgagctcccgcagttggacagcccgagcttgtcgcctagtttagggacgaataaagatcagaacgagagtttcgagcaagaagaagagaagagctttaactgtgtggattggagaacactagataccttgcttgaaacacaagtcatacatccacataaccctaatattcttatgttcgaaacgcagtcgtataatccggcgccaagcttcccttccatgcatcaaagctataatgaggtcgaagctaatattcatcattctcttggatgcttccctgactcgtaattaaaaaaaaaacacttcatctatatattgatttgtattctatgatttaattgttccatctggaaaataacatttataactgtctatttgtaaaagaagtttgtgtttattacgtagaaatttgttgttg

SEQ ID NO: 42739 - protein, 324 aa, Arabidopsis thaliana
  peptide (1)..(324): Ceres Seq. ID no. 12336261
  misc_feature (9)..(138): Pfam Name: No apical meristem (NAM) protein Pfam Description: No apical meristem (NAM) protein
  misc_feature (9)..(310): Homolog of NCBI NO: 15241802 NR Description: NAC - like protein; protein id: At5g62380.1
  misc_feature (7)..(218): Homolog of NCBI NO: 15221554 NR Description: unknown protein; protein id: At1g62700.1
  misc_feature (7)..(240): Homolog of NCBI NO: 15221256 NR Description: unknown protein; protein id: At1g12260.1
  misc_feature (7)..(280): Homolog of NCBI NO: 38605889 NR Description: OSJNBb0020O11.1 [Oryza sativa (japonica
  misc_feature (5)..(259): Homolog of NCBI NO: 34902254 NR Description: Putative NAM-like protein
  misc_feature (1)..(279): Homolog of NCBI NO: 15239338 NR Description: NAM (no apical meristem)-like protein; protein
  misc_feature (9)..(285): Homolog of NCBI NO: 38637051 NR Description: putative OsNAC7 protein [Oryza sativa (japonica
  misc_feature (1)..(265): Homolog of NCBI NO: 15234325 NR Description: NAM like protein; protein id: At4g36160.1
  misc_feature (1)..(262): Homolog of NCBI NO: 15227958 NR Description: putative NAM (no apical meristem)-like protein
  misc_feature (1)..(324): Homolog of NCBI NO: 15217612 NR Description: NAM-like protein
MDNIMQSSMPPGFRFHPTEEELVGYYLDRKINSMKSALDVIVEIDLYKMEPWDIQARCKLGYEEQNEWYFFSHKDRKYPTGTRTNRATAAGFWKATGRDKAVLSKNSVIGMRKTLVYYKGRAPNGRKSDWIMHEYRLQNSELAPVQEEGWVVCRAFRKPIPNQRPLGYEPWQNQLYHVESSNNYSSSVTMNTSHHIGASSSSHNLNQMLMSNNHYNPNNTSSSMHQYGNIELPQLDSPSLSPSLGTNKDQNESFEQEEEKSFNCVDWRTLDTLLETQVIHPHNPNILMFETQSYNPAPSFPSMHQSYNEVEANIHHSLGCFPDS

SEQ ID NO: 42740 - protein, 320 aa, Arabidopsis thaliana
  peptide (1)..(320): Ceres Seq. ID no. 12336262
  misc_feature (5)..(134): Pfam Name: No apical meristem (NAM) protein Pfam Description: No apical meristem (NAM) protein
  misc_feature (5)..(306): Homolog of NCBI NO: 15241802 NR Description: NAC - like protein; protein id: At5g62380.1
  misc_feature (3)..(214): Homolog of NCBI NO: 15221554 NR Description: unknown protein; protein id: At1g62700.1
  misc_feature (3)..(236): Homolog of NCBI NO: 15221256 NR Description: unknown protein; protein id: At1g12260.1
  misc_feature (3)..(276): Homolog of NCBI NO: 38605889 NR Description: OSJNBb0020O11.1 [Oryza sativa (japonica
  misc_feature (1)..(255): Homolog of NCBI NO: 34902254 NR Description: Putative NAM-like protein
  misc_feature (1)..(275): Homolog of NCBI NO: 15239338 NR Description: NAM (no apical meristem)-like protein; protein
  misc_feature (5)..(281): Homolog of NCBI NO: 38637051 NR Description: putative OsNAC7 protein [Oryza sativa (japonica
  misc_feature (1)..(261): Homolog of NCBI NO: 15234325 NR Description: NAM like protein; protein id: At4g36160.1
  misc_feature (1)..(258): Homolog of NCBI NO: 15227958 NR Description: putative NAM (no apical meristem)-like protein
  misc_feature (1)..(320): Homolog of NCBI NO: 15217612 NR Description: NAM-like protein
MQSSMPPGFRFHPTEEELVGYYLDRKINSMKSALDVIVEIDLYKMEPWDIQARCKLGYEEQNEWYFFSHKDRKYPTGTRTNRATAAGFWKATGRDKAVLSKNSVIGMRKTLVYYKGRAPNGRKSDWIMHEYRLQNSELAPVQEEGWVVCRAFRKPIPNQRPLGYEPWQNQLYHVESSNNYSSSVTMNTSHHIGASSSSHNLNQMLMSNNHYNPNNTSSSMHQYGNIELPQLDSPSLSPSLGTNKDQNESFEQEEEKSFNCVDWRTLDTLLETQVIHPHNPNILMFETQSYNPAPSFPSMHQSYNEVEANIHHSLGCFPDS

SEQ ID NO: 42741 - protein, 316 aa, Arabidopsis thaliana
  peptide (1)..(316): Ceres Seq. ID no. 12336263
  misc_feature (1)..(130): Pfam Name: No apical meristem (NAM) protein Pfam Description: No apical meristem (NAM) protein
  misc_feature (1)..(302): Homolog of NCBI NO: 15241802 NR Description: NAC - like protein; protein id: At5g62380.1
  misc_feature (1)..(210): Homolog of NCBI NO: 15221554 NR Description: unknown protein; protein id: At1g62700.1
  misc_feature (1)..(232): Homolog of NCBI NO: 15221256 NR Description: unknown protein; protein id: At1g12260.1
  misc_feature (1)..(272): Homolog of NCBI NO: 38605889 NR Description: OSJNBb0020O11.1 [Oryza sativa (japonica
  misc_feature (1)..(251): Homolog of NCBI NO: 34902254 NR Description: Putative NAM-like protein
  misc_feature (1)..(271): Homolog of NCBI NO: 15239338 NR Description: NAM (no apical meristem)-like protein; protein
  misc_feature (1)..(277): Homolog of NCBI NO: 38637051 NR Description: putative OsNAC7 protein [Oryza sativa (japonica
  misc_feature (1)..(257): Homolog of NCBI NO: 15234325 NR Description: NAM like protein; protein id: At4g36160.1
  misc_feature (1)..(254): Homolog of NCBI NO: 15227958 NR Description: putative NAM (no apical meristem)-like protein
  misc_feature (1)..(316): Homolog of NCBI NO: 15217612 NR Description: NAM-like protein
MPPGFRFHPTEEELVGYYLDRKINSMKSALDVIVEIDLYKMEPWDIQARCKLGYEEQNEWYFFSHKDRKYPTGTRTNRATAAGFWKATGRDKAVLSKNSVIGMRKTLVYYKGRAPNGRKSDWIMHEYRLQNSELAPVQEEGWVVCRAFRKPIPNQRPLGYEPWQNQLYHVESSNNYSSSVTMNTSHHIGASSSSHNLNQMLMSNNHYNPNNTSSSMHQYGNIELPQLDSPSLSPSLGTNKDQNESFEQEEEKSFNCVDWRTLDTLLETQVIHPHNPNILMFETQSYNPAPSFPSMHQSYNEVEANIHHSLGCFPDS

SEQ ID NO: 42742 - DNA, 1346 bp, Arabidopsis thaliana
  misc_feature (1)..(1346): Ceres Seq. ID no. 13648951
  misc_feature: MA Experiment ID: 20000180 Result: Up-regulated in Transcription
  misc_feature: MA Experiment 20000180 PARAMETER Experiment Name: At_Germinating_Seeds_P Parameter: Age (hr) Value: 24 vs. 0
  misc_feature: MA Experiment 20000180 PARAMETER Experiment Name: At_Germinating_Seeds_P Parameter: Tissue Value: Germinating Seeds
  misc_feature: MA Experiment ID: 20000184 Result: Down-regulated in Transcription
  misc_feature: MA Experiment 20000184 PARAMETER Experiment Name: At_Shoots__P Parameter: Age (day) Value: 7
  misc_feature: MA Experiment 20000184 PARAMETER Experiment Name: At_Shoots__P Parameter: Tissue Value: Shoots vs. Whole Plant
  misc_feature: MA Experiment ID: 20000185 Result: Up-regulated in Transcription
  misc_feature: MA Experiment 20000185 PARAMETER Experiment Name: At_Roots__P Parameter: Age (day) Value: 7 vs. 21
  misc_feature: MA Experiment 20000185 PARAMETER Experiment Name: At_Roots__P Parameter: Organism Value: A. thaliana
  misc_feature: MA Experiment 20000185 PARAMETER Experiment Name: At_Roots__P Parameter: Tissue Value: Roots vs. Whole Plant
  misc_feature: MA Experiment ID: 20000234 Result: Up-regulated in Transcription
  misc_feature: MA Experiment 20000234 PARAMETER Experiment Name: At_Siliques_P Parameter: Age (day) Value: 21
  misc_feature: MA Experiment 20000234 PARAMETER Experiment Name: At_Siliques_P Parameter: Organism Value: A. thaliana
  misc_feature: MA Experiment 20000234 PARAMETER Experiment Name: At_Siliques_P Parameter: Plant Line Value: WS
  misc_feature: MA Experiment 20000234 PARAMETER Experiment Name: At_Siliques_P Parameter: Tissue Value: Less Than 5mm Siliques vs. Whole Plant
  misc_feature: MA Experiment ID: 20000264 Result: Up-regulated in Transcription
  misc_feature: MA Experiment 20000264 PARAMETER Experiment Name: At_Open_Flower_P Parameter: Age (day) Value: 21
  misc_feature: MA Experiment 20000264 PARAMETER Experiment Name: At_Open_Flower_P Parameter: Plant Line Value: WS
  misc_feature: MA Experiment 20000264 PARAMETER Experiment Name: At_Open_Flower_P Parameter: Tissue Value: Open Flower vs. Whole Plant
  misc_feature: MA Experiment ID: 20000265 Result: Up-regulated in Transcription
  misc_feature: MA Experiment 20000265 PARAMETER Experiment Name: At_Open_Flower_P Parameter: Age (day) Value: 21
  misc_feature: MA Experiment 20000265 PARAMETER Experiment Name: At_Open_Flower_P Parameter: Plant Line Value: WS
  misc_feature: MA Experiment 20000265 PARAMETER Experiment Name: At_Open_Flower_P Parameter: Tissue Value: Closed Flower vs. Whole Plant
  misc_feature: MA Experiment ID: 20000286 Result: Up-regulated in Transcription
  misc_feature: MA Experiment 20000286 PARAMETER Experiment Name: At_Open_Flower_P Parameter: Age (day) Value: 21
  misc_feature: MA Experiment 20000286 PARAMETER Experiment Name: At_Open_Flower_P Parameter: Plant Line Value: WS
  misc_feature: MA Experiment 20000286 PARAMETER Experiment Name: At_Open_Flower_P Parameter: Tissue Value: Half Open vs. Whole Plant
  misc_feature: MA Experiment ID: 20000439 Result: Up-regulated in Transcription
  misc_feature: MA Experiment 20000439 PARAMETER Experiment Name: At_Roots__P Parameter: Age (day) Value: 14 vs. 21
  misc_feature: MA Experiment 20000439 PARAMETER Experiment Name: At_Roots__P Parameter: Organism Value: A. thaliana
  misc_feature: MA Experiment 20000439 PARAMETER Experiment Name: At_Roots__P Parameter: Tissue Value: Roots vs. Whole Plant
  misc_feature: MA Experiment ID: 20000794 Result: Up-regulated in Transcription
  misc_feature: MA Experiment 20000794 PARAMETER Experiment Name: At_Petals_P Parameter: Age (day) Value: 23-25 days
  misc_feature: MA Experiment 20000794 PARAMETER Experiment Name: At_Petals_P Parameter: Plant Line Value: WS
  misc_feature: MA Experiment 20000794 PARAMETER Experiment Name: At_Petals_P Parameter: Tissue Value: Petals vs. Whole plant
  misc_feature: MA Experiment ID: 20001450 Result: Down-regulated in Transcription
  misc_feature: MA Experiment 20001450 PARAMETER Experiment Name: At_Far-red-induction_P Parameter: Age (day) Value: 7
  misc_feature: MA Experiment 20001450 PARAMETER Experiment Name: At_Far-red-induction_P Parameter: Light Value: Far-red vs. White
  misc_feature: MA Experiment 20001450 PARAMETER Experiment Name: At_Far-red-induction_P Parameter: Organism Value: A. thaliana
  misc_feature: MA Experiment 20001450 PARAMETER Experiment Name: At_Far-red-induction_P Parameter: Plant Line Value: Columbia
  misc_feature: MA Experiment 20001450 PARAMETER Experiment Name: At_Far-red-induction_P Parameter: Timepoint (hr) Value: 8
  misc_feature: MA Experiment 20001450 PARAMETER Experiment Name: At_Far-red-induction_P Parameter: Tissue Value: Whole Plant
  misc_feature: MA Experiment ID: 20001451 Result: Down-regulated in Transcription
  misc_feature: MA Experiment 20001451 PARAMETER Experiment Name: At_Far-red-induction_P Parameter: Age (day) Value: 7
  misc_feature: MA Experiment 20001451 PARAMETER Experiment Name: At_Far-red-induction_P Parameter: Light Value: Far-red vs. White
  misc_feature: MA Experiment 20001451 PARAMETER Experiment Name: At_Far-red-induction_P Parameter: Organism Value: A. thaliana
  misc_feature: MA Experiment 20001451 PARAMETER Experiment Name: At_Far-red-induction_P Parameter: Plant Line Value: Columbia
  misc_feature: MA Experiment 20001451 PARAMETER Experiment Name: At_Far-red-induction_P Parameter: Timepoint (hr) Value: 24
  misc_feature: MA Experiment 20001451 PARAMETER Experiment Name: At_Far-red-induction_P Parameter: Tissue Value: Whole Plant
aaaaggtttgatgagagtcttttcctaccaaaccccctctccttgtgatgatgattagcttcacctgccattttctcaatgactgtacccacaggttatataaatggcttctcacatttcgagctccattcctcaccagaccccttttgcaagattagtaagttattgttgacgttttgagaaagctggatatagctcaagaaggtcaaaacatcgatgagccggttgttattggagaggaaaaaggttctgtaagattgactactcttaaccgccctcgtcagctgaatgtcatctctccggaagtggtctttaagcttgcagaatatcttgaattgtgggagaaggatgaccaaacaaagcttatattgatcaagggtacaggtagagctttctccgccggtggtgatctaaaggtgttttatcacggacaggaatcaaaggattcttgccttgaggttgtttaccggatgtactggctgtgttatcatatccacacatacaagaagacgcaggtgtctctggttaatggaatatcgatgggtggaggtgcagcattgatggtccctatgaagttttcagttgtgacagagaaaactgtttttgcgactccagaagcaagtttcgggtttcacactgattgcgggttctcctacatccattcacgtcttcctggtcatttaggagagttcttggctttaactggggcaagattgaacggcaaagaacttgtagcaattggaatggcaacacattttgtaccttctggtaaattgatggatctggaggcacggcttgtgagtttagactcaggagatgcggatgtagtccaatccacaattgaagagttctccgagaaagtcaaccttgacaaagacagcatccttaacaagcagtcggtaatcaatgagtgtttctcaaaagaaagtgtgaagcagatcatacaagcatttgaagctgaagcaagcaaagacgggaatgaatggataactccagtcatcaaaggtctaaagcgatcgtcacccacagggttgaagatagtactacaatcgatccgtgaaggtagaaaacaaacgctgagtgattgcctgaagaaagagtttcggctcaccttgaatatcttgaggaaaaccatatcccctgatatgtatgagggtataagggctctgaccatagacaaagacaattctccaaagtggaatccagcgacattagatgaggtggatgatgagaaaatcaactcggtgtttaagctctttgaggatgatgatattgaactacaaatccctgaaacagaagaaaacaggtggggaggcaaatacgagacttcaggctacgcatctgta

SEQ ID NO: 42743 - protein, 292 aa, Arabidopsis thaliana
  peptide (1)..(292): Ceres Seq. ID no. 13648952
  misc_feature (1)..(98): Pfam Name: Enoyl-CoA hydratase/isomerase family Pfam Description: Enoyl-CoA hydratase/isomerase family
  misc_feature (1)..(98): Pfam Name: Enoyl-CoA hydratase/isomerase family Pfam Description: Enoyl-CoA hydratase/isomerase family
  misc_feature (1)..(276): Homolog of NCBI NO: 22329062 NR Description: 3-hydroxyisobutyryl-coenzyme A hydrolase
  misc_feature (162)..(273): Homolog of NCBI NO: 30695218 NR Description: enoyl-CoA hydratase/isomerase family [Arabidopsis
  misc_feature (1)..(168): Homolog of NCBI NO: 30695218 NR Description: enoyl-CoA hydratase/isomerase family [Arabidopsis
  misc_feature (1)..(267): Homolog of NCBI NO: 15224539 NR Description: 3-hydroxyisobutyryl-coenzyme A hydrolase
  misc_feature (1)..(277): Homolog of NCBI NO: 37536724 NR Description: putative enoyl-CoA-hydratase
  misc_feature (1)..(276): Homolog of NCBI NO: 22329062 NR Description: 3-hydroxyisobutyryl-coenzyme A hydrolase
  misc_feature (1)..(168): Homolog of NCBI NO: 30695218 NR Description: enoyl-CoA hydratase/isomerase family [Arabidopsis
  misc_feature (1)..(277): Homolog of NCBI NO: 37536724 NR Description: putative enoyl-CoA-hydratase
  misc_feature (1)..(291): Homolog of NCBI NO: 30679729 NR Description: 3-hydroxyisobutyryl-coenzyme A hydrolase
  misc_feature (1)..(291): Homolog of NCBI NO: 6692680 NR Description: F12K11.12 [Arabidopsis thaliana]
  misc_feature (1)..(273): Homolog of NCBI NO: 15239206 NR Description: 3-hydroxyisobutyryl-coenzyme A hydrolase
  misc_feature (1)..(267): Homolog of NCBI NO: 15224549 NR Description: 3-hydroxyisobutyryl-coenzyme A hydrolase
  misc_feature (1)..(273): Homolog of NCBI NO: 6014701 NR Description: enoyl-CoA-hydratase [Avicennia marina]
  misc_feature (1)..(267): Homolog of NCBI NO: 15224539 NR Description: 3-hydroxyisobutyryl-coenzyme A hydrolase
  misc_feature (162)..(273): Homolog of NCBI NO: 30695218 NR Description: enoyl-CoA hydratase/isomerase family [Arabidopsis
  misc_feature (1)..(273): Homolog of NCBI NO: 6014701 NR Description: enoyl-CoA-hydratase [Avicennia marina]
  misc_feature (1)..(267): Homolog of NCBI NO: 15224549 NR Description: 3-hydroxyisobutyryl-coenzyme A hydrolase
  misc_feature (1)..(273): Homolog of NCBI NO: 15239206 NR Description: 3-hydroxyisobutyryl-coenzyme A hydrolase
  misc_feature (1)..(291): Homolog of NCBI NO: 6692680 NR Description: F12K11.12 [Arabidopsis thaliana]
  misc_feature (1)..(291): Homolog of NCBI NO: 30679729 NR Description: 3-hydroxyisobutyryl-coenzyme A hydrolase
MYWLCYHIHTYKKTQVSLVNGISMGGGAALMVPMKFSVVTEKTVFATPEASFGFHTDCGFSYIHSRLPGHLGEFLALTGARLNGKELVAIGMATHFVPSGKLMDLEARLVSLDSGDADVVQSTIEEFSEKVNLDKDSILNKQSVINECFSKESVKQIIQAFEAEASKDGNEWITPVIKGLKRSSPTGLKIVLQSIREGRKQTLSDCLKKEFRLTLNILRKTISPDMYEGIRALTIDKDNSPKWNPATLDEVDDEKINSVFKLFEDDDIELQIPETEENRWGGKYETSGYASV

SEQ ID NO: 42744 - protein, 269 aa, Arabidopsis thaliana
  peptide (1)..(269): Ceres Seq. ID no. 13648953
  misc_feature (1)..(75): Pfam Name: Enoyl-CoA hydratase/isomerase family Pfam Description: Enoyl-CoA hydratase/isomerase family
  misc_feature (1)..(75): Pfam Name: Enoyl-CoA hydratase/isomerase family Pfam Description: Enoyl-CoA hydratase/isomerase family
  misc_feature (1)..(253): Homolog of NCBI NO: 22329062 NR Description: 3-hydroxyisobutyryl-coenzyme A hydrolase
  misc_feature (139)..(250): Homolog of NCBI NO: 30695218 NR Description: enoyl-CoA hydratase/isomerase family [Arabidopsis
  misc_feature (1)..(145): Homolog of NCBI NO: 30695218 NR Description: enoyl-CoA hydratase/isomerase family [Arabidopsis
  misc_feature (1)..(244): Homolog of NCBI NO: 15224539 NR Description: 3-hydroxyisobutyryl-coenzyme A hydrolase
  misc_feature (1)..(254): Homolog of NCBI NO: 37536724 NR Description: putative enoyl-CoA-hydratase
  misc_feature (1)..(253): Homolog of NCBI NO: 22329062 NR Description: 3-hydroxyisobutyryl-coenzyme A hydrolase
  misc_feature (1)..(145): Homolog of NCBI NO: 30695218 NR Description: enoyl-CoA hydratase/isomerase family [Arabidopsis
  misc_feature (1)..(254): Homolog of NCBI NO: 37536724 NR Description: putative enoyl-CoA-hydratase
  misc_feature (1)..(268): Homolog of NCBI NO: 30679729 NR Description: 3-hydroxyisobutyryl-coenzyme A hydrolase
  misc_feature (1)..(268): Homolog of NCBI NO: 6692680 NR Description: F12K11.12 [Arabidopsis thaliana]
  misc_feature (1)..(250): Homolog of NCBI NO: 15239206 NR Description: 3-hydroxyisobutyryl-coenzyme A hydrolase
  misc_feature (1)..(244): Homolog of NCBI NO: 15224549 NR Description: 3-hydroxyisobutyryl-coenzyme A hydrolase
  misc_feature (1)..(250): Homolog of NCBI NO: 6014701 NR Description: enoyl-CoA-hydratase [Avicennia marina]
  misc_feature (1)..(244): Homolog of NCBI NO: 15224539 NR Description: 3-hydroxyisobutyryl-coenzyme A hydrolase
  misc_feature (139)..(250): Homolog of NCBI NO: 30695218 NR Description: enoyl-CoA hydratase/isomerase family [Arabidopsis
  misc_feature (1)..(250): Homolog of NCBI NO: 6014701 NR Description: enoyl-CoA-hydratase [Avicennia marina]
  misc_feature (1)..(244): Homolog of NCBI NO: 15224549 NR Description: 3-hydroxyisobutyryl-coenzyme A hydrolase
  misc_feature (1)..(250): Homolog of NCBI NO: 15239206 NR Description: 3-hydroxyisobutyryl-coenzyme A hydrolase
  misc_feature (1)..(268): Homolog of NCBI NO: 6692680 NR Description: F12K11.12 [Arabidopsis thaliana]
  misc_feature (1)..(268): Homolog of NCBI NO: 30679729 NR Description: 3-hydroxyisobutyryl-coenzyme A hydrolase
MGGGAALMVPMKFSVVTEKTVFATPEASFGFHTDCGFSYIHSRLPGHLGEFLALTGARLNGKELVAIGMATHFVPSGKLMDLEARLVSLDSGDADVVQSTIEEFSEKVNLDKDSILNKQSVINECFSKESVKQIIQAFEAEASKDGNEWITPVIKGLKRSSPTGLKIVLQSIREGRKQTLSDCLKKEFRLTLNILRKTISPDMYEGIRALTIDKDNSPKWNPATLDEVDDEKINSVFKLFEDDDIELQIPETEENRWGGKYETSGYASV

SEQ ID NO: 42745 - protein, 262 aa, Arabidopsis thaliana
  peptide (1)..(262): Ceres Seq. ID no. 13648954
  misc_feature (1)..(68): Pfam Name: Enoyl-CoA hydratase/isomerase family Pfam Description: Enoyl-CoA hydratase/isomerase family
  misc_feature (1)..(68): Pfam Name: Enoyl-CoA hydratase/isomerase family Pfam Description: Enoyl-CoA hydratase/isomerase family
  misc_feature (1)..(246): Homolog of NCBI NO: 22329062 NR Description: 3-hydroxyisobutyryl-coenzyme A hydrolase
  misc_feature (132)..(243): Homolog of NCBI NO: 30695218 NR Description: enoyl-CoA hydratase/isomerase family [Arabidopsis
  misc_feature (1)..(138): Homolog of NCBI NO: 30695218 NR Description: enoyl-CoA hydratase/isomerase family [Arabidopsis
  misc_feature (1)..(237): Homolog of NCBI NO: 15224539 NR Description: 3-hydroxyisobutyryl-coenzyme A hydrolase
  misc_feature (1)..(247): Homolog of NCBI NO: 37536724 NR Description: putative enoyl-CoA-hydratase
  misc_feature (1)..(246): Homolog of NCBI NO: 22329062 NR Description: 3-hydroxyisobutyryl-coenzyme A hydrolase
  misc_feature (1)..(138): Homolog of NCBI NO: 30695218 NR Description: enoyl-CoA hydratase/isomerase family [Arabidopsis
  misc_feature (1)..(247): Homolog of NCBI NO: 37536724 NR Description: putative enoyl-CoA-hydratase
  misc_feature (1)..(261): Homolog of NCBI NO: 30679729 NR Description: 3-hydroxyisobutyryl-coenzyme A hydrolase
  misc_feature (1)..(261): Homolog of NCBI NO: 6692680 NR Description: F12K11.12 [Arabidopsis thaliana]
  misc_feature (1)..(243): Homolog of NCBI NO: 15239206 NR Description: 3-hydroxyisobutyryl-coenzyme A hydrolase
  misc_feature (1)..(237): Homolog of NCBI NO: 15224549 NR Description: 3-hydroxyisobutyryl-coenzyme A hydrolase
  misc_feature (1)..(243): Homolog of NCBI NO: 6014701 NR Description: enoyl-CoA-hydratase [Avicennia marina]
  misc_feature (1)..(237): Homolog of NCBI NO: 15224539 NR Description: 3-hydroxyisobutyryl-coenzyme A hydrolase
  misc_feature (132)..(243): Homolog of NCBI NO: 30695218 NR Description: enoyl-CoA hydratase/isomerase family [Arabidopsis
  misc_feature (1)..(243): Homolog of NCBI NO: 6014701 NR Description: enoyl-CoA-hydratase [Avicennia marina]
  misc_feature (1)..(237): Homolog of NCBI NO: 15224549 NR Description: 3-hydroxyisobutyryl-coenzyme A hydrolase
  misc_feature (1)..(243): Homolog of NCBI NO: 15239206 NR Description: 3-hydroxyisobutyryl-coenzyme A hydrolase
  misc_feature (1)..(261): Homolog of NCBI NO: 6692680 NR Description: F12K11.12 [Arabidopsis thaliana]
  misc_feature (1)..(261): Homolog of NCBI NO: 30679729 NR Description: 3-hydroxyisobutyryl-coenzyme A hydrolase
MVPMKFSVVTEKTVFATPEASFGFHTDCGFSYIHSRLPGHLGEFLALTGARLNGKELVAIGMATHFVPSGKLMDLEARLVSLDSGDADVVQSTIEEFSEKVNLDKDSILNKQSVINECFSKESVKQIIQAFEAEASKDGNEWITPVIKGLKRSSPTGLKIVLQSIREGRKQTLSDCLKKEFRLTLNILRKTISPDMYEGIRALTIDKDNSPKWNPATLDEVDDEKINSVFKLFEDDDIELQIPETEENRWGGKYETSGYASV

SEQ ID NO: 42746 - DNA, 1499 bp, Arabidopsis thaliana
  misc_feature (1)..(1499): Ceres Seq. ID no. 12330770
  misc_feature: MA Experiment ID: 108434 Result: Up-regulated in Transcription
  misc_feature: MA Experiment 108434 PARAMETER Experiment Name: At_Root_Tips_cDNA_P Parameter: Tissue Value: Root Tips
  misc_feature: MA Experiment ID: 108595 Result: Down-regulated in Transcription
  misc_feature: MA Experiment 108595 PARAMETER Experiment Name: At_Ler-pi_Ovule_cDNA_P Parameter: Plant Line Value: null
  misc_feature: MA Experiment ID: 20001911 Result: Down-regulated in Transcription
  misc_feature: MA Experiment 20001911 PARAMETER Experiment Name: At_Drought_Reproduction_P Parameter: Age (day) Value: 40
  misc_feature: MA Experiment 20001911 PARAMETER Experiment Name: At_Drought_Reproduction_P Parameter: Organism Value: A. thaliana
  misc_feature: MA Experiment 20001911 PARAMETER Experiment Name: At_Drought_Reproduction_P Parameter: Plant Line Value: WS
  misc_feature: MA Experiment 20001911 PARAMETER Experiment Name: At_Drought_Reproduction_P Parameter: Timepoint (day) Value: 10
  misc_feature: MA Experiment 20001911 PARAMETER Experiment Name: At_Drought_Reproduction_P Parameter: Tissue Value: Flowers
  misc_feature: MA Experiment 20001911 PARAMETER Experiment Name: At_Drought_Reproduction_P Parameter: Treatment Value: Drought vs. No Drought
atcaatggaggtttttgattcgccccaagctctcgcgattcctgatgttcttcagtaatttcttgcaatccttataaacaaagagcgtggagaatcgtttcagaggaaagaaaactaaaaatggcgactcttttcaacaaatttcagcaggctgttggagttcttgccaagagtaccacatttgctaagaacccaaggcaactgcagtttgaagcagacgttaacaaactctttatgtatacaagctataaccggttgggacgagaagctgaggagactgatgcagaggagatcattgagatggctggtaaagccactttatctgagcagcagaagcaagttcaagagaacattcactaccaagttgaaaaattctgctctttgatggatggaatccttcttcctgatgttaggaggaacgagtcggggtcacaatcaacaagccctcgtcctcctcgtagaagtggtcttactttcgccattggtagtaataatgcttttccacatgcagatcagccccttgttcccgagacaaagcctttgaaactcaatgacgtctcacagagattaatggatcaaatgggttacaccctcgagaccaaaccgtctgtaatacctcacaaagacgctggtcaaggttgttttatcaaaggcgaggcagatgttggaaccgtcttagccttttaccctggagttatttactctcctgctttctacaagtacatacccgggtacccgaaggttgattcacagaactcatatctcatcaccaggtatgatgggactgtaataaatgctcaaccttggggtcttgggggagaatcaagggaagcatggaacgggtcctacacacctgcggtcaaagcaaacaccaaaaccgcagaaaacgggtcagacaggttatggaaagcgttgagcaagcctctcgaaggttcgggtaaaggaaaagaggttcttgagaggagaaatccgttggcttttggtcacttagctaaccacccagcgaaagagatgactccaaacgttatgatatgtccttatgacttccctttgatggcgaaagatctgcggccttacattccgaatatatcttttggggattctggagaaataaagatgaaaagatttggaagtttctggtttaagacagggagtaaaaacgggttagaagctccggttctgaagacactggtcttggtggcaacgaggtcgttgtgtaatgaggaacttttgctgaattacaggctgagcaactctaagagacgaccagattggtatactccggttaacgaggaggaagataggagaagatggagctaaatttctcttttatgttttaatgaaacttgaaaggctctgtttcaaaacatgctcctcggttttctttggactattagtgcgacgtcgttttctgagtgtttcactattttggtttttcgattatttttggaagacattttattctaatcttttaaagacatttatgttgttcggttgtc

SEQ ID NO: 42747 - protein, 399 aa, Arabidopsis thaliana
  peptide (1)..(399): Ceres Seq. ID no. 12330771
  misc_feature (1)..(330): Homolog of NCBI NO: 11358190 NR Description: hypothetical protein T22D6.210 - Arabidopsis
  misc_feature (1)..(391): Homolog of NCBI NO: 26453064 NR Description: unknown protein [Arabidopsis thaliana]
  misc_feature (1)..(391): Homolog of NCBI NO: 15241572 NR Description: hypothetical protein (fragment at BAC end)
  misc_feature (1)..(399): Homolog of NCBI NO: 22327005 NR Description: unknown protein
  misc_feature (1)..(399): Homolog of NCBI NO: 10177809 NR Description: gene_id:MKD15.6~unknown protein [Arabidopsis
MATLFNKFQQAVGVLAKSTTFAKNPRQLQFEADVNKLFMYTSYNRLGREAEETDAEEIIEMAGKATLSEQQKQVQENIHYQVEKFCSLMDGILLPDVRRNESGSQSTSPRPPRRSGLTFAIGSNNAFPHADQPLVPETKPLKLNDVSQRLMDQMGYTLETKPSVIPHKDAGQGCFIKGEADVGTVLAFYPGVIYSPAFYKYIPGYPKVDSQNSYLITRYDGTVINAQPWGLGGESREAWNGSYTPAVKANTKTAENGSDRLWKALSKPLEGSGKGKEVLERRNPLAFGHLANHPAKEMTPNVMICPYDFPLMAKDLRPYIPNISFGDSGEIKMKRFGSFWFKTGSKNGLEAPVLKTLVLVATRSLCNEELLLNYRLSNSKRRPDWYTPVNEEEDRRRWS

SEQ ID NO: 42748 - protein, 361 aa, Arabidopsis thaliana
  peptide (1)..(361): Ceres Seq. ID no. 12330772
  misc_feature (1)..(292): Homolog of NCBI NO: 11358190 NR Description: hypothetical protein T22D6.210 - Arabidopsis
  misc_feature (1)..(353): Homolog of NCBI NO: 26453064 NR Description: unknown protein [Arabidopsis thaliana]
  misc_feature (1)..(353): Homolog of NCBI NO: 15241572 NR Description: hypothetical protein (fragment at BAC end)
  misc_feature (1)..(361): Homolog of NCBI NO: 22327005 NR Description: unknown protein
  misc_feature (1)..(361): Homolog of NCBI NO: 10177809 NR Description: gene_id:MKD15.6~unknown protein [Arabidopsis
MYTSYNRLGREAEETDAEEIIEMAGKATLSEQQKQVQENIHYQVEKFCSLMDGILLPDVRRNESGSQSTSPRPPRRSGLTFAIGSNNAFPHADQPLVPETKPLKLNDVSQRLMDQMGYTLETKPSVIPHKDAGQGCFIKGEADVGTVLAFYPGVIYSPAFYKYIPGYPKVDSQNSYLITRYDGTVINAQPWGLGGESREAWNGSYTPAVKANTKTAENGSDRLWKALSKPLEGSGKGKEVLERRNPLAFGHLANHPAKEMTPNVMICPYDFPLMAKDLRPYIPNISFGDSGEIKMKRFGSFWFKTGSKNGLEAPVLKTLVLVATRSLCNEELLLNYRLSNSKRRPDWYTPVNEEEDRRRWS

SEQ ID NO: 42749 - protein, 339 aa, Arabidopsis thaliana
  peptide (1)..(339): Ceres Seq. ID no. 12330773
  misc_feature (1)..(270): Homolog of NCBI NO: 11358190 NR Description: hypothetical protein T22D6.210 - Arabidopsis
  misc_feature (1)..(331): Homolog of NCBI NO: 26453064 NR Description: unknown protein [Arabidopsis thaliana]
  misc_feature (1)..(331): Homolog of NCBI NO: 15241572 NR Description: hypothetical protein (fragment at BAC end)
  misc_feature (1)..(339): Homolog of NCBI NO: 22327005 NR Description: unknown protein
  misc_feature (1)..(339): Homolog of NCBI NO: 10177809 NR Description: gene_id:MKD15.6~unknown protein [Arabidopsis
MAGKATLSEQQKQVQENIHYQVEKFCSLMDGILLPDVRRNESGSQSTSPRPPRRSGLTFAIGSNNAFPHADQPLVPETKPLKLNDVSQRLMDQMGYTLETKPSVIPHKDAGQGCFIKGEADVGTVLAFYPGVIYSPAFYKYIPGYPKVDSQNSYLITRYDGTVINAQPWGLGGESREAWNGSYTPAVKANTKTAENGSDRLWKALSKPLEGSGKGKEVLERRNPLAFGHLANHPAKEMTPNVMICPYDFPLMAKDLRPYIPNISFGDSGEIKMKRFGSFWFKTGSKNGLEAPVLKTLVLVATRSLCNEELLLNYRLSNSKRRPDWYTPVNEEEDRRRWS

SEQ ID NO: 42750 - DNA, 1241 bp, Arabidopsis thaliana
  misc_feature (1)..(1241): Ceres Seq. ID no. 13645942
  misc_feature: MA Experiment ID: 20000180 Result: Up-regulated in Transcription
  misc_feature: MA Experiment 20000180 PARAMETER Experiment Name: At_Germinating_Seeds_P Parameter: Age (hr) Value: 24 vs. 0
  misc_feature: MA Experiment 20000180 PARAMETER Experiment Name: At_Germinating_Seeds_P Parameter: Tissue Value: Germinating Seeds
  misc_feature: MA Experiment ID: 20000185 Result: Up-regulated in Transcription
  misc_feature: MA Experiment 20000185 PARAMETER Experiment Name: At_Roots__P Parameter: Age (day) Value: 7 vs. 21
  misc_feature: MA Experiment 20000185 PARAMETER Experiment Name: At_Roots__P Parameter: Organism Value: A. thaliana
  misc_feature: MA Experiment 20000185 PARAMETER Experiment Name: At_Roots__P Parameter: Tissue Value: Roots vs. Whole Plant
  misc_feature: MA Experiment ID: 20000234 Result: Up-regulated in Transcription
  misc_feature: MA Experiment 20000234 PARAMETER Experiment Name: At_Siliques_P Parameter: Age (day) Value: 21
  misc_feature: MA Experiment 20000234 PARAMETER Experiment Name: At_Siliques_P Parameter: Organism Value: A. thaliana
  misc_feature: MA Experiment 20000234 PARAMETER Experiment Name: At_Siliques_P Parameter: Plant Line Value: WS
  misc_feature: MA Experiment 20000234 PARAMETER Experiment Name: At_Siliques_P Parameter: Tissue Value: Less Than 5mm Siliques vs. Whole Plant
  misc_feature: MA Experiment ID: 20000235 Result: Up-regulated in Transcription
  misc_feature: MA Experiment 20000235 PARAMETER Experiment Name: At_Siliques_P Parameter: Age (day) Value: 21
  misc_feature: MA Experiment 20000235 PARAMETER Experiment Name: At_Siliques_P Parameter: Organism Value: A. thaliana
  misc_feature: MA Experiment 20000235 PARAMETER Experiment Name: At_Siliques_P Parameter: Plant Line Value: WS
  misc_feature: MA Experiment 20000235 PARAMETER Experiment Name: At_Siliques_P Parameter: Tissue Value: 5-10mm Siliques vs. Whole Plant
  misc_feature: MA Experiment ID: 20000439 Result: Up-regulated in Transcription
  misc_feature: MA Experiment 20000439 PARAMETER Experiment Name: At_Roots__P Parameter: Age (day) Value: 14 vs. 21
  misc_feature: MA Experiment 20000439 PARAMETER Experiment Name: At_Roots__P Parameter: Organism Value: A. thaliana
  misc_feature: MA Experiment 20000439 PARAMETER Experiment Name: At_Roots__P Parameter: Tissue Value: Roots vs. Whole Plant
  misc_feature: MA Experiment ID: 20000794 Result: Down-regulated in Transcription
  misc_feature: MA Experiment 20000794 PARAMETER Experiment Name: At_Petals_P Parameter: Age (day) Value: 23-25 days
  misc_feature: MA Experiment 20000794 PARAMETER Experiment Name: At_Petals_P Parameter: Plant Line Value: WS
  misc_feature: MA Experiment 20000794 PARAMETER Experiment Name: At_Petals_P Parameter: Tissue Value: Petals vs. Whole plant
  misc_feature: MA Experiment ID: 20001556 Result: Down-regulated in Transcription
  misc_feature: MA Experiment 20001556 PARAMETER Experiment Name: At_Drought_Soil_Dry_P Parameter: Age (day) Value: 26
  misc_feature: MA Experiment 20001556 PARAMETER Experiment Name: At_Drought_Soil_Dry_P Parameter: Organism Value: A. thaliana
  misc_feature: MA Experiment 20001556 PARAMETER Experiment Name: At_Drought_Soil_Dry_P Parameter: Plant Line Value: WS
  misc_feature: MA Experiment 20001556 PARAMETER Experiment Name: At_Drought_Soil_Dry_P Parameter: Post Timepoint (hr) Value: None
  misc_feature: MA Experiment 20001556 PARAMETER Experiment Name: At_Drought_Soil_Dry_P Parameter: Post-Treatment Value: None
  misc_feature: MA Experiment 20001556 PARAMETER Experiment Name: At_Drought_Soil_Dry_P Parameter: Timepoint (day) Value: 12
  misc_feature: MA Experiment 20001556 PARAMETER Experiment Name: At_Drought_Soil_Dry_P Parameter: Treatment Value: Drought vs. No Drought
  misc_feature: MA Experiment ID: 20001557 Result: Down-regulated in Transcription
  misc_feature: MA Experiment 20001557 PARAMETER Experiment Name: At_Drought_Soil_Dry_P Parameter: Age (day) Value: 27
  misc_feature: MA Experiment 20001557 PARAMETER Experiment Name: At_Drought_Soil_Dry_P Parameter: Organism Value: A. thaliana
  misc_feature: MA Experiment 20001557 PARAMETER Experiment Name: At_Drought_Soil_Dry_P Parameter: Plant Line Value: WS
  misc_feature: MA Experiment 20001557 PARAMETER Experiment Name: At_Drought_Soil_Dry_P Parameter: Post Timepoint (hr) Value: 3
  misc_feature: MA Experiment 20001557 PARAMETER Experiment Name: At_Drought_Soil_Dry_P Parameter: Post-Treatment Value: Re-Water vs. No Drought
  misc_feature: MA Experiment 20001557 PARAMETER Experiment Name: At_Drought_Soil_Dry_P Parameter: Timepoint (day) Value: 13
  misc_feature: MA Experiment 20001557 PARAMETER Experiment Name: At_Drought_Soil_Dry_P Parameter: Treatment Value: Drought vs. No Drought
  misc_feature: MA Experiment ID: 20001558 Result: Down-regulated in Transcription
  misc_feature: MA Experiment 20001558 PARAMETER Experiment Name: At_Drought_Soil_Dry_P Parameter: Age (day) Value: 27
  misc_feature: MA Experiment 20001558 PARAMETER Experiment Name: At_Drought_Soil_Dry_P Parameter: Organism Value: A. thaliana
  misc_feature: MA Experiment 20001558 PARAMETER Experiment Name: At_Drought_Soil_Dry_P Parameter: Plant Line Value: WS
  misc_feature: MA Experiment 20001558 PARAMETER Experiment Name: At_Drought_Soil_Dry_P Parameter: Post Timepoint (hr) Value: 6
  misc_feature: MA Experiment 20001558 PARAMETER Experiment Name: At_Drought_Soil_Dry_P Parameter: Post-Treatment Value: Re-Water vs. No Drought
  misc_feature: MA Experiment 20001558 PARAMETER Experiment Name: At_Drought_Soil_Dry_P Parameter: Timepoint (day) Value: 13
  misc_feature: MA Experiment 20001558 PARAMETER Experiment Name: At_Drought_Soil_Dry_P Parameter: Treatment Value: Drought vs. No Drought
  misc_feature: MA Experiment ID: 20001907 Result: Down-regulated in Transcription
  misc_feature: MA Experiment 20001907 PARAMETER Experiment Name: At_Drought_Reproduction_P Parameter: Age (day) Value: 37
  misc_feature: MA Experiment 20001907 PARAMETER Experiment Name: At_Drought_Reproduction_P Parameter: Organism Value: A. thaliana
  misc_feature: MA Experiment 20001907 PARAMETER Experiment Name: At_Drought_Reproduction_P Parameter: Plant Line Value: WS
  misc_feature: MA Experiment 20001907 PARAMETER Experiment Name: At_Drought_Reproduction_P Parameter: Timepoint (day) Value: 7
  misc_feature: MA Experiment 20001907 PARAMETER Experiment Name: At_Drought_Reproduction_P Parameter: Tissue Value: Siliques
  misc_feature: MA Experiment 20001907 PARAMETER Experiment Name: At_Drought_Reproduction_P Parameter: Treatment Value: Drought vs. No Drought
  misc_feature: MA Experiment ID: 20001910 Result: Down-regulated in Transcription
  misc_feature: MA Experiment 20001910 PARAMETER Experiment Name: At_Drought_Reproduction_P Parameter: Age (day) Value: 37
  misc_feature: MA Experiment 20001910 PARAMETER Experiment Name: At_Drought_Reproduction_P Parameter: Organism Value: A. thaliana
  misc_feature: MA Experiment 20001910 PARAMETER Experiment Name: At_Drought_Reproduction_P Parameter: Plant Line Value: WS
  misc_feature: MA Experiment 20001910 PARAMETER Experiment Name: At_Drought_Reproduction_P Parameter: Timepoint (day) Value: 7
  misc_feature: MA Experiment 20001910 PARAMETER Experiment Name: At_Drought_Reproduction_P Parameter: Tissue Value: Flowers
  misc_feature: MA Experiment 20001910 PARAMETER Experiment Name: At_Drought_Reproduction_P Parameter: Treatment Value: Drought vs. No Drought
  misc_feature: MA Experiment ID: 20001911 Result: Down-regulated in Transcription
  misc_feature: MA Experiment 20001911 PARAMETER Experiment Name: At_Drought_Reproduction_P Parameter: Age (day) Value: 40
  misc_feature: MA Experiment 20001911 PARAMETER Experiment Name: At_Drought_Reproduction_P Parameter: Organism Value: A. thaliana
  misc_feature: MA Experiment 20001911 PARAMETER Experiment Name: At_Drought_Reproduction_P Parameter: Plant Line Value: WS
  misc_feature: MA Experiment 20001911 PARAMETER Experiment Name: At_Drought_Reproduction_P Parameter: Timepoint (day) Value: 10
  misc_feature: MA Experiment 20001911 PARAMETER Experiment Name: At_Drought_Reproduction_P Parameter: Tissue Value: Flowers
  misc_feature: MA Experiment 20001911 PARAMETER Experiment Name: At_Drought_Reproduction_P Parameter: Treatment Value: Drought vs. No Drought
actatctcttcttcttcttcctcttctctcagtgaacaaatttggctatggctttttctgcaccatcactttccaaattctctcttttggttgccatttcagcatcagctctcctctgttgtgcttttgcccgtgatttctccattgttggatacacgccggagcatttgacaaacactgacaagcttctagagctcttcgagtcatggatgtcagaacacagcaaggcttacaaaagcgtggaggagaaggtgcacaggtttgaggttttcagagagaatctgatgcatatagaccagaggaacaatgagatcaacagttactggctcggtttgaacgagtttgcggatttgacccatgaagagttcaaaggaagatatctaggacttgcaaagccacaattctctagaaagagacagccctcagctaacttcaggtacagagatatcacggacttgcctaaatccgtagactggagaaagaaaggcgctgtggctcctgtcaaggaccagggtcaatgtggtagctgttgggcattttcaacagttgcagctgtcgaggggatcaaccagatcacaacagggaatctgagttcgctttcagagcaagaactcatagactgtgacacaactttcaacagtggctgcaatggaggtctcatggactacgcattccagtacataatttcgaccggtggtctccacaaagaagatgattacccttatctcatggaggaaggaatttgtcaagagcagaaagaggatgtggaacgtgtgacaatcagcggctacgaagatgtccctgaaaatgatgacgaaagcctggtgaaggctttagctcatcagccagtcagtgtggctattgaggcttcaggaagagacttccagttctacaaagggggagtgtttaatggtaaatgtggaacagacctagaccacggtgtggcagcggttggatatggttcatcaaagggatctgactatgttattgtcaagaactcatggggaccaagatggggagagaaagggtttattaggatgaagagaaacactggtaaaccagagggactctgtggaatcaacaagatggcctcatatcctaccaagaccaagtgatagatatacctttgttcctgcatcctacctttttttctttctttcaatgcatttctattgcacattatattgtattgatgaatgtgagattttaaaataacatggtaagagttctcttaccatttt

SEQ ID NO: 42751 - protein, 355 aa, Arabidopsis thaliana
  peptide (1)..(355): Ceres Seq. ID no. 13645943
  misc_feature (137)..(352): Pfam Name: Papain family cysteine protease Pfam Description: Papain family cysteine protease
  misc_feature (1)..(314): Homolog of NCBI NO: 8886940 NR Description: F2D10.37 [Arabidopsis thaliana]
  misc_feature (1)..(353): Homolog of NCBI NO: 34905996 NR Description: putative cysteine proteinase
  misc_feature (13)..(353): Homolog of NCBI NO: 14719319 NR Description: putative cysteine proteinase [Oryza sativa]
  misc_feature (1)..(340): Homolog of NCBI NO: 7435773 NR Description: cysteine proteinase (EC 3.4.22.-) precursor -
  misc_feature (9)..(355): Homolog of NCBI NO: 37780039 NR Description: cysteine protease 14 [Trifolium repens]
  misc_feature (1)..(355): Homolog of NCBI NO: 22759715 NR Description: cysteine proteinase [Zinnia elegans]
  misc_feature (1)..(355): Homolog of NCBI NO: 30141025 NR Description: cysteine protease-4 [Helianthus annuus]
  misc_feature (9)..(355): Homolog of NCBI NO: 37780041 NR Description: cysteine protease 14 [Trifolium repens]
  misc_feature (1)..(355): Homolog of NCBI NO: 18394919 NR Description: cysteine proteinase XCP2 [Arabidopsis thaliana]
  misc_feature (1)..(355): Homolog of NCBI NO: 18418684 NR Description: cysteine protease XCP1 [Arabidopsis thaliana]
MAFSAPSLSKFSLLVAISASALLCCAFARDFSIVGYTPEHLTNTDKLLELFESWMSEHSKAYKSVEEKVHRFEVFRENLMHIDQRNNEINSYWLGLNEFADLTHEEFKGRYLGLAKPQFSRKRQPSANFRYRDITDLPKSVDWRKKGAVAPVKDQGQCGSCWAFSTVAAVEGINQITTGNLSSLSEQELIDCDTTFNSGCNGGLMDYAFQYIISTGGLHKEDDYPYLMEEGICQEQKEDVERVTISGYEDVPENDDESLVKALAHQPVSVAIEASGRDFQFYKGGVFNGKCGTDLDHGVAAVGYGSSKGSDYVIVKNSWGPRWGEKGFIRMKRNTGKPEGLCGINKMASYPTKTK

SEQ ID NO: 42752 - protein, 301 aa, Arabidopsis thaliana
  peptide (1)..(301): Ceres Seq. ID no. 13645944
  misc_feature (83)..(298): Pfam Name: Papain family cysteine protease Pfam Description: Papain family cysteine protease
  misc_feature (1)..(260): Homolog of NCBI NO: 8886940 NR Description: F2D10.37 [Arabidopsis thaliana]
  misc_feature (1)..(299): Homolog of NCBI NO: 34905996 NR Description: putative cysteine proteinase
  misc_feature (1)..(299): Homolog of NCBI NO: 14719319 NR Description: putative cysteine proteinase [Oryza sativa]
  misc_feature (1)..(286): Homolog of NCBI NO: 7435773 NR Description: cysteine proteinase (EC 3.4.22.-) precursor -
  misc_feature (1)..(301): Homolog of NCBI NO: 37780039 NR Description: cysteine protease 14 [Trifolium repens]
  misc_feature (1)..(301): Homolog of NCBI NO: 22759715 NR Description: cysteine proteinase [Zinnia elegans]
  misc_feature (1)..(301): Homolog of NCBI NO: 30141025 NR Description: cysteine protease-4 [Helianthus annuus]
  misc_feature (1)..(301): Homolog of NCBI NO: 37780041 NR Description: cysteine protease 14 [Trifolium repens]
  misc_feature (1)..(301): Homolog of NCBI NO: 18394919 NR Description: cysteine proteinase XCP2 [Arabidopsis thaliana]
  misc_feature (1)..(301): Homolog of NCBI NO: 18418684 NR Description: cysteine protease XCP1 [Arabidopsis thaliana]
MSEHSKAYKSVEEKVHRFEVFRENLMHIDQRNNEINSYWLGLNEFADLTHEEFKGRYLGLAKPQFSRKRQPSANFRYRDITDLPKSVDWRKKGAVAPVKDQGQCGSCWAFSTVAAVEGINQITTGNLSSLSEQELIDCDTTFNSGCNGGLMDYAFQYIISTGGLHKEDDYPYLMEEGICQEQKEDVERVTISGYEDVPENDDESLVKALAHQPVSVAIEASGRDFQFYKGGVFNGKCGTDLDHGVAAVGYGSSKGSDYVIVKNSWGPRWGEKGFIRMKRNTGKPEGLCGINKMASYPTKTK

SEQ ID NO: 42753 - protein, 276 aa, Arabidopsis thaliana
  peptide (1)..(276): Ceres Seq. ID no. 13645945
  misc_feature (58)..(273): Pfam Name: Papain family cysteine protease Pfam Description: Papain family cysteine protease
  misc_feature (1)..(235): Homolog of NCBI NO: 8886940 NR Description: F2D10.37 [Arabidopsis thaliana]
  misc_feature (1)..(274): Homolog of NCBI NO: 34905996 NR Description: putative cysteine proteinase
  misc_feature (1)..(274): Homolog of NCBI NO: 14719319 NR Description: putative cysteine proteinase [Oryza sativa]
  misc_feature (1)..(261): Homolog of NCBI NO: 7435773 NR Description: cysteine proteinase (EC 3.4.22.-) precursor -
  misc_feature (1)..(276): Homolog of NCBI NO: 37780039 NR Description: cysteine protease 14 [Trifolium repens]
  misc_feature (1)..(276): Homolog of NCBI NO: 22759715 NR Description: cysteine proteinase [Zinnia elegans]
  misc_feature (1)..(276): Homolog of NCBI NO: 30141025 NR Description: cysteine protease-4 [Helianthus annuus]
  misc_feature (1)..(276): Homolog of NCBI NO: 37780041 NR Description: cysteine protease 14 [Trifolium repens]
  misc_feature (1)..(276): Homolog of NCBI NO: 18394919 NR Description: cysteine proteinase XCP2 [Arabidopsis thaliana]
  misc_feature (1)..(276): Homolog of NCBI NO: 18418684 NR Description: cysteine protease XCP1 [Arabidopsis thaliana]
MHIDQRNNEINSYWLGLNEFADLTHEEFKGRYLGLAKPQFSRKRQPSANFRYRDITDLPKSVDWRKKGAVAPVKDQGQCGSCWAFSTVAAVEGINQITTGNLSSLSEQELIDCDTTFNSGCNGGLMDYAFQYIISTGGLHKEDDYPYLMEEGICQEQKEDVERVTISGYEDVPENDDESLVKALAHQPVSVAIEASGRDFQFYKGGVFNGKCGTDLDHGVAAVGYGSSKGSDYVIVKNSWGPRWGEKGFIRMKRNTGKPEGLCGINKMASYPTKTK

SEQ ID NO: 42754 - DNA, 1908 bp, Arabidopsis thaliana
  misc_feature (1)..(1908): Ceres Seq. ID no. 13490997
  misc_feature: MA Experiment ID: 108473 Result: Down-regulated in Transcription
  misc_feature: MA Experiment 108473 PARAMETER Experiment Name: At_Drought_Flowers_cDNA_P Parameter: Timepoint (hr) Value: 7 d
  misc_feature: MA Experiment 108473 PARAMETER Experiment Name: At_Drought_Flowers_cDNA_P Parameter: Tissue Value: Flower
  misc_feature: MA Experiment 108473 PARAMETER Experiment Name: At_Drought_Flowers_cDNA_P Parameter: Treatment Value: Drought vs. No Drought
  misc_feature: MA Experiment ID: 108501 Result: Down-regulated in Transcription
  misc_feature: MA Experiment 108501 PARAMETER Experiment Name: At_ap2_floral_buds_cDNA_P Parameter: Plant Line Value: ap2 (Ler.)
  misc_feature: MA Experiment 108501 PARAMETER Experiment Name: At_ap2_floral_buds_cDNA_P Parameter: Tissue Value: Closed Flower
  misc_feature: MA Experiment ID: 108569 Result: Up-regulated in Transcription
  misc_feature: MA Experiment 108569 PARAMETER Experiment Name: At_0.001%_MeJA__cDNA_P Parameter: Timepoint (hr) Value: 6
  misc_feature: MA Experiment 108569 PARAMETER Experiment Name: At_0.001%_MeJA__cDNA_P Parameter: Tissue Value: Aerial
  misc_feature: MA Experiment 108569 PARAMETER Experiment Name: At_0.001%_MeJA__cDNA_P Parameter: Treatment Value: 0.001% MeJA vs. No Treatment
  misc_feature: MA Experiment ID: 108573 Result: Down-regulated in Transcription
  misc_feature: MA Experiment 108573 PARAMETER Experiment Name: At_Drought_cDNA_P Parameter: Timepoint (hr) Value: 6
  misc_feature: MA Experiment 108573 PARAMETER Experiment Name: At_Drought_cDNA_P Parameter: Tissue Value: Aerial
  misc_feature: MA Experiment 108573 PARAMETER Experiment Name: At_Drought_cDNA_P Parameter: Treatment Value: Drought vs. No Drought
  misc_feature: MA Experiment ID: 108574 Result: Up-regulated in Transcription
  misc_feature: MA Experiment 108574 PARAMETER Experiment Name: At_Wounding__cDNA_P Parameter: Timepoint (hr) Value: 1
  misc_feature: MA Experiment 108574 PARAMETER Experiment Name: At_Wounding__cDNA_P Parameter: Tissue Value: Aerial
  misc_feature: MA Experiment 108574 PARAMETER Experiment Name: At_Wounding__cDNA_P Parameter: Treatment Value: Wounding vs. No Wounding
  misc_feature: MA Experiment ID: 108579 Result: Up-regulated in Transcription
  misc_feature: MA Experiment 108579 PARAMETER Experiment Name: At_4deg_Cold_cDNA_P Parameter: Temperature (deg C) Value: 4 vs. 22
  misc_feature: MA Experiment 108579 PARAMETER Experiment Name: At_4deg_Cold_cDNA_P Parameter: Timepoint (hr) Value: 6
  misc_feature: MA Experiment 108579 PARAMETER Experiment Name: At_4deg_Cold_cDNA_P Parameter: Tissue Value: Aerial
  misc_feature: MA Experiment ID: 108605 Result: Up-regulated in Transcription
  misc_feature: MA Experiment 108605 PARAMETER Experiment Name: At_100uM_ABA_cDNA_P Parameter: Timepoint (hr) Value: 6
  misc_feature: MA Experiment 108605 PARAMETER Experiment Name: At_100uM_ABA_cDNA_P Parameter: Tissue Value: Aerial
  misc_feature: MA Experiment 108605 PARAMETER Experiment Name: At_100uM_ABA_cDNA_P Parameter: Treatment Value: 100uM ABA vs. No Treatment
  misc_feature: MA Experiment ID: 108608 Result: Up-regulated in Transcription
  misc_feature: MA Experiment 108608 PARAMETER Experiment Name: At_100uM_ABA_cDNA_P Parameter: Timepoint (hr) Value: 1
  misc_feature: MA Experiment 108608 PARAMETER Experiment Name: At_100uM_ABA_cDNA_P Parameter: Tissue Value: Aerial
  misc_feature: MA Experiment 108608 PARAMETER Experiment Name: At_100uM_ABA_cDNA_P Parameter: Treatment Value: 100uM ABA vs. No Treatment
  misc_feature: MA Experiment ID: 108609 Result: Up-regulated in Transcription
  misc_feature: MA Experiment 108609 PARAMETER Experiment Name: At_100uM_ABA_cDNA_P Parameter: Timepoint (hr) Value: 24
  misc_feature: MA Experiment 108609 PARAMETER Experiment Name: At_100uM_ABA_cDNA_P Parameter: Tissue Value: Aerial
  misc_feature: MA Experiment 108609 PARAMETER Experiment Name: At_100uM_ABA_cDNA_P Parameter: Treatment Value: 100uM ABA vs. No Treatment
  misc_feature: MA Experiment ID: 108668 Result: Down-regulated in Transcription
  misc_feature: MA Experiment 108668 PARAMETER Experiment Name: At_2mM_SA_cDNA_P Parameter: Plant Line Value: WS
  misc_feature: MA Experiment 108668 PARAMETER Experiment Name: At_2mM_SA_cDNA_P Parameter: Timepoint (hr) Value: 6
  misc_feature: MA Experiment 108668 PARAMETER Experiment Name: At_2mM_SA_cDNA_P Parameter: Treatment Value: 2mM SA vs. No Treatment
  misc_feature: MA Experiment ID: 20000072 Result: Down-regulated in Transcription
  misc_feature: MA Experiment 20000072 PARAMETER Experiment Name: At_100uM_ABA_Mutants_cDNA_P Parameter: Plant Line Value: CS8105
  misc_feature: MA Experiment 20000072 PARAMETER Experiment Name: At_100uM_ABA_Mutants_cDNA_P Parameter: Timepoint (hr) Value: 6
  misc_feature: MA Experiment 20000072 PARAMETER Experiment Name: At_100uM_ABA_Mutants_cDNA_P Parameter: Tissue Value: Aerial
  misc_feature: MA Experiment 20000072 PARAMETER Experiment Name: At_100uM_ABA_Mutants_cDNA_P Parameter: Treatment Value: 100uM ABA vs. No Treatment
  misc_feature: MA Experiment ID: 20000089 Result: Down-regulated in Transcription
  misc_feature: MA Experiment ID: 20000090 Result: Down-regulated in Transcription
  misc_feature: MA Experiment ID: 20000093 Result: Down-regulated in Transcription
  misc_feature: MA Experiment 20000093 PARAMETER Experiment Name: At_42deg_Heat_cDNA_P Parameter: Temperature (deg C) Value: 42 vs. 22
  misc_feature: MA Experiment 20000093 PARAMETER Experiment Name: At_42deg_Heat_cDNA_P Parameter: Timepoint (hr) Value: 0.5
  misc_feature: MA Experiment 20000093 PARAMETER Experiment Name: At_42deg_Heat_cDNA_P Parameter: Tissue Value: Aerial
  misc_feature: MA Experiment ID: 20000112 Result: Down-regulated in Transcription
  misc_feature: MA Experiment 20000112 PARAMETER Experiment Name: At_42deg_Heat_cDNA_P Parameter: Temperature (deg C) Value: 42 vs. 22
  misc_feature: MA Experiment 20000112 PARAMETER Experiment Name: At_42deg_Heat_cDNA_P Parameter: Timepoint (hr) Value: 2
  misc_feature: MA Experiment 20000112 PARAMETER Experiment Name: At_42deg_Heat_cDNA_P Parameter: Tissue Value: Aerial
  misc_feature: MA Experiment ID: 20000113 Result: Down-regulated in Transcription
  misc_feature: MA Experiment 20000113 PARAMETER Experiment Name: At_42deg_Heat_cDNA_P Parameter: Temperature (deg C) Value: 42 vs. 22
  misc_feature: MA Experiment 20000113 PARAMETER Experiment Name: At_42deg_Heat_cDNA_P Parameter: Timepoint (hr) Value: 8
  misc_feature: MA Experiment 20000113 PARAMETER Experiment Name: At_42deg_Heat_cDNA_P Parameter: Tissue Value: Aerial
  misc_feature: MA Experiment ID: 20000182 Result: Down-regulated in Transcription
  misc_feature: MA Experiment 20000182 PARAMETER Experiment Name: At_2mM_SA_P Parameter: Age (day) Value: 14
  misc_feature: MA Experiment 20000182 PARAMETER Experiment Name: At_2mM_SA_P Parameter: Organism Value: A. thaliana
  misc_feature: MA Experiment 20000182 PARAMETER Experiment Name: At_2mM_SA_P Parameter: Plant Line Value: WS
  misc_feature: MA Experiment 20000182 PARAMETER Experiment Name: At_2mM_SA_P Parameter: Timepoint (hr) Value: 6
  misc_feature: MA Experiment 20000182 PARAMETER Experiment Name: At_2mM_SA_P Parameter: Tissue Value: Aerial
  misc_feature: MA Experiment 20000182 PARAMETER Experiment Name: At_2mM_SA_P Parameter: Treatment Value: 2mM SA vs. No Treatment
  misc_feature: MA Experiment ID: 20000185 Result: Down-regulated in Transcription
  misc_feature: MA Experiment 20000185 PARAMETER Experiment Name: At_Roots__P Parameter: Age (day) Value: 7 vs. 21
  misc_feature: MA Experiment 20000185 PARAMETER Experiment Name: At_Roots__P Parameter: Organism Value: A. thaliana
  misc_feature: MA Experiment 20000185 PARAMETER Experiment Name: At_Roots__P Parameter: Tissue Value: Roots vs. Whole Plant
  misc_feature: MA Experiment ID: 20000234 Result: Up-regulated in Transcription
  misc_feature: MA Experiment 20000234 PARAMETER Experiment Name: At_Siliques_P Parameter: Age (day) Value: 21
  misc_feature: MA Experiment 20000234 PARAMETER Experiment Name: At_Siliques_P Parameter: Organism Value: A. thaliana
  misc_feature: MA Experiment 20000234 PARAMETER Experiment Name: At_Siliques_P Parameter: Plant Line Value: WS
  misc_feature: MA Experiment 20000234 PARAMETER Experiment Name: At_Siliques_P Parameter: Tissue Value: Less Than 5mm Siliques vs. Whole Plant
  misc_feature: MA Experiment ID: 20000235 Result: Up-regulated in Transcription
  misc_feature: MA Experiment 20000235 PARAMETER Experiment Name: At_Siliques_P Parameter: Age (day) Value: 21
  misc_feature: MA Experiment 20000235 PARAMETER Experiment Name: At_Siliques_P Parameter: Organism Value: A. thaliana
  misc_feature: MA Experiment 20000235 PARAMETER Experiment Name: At_Siliques_P Parameter: Plant Line Value: WS
  misc_feature: MA Experiment 20000235 PARAMETER Experiment Name: At_Siliques_P Parameter: Tissue Value: 5-10mm Siliques vs. Whole Plant
  misc_feature: MA Experiment ID: 20000265 Result: Up-regulated in Transcription
  misc_feature: MA Experiment 20000265 PARAMETER Experiment Name: At_Open_Flower_P Parameter: Age (day) Value: 21
  misc_feature: MA Experiment 20000265 PARAMETER Experiment Name: At_Open_Flower_P Parameter: Plant Line Value: WS
  misc_feature: MA Experiment 20000265 PARAMETER Experiment Name: At_Open_Flower_P Parameter: Tissue Value: Closed Flower vs. Whole Plant
  misc_feature: MA Experiment ID: 20000286 Result: Up-regulated in Transcription
  misc_feature: MA Experiment 20000286 PARAMETER Experiment Name: At_Open_Flower_P Parameter: Age (day) Value: 21
  misc_feature: MA Experiment 20000286 PARAMETER Experiment Name: At_Open_Flower_P Parameter: Plant Line Value: WS
  misc_feature: MA Experiment 20000286 PARAMETER Experiment Name: At_Open_Flower_P Parameter: Tissue Value: Half Open vs. Whole Plant
  misc_feature: MA Experiment ID: 20000308 Result: Up-regulated in Transcription
  misc_feature: MA Experiment 20000308 PARAMETER Experiment Name: At_100mM_NaCl__P Parameter: Age (day) Value: 17
  misc_feature: MA Experiment 20000308 PARAMETER Experiment Name: At_100mM_NaCl__P Parameter: Organism Value: A. thaliana
  misc_feature: MA Experiment 20000308 PARAMETER Experiment Name: At_100mM_NaCl__P Parameter: Plant Line Value: WS
  misc_feature: MA Experiment 20000308 PARAMETER Experiment Name: At_100mM_NaCl__P Parameter: Timepoint (hr) Value: 72
  misc_feature: MA Experiment 20000308 PARAMETER Experiment Name: At_100mM_NaCl__P Parameter: Tissue Value: Whole Plant
  misc_feature: MA Experiment 20000308 PARAMETER Experiment Name: At_100mM_NaCl__P Parameter: Treatment Value: 100mM NaCl vs. No Treatment
  misc_feature: MA Experiment ID: 20000437 Result: Down-regulated in Transcription
  misc_feature: MA Experiment 20000437 PARAMETER Experiment Name: At_Drought_P Parameter: Age (day) Value: 8
  misc_feature: MA Experiment 20000437 PARAMETER Experiment Name: At_Drought_P Parameter: Organism Value: A. thaliana
  misc_feature: MA Experiment 20000437 PARAMETER Experiment Name: At_Drought_P Parameter: Plant Line Value: WS
  misc_feature: MA Experiment 20000437 PARAMETER Experiment Name: At_Drought_P Parameter: Timepoint (hr) Value: 24
  misc_feature: MA Experiment 20000437 PARAMETER Experiment Name: At_Drought_P Parameter: Tissue Value: Whole Plant
  misc_feature: MA Experiment 20000437 PARAMETER Experiment Name: At_Drought_P Parameter: Treatment Value: Drought vs. No Drought
  misc_feature: MA Experiment ID: 20000438 Result: Down-regulated in Transcription
  misc_feature: MA Experiment 20000438 PARAMETER Experiment Name: At_Shoots__P Parameter: Age (day) Value: 14
  misc_feature: MA Experiment 20000438 PARAMETER Experiment Name: At_Shoots__P Parameter: Tissue Value: Shoots vs. Whole Plant
  misc_feature: MA Experiment ID: 20000439 Result: Down-regulated in Transcription
  misc_feature: MA Experiment 20000439 PARAMETER Experiment Name: At_Roots__P Parameter: Age (day) Value: 14 vs. 21
  misc_feature: MA Experiment 20000439 PARAMETER Experiment Name: At_Roots__P Parameter: Organism Value: A. thaliana
  misc_feature: MA Experiment 20000439 PARAMETER Experiment Name: At_Roots__P Parameter: Tissue Value: Roots vs. Whole Plant
  misc_feature: MA Experiment ID: 20000441 Result: Down-regulated in Transcription
  misc_feature: MA Experiment 20000441 PARAMETER Experiment Name: At_1uM_BR-BRZ__P Parameter: Tissue Value: Shoot Apices
  misc_feature: MA Experiment 20000441 PARAMETER Experiment Name: At_1uM_BR-BRZ__P Parameter: Treatment Value: 1uM BR vs. No Treatment
  misc_feature: MA Experiment ID: 20000443 Result: Down-regulated in Transcription
  misc_feature: MA Experiment 20000443 PARAMETER Experiment Name: At_1uM_BR-BRZ__P Parameter: Tissue Value: Shoot Apices
  misc_feature: MA Experiment 20000443 PARAMETER Experiment Name: At_1uM_BR-BRZ__P Parameter: Treatment Value: 1uM BRZ vs. No Treatment
  misc_feature: MA Experiment ID: 20000453 Result: Up-regulated in Transcription
  misc_feature: MA Experiment 20000453 PARAMETER Experiment Name: At_100uM_ABA_P Parameter: Age (day) Value: 15
  misc_feature: MA Experiment 20000453 PARAMETER Experiment Name: At_100uM_ABA_P Parameter: Organism Value: A. thaliana
  misc_feature: MA Experiment 20000453 PARAMETER Experiment Name: At_100uM_ABA_P Parameter: Plant Line Value: WS
  misc_feature: MA Experiment 20000453 PARAMETER Experiment Name: At_100uM_ABA_P Parameter: Timepoint (hr) Value: 24
  misc_feature: MA Experiment 20000453 PARAMETER Experiment Name: At_100uM_ABA_P Parameter: Tissue Value: Aerial
  misc_feature: MA Experiment 20000453 PARAMETER Experiment Name: At_100uM_ABA_P Parameter: Treatment Value: 100uM ABA vs. No Treatment
  misc_feature: MA Experiment ID: 20000455 Result: Up-regulated in Transcription
  misc_feature: MA Experiment 20000455 PARAMETER Experiment Name: At_100uM_ABA_P Parameter: Age (day) Value: 16
  misc_feature: MA Experiment 20000455 PARAMETER Experiment Name: At_100uM_ABA_P Parameter: Organism Value: A. thaliana
  misc_feature: MA Experiment 20000455 PARAMETER Experiment Name: At_100uM_ABA_P Parameter: Plant Line Value: WS
  misc_feature: MA Experiment 20000455 PARAMETER Experiment Name: At_100uM_ABA_P Parameter: Timepoint (hr) Value: 48
  misc_feature: MA Experiment 20000455 PARAMETER Experiment Name: At_100uM_ABA_P Parameter: Tissue Value: Aerial
  misc_feature: MA Experiment 20000455 PARAMETER Experiment Name: At_100uM_ABA_P Parameter: Treatment Value: 100uM ABA vs. No Treatment
  misc_feature: MA Experiment ID: 20000456 Result: Down-regulated in Transcription
  misc_feature: MA Experiment 20000456 PARAMETER Experiment Name: At_100uM_BA_P Parameter: Age (day) Value: 14
  misc_feature: MA Experiment 20000456 PARAMETER Experiment Name: At_100uM_BA_P Parameter: Organism Value: A. thaliana
  misc_feature: MA Experiment 20000456 PARAMETER Experiment Name: At_100uM_BA_P Parameter: Plant Line Value: WS
  misc_feature: MA Experiment 20000456 PARAMETER Experiment Name: At_100uM_BA_P Parameter: Timepoint (hr) Value: 6
  misc_feature: MA Experiment 20000456 PARAMETER Experiment Name: At_100uM_BA_P Parameter: Tissue Value: Aerial
  misc_feature: MA Experiment 20000456 PARAMETER Experiment Name: At_100uM_BA_P Parameter: Treatment Value: 100uM BA vs. No Treatment
  misc_feature: MA Experiment ID: 20000495 Result: Down-regulated in Transcription
  misc_feature: MA Experiment 20000495 PARAMETER Experiment Name: At_Guard_Cells_P Parameter: Harvest Date Value: 8/2/2002
  misc_feature: MA Experiment 20000495 PARAMETER Experiment Name: At_Guard_Cells_P Parameter: Organism Value: A. thaliana
  misc_feature: MA Experiment 20000495 PARAMETER Experiment Name: At_Guard_Cells_P Parameter: Tissue Value: Guard Cells vs. Leaves
  misc_feature: MA Experiment ID: 20001554 Result: Up-regulated in Transcription
  misc_feature: MA Experiment 20001554 PARAMETER Experiment Name: At_Drought_Soil_Dry_P Parameter: Age (day) Value: 21
  misc_feature: MA Experiment 20001554 PARAMETER Experiment Name: At_Drought_Soil_Dry_P Parameter: Organism Value: A. thaliana
  misc_feature: MA Experiment 20001554 PARAMETER Experiment Name: At_Drought_Soil_Dry_P Parameter: Plant Line Value: WS
  misc_feature: MA Experiment 20001554 PARAMETER Experiment Name: At_Drought_Soil_Dry_P Parameter: Post Timepoint (hr) Value: None
  misc_feature: MA Experiment 20001554 PARAMETER Experiment Name: At_Drought_Soil_Dry_P Parameter: Post-Treatment Value: None
  misc_feature: MA Experiment 20001554 PARAMETER Experiment Name: At_Drought_Soil_Dry_P Parameter: Timepoint (day) Value: 7
  misc_feature: MA Experiment 20001554 PARAMETER Experiment Name: At_Drought_Soil_Dry_P Parameter: Treatment Value: Drought vs. No Drought
  misc_feature: MA Experiment ID: 20001555 Result: Up-regulated in Transcription
  misc_feature: MA Experiment 20001555 PARAMETER Experiment Name: At_Drought_Soil_Dry_P Parameter: Age (day) Value: 24
  misc_feature: MA Experiment 20001555 PARAMETER Experiment Name: At_Drought_Soil_Dry_P Parameter: Organism Value: A. thaliana
  misc_feature: MA Experiment 20001555 PARAMETER Experiment Name: At_Drought_Soil_Dry_P Parameter: Plant Line Value: WS
  misc_feature: MA Experiment 20001555 PARAMETER Experiment Name: At_Drought_Soil_Dry_P Parameter: Post Timepoint (hr) Value: None
  misc_feature: MA Experiment 20001555 PARAMETER Experiment Name: At_Drought_Soil_Dry_P Parameter: Post-Treatment Value: None
  misc_feature: MA Experiment 20001555 PARAMETER Experiment Name: At_Drought_Soil_Dry_P Parameter: Timepoint (day) Value: 10
  misc_feature: MA Experiment 20001555 PARAMETER Experiment Name: At_Drought_Soil_Dry_P Parameter: Treatment Value: Drought vs. No Drought
  misc_feature: MA Experiment ID: 20001556 Result: Up-regulated in Transcription
  misc_feature: MA Experiment 20001556 PARAMETER Experiment Name: At_Drought_Soil_Dry_P Parameter: Age (day) Value: 26
  misc_feature: MA Experiment 20001556 PARAMETER Experiment Name: At_Drought_Soil_Dry_P Parameter: Organism Value: A. thaliana
  misc_feature: MA Experiment 20001556 PARAMETER Experiment Name: At_Drought_Soil_Dry_P Parameter: Plant Line Value: WS
  misc_feature: MA Experiment 20001556 PARAMETER Experiment Name: At_Drought_Soil_Dry_P Parameter: Post Timepoint (hr) Value: None
  misc_feature: MA Experiment 20001556 PARAMETER Experiment Name: At_Drought_Soil_Dry_P Parameter: Post-Treatment Value: None
  misc_feature: MA Experiment 20001556 PARAMETER Experiment Name: At_Drought_Soil_Dry_P Parameter: Timepoint (day) Value: 12
  misc_feature: MA Experiment 20001556 PARAMETER Experiment Name: At_Drought_Soil_Dry_P Parameter: Treatment Value: Drought vs. No Drought
  misc_feature: MA Experiment ID: 20001557 Result: Up-regulated in Transcription
  misc_feature: MA Experiment 20001557 PARAMETER Experiment Name: At_Drought_Soil_Dry_P Parameter: Age (day) Value: 27
  misc_feature: MA Experiment 20001557 PARAMETER Experiment Name: At_Drought_Soil_Dry_P Parameter: Organism Value: A. thaliana
  misc_feature: MA Experiment 20001557 PARAMETER Experiment Name: At_Drought_Soil_Dry_P Parameter: Plant Line Value: WS
  misc_feature: MA Experiment 20001557 PARAMETER Experiment Name: At_Drought_Soil_Dry_P Parameter: Post Timepoint (hr) Value: 3
  misc_feature: MA Experiment 20001557 PARAMETER Experiment Name: At_Drought_Soil_Dry_P Parameter: Post-Treatment Value: Re-Water vs. No Drought
  misc_feature: MA Experiment 20001557 PARAMETER Experiment Name: At_Drought_Soil_Dry_P Parameter: Timepoint (day) Value: 13
  misc_feature: MA Experiment 20001557 PARAMETER Experiment Name: At_Drought_Soil_Dry_P Parameter: Treatment Value: Drought vs. No Drought
  misc_feature: MA Experiment ID: 20001558 Result: Up-regulated in Transcription
  misc_feature: MA Experiment 20001558 PARAMETER Experiment Name: At_Drought_Soil_Dry_P Parameter: Age (day) Value: 27
  misc_feature: MA Experiment 20001558 PARAMETER Experiment Name: At_Drought_Soil_Dry_P Parameter: Organism Value: A. thaliana
  misc_feature: MA Experiment 20001558 PARAMETER Experiment Name: At_Drought_Soil_Dry_P Parameter: Plant Line Value: WS
  misc_feature: MA Experiment 20001558 PARAMETER Experiment Name: At_Drought_Soil_Dry_P Parameter: Post Timepoint (hr) Value: 6
  misc_feature: MA Experiment 20001558 PARAMETER Experiment Name: At_Drought_Soil_Dry_P Parameter: Post-Treatment Value: Re-Water vs. No Drought
  misc_feature: MA Experiment 20001558 PARAMETER Experiment Name: At_Drought_Soil_Dry_P Parameter: Timepoint (day) Value: 13
  misc_feature: MA Experiment 20001558 PARAMETER Experiment Name: At_Drought_Soil_Dry_P Parameter: Treatment Value: Drought vs. No Drought
  misc_feature: MA Experiment ID: 20001559 Result: Up-regulated in Transcription
  misc_feature: MA Experiment 20001559 PARAMETER Experiment Name: At_Drought_Soil_Dry_P Parameter: Age (day) Value: 28
  misc_feature: MA Experiment 20001559 PARAMETER Experiment Name: At_Drought_Soil_Dry_P Parameter: Organism Value: A. thaliana
  misc_feature: MA Experiment 20001559 PARAMETER Experiment Name: At_Drought_Soil_Dry_P Parameter: Plant Line Value: WS
  misc_feature: MA Experiment 20001559 PARAMETER Experiment Name: At_Drought_Soil_Dry_P Parameter: Post Timepoint (hr) Value: 29
  misc_feature: MA Experiment 20001559 PARAMETER Experiment Name: At_Drought_Soil_Dry_P Parameter: Post-Treatment Value: Re-Water vs. No Drought
  misc_feature: MA Experiment 20001559 PARAMETER Experiment Name: At_Drought_Soil_Dry_P Parameter: Timepoint (day) Value: 14
  misc_feature: MA Experiment 20001559 PARAMETER Experiment Name: At_Drought_Soil_Dry_P Parameter: Treatment Value: Drought vs. No Drought
  misc_feature: MA Experiment ID: 20001560 Result: Up-regulated in Transcription
  misc_feature: MA Experiment 20001560 PARAMETER Experiment Name: At_Drought_Soil_Dry_P Parameter: Age (day) Value: 28
  misc_feature: MA Experiment 20001560 PARAMETER Experiment Name: At_Drought_Soil_Dry_P Parameter: Organism Value: A. thaliana
  misc_feature: MA Experiment 20001560 PARAMETER Experiment Name: At_Drought_Soil_Dry_P Parameter: Plant Line Value: WS
  misc_feature: MA Experiment 20001560 PARAMETER Experiment Name: At_Drought_Soil_Dry_P Parameter: Post Timepoint (hr) Value: None
  misc_feature: MA Experiment 20001560 PARAMETER Experiment Name: At_Drought_Soil_Dry_P Parameter: Post-Treatment Value: None
  misc_feature: MA Experiment 20001560 PARAMETER Experiment Name: At_Drought_Soil_Dry_P Parameter: Timepoint (day) Value: 14
  misc_feature: MA Experiment 20001560 PARAMETER Experiment Name: At_Drought_Soil_Dry_P Parameter: Treatment Value: Drought vs. No Drought
  misc_feature: MA Experiment ID: 20001768 Result: Up-regulated in Transcription
  misc_feature: MA Experiment 20001768 PARAMETER Experiment Name: At_Far-red-enriched-adult_P Parameter: Age (day) Value: 28
  misc_feature: MA Experiment 20001768 PARAMETER Experiment Name: At_Far-red-enriched-adult_P Parameter: Light Value: Far-red enriched vs. White
  misc_feature: MA Experiment 20001768 PARAMETER Experiment Name: At_Far-red-enriched-adult_P Parameter: Organism Value: A. thaliana
  misc_feature: MA Experiment 20001768 PARAMETER Experiment Name: At_Far-red-enriched-adult_P Parameter: Plant Line Value: Columbia
  misc_feature: MA Experiment 20001768 PARAMETER Experiment Name: At_Far-red-enriched-adult_P Parameter: Timepoint (hr) Value: 1
  misc_feature: MA Experiment 20001768 PARAMETER Experiment Name: At_Far-red-enriched-adult_P Parameter: Tissue Value: Aerial
  misc_feature: MA Experiment ID: 20001773 Result: Up-regulated in Transcription
  misc_feature: MA Experiment 20001773 PARAMETER Experiment Name: At_Far-red-enriched-adult_P Parameter: Age (day) Value: 30
  misc_feature: MA Experiment 20001773 PARAMETER Experiment Name: At_Far-red-enriched-adult_P Parameter: Light Value: Far-red enriched vs. White
  misc_feature: MA Experiment 20001773 PARAMETER Experiment Name: At_Far-red-enriched-adult_P Parameter: Organism Value: A. thaliana
  misc_feature: MA Experiment 20001773 PARAMETER Experiment Name: At_Far-red-enriched-adult_P Parameter: Plant Line Value: Columbia
  misc_feature: MA Experiment 20001773 PARAMETER Experiment Name: At_Far-red-enriched-adult_P Parameter: Timepoint (hr) Value: 48
  misc_feature: MA Experiment 20001773 PARAMETER Experiment Name: At_Far-red-enriched-adult_P Parameter: Tissue Value: Aerial
  misc_feature: MA Experiment ID: 20001906 Result: Down-regulated in Transcription
  misc_feature: MA Experiment 20001906 PARAMETER Experiment Name: At_Drought_Reproduction_P Parameter: Age (day) Value: 35
  misc_feature: MA Experiment 20001906 PARAMETER Experiment Name: At_Drought_Reproduction_P Parameter: Organism Value: A. thaliana
  misc_feature: MA Experiment 20001906 PARAMETER Experiment Name: At_Drought_Reproduction_P Parameter: Plant Line Value: WS
  misc_feature: MA Experiment 20001906 PARAMETER Experiment Name: At_Drought_Reproduction_P Parameter: Timepoint (day) Value: 5
  misc_feature: MA Experiment 20001906 PARAMETER Experiment Name: At_Drought_Reproduction_P Parameter: Tissue Value: Siliques
  misc_feature: MA Experiment 20001906 PARAMETER Experiment Name: At_Drought_Reproduction_P Parameter: Treatment Value: Drought vs. No Drought
  misc_feature: MA Experiment ID: 20001908 Result: Down-regulated in Transcription
  misc_feature: MA Experiment 20001908 PARAMETER Experiment Name: At_Drought_Reproduction_P Parameter: Age (day) Value: 40
  misc_feature: MA Experiment 20001908 PARAMETER Experiment Name: At_Drought_Reproduction_P Parameter: Organism Value: A. thaliana
  misc_feature: MA Experiment 20001908 PARAMETER Experiment Name: At_Drought_Reproduction_P Parameter: Plant Line Value: WS
  misc_feature: MA Experiment 20001908 PARAMETER Experiment Name: At_Drought_Reproduction_P Parameter: Timepoint (day) Value: 10
  misc_feature: MA Experiment 20001908 PARAMETER Experiment Name: At_Drought_Reproduction_P Parameter: Tissue Value: Siliques
  misc_feature: MA Experiment 20001908 PARAMETER Experiment Name: At_Drought_Reproduction_P Parameter: Treatment Value: Drought vs. No Drought
  misc_feature: MA Experiment ID: 20001911 Result: Down-regulated in Transcription
  misc_feature: MA Experiment 20001911 PARAMETER Experiment Name: At_Drought_Reproduction_P Parameter: Age (day) Value: 40
  misc_feature: MA Experiment 20001911 PARAMETER Experiment Name: At_Drought_Reproduction_P Parameter: Organism Value: A. thaliana
  misc_feature: MA Experiment 20001911 PARAMETER Experiment Name: At_Drought_Reproduction_P Parameter: Plant Line Value: WS
  misc_feature: MA Experiment 20001911 PARAMETER Experiment Name: At_Drought_Reproduction_P Parameter: Timepoint (day) Value: 10
  misc_feature: MA Experiment 20001911 PARAMETER Experiment Name: At_Drought_Reproduction_P Parameter: Tissue Value: Flowers
  misc_feature: MA Experiment 20001911 PARAMETER Experiment Name: At_Drought_Reproduction_P Parameter: Treatment Value: Drought vs. No Drought
ttcgcggttcaaaaaattaagtgatcatcacttctcctcctttatcgagagcttcagttttagagcaacaatgtctctatttctgaagcccttcctcttcctatacgacaccactcttagtcttctcttacttctgttcaatggatggagtcttgaggatacagcagcagcccaaaagaggcgtgaagcagacaaaaatgctgcagaaactgaatggatccaactccaatacttgtggaccaaaacaaggagtgttgtactacttcccgttttcaagggtttggtggttatgtgtttggttctatccattatagtgttcttcgagagtttttacatgaactttgtgatactcttcgtcaagttatttaaacgtaaaccccataaagtgtacaaatgggaggccatgcaagaagatgttgaggttggacccgataactacccaatggttcttatccaaataccaatgtacaatgaaaaagaggtctttcaattatctatagcagcaatatgtagtttggtctggccatcgagccgtctagtagttcaagttgtagatgattctacggatccggccgtaagggaaggtgtggacgtagagattgcaaaatggcaaagccaaggcataaacataaggtgtgaaaggagagataacaggaacggctacaaagccggagctatgaaagaagctcttacgcagagctacgtcaagcaatgcgacttcgtagcagtcttcgatgctgatttccaacccgagcccgattatctcatccgcgctgtccctttccttgtccacaaccctgacgttgctctagttcaagcccgatggatatttgttaacgcgaacaaatgcttgatgacgaggatgcaagagatgtctctcaactatcatttcaaagtggaacaagaatcagggtcgactagacatgctttcttcgggtttaatggaaccgcgggtgtatggagaatatcggcaatggaagcagcaggaggatggaaatcaaggaccacagtagaggacatggacttggctgttcgtgttggtcttcatggctggaaatttgtctaccttaacgacctcacggtgagaaacgagcttccaagcaaatttaaggcctacagattccagcaacataggtggtcctgtggaccggcgaatctatttagaaaaatgacgatggagatcattttcaataagagagtatcaatttggaagaagttttatgtgatctacagctttttcttcgtaaggaaagtggcggtacacttcttgacattcttcttctactgtataattgtgccaacaagtgtcttcttccctgaaatccacatcccatcttggtctaccatttacgttccctctttgatcagtatcttccacaccctggcaactccaagatccttctacctcgtgatattttgggtcttgttcgagaatgtaatggctatgcatcgaaccaaaggtacgtgcattggcctacttgaaggaggaagagtaaacgaatgggttgtgaccgaaaaactaggagatgctttgaagagtaagctactctctcgggtagtccaaagaaaatcttgttatcaaagagtgaattccaaggaagtgatggtgggggtatacatattaggatgtgcactctatggcctgatctatgggcacacatggttacatttctatctttttcttcaggccacagcctttttcgtctccggttttggttttgtcggaacggcctaagaaccttcccggcccattatttttagtcaccaaataaattctccatgttttagttcttatttacacttttatttattttgacaccattgtacggtttggaccccatatcatcatgttgtataagtataacgaataatgattttttgtttgtttgaatgtatgcgtcactcggt

SEQ ID NO: 42755 - protein, 577 aa, Arabidopsis thaliana
  peptide (1)..(577): Ceres Seq. ID no. 13490998
  misc_feature (150)..(328): Pfam Name: Glycosyl transferase Pfam Description: Glycosyl transferase
  misc_feature (74)..(576): Homolog of NCBI NO: 16519223 NR Description: cellulose synthase-like protein OsCslA9 [Oryza
  misc_feature (55)..(575): Homolog of NCBI NO: 21536839 NR Description: putative glucosyltransferase [Arabidopsis
  misc_feature (55)..(575): Homolog of NCBI NO: 18403914 NR Description: glycosyltransferase family 2 [Arabidopsis
  misc_feature (101)..(576): Homolog of NCBI NO: 30688416 NR Description: glycosyltransferase family 2 [Arabidopsis
  misc_feature (24)..(576): Homolog of NCBI NO: 30688411 NR Description: glycosyltransferase family 2 [Arabidopsis
  misc_feature (226)..(576): Homolog of NCBI NO: 15235809 NR Description: glucosyltransferase-related [Arabidopsis
  misc_feature (417)..(576): Homolog of NCBI NO: 9369401 NR Description: T23E23.23 [Arabidopsis thaliana]
  misc_feature (24)..(451): Homolog of NCBI NO: 9369401 NR Description: T23E23.23 [Arabidopsis thaliana]
  misc_feature (24)..(576): Homolog of NCBI NO: 15221657 NR Description: glycosyltransferase family 2 [Arabidopsis
  misc_feature (24)..(576): Homolog of NCBI NO: 28393622 NR Description: putative cellulose synthase [Arabidopsis thaliana]
SRFKKLSDHHFSSFIESFSFRATMSLFLKPFLFLYDTTLSLLLLLFNGWSLEDTAAAQKRREADKNAAETEWIQLQYLWTKTRSVVLLPVFKGLVVMCLVLSIIVFFESFYMNFVILFVKLFKRKPHKVYKWEAMQEDVEVGPDNYPMVLIQIPMYNEKEVFQLSIAAICSLVWPSSRLVVQVVDDSTDPAVREGVDVEIAKWQSQGINIRCERRDNRNGYKAGAMKEALTQSYVKQCDFVAVFDADFQPEPDYLIRAVPFLVHNPDVALVQARWIFVNANKCLMTRMQEMSLNYHFKVEQESGSTRHAFFGFNGTAGVWRISAMEAAGGWKSRTTVEDMDLAVRVGLHGWKFVYLNDLTVRNELPSKFKAYRFQQHRWSCGPANLFRKMTMEIIFNKRVSIWKKFYVIYSFFFVRKVAVHFLTFFFYCIIVPTSVFFPEIHIPSWSTIYVPSLISIFHTLATPRSFYLVIFWVLFENVMAMHRTKGTCIGLLEGGRVNEWVVTEKLGDALKSKLLSRVVQRKSCYQRVNSKEVMVGVYILGCALYGLIYGHTWLHFYLFLQATAFFVSGFGFVGTA

SEQ ID NO: 42756 - protein, 554 aa, Arabidopsis thaliana
  peptide (1)..(554): Ceres Seq. ID no. 13490999
  misc_feature (127)..(305): Pfam Name: Glycosyl transferase Pfam Description: Glycosyl transferase
  misc_feature (51)..(553): Homolog of NCBI NO: 16519223 NR Description: cellulose synthase-like protein OsCslA9 [Oryza
  misc_feature (32)..(552): Homolog of NCBI NO: 21536839 NR Description: putative glucosyltransferase [Arabidopsis
  misc_feature (32)..(552): Homolog of NCBI NO: 18403914 NR Description: glycosyltransferase family 2 [Arabidopsis
  misc_feature (78)..(553): Homolog of NCBI NO: 30688416 NR Description: glycosyltransferase family 2 [Arabidopsis
  misc_feature (1)..(553): Homolog of NCBI NO: 30688411 NR Description: glycosyltransferase family 2 [Arabidopsis
  misc_feature (203)..(553): Homolog of NCBI NO: 15235809 NR Description: glucosyltransferase-related [Arabidopsis
  misc_feature (394)..(553): Homolog of NCBI NO: 9369401 NR Description: T23E23.23 [Arabidopsis thaliana]
  misc_feature (1)..(428): Homolog of NCBI NO: 9369401 NR Description: T23E23.23 [Arabidopsis thaliana]
  misc_feature (1)..(553): Homolog of NCBI NO: 15221657 NR Description: glycosyltransferase family 2 [Arabidopsis
  misc_feature (1)..(553): Homolog of NCBI NO: 28393622 NR Description: putative cellulose synthase [Arabidopsis thaliana]
MSLFLKPFLFLYDTTLSLLLLLFNGWSLEDTAAAQKRREADKNAAETEWIQLQYLWTKTRSVVLLPVFKGLVVMCLVLSIIVFFESFYMNFVILFVKLFKRKPHKVYKWEAMQEDVEVGPDNYPMVLIQIPMYNEKEVFQLSIAAICSLVWPSSRLVVQVVDDSTDPAVREGVDVEIAKWQSQGINIRCERRDNRNGYKAGAMKEALTQSYVKQCDFVAVFDADFQPEPDYLIRAVPFLVHNPDVALVQARWIFVNANKCLMTRMQEMSLNYHFKVEQESGSTRHAFFGFNGTAGVWRISAMEAAGGWKSRTTVEDMDLAVRVGLHGWKFVYLNDLTVRNELPSKFKAYRFQQHRWSCGPANLFRKMTMEIIFNKRVSIWKKFYVIYSFFFVRKVAVHFLTFFFYCIIVPTSVFFPEIHIPSWSTIYVPSLISIFHTLATPRSFYLVIFWVLFENVMAMHRTKGTCIGLLEGGRVNEWVVTEKLGDALKSKLLSRVVQRKSCYQRVNSKEVMVGVYILGCALYGLIYGHTWLHFYLFLQATAFFVSGFGFVGTA

SEQ ID NO: 42757 - protein, 481 aa, Arabidopsis thaliana
  peptide (1)..(481): Ceres Seq. ID no. 13491000
  misc_feature (54)..(232): Pfam Name: Glycosyl transferase Pfam Description: Glycosyl transferase
  misc_feature (1)..(480): Homolog of NCBI NO: 16519223 NR Description: cellulose synthase-like protein OsCslA9 [Oryza
  misc_feature (1)..(479): Homolog of NCBI NO: 21536839 NR Description: putative glucosyltransferase [Arabidopsis
  misc_feature (1)..(479): Homolog of NCBI NO: 18403914 NR Description: glycosyltransferase family 2 [Arabidopsis
  misc_feature (5)..(480): Homolog of NCBI NO: 30688416 NR Description: glycosyltransferase family 2 [Arabidopsis
  misc_feature (1)..(480): Homolog of NCBI NO: 30688411 NR Description: glycosyltransferase family 2 [Arabidopsis
  misc_feature (130)..(480): Homolog of NCBI NO: 15235809 NR Description: glucosyltransferase-related [Arabidopsis
  misc_feature (321)..(480): Homolog of NCBI NO: 9369401 NR Description: T23E23.23 [Arabidopsis thaliana]
  misc_feature (1)..(355): Homolog of NCBI NO: 9369401 NR Description: T23E23.23 [Arabidopsis thaliana]
  misc_feature (1)..(480): Homolog of NCBI NO: 15221657 NR Description: glycosyltransferase family 2 [Arabidopsis
  misc_feature (1)..(480): Homolog of NCBI NO: 28393622 NR Description: putative cellulose synthase [Arabidopsis thaliana]
MCLVLSIIVFFESFYMNFVILFVKLFKRKPHKVYKWEAMQEDVEVGPDNYPMVLIQIPMYNEKEVFQLSIAAICSLVWPSSRLVVQVVDDSTDPAVREGVDVEIAKWQSQGINIRCERRDNRNGYKAGAMKEALTQSYVKQCDFVAVFDADFQPEPDYLIRAVPFLVHNPDVALVQARWIFVNANKCLMTRMQEMSLNYHFKVEQESGSTRHAFFGFNGTAGVWRISAMEAAGGWKSRTTVEDMDLAVRVGLHGWKFVYLNDLTVRNELPSKFKAYRFQQHRWSCGPANLFRKMTMEIIFNKRVSIWKKFYVIYSFFFVRKVAVHFLTFFFYCIIVPTSVFFPEIHIPSWSTIYVPSLISIFHTLATPRSFYLVIFWVLFENVMAMHRTKGTCIGLLEGGRVNEWVVTEKLGDALKSKLLSRVVQRKSCYQRVNSKEVMVGVYILGCALYGLIYGHTWLHFYLFLQATAFFVSGFGFVGTA

SEQ ID NO: 42758 - DNA, 1455 bp, Arabidopsis thaliana
  misc_feature (1)..(1455): Ceres Seq. ID no. 13647045
  misc_feature: MA Experiment ID: 20000180 Result: Up-regulated in Transcription
  misc_feature: MA Experiment 20000180 PARAMETER Experiment Name: At_Germinating_Seeds_P Parameter: Age (hr) Value: 24 vs. 0
  misc_feature: MA Experiment 20000180 PARAMETER Experiment Name: At_Germinating_Seeds_P Parameter: Tissue Value: Germinating Seeds
  misc_feature: MA Experiment ID: 20000185 Result: Up-regulated in Transcription
  misc_feature: MA Experiment 20000185 PARAMETER Experiment Name: At_Roots__P Parameter: Age (day) Value: 7 vs. 21
  misc_feature: MA Experiment 20000185 PARAMETER Experiment Name: At_Roots__P Parameter: Organism Value: A. thaliana
  misc_feature: MA Experiment 20000185 PARAMETER Experiment Name: At_Roots__P Parameter: Tissue Value: Roots vs. Whole Plant
  misc_feature: MA Experiment ID: 20000437 Result: Down-regulated in Transcription
  misc_feature: MA Experiment 20000437 PARAMETER Experiment Name: At_Drought_P Parameter: Age (day) Value: 8
  misc_feature: MA Experiment 20000437 PARAMETER Experiment Name: At_Drought_P Parameter: Organism Value: A. thaliana
  misc_feature: MA Experiment 20000437 PARAMETER Experiment Name: At_Drought_P Parameter: Plant Line Value: WS
  misc_feature: MA Experiment 20000437 PARAMETER Experiment Name: At_Drought_P Parameter: Timepoint (hr) Value: 24
  misc_feature: MA Experiment 20000437 PARAMETER Experiment Name: At_Drought_P Parameter: Tissue Value: Whole Plant
  misc_feature: MA Experiment 20000437 PARAMETER Experiment Name: At_Drought_P Parameter: Treatment Value: Drought vs. No Drought
accaaacaacaaaataacttcaagaaggctggagttaaaaggcaagtaagagaaagacacatcaatataacccaaaacaaaacatcataacagcaacaataacagacacataaccaatggcaaagcgacaactgttgatgctgggtattagaactagctttcatactatcgccgccgtgcttgtggccggattaatattcactgccgtgtttttgtccagaaacagtttgccaaaggaaaatcctcaaagccacggtgttacggatcgcggaggggacagtggcagagaatgtaatttgttcgaagggaaatgggtatttgataacgtatcataccctctttataaagaagaagattgcaagttcatgtctgaccagttggcttgtgagaagtttgggaggaaagatctgagttacaaattctggaggtggcaacctcacacgtgtgatcttcccaggtttaatggaacgaagttgctggagaggctaagaaataagaggatggtgtacgtaggagactctctgaacagaggccaatgggtatcaatggtgtgtatggttagttcggtaattacaaacccaaaggcgatgtatatgcacaacaatggctctaacctcatcacgttcaaagctctcgaatacaatgctacaatagactactattgggctcctttgctggtggaatccaactcggacgacccgacaaaccatagattccccgatcggatagttcggatccaatcaatagaaaaacatgcaaggcattggacgaactctgatatcattgttttcaactcttacttatggtggagaatgcctcatatcaagtcactgtggggatcgtttgagaaattagatggaatatacaaggaagtggagatggtgagagtttatgaaatggctttgcaaacactgtctcagtggttggaggttcacgttaaccccaatattaccaaacttttcttcatgtccatgtctcccacccatgaaagggctgaagaatggggaggaatacttaatcagaactgttatggagaagctagtctaatagataaagaaggatatactggaagagggtcagatccaaagatgatgagagtcttagaaaatgtgcttgacgggctaaaaaatcgaggattaaacatgcagatgataaacattacgcaactatcagagtatcgaaaagaaggtcatccttcgatctacagaaaacaatggggaacagtgaaggaaaatgaaatctcgaatccaagtagtaacgcagattgtatacattggtgtttgcctggagttcctgatgtttggaatgaactcctttatgcttatattcttgaccatcattctagttgaaaactactattatatcttttgtttttttacctattccacttcaattgtacagttgatttccttactctcacttcttttctatcaaaaaaattaacatgtttttctt

SEQ ID NO: 42759 - protein, 410 aa, Arabidopsis thaliana
  peptide (1)..(410): Ceres Seq. ID no. 13647046
  misc_feature (52)..(402): Homolog of NCBI NO: 28876013 NR Description: unknown protein [Oryza sativa (japonica
  misc_feature (21)..(405): Homolog of NCBI NO: 25366731 NR Description: hypothetical protein At2g40150 [imported] -
  misc_feature (21)..(405): Homolog of NCBI NO: 18405283 NR Description: expressed protein [Arabidopsis thaliana]
  misc_feature (39)..(402): Homolog of NCBI NO: 15226647 NR Description: expressed protein [Arabidopsis thaliana]
  misc_feature (39)..(402): Homolog of NCBI NO: 28393743 NR Description: unknown protein [Arabidopsis thaliana]
  misc_feature (57)..(404): Homolog of NCBI NO: 11291876 NR Description: hypothetical protein F7A7.140 - Arabidopsis
  misc_feature (57)..(404): Homolog of NCBI NO: 21536676 NR Description: unknown [Arabidopsis thaliana]
  misc_feature (57)..(404): Homolog of NCBI NO: 18413698 NR Description: expressed protein [Arabidopsis thaliana]
  misc_feature (8)..(410): Homolog of NCBI NO: 7487161 NR Description: hypothetical protein At2g38320 [imported] -
  misc_feature (1)..(410): Homolog of NCBI NO: 18404712 NR Description: expressed protein [Arabidopsis thaliana]
MAKRQLLMLGIRTSFHTIAAVLVAGLIFTAVFLSRNSLPKENPQSHGVTDRGGDSGRECNLFEGKWVFDNVSYPLYKEEDCKFMSDQLACEKFGRKDLSYKFWRWQPHTCDLPRFNGTKLLERLRNKRMVYVGDSLNRGQWVSMVCMVSSVITNPKAMYMHNNGSNLITFKALEYNATIDYYWAPLLVESNSDDPTNHRFPDRIVRIQSIEKHARHWTNSDIIVFNSYLWWRMPHIKSLWGSFEKLDGIYKEVEMVRVYEMALQTLSQWLEVHVNPNITKLFFMSMSPTHERAEEWGGILNQNCYGEASLIDKEGYTGRGSDPKMMRVLENVLDGLKNRGLNMQMINITQLSEYRKEGHPSIYRKQWGTVKENEISNPSSNADCIHWCLPGVPDVWNELLYAYILDHHSS

SEQ ID NO: 42760 - protein, 403 aa, Arabidopsis thaliana
  peptide (1)..(403): Ceres Seq. ID no. 13647047
  misc_feature (45)..(395): Homolog of NCBI NO: 28876013 NR Description: unknown protein [Oryza sativa (japonica
  misc_feature (14)..(398): Homolog of NCBI NO: 25366731 NR Description: hypothetical protein At2g40150 [imported] -
  misc_feature (14)..(398): Homolog of NCBI NO: 18405283 NR Description: expressed protein [Arabidopsis thaliana]
  misc_feature (32)..(395): Homolog of NCBI NO: 15226647 NR Description: expressed protein [Arabidopsis thaliana]
  misc_feature (32)..(395): Homolog of NCBI NO: 28393743 NR Description: unknown protein [Arabidopsis thaliana]
  misc_feature (50)..(397): Homolog of NCBI NO: 11291876 NR Description: hypothetical protein F7A7.140 - Arabidopsis
  misc_feature (50)..(397): Homolog of NCBI NO: 21536676 NR Description: unknown [Arabidopsis thaliana]
  misc_feature (50)..(397): Homolog of NCBI NO: 18413698 NR Description: expressed protein [Arabidopsis thaliana]
  misc_feature (1)..(403): Homolog of NCBI NO: 7487161 NR Description: hypothetical protein At2g38320 [imported] -
  misc_feature (1)..(403): Homolog of NCBI NO: 18404712 NR Description: expressed protein [Arabidopsis thaliana]
MLGIRTSFHTIAAVLVAGLIFTAVFLSRNSLPKENPQSHGVTDRGGDSGRECNLFEGKWVFDNVSYPLYKEEDCKFMSDQLACEKFGRKDLSYKFWRWQPHTCDLPRFNGTKLLERLRNKRMVYVGDSLNRGQWVSMVCMVSSVITNPKAMYMHNNGSNLITFKALEYNATIDYYWAPLLVESNSDDPTNHRFPDRIVRIQSIEKHARHWTNSDIIVFNSYLWWRMPHIKSLWGSFEKLDGIYKEVEMVRVYEMALQTLSQWLEVHVNPNITKLFFMSMSPTHERAEEWGGILNQNCYGEASLIDKEGYTGRGSDPKMMRVLENVLDGLKNRGLNMQMINITQLSEYRKEGHPSIYRKQWGTVKENEISNPSSNADCIHWCLPGVPDVWNELLYAYILDHHSS

SEQ ID NO: 42761 - protein, 327 aa, Arabidopsis thaliana
  peptide (1)..(327): Ceres Seq. ID no. 13647048
  misc_feature (1)..(319): Homolog of NCBI NO: 28876013 NR Description: unknown protein [Oryza sativa (japonica
  misc_feature (1)..(322): Homolog of NCBI NO: 25366731 NR Description: hypothetical protein At2g40150 [imported] -
  misc_feature (1)..(322): Homolog of NCBI NO: 18405283 NR Description: expressed protein [Arabidopsis thaliana]
  misc_feature (1)..(319): Homolog of NCBI NO: 15226647 NR Description: expressed protein [Arabidopsis thaliana]
  misc_feature (1)..(319): Homolog of NCBI NO: 28393743 NR Description: unknown protein [Arabidopsis thaliana]
  misc_feature (1)..(321): Homolog of NCBI NO: 11291876 NR Description: hypothetical protein F7A7.140 - Arabidopsis
  misc_feature (1)..(321): Homolog of NCBI NO: 21536676 NR Description: unknown [Arabidopsis thaliana]
  misc_feature (1)..(321): Homolog of NCBI NO: 18413698 NR Description: expressed protein [Arabidopsis thaliana]
  misc_feature (1)..(327): Homolog of NCBI NO: 7487161 NR Description: hypothetical protein At2g38320 [imported] -
  misc_feature (1)..(327): Homolog of NCBI NO: 18404712 NR Description: expressed protein [Arabidopsis thaliana]
MSDQLACEKFGRKDLSYKFWRWQPHTCDLPRFNGTKLLERLRNKRMVYVGDSLNRGQWVSMVCMVSSVITNPKAMYMHNNGSNLITFKALEYNATIDYYWAPLLVESNSDDPTNHRFPDRIVRIQSIEKHARHWTNSDIIVFNSYLWWRMPHIKSLWGSFEKLDGIYKEVEMVRVYEMALQTLSQWLEVHVNPNITKLFFMSMSPTHERAEEWGGILNQNCYGEASLIDKEGYTGRGSDPKMMRVLENVLDGLKNRGLNMQMINITQLSEYRKEGHPSIYRKQWGTVKENEISNPSSNADCIHWCLPGVPDVWNELLYAYILDHHSS

SEQ ID NO: 42762 - DNA, 2054 bp, Arabidopsis thaliana
  misc_feature (1)..(2054): Ceres Seq. ID no. 12330813
  misc_feature: MA Experiment ID: 108434 Result: Up-regulated in Transcription
  misc_feature: MA Experiment 108434 PARAMETER Experiment Name: At_Root_Tips_cDNA_P Parameter: Tissue Value: Root Tips
  misc_feature: MA Experiment ID: 108462 Result: Down-regulated in Transcription
  misc_feature: MA Experiment 108462 PARAMETER Experiment Name: At_Germinating_Seeds_cDNA_P Parameter: Age (day) Value: 2 vs. 0
  misc_feature: MA Experiment 108462 PARAMETER Experiment Name: At_Germinating_Seeds_cDNA_P Parameter: Tissue Value: Germinating Seeds
  misc_feature: MA Experiment ID: 108463 Result: Down-regulated in Transcription
  misc_feature: MA Experiment 108463 PARAMETER Experiment Name: At_Germinating_Seeds_cDNA_P Parameter: Age (day) Value: 3 vs. 0
  misc_feature: MA Experiment 108463 PARAMETER Experiment Name: At_Germinating_Seeds_cDNA_P Parameter: Tissue Value: Germinating Seeds
  misc_feature: MA Experiment ID: 108464 Result: Down-regulated in Transcription
  misc_feature: MA Experiment 108464 PARAMETER Experiment Name: At_Germinating_Seeds_cDNA_P Parameter: Age (day) Value: 4 vs. 0
  misc_feature: MA Experiment 108464 PARAMETER Experiment Name: At_Germinating_Seeds_cDNA_P Parameter: Tissue Value: Germinating Seeds
  misc_feature: MA Experiment ID: 108573 Result: Down-regulated in Transcription
  misc_feature: MA Experiment 108573 PARAMETER Experiment Name: At_Drought_cDNA_P Parameter: Timepoint (hr) Value: 6
  misc_feature: MA Experiment 108573 PARAMETER Experiment Name: At_Drought_cDNA_P Parameter: Tissue Value: Aerial
  misc_feature: MA Experiment 108573 PARAMETER Experiment Name: At_Drought_cDNA_P Parameter: Treatment Value: Drought vs. No Drought
  misc_feature: MA Experiment ID: 108585 Result: Down-regulated in Transcription
  misc_feature: MA Experiment 108585 PARAMETER Experiment Name: At_5mM_NaNP_cDNA_P Parameter: Timepoint (hr) Value: 6
  misc_feature: MA Experiment 108585 PARAMETER Experiment Name: At_5mM_NaNP_cDNA_P Parameter: Tissue Value: Aerial
  misc_feature: MA Experiment 108585 PARAMETER Experiment Name: At_5mM_NaNP_cDNA_P Parameter: Treatment Value: null
  misc_feature: MA Experiment ID: 108668 Result: Down-regulated in Transcription
  misc_feature: MA Experiment 108668 PARAMETER Experiment Name: At_2mM_SA_cDNA_P Parameter: Plant Line Value: WS
  misc_feature: MA Experiment 108668 PARAMETER Experiment Name: At_2mM_SA_cDNA_P Parameter: Timepoint (hr) Value: 6
  misc_feature: MA Experiment 108668 PARAMETER Experiment Name: At_2mM_SA_cDNA_P Parameter: Treatment Value: 2mM SA vs. No Treatment
  misc_feature: MA Experiment ID: 20000113 Result: Down-regulated in Transcription
  misc_feature: MA Experiment 20000113 PARAMETER Experiment Name: At_42deg_Heat_cDNA_P Parameter: Temperature (deg C) Value: 42 vs. 22
  misc_feature: MA Experiment 20000113 PARAMETER Experiment Name: At_42deg_Heat_cDNA_P Parameter: Timepoint (hr) Value: 8
  misc_feature: MA Experiment 20000113 PARAMETER Experiment Name: At_42deg_Heat_cDNA_P Parameter: Tissue Value: Aerial
  misc_feature: MA Experiment ID: 20000171 Result: Down-regulated in Transcription
  misc_feature: MA Experiment 20000171 PARAMETER Experiment Name: At_42deg_Heat_P Parameter: Age (day) Value: 14
  misc_feature: MA Experiment 20000171 PARAMETER Experiment Name: At_42deg_Heat_P Parameter: Organism Value: A. thaliana
  misc_feature: MA Experiment 20000171 PARAMETER Experiment Name: At_42deg_Heat_P Parameter: Plant Line Value: WS
  misc_feature: MA Experiment 20000171 PARAMETER Experiment Name: At_42deg_Heat_P Parameter: Temperature (deg C) Value: 42 vs. 22
  misc_feature: MA Experiment 20000171 PARAMETER Experiment Name: At_42deg_Heat_P Parameter: Timepoint (hr) Value: 1
  misc_feature: MA Experiment 20000171 PARAMETER Experiment Name: At_42deg_Heat_P Parameter: Tissue Value: Aerial
  misc_feature: MA Experiment ID: 20000180 Result: Up-regulated in Transcription
  misc_feature: MA Experiment 20000180 PARAMETER Experiment Name: At_Germinating_Seeds_P Parameter: Age (hr) Value: 24 vs. 0
  misc_feature: MA Experiment 20000180 PARAMETER Experiment Name: At_Germinating_Seeds_P Parameter: Tissue Value: Germinating Seeds
  misc_feature: MA Experiment ID: 20000184 Result: Down-regulated in Transcription
  misc_feature: MA Experiment 20000184 PARAMETER Experiment Name: At_Shoots__P Parameter: Age (day) Value: 7
  misc_feature: MA Experiment 20000184 PARAMETER Experiment Name: At_Shoots__P Parameter: Tissue Value: Shoots vs. Whole Plant
  misc_feature: MA Experiment ID: 20000224 Result: Up-regulated in Transcription
  misc_feature: MA Experiment ID: 20000227 Result: Up-regulated in Transcription
  misc_feature: MA Experiment 20000227 PARAMETER Experiment Name: At_Root-Tips-vs-Tops_P Parameter: Tissue Value: Root Tips vs. Root Tops
  misc_feature: MA Experiment ID: 20000234 Result: Up-regulated in Transcription
  misc_feature: MA Experiment 20000234 PARAMETER Experiment Name: At_Siliques_P Parameter: Age (day) Value: 21
  misc_feature: MA Experiment 20000234 PARAMETER Experiment Name: At_Siliques_P Parameter: Organism Value: A. thaliana
  misc_feature: MA Experiment 20000234 PARAMETER Experiment Name: At_Siliques_P Parameter: Plant Line Value: WS
  misc_feature: MA Experiment 20000234 PARAMETER Experiment Name: At_Siliques_P Parameter: Tissue Value: Less Than 5mm Siliques vs. Whole Plant
  misc_feature: MA Experiment ID: 20000235 Result: Up-regulated in Transcription
  misc_feature: MA Experiment 20000235 PARAMETER Experiment Name: At_Siliques_P Parameter: Age (day) Value: 21
  misc_feature: MA Experiment 20000235 PARAMETER Experiment Name: At_Siliques_P Parameter: Organism Value: A. thaliana
  misc_feature: MA Experiment 20000235 PARAMETER Experiment Name: At_Siliques_P Parameter: Plant Line Value: WS
  misc_feature: MA Experiment 20000235 PARAMETER Experiment Name: At_Siliques_P Parameter: Tissue Value: 5-10mm Siliques vs. Whole Plant
  misc_feature: MA Experiment ID: 20000264 Result: Up-regulated in Transcription
  misc_feature: MA Experiment 20000264 PARAMETER Experiment Name: At_Open_Flower_P Parameter: Age (day) Value: 21
  misc_feature: MA Experiment 20000264 PARAMETER Experiment Name: At_Open_Flower_P Parameter: Plant Line Value: WS
  misc_feature: MA Experiment 20000264 PARAMETER Experiment Name: At_Open_Flower_P Parameter: Tissue Value: Open Flower vs. Whole Plant
  misc_feature: MA Experiment ID: 20000265 Result: Up-regulated in Transcription
  misc_feature: MA Experiment 20000265 PARAMETER Experiment Name: At_Open_Flower_P Parameter: Age (day) Value: 21
  misc_feature: MA Experiment 20000265 PARAMETER Experiment Name: At_Open_Flower_P Parameter: Plant Line Value: WS
  misc_feature: MA Experiment 20000265 PARAMETER Experiment Name: At_Open_Flower_P Parameter: Tissue Value: Closed Flower vs. Whole Plant
  misc_feature: MA Experiment ID: 20000286 Result: Up-regulated in Transcription
  misc_feature: MA Experiment 20000286 PARAMETER Experiment Name: At_Open_Flower_P Parameter: Age (day) Value: 21
  misc_feature: MA Experiment 20000286 PARAMETER Experiment Name: At_Open_Flower_P Parameter: Plant Line Value: WS
  misc_feature: MA Experiment 20000286 PARAMETER Experiment Name: At_Open_Flower_P Parameter: Tissue Value: Half Open vs. Whole Plant
  misc_feature: MA Experiment ID: 20000437 Result: Down-regulated in Transcription
  misc_feature: MA Experiment 20000437 PARAMETER Experiment Name: At_Drought_P Parameter: Age (day) Value: 8
  misc_feature: MA Experiment 20000437 PARAMETER Experiment Name: At_Drought_P Parameter: Organism Value: A. thaliana
  misc_feature: MA Experiment 20000437 PARAMETER Experiment Name: At_Drought_P Parameter: Plant Line Value: WS
  misc_feature: MA Experiment 20000437 PARAMETER Experiment Name: At_Drought_P Parameter: Timepoint (hr) Value: 24
  misc_feature: MA Experiment 20000437 PARAMETER Experiment Name: At_Drought_P Parameter: Tissue Value: Whole Plant
  misc_feature: MA Experiment 20000437 PARAMETER Experiment Name: At_Drought_P Parameter: Treatment Value: Drought vs. No Drought
  misc_feature: MA Experiment ID: 20000573 Result: Down-regulated in Transcription
  misc_feature: MA Experiment 20000573 PARAMETER Experiment Name: At_100uM_ABA_Mutants__P Parameter: Organism Value: A. thaliana
  misc_feature: MA Experiment 20000573 PARAMETER Experiment Name: At_100uM_ABA_Mutants__P Parameter: Plant Line Value: CS22 vs. Ler wt
  misc_feature: MA Experiment 20000573 PARAMETER Experiment Name: At_100uM_ABA_Mutants__P Parameter: Timepoint (hr) Value: N/A
  misc_feature: MA Experiment 20000573 PARAMETER Experiment Name: At_100uM_ABA_Mutants__P Parameter: Tissue Value: Whole Plant
  misc_feature: MA Experiment 20000573 PARAMETER Experiment Name: At_100uM_ABA_Mutants__P Parameter: Treatment Value: None
  misc_feature: MA Experiment ID: 20000794 Result: Down-regulated in Transcription
  misc_feature: MA Experiment 20000794 PARAMETER Experiment Name: At_Petals_P Parameter: Age (day) Value: 23-25 days
  misc_feature: MA Experiment 20000794 PARAMETER Experiment Name: At_Petals_P Parameter: Plant Line Value: WS
  misc_feature: MA Experiment 20000794 PARAMETER Experiment Name: At_Petals_P Parameter: Tissue Value: Petals vs. Whole plant
  misc_feature: MA Experiment ID: 20001558 Result: Up-regulated in Transcription
  misc_feature: MA Experiment 20001558 PARAMETER Experiment Name: At_Drought_Soil_Dry_P Parameter: Age (day) Value: 27
  misc_feature: MA Experiment 20001558 PARAMETER Experiment Name: At_Drought_Soil_Dry_P Parameter: Organism Value: A. thaliana
  misc_feature: MA Experiment 20001558 PARAMETER Experiment Name: At_Drought_Soil_Dry_P Parameter: Plant Line Value: WS
  misc_feature: MA Experiment 20001558 PARAMETER Experiment Name: At_Drought_Soil_Dry_P Parameter: Post Timepoint (hr) Value: 6
  misc_feature: MA Experiment 20001558 PARAMETER Experiment Name: At_Drought_Soil_Dry_P Parameter: Post-Treatment Value: Re-Water vs. No Drought
  misc_feature: MA Experiment 20001558 PARAMETER Experiment Name: At_Drought_Soil_Dry_P Parameter: Timepoint (day) Value: 13
  misc_feature: MA Experiment 20001558 PARAMETER Experiment Name: At_Drought_Soil_Dry_P Parameter: Treatment Value: Drought vs. No Drought
  misc_feature: MA Experiment ID: 20001560 Result: Up-regulated in Transcription
  misc_feature: MA Experiment 20001560 PARAMETER Experiment Name: At_Drought_Soil_Dry_P Parameter: Age (day) Value: 28
  misc_feature: MA Experiment 20001560 PARAMETER Experiment Name: At_Drought_Soil_Dry_P Parameter: Organism Value: A. thaliana
  misc_feature: MA Experiment 20001560 PARAMETER Experiment Name: At_Drought_Soil_Dry_P Parameter: Plant Line Value: WS
  misc_feature: MA Experiment 20001560 PARAMETER Experiment Name: At_Drought_Soil_Dry_P Parameter: Post Timepoint (hr) Value: None
  misc_feature: MA Experiment 20001560 PARAMETER Experiment Name: At_Drought_Soil_Dry_P Parameter: Post-Treatment Value: None
  misc_feature: MA Experiment 20001560 PARAMETER Experiment Name: At_Drought_Soil_Dry_P Parameter: Timepoint (day) Value: 14
  misc_feature: MA Experiment 20001560 PARAMETER Experiment Name: At_Drought_Soil_Dry_P Parameter: Treatment Value: Drought vs. No Drought
ctgtttcctatgctctctctctctcttactctcacagtgactattcgtcgcttcagatctaaaagagaggaagataaaccatttggattcaatatcgattaaggaaaccttttgacttcacaagaatggcagtgacagaagcagaaaatcctcttcttggtgaaatcacttgtggcaccttactacagaagttgcaggaaatctgggatgaggttggggagagtgatgaagaacgagacaaactgcttctacagattgaggaagagtgtctgaatgtttacaaaaagaaagttgagctagccgcaaaatctcgtgcagagcttcttcagactttgtcagatgccactgttgaactttccaatctcacaactgctctcggggaaaaaagctatatcgacattcctgataagacttcaggaacgatcaaagaacaactttctgcaatagcacctgcgcttgaacaactttggcaacagaaagaggaaagggtccgggcattttctgatgtacaatcacagattcagaagatatgtgaggagatcgctggcggattgaacaatggacctcatgtggttgatgagactgacttgtctctaaagagattagatgacttccagaggaaactccaagagctccagaaagagaagagtgataggttacagaaggtgctcgagtttgtgagcacggtgcatgatctatgtgccgtccttcgtttagatttcttaagcactgtcaccgaagttcatccgagcttagatgaggcaaatggtgttcaaaccaagagcattagcaatgaaacacttgcaaggttggctaagactgtcttgactcttaaagaagataaaatgcaaagacttaagaagcttcaagaactagctactcagctaactgatctatggaatctgatggatacttctgatgaggaaagggagctttttgaccatgttacctctaacatttcagcttcagttcatgaagtgactgcctctggtgctctcgcacttgatcttatcgaacaggctgaggtggaagtggataggcttgatcaactgaaatctagcagaatgaaggaaattgcattcaaaaagcaatcagagcttgaggagatatatgctcgtgctcacatagaaataaaaccagaggttgttcgtgagaggatcatgtcgttgattgatgctgggaatactgaacctactgagttactggctgacatggatagccagatcgcaaaggccaaggaggaagcctttagtagaaaagaaattttagaccgtgtagagaaatggatgtcagcttgtgaggaagagagctggctcgaagattacaatcgagatcagaacaggtatagtgcaagccgaggtgcgcatttgaatctcaagagagctgagaaagctcggattctggtcagcaagattactgctatggttgacacgttgattgctaaaacccgggcatgggaagaggagaacagtatgtcctttgagtacgatggagttcctttactcgccatgctagatgaatacactatgcttaggcaagaacgagaagatgagaagcggaggctgaaagaacagaagaagcagcaagaacagccacacacagatcaagaatccgcctttgggtctaaaccaagccctgcaagacccgttagtgccaagaaaccggtgggaacacgagtcaatggaggagggctcaacgaaactcctatgaggcgtttgtctatgaactcaaaccagaacggaagcaagtccaagagagacagtctgaacaagatagcttcaccttcgaacattgtagccaacacaaaagatgatgctgcatctccagtctctcgtgctgacccagtgatggcttcaccgtgacaatatcaaaagaaagagagttataatgcttacttacacttttgttagttgctaatagtgctgtttaagaaacaaacacttagaaacaaagacaatgagagtagaatgttacttagatgtttctgtttctgtattcattcactcaaatttgtttggtacttgttagcatgactaatgtgaagtgaccggttt

SEQ ID NO: 42763 - protein, 578 aa, Arabidopsis thaliana
  peptide (1)..(578): Ceres Seq. ID no. 12330814
  misc_feature (36)..(571): Pfam Name: Microtubule associated protein (MAP65/ASE1 family) Pfam Description: Microtubule associated protein (MAP65/ASE1
  misc_feature (15)..(529): Homolog of NCBI NO: 25410943 NR Description: hypothetical protein At2g01910 [imported] -
  misc_feature (13)..(535): Homolog of NCBI NO: 27357984 NR Description: Unknown protein [Oryza sativa (japonica
  misc_feature (7)..(535): Homolog of NCBI NO: 15242132 NR Description: putative protein; protein id: At5g51600.1
  misc_feature (1)..(578): Homolog of NCBI NO: 11558254 NR Description: microtubule-associated protein MAP65-1b
  misc_feature (1)..(578): Homolog of NCBI NO: 11558256 NR Description: microtubule-associated protein MAP65-1c
  misc_feature (1)..(578): Homolog of NCBI NO: 11558252 NR Description: microtubule-associated protein MAP65-1a
  misc_feature (1)..(578): Homolog of NCBI NO: 28200790 NR Description: 65kD microtubule associated protein [Daucus
  misc_feature (1)..(431): Homolog of NCBI NO: 7485328 NR Description: hypothetical protein F10M23.100 - Arabidopsis
  misc_feature (1)..(578): Homolog of NCBI NO: 15240485 NR Description: putative protein; protein id: At5g55230.1
  misc_feature (1)..(578): Homolog of NCBI NO: 18416818 NR Description: putative protein
MAVTEAENPLLGEITCGTLLQKLQEIWDEVGESDEERDKLLLQIEEECLNVYKKKVELAAKSRAELLQTLSDATVELSNLTTALGEKSYIDIPDKTSGTIKEQLSAIAPALEQLWQQKEERVRAFSDVQSQIQKICEEIAGGLNNGPHVVDETDLSLKRLDDFQRKLQELQKEKSDRLQKVLEFVSTVHDLCAVLRLDFLSTVTEVHPSLDEANGVQTKSISNETLARLAKTVLTLKEDKMQRLKKLQELATQLTDLWNLMDTSDEERELFDHVTSNISASVHEVTASGALALDLIEQAEVEVDRLDQLKSSRMKEIAFKKQSELEEIYARAHIEIKPEVVRERIMSLIDAGNTEPTELLADMDSQIAKAKEEAFSRKEILDRVEKWMSACEEESWLEDYNRDQNRYSASRGAHLNLKRAEKARILVSKITAMVDTLIAKTRAWEEENSMSFEYDGVPLLAMLDEYTMLRQEREDEKRRLKEQKKQQEQPHTDQESAFGSKPSPARPVSAKKPVGTRVNGGGLNETPMRRLSMNSNQNGSKSKRDSLNKIASPSNIVANTKDDAASPVSRADPVMASP

SEQ ID NO: 42764 - protein, 338 aa, Arabidopsis thaliana
  peptide (1)..(338): Ceres Seq. ID no. 12330815
  misc_feature (1)..(331): Pfam Name: Microtubule associated protein (MAP65/ASE1 family) Pfam Description: Microtubule associated protein (MAP65/ASE1
  misc_feature (1)..(289): Homolog of NCBI NO: 25410943 NR Description: hypothetical protein At2g01910 [imported] -
  misc_feature (1)..(295): Homolog of NCBI NO: 27357984 NR Description: Unknown protein [Oryza sativa (japonica
  misc_feature (1)..(295): Homolog of NCBI NO: 15242132 NR Description: putative protein; protein id: At5g51600.1
  misc_feature (1)..(338): Homolog of NCBI NO: 11558254 NR Description: microtubule-associated protein MAP65-1b
  misc_feature (1)..(338): Homolog of NCBI NO: 11558256 NR Description: microtubule-associated protein MAP65-1c
  misc_feature (1)..(338): Homolog of NCBI NO: 11558252 NR Description: microtubule-associated protein MAP65-1a
  misc_feature (1)..(338): Homolog of NCBI NO: 28200790 NR Description: 65kD microtubule associated protein [Daucus
  misc_feature (1)..(191): Homolog of NCBI NO: 7485328 NR Description: hypothetical protein F10M23.100 - Arabidopsis
  misc_feature (1)..(338): Homolog of NCBI NO: 15240485 NR Description: putative protein; protein id: At5g55230.1
  misc_feature (1)..(338): Homolog of NCBI NO: 18416818 NR Description: putative protein
MQRLKKLQELATQLTDLWNLMDTSDEERELFDHVTSNISASVHEVTASGALALDLIEQAEVEVDRLDQLKSSRMKEIAFKKQSELEEIYARAHIEIKPEVVRERIMSLIDAGNTEPTELLADMDSQIAKAKEEAFSRKEILDRVEKWMSACEEESWLEDYNRDQNRYSASRGAHLNLKRAEKARILVSKITAMVDTLIAKTRAWEEENSMSFEYDGVPLLAMLDEYTMLRQEREDEKRRLKEQKKQQEQPHTDQESAFGSKPSPARPVSAKKPVGTRVNGGGLNETPMRRLSMNSNQNGSKSKRDSLNKIASPSNIVANTKDDAASPVSRADPVMASP

SEQ ID NO: 42765 - protein, 318 aa, Arabidopsis thaliana
  peptide (1)..(318): Ceres Seq. ID no. 12330816
  misc_feature (1)..(311): Pfam Name: Microtubule associated protein (MAP65/ASE1 family) Pfam Description: Microtubule associated protein (MAP65/ASE1
  misc_feature (1)..(269): Homolog of NCBI NO: 25410943 NR Description: hypothetical protein At2g01910 [imported] -
  misc_feature (1)..(275): Homolog of NCBI NO: 27357984 NR Description: Unknown protein [Oryza sativa (japonica
  misc_feature (1)..(275): Homolog of NCBI NO: 15242132 NR Description: putative protein; protein id: At5g51600.1
  misc_feature (1)..(318): Homolog of NCBI NO: 11558254 NR Description: microtubule-associated protein MAP65-1b
  misc_feature (1)..(318): Homolog of NCBI NO: 11558256 NR Description: microtubule-associated protein MAP65-1c
  misc_feature (1)..(318): Homolog of NCBI NO: 11558252 NR Description: microtubule-associated protein MAP65-1a
  misc_feature (1)..(318): Homolog of NCBI NO: 28200790 NR Description: 65kD microtubule associated protein [Daucus
  misc_feature (1)..(171): Homolog of NCBI NO: 7485328 NR Description: hypothetical protein F10M23.100 - Arabidopsis
  misc_feature (1)..(318): Homolog of NCBI NO: 15240485 NR Description: putative protein; protein id: At5g55230.1
  misc_feature (1)..(318): Homolog of NCBI NO: 18416818 NR Description: putative protein
MDTSDEERELFDHVTSNISASVHEVTASGALALDLIEQAEVEVDRLDQLKSSRMKEIAFKKQSELEEIYARAHIEIKPEVVRERIMSLIDAGNTEPTELLADMDSQIAKAKEEAFSRKEILDRVEKWMSACEEESWLEDYNRDQNRYSASRGAHLNLKRAEKARILVSKITAMVDTLIAKTRAWEEENSMSFEYDGVPLLAMLDEYTMLRQEREDEKRRLKEQKKQQEQPHTDQESAFGSKPSPARPVSAKKPVGTRVNGGGLNETPMRRLSMNSNQNGSKSKRDSLNKIASPSNIVANTKDDAASPVSRADPVMASP

SEQ ID NO: 42766 - DNA, 1714 bp, Arabidopsis thaliana
  misc_feature (1)..(1714): Ceres Seq. ID no. 12338696
  misc_feature: MA Experiment ID: 108461 Result: Up-regulated in Transcription
  misc_feature: MA Experiment 108461 PARAMETER Experiment Name: At_Germinating_Seeds_cDNA_P Parameter: Age (day) Value: 1 vs. 0
  misc_feature: MA Experiment 108461 PARAMETER Experiment Name: At_Germinating_Seeds_cDNA_P Parameter: Tissue Value: Germinating Seeds
  misc_feature: MA Experiment ID: 108462 Result: Up-regulated in Transcription
  misc_feature: MA Experiment 108462 PARAMETER Experiment Name: At_Germinating_Seeds_cDNA_P Parameter: Age (day) Value: 2 vs. 0
  misc_feature: MA Experiment 108462 PARAMETER Experiment Name: At_Germinating_Seeds_cDNA_P Parameter: Tissue Value: Germinating Seeds
  misc_feature: MA Experiment ID: 108463 Result: Up-regulated in Transcription
  misc_feature: MA Experiment 108463 PARAMETER Experiment Name: At_Germinating_Seeds_cDNA_P Parameter: Age (day) Value: 3 vs. 0
  misc_feature: MA Experiment 108463 PARAMETER Experiment Name: At_Germinating_Seeds_cDNA_P Parameter: Tissue Value: Germinating Seeds
  misc_feature: MA Experiment ID: 108464 Result: Up-regulated in Transcription
  misc_feature: MA Experiment 108464 PARAMETER Experiment Name: At_Germinating_Seeds_cDNA_P Parameter: Age (day) Value: 4 vs. 0
  misc_feature: MA Experiment 108464 PARAMETER Experiment Name: At_Germinating_Seeds_cDNA_P Parameter: Tissue Value: Germinating Seeds
  misc_feature: MA Experiment ID: 108501 Result: Down-regulated in Transcription
  misc_feature: MA Experiment 108501 PARAMETER Experiment Name: At_ap2_floral_buds_cDNA_P Parameter: Plant Line Value: ap2 (Ler.)
  misc_feature: MA Experiment 108501 PARAMETER Experiment Name: At_ap2_floral_buds_cDNA_P Parameter: Tissue Value: Closed Flower
  misc_feature: MA Experiment ID: 108594 Result: Down-regulated in Transcription
  misc_feature: MA Experiment 108594 PARAMETER Experiment Name: At_Ler-rhl_Root_cDNA_P Parameter: Plant Line Value: null
  misc_feature: MA Experiment ID: 20000111 Result: Up-regulated in Transcription
  misc_feature: MA Experiment 20000111 PARAMETER Experiment Name: At_42deg_Heat_cDNA_P Parameter: Temperature (deg C) Value: 42 vs. 22
  misc_feature: MA Experiment 20000111 PARAMETER Experiment Name: At_42deg_Heat_cDNA_P Parameter: Timepoint (hr) Value: 6
  misc_feature: MA Experiment 20000111 PARAMETER Experiment Name: At_42deg_Heat_cDNA_P Parameter: Tissue Value: Aerial
  misc_feature: MA Experiment ID: 20000180 Result: Up-regulated in Transcription
  misc_feature: MA Experiment 20000180 PARAMETER Experiment Name: At_Germinating_Seeds_P Parameter: Age (hr) Value: 24 vs. 0
  misc_feature: MA Experiment 20000180 PARAMETER Experiment Name: At_Germinating_Seeds_P Parameter: Tissue Value: Germinating Seeds
  misc_feature: MA Experiment ID: 20000184 Result: Up-regulated in Transcription
  misc_feature: MA Experiment 20000184 PARAMETER Experiment Name: At_Shoots__P Parameter: Age (day) Value: 7
  misc_feature: MA Experiment 20000184 PARAMETER Experiment Name: At_Shoots__P Parameter: Tissue Value: Shoots vs. Whole Plant
  misc_feature: MA Experiment ID: 20000185 Result: Up-regulated in Transcription
  misc_feature: MA Experiment 20000185 PARAMETER Experiment Name: At_Roots__P Parameter: Age (day) Value: 7 vs. 21
  misc_feature: MA Experiment 20000185 PARAMETER Experiment Name: At_Roots__P Parameter: Organism Value: A. thaliana
  misc_feature: MA Experiment 20000185 PARAMETER Experiment Name: At_Roots__P Parameter: Tissue Value: Roots vs. Whole Plant
  misc_feature: MA Experiment ID: 20000264 Result: Up-regulated in Transcription
  misc_feature: MA Experiment 20000264 PARAMETER Experiment Name: At_Open_Flower_P Parameter: Age (day) Value: 21
  misc_feature: MA Experiment 20000264 PARAMETER Experiment Name: At_Open_Flower_P Parameter: Plant Line Value: WS
  misc_feature: MA Experiment 20000264 PARAMETER Experiment Name: At_Open_Flower_P Parameter: Tissue Value: Open Flower vs. Whole Plant
  misc_feature: MA Experiment ID: 20000286 Result: Up-regulated in Transcription
  misc_feature: MA Experiment 20000286 PARAMETER Experiment Name: At_Open_Flower_P Parameter: Age (day) Value: 21
  misc_feature: MA Experiment 20000286 PARAMETER Experiment Name: At_Open_Flower_P Parameter: Plant Line Value: WS
  misc_feature: MA Experiment 20000286 PARAMETER Experiment Name: At_Open_Flower_P Parameter: Tissue Value: Half Open vs. Whole Plant
  misc_feature: MA Experiment ID: 20000437 Result: Down-regulated in Transcription
  misc_feature: MA Experiment 20000437 PARAMETER Experiment Name: At_Drought_P Parameter: Age (day) Value: 8
  misc_feature: MA Experiment 20000437 PARAMETER Experiment Name: At_Drought_P Parameter: Organism Value: A. thaliana
  misc_feature: MA Experiment 20000437 PARAMETER Experiment Name: At_Drought_P Parameter: Plant Line Value: WS
  misc_feature: MA Experiment 20000437 PARAMETER Experiment Name: At_Drought_P Parameter: Timepoint (hr) Value: 24
  misc_feature: MA Experiment 20000437 PARAMETER Experiment Name: At_Drought_P Parameter: Tissue Value: Whole Plant
  misc_feature: MA Experiment 20000437 PARAMETER Experiment Name: At_Drought_P Parameter: Treatment Value: Drought vs. No Drought
  misc_feature: MA Experiment ID: 20000438 Result: Up-regulated in Transcription
  misc_feature: MA Experiment 20000438 PARAMETER Experiment Name: At_Shoots__P Parameter: Age (day) Value: 14
  misc_feature: MA Experiment 20000438 PARAMETER Experiment Name: At_Shoots__P Parameter: Tissue Value: Shoots vs. Whole Plant
  misc_feature: MA Experiment ID: 20000439 Result: Up-regulated in Transcription
  misc_feature: MA Experiment 20000439 PARAMETER Experiment Name: At_Roots__P Parameter: Age (day) Value: 14 vs. 21
  misc_feature: MA Experiment 20000439 PARAMETER Experiment Name: At_Roots__P Parameter: Organism Value: A. thaliana
  misc_feature: MA Experiment 20000439 PARAMETER Experiment Name: At_Roots__P Parameter: Tissue Value: Roots vs. Whole Plant
  misc_feature: MA Experiment ID: 20000451 Result: Up-regulated in Transcription
  misc_feature: MA Experiment 20000451 PARAMETER Experiment Name: At_CS6879_Shoots-Roots_P Parameter: Age (day) Value: 14
  misc_feature: MA Experiment 20000451 PARAMETER Experiment Name: At_CS6879_Shoots-Roots_P Parameter: Organism Value: A. thaliana
  misc_feature: MA Experiment 20000451 PARAMETER Experiment Name: At_CS6879_Shoots-Roots_P Parameter: Plant Line Value: CS6879 vs. WS
  misc_feature: MA Experiment 20000451 PARAMETER Experiment Name: At_CS6879_Shoots-Roots_P Parameter: Tissue Value: Roots
  misc_feature: MA Experiment ID: 20000452 Result: Up-regulated in Transcription
  misc_feature: MA Experiment 20000452 PARAMETER Experiment Name: At_CS6879_Shoots-Roots_P Parameter: Age (day) Value: 14
  misc_feature: MA Experiment 20000452 PARAMETER Experiment Name: At_CS6879_Shoots-Roots_P Parameter: Organism Value: A. thaliana
  misc_feature: MA Experiment 20000452 PARAMETER Experiment Name: At_CS6879_Shoots-Roots_P Parameter: Plant Line Value: CS6879 vs. WS
  misc_feature: MA Experiment 20000452 PARAMETER Experiment Name: At_CS6879_Shoots-Roots_P Parameter: Tissue Value: Shoots
  misc_feature: MA Experiment ID: 20000573 Result: Down-regulated in Transcription
  misc_feature: MA Experiment 20000573 PARAMETER Experiment Name: At_100uM_ABA_Mutants__P Parameter: Organism Value: A. thaliana
  misc_feature: MA Experiment 20000573 PARAMETER Experiment Name: At_100uM_ABA_Mutants__P Parameter: Plant Line Value: CS22 vs. Ler wt
  misc_feature: MA Experiment 20000573 PARAMETER Experiment Name: At_100uM_ABA_Mutants__P Parameter: Timepoint (hr) Value: N/A
  misc_feature: MA Experiment 20000573 PARAMETER Experiment Name: At_100uM_ABA_Mutants__P Parameter: Tissue Value: Whole Plant
  misc_feature: MA Experiment 20000573 PARAMETER Experiment Name: At_100uM_ABA_Mutants__P Parameter: Treatment Value: None
  misc_feature: MA Experiment ID: 20000794 Result: Up-regulated in Transcription
  misc_feature: MA Experiment 20000794 PARAMETER Experiment Name: At_Petals_P Parameter: Age (day) Value: 23-25 days
  misc_feature: MA Experiment 20000794 PARAMETER Experiment Name: At_Petals_P Parameter: Plant Line Value: WS
  misc_feature: MA Experiment 20000794 PARAMETER Experiment Name: At_Petals_P Parameter: Tissue Value: Petals vs. Whole plant
  misc_feature: MA Experiment ID: 20001248 Result: Down-regulated in Transcription
  misc_feature: MA Experiment 20001248 PARAMETER Experiment Name: At_Far-red-induction_P Parameter: Age (day) Value: 7
  misc_feature: MA Experiment 20001248 PARAMETER Experiment Name: At_Far-red-induction_P Parameter: Light Value: Far-red vs. White
  misc_feature: MA Experiment 20001248 PARAMETER Experiment Name: At_Far-red-induction_P Parameter: Organism Value: A. thaliana
  misc_feature: MA Experiment 20001248 PARAMETER Experiment Name: At_Far-red-induction_P Parameter: Plant Line Value: Columbia
  misc_feature: MA Experiment 20001248 PARAMETER Experiment Name: At_Far-red-induction_P Parameter: Timepoint (hr) Value: 4
  misc_feature: MA Experiment 20001248 PARAMETER Experiment Name: At_Far-red-induction_P Parameter: Tissue Value: Whole Plant
  misc_feature: MA Experiment ID: 20001450 Result: Down-regulated in Transcription
  misc_feature: MA Experiment 20001450 PARAMETER Experiment Name: At_Far-red-induction_P Parameter: Age (day) Value: 7
  misc_feature: MA Experiment 20001450 PARAMETER Experiment Name: At_Far-red-induction_P Parameter: Light Value: Far-red vs. White
  misc_feature: MA Experiment 20001450 PARAMETER Experiment Name: At_Far-red-induction_P Parameter: Organism Value: A. thaliana
  misc_feature: MA Experiment 20001450 PARAMETER Experiment Name: At_Far-red-induction_P Parameter: Plant Line Value: Columbia
  misc_feature: MA Experiment 20001450 PARAMETER Experiment Name: At_Far-red-induction_P Parameter: Timepoint (hr) Value: 8
  misc_feature: MA Experiment 20001450 PARAMETER Experiment Name: At_Far-red-induction_P Parameter: Tissue Value: Whole Plant
  misc_feature: MA Experiment ID: 20001773 Result: Up-regulated in Transcription
  misc_feature: MA Experiment 20001773 PARAMETER Experiment Name: At_Far-red-enriched-adult_P Parameter: Age (day) Value: 30
  misc_feature: MA Experiment 20001773 PARAMETER Experiment Name: At_Far-red-enriched-adult_P Parameter: Light Value: Far-red enriched vs. White
  misc_feature: MA Experiment 20001773 PARAMETER Experiment Name: At_Far-red-enriched-adult_P Parameter: Organism Value: A. thaliana
  misc_feature: MA Experiment 20001773 PARAMETER Experiment Name: At_Far-red-enriched-adult_P Parameter: Plant Line Value: Columbia
  misc_feature: MA Experiment 20001773 PARAMETER Experiment Name: At_Far-red-enriched-adult_P Parameter: Timepoint (hr) Value: 48
  misc_feature: MA Experiment 20001773 PARAMETER Experiment Name: At_Far-red-enriched-adult_P Parameter: Tissue Value: Aerial
atagaaacacatcattaacaaaacaaagcctctctaaataaaaacaaaaagctaactgaataagaagaagtagtgatgcatatcacaaaaccacacgccgccatgttttccagtcccggaatgggccatgtcatcccggtgatcgagcttggaaagcgtctctccgctaacaacggcttccacgtcaccgtcttcgtcctcgaaaccgacgcagcctccgctcaatccaagttcctaaactcaaccggcgtcgacatcgtcaaacttccatcgccggacatttatggtttagtggaccccgacgaccatgtagtgaccaagatcggagtcattatgcgtgcagcagttccagccctccgatccaagatcgctgccatgcatcaaaagccaacggctctgatcgttgacttgtttggcacagatgcgttatgtctcgcaaaggaatttaacatgttgagttatgtgtttatccctaccaacgcacgttttctcggagtttcgatttattatccaaatttggacaaagatatcaaggaagagcacacagtgcaaagaaacccactcgctataccggggtgtgaaccggttaggttcgaagatactctggatgcatatctggttcccgacgaaccggtgtaccgggattttgttcgtcatggtctggcttacccaaaagccgatggaattttggtaaatacatgggaagagatggagcccaaatcattgaagtcccttctaaacccaaagctcttgggccgggttgctcgtgtaccggtctatccaatcggtcccttatgcagaccgatacaatcatccgaaaccgatcacccggttttggattggttaaacgaacaaccgaacgagtcggttctctatatctccttcgggagtggtggttgtctatcggcgaaacagttaactgaattggcgtggggactcgagcagagccagcaacggttcgtatgggtggttcgaccaccggtcgacggttcgtgttgtagcgagtatgtctcggctaacggtggtggaaccgaagacaacacgccagagtatctaccggaagggttcgtgagtcgtactagtgatagaggtttcgtggtcccctcatgggccccacaagctgaaatcctgtcccatcgggccgttggtgggtttttgacccattgcggttggagctcgacgttggaaagcgtcgttggcggcgttccgatgatcgcatggccactttttgccgagcagaatatgaatgcggcgttgctcagcgacgaactgggaatcgcagtcagattggatgatccaaaggaggatatttctaggtggaagattgaggcgttggtgaggaaggttatgactgagaaggaaggtgaagcgatgagaaggaaagtgaagaagttgagagactcggcggagatgtcactgagcattgacggtggtggtttggcgcacgagtcgctttgcagagtcaccaaggagtgtcaacggtttttggaacgtgtcgtggacttgtcacgtggtgcttagaaattgttaccgttttctagctcttttattattagtggttgaattatacgtgtcgttcctctgttagtgtataatataataatcgatttactctttgtaatataatgatgtttttgatatttttcaactaattttccattgtaatattgaataatcgggtgttgttgtaattaataatgagaaacaatttgtt

SEQ ID NO: 42767 - protein, 481 aa, Arabidopsis thaliana
  peptide (1)..(481): Ceres Seq. ID no. 12338697
  misc_feature (8)..(481): Pfam Name: UDP-glucoronosyl and UDP-glucosyl transferase Pfam Description: UDP-glucoronosyl and UDP-glucosyl transferase
  misc_feature (7)..(450): Homolog of NCBI NO: 15234527 NR Description: glucosyltransferase-like protein; protein id:
  misc_feature (6)..(48): Homolog of NCBI NO: 25286815 NR Description: probable flavonol 3-O-glucosyltransferase
  misc_feature (78)..(467): Homolog of NCBI NO: 25286815 NR Description: probable flavonol 3-O-glucosyltransferase
  misc_feature (5)..(467): Homolog of NCBI NO: 25286819 NR Description: probable flavonol 3-O-glucosyltransferase
  misc_feature (4)..(453): Homolog of NCBI NO: 2501494 NR Description: Flavonol 3-O-glucosyltransferase 5 (UDP-glucose
  misc_feature (10)..(481): Homolog of NCBI NO: 7433913 NR Description: UTP-glucose glucosyltransferase-like protein -
  misc_feature (1)..(481): Homolog of NCBI NO: 18409172 NR Description: UTP-glucose glucosyltransferase - like protein
  misc_feature (1)..(481): Homolog of NCBI NO: 15240305 NR Description: UTP-glucose glucosyltransferase - like protein
  misc_feature (10)..(481): Homolog of NCBI NO: 21553566 NR Description: UTP-glucose glucosyltransferase [Arabidopsis
  misc_feature (1)..(481): Homolog of NCBI NO: 15240051 NR Description: UTP-glucose glucosyltransferase
MHITKPHAAMFSSPGMGHVIPVIELGKRLSANNGFHVTVFVLETDAASAQSKFLNSTGVDIVKLPSPDIYGLVDPDDHVVTKIGVIMRAAVPALRSKIAAMHQKPTALIVDLFGTDALCLAKEFNMLSYVFIPTNARFLGVSIYYPNLDKDIKEEHTVQRNPLAIPGCEPVRFEDTLDAYLVPDEPVYRDFVRHGLAYPKADGILVNTWEEMEPKSLKSLLNPKLLGRVARVPVYPIGPLCRPIQSSETDHPVLDWLNEQPNESVLYISFGSGGCLSAKQLTELAWGLEQSQQRFVWVVRPPVDGSCCSEYVSANGGGTEDNTPEYLPEGFVSRTSDRGFVVPSWAPQAEILSHRAVGGFLTHCGWSSTLESVVGGVPMIAWPLFAEQNMNAALLSDELGIAVRLDDPKEDISRWKIEALVRKVMTEKEGEAMRRKVKKLRDSAEMSLSIDGGGLAHESLCRVTKECQRFLERVVDLSRGA

SEQ ID NO: 42768 - protein, 472 aa, Arabidopsis thaliana
  peptide (1)..(472): Ceres Seq. ID no. 12338698
  misc_feature (1)..(472): Pfam Name: UDP-glucoronosyl and UDP-glucosyl transferase Pfam Description: UDP-glucoronosyl and UDP-glucosyl transferase
  misc_feature (1)..(441): Homolog of NCBI NO: 15234527 NR Description: glucosyltransferase-like protein; protein id:
  misc_feature (1)..(39): Homolog of NCBI NO: 25286815 NR Description: probable flavonol 3-O-glucosyltransferase
  misc_feature (69)..(458): Homolog of NCBI NO: 25286815 NR Description: probable flavonol 3-O-glucosyltransferase
  misc_feature (1)..(458): Homolog of NCBI NO: 25286819 NR Description: probable flavonol 3-O-glucosyltransferase
  misc_feature (1)..(444): Homolog of NCBI NO: 2501494 NR Description: Flavonol 3-O-glucosyltransferase 5 (UDP-glucose
  misc_feature (1)..(472): Homolog of NCBI NO: 7433913 NR Description: UTP-glucose glucosyltransferase-like protein -
  misc_feature (1)..(472): Homolog of NCBI NO: 18409172 NR Description: UTP-glucose glucosyltransferase - like protein
  misc_feature (1)..(472): Homolog of NCBI NO: 15240305 NR Description: UTP-glucose glucosyltransferase - like protein
  misc_feature (1)..(472): Homolog of NCBI NO: 21553566 NR Description: UTP-glucose glucosyltransferase [Arabidopsis
  misc_feature (1)..(472): Homolog of NCBI NO: 15240051 NR Description: UTP-glucose glucosyltransferase
MFSSPGMGHVIPVIELGKRLSANNGFHVTVFVLETDAASAQSKFLNSTGVDIVKLPSPDIYGLVDPDDHVVTKIGVIMRAAVPALRSKIAAMHQKPTALIVDLFGTDALCLAKEFNMLSYVFIPTNARFLGVSIYYPNLDKDIKEEHTVQRNPLAIPGCEPVRFEDTLDAYLVPDEPVYRDFVRHGLAYPKADGILVNTWEEMEPKSLKSLLNPKLLGRVARVPVYPIGPLCRPIQSSETDHPVLDWLNEQPNESVLYISFGSGGCLSAKQLTELAWGLEQSQQRFVWVVRPPVDGSCCSEYVSANGGGTEDNTPEYLPEGFVSRTSDRGFVVPSWAPQAEILSHRAVGGFLTHCGWSSTLESVVGGVPMIAWPLFAEQNMNAALLSDELGIAVRLDDPKEDISRWKIEALVRKVMTEKEGEAMRRKVKKLRDSAEMSLSIDGGGLAHESLCRVTKECQRFLERVVDLSRGA

SEQ ID NO: 42769 - protein, 466 aa, Arabidopsis thaliana
  peptide (1)..(466): Ceres Seq. ID no. 12338699
  misc_feature (1)..(466): Pfam Name: UDP-glucoronosyl and UDP-glucosyl transferase Pfam Description: UDP-glucoronosyl and UDP-glucosyl transferase
  misc_feature (1)..(435): Homolog of NCBI NO: 15234527 NR Description: glucosyltransferase-like protein; protein id:
  misc_feature (1)..(33): Homolog of NCBI NO: 25286815 NR Description: probable flavonol 3-O-glucosyltransferase
  misc_feature (63)..(452): Homolog of NCBI NO: 25286815 NR Description: probable flavonol 3-O-glucosyltransferase
  misc_feature (1)..(452): Homolog of NCBI NO: 25286819 NR Description: probable flavonol 3-O-glucosyltransferase
  misc_feature (1)..(438): Homolog of NCBI NO: 2501494 NR Description: Flavonol 3-O-glucosyltransferase 5 (UDP-glucose
  misc_feature (1)..(466): Homolog of NCBI NO: 7433913 NR Description: UTP-glucose glucosyltransferase-like protein -
  misc_feature (1)..(466): Homolog of NCBI NO: 18409172 NR Description: UTP-glucose glucosyltransferase - like protein
  misc_feature (1)..(466): Homolog of NCBI NO: 15240305 NR Description: UTP-glucose glucosyltransferase - like protein
  misc_feature (1)..(466): Homolog of NCBI NO: 21553566 NR Description: UTP-glucose glucosyltransferase [Arabidopsis
  misc_feature (1)..(466): Homolog of NCBI NO: 15240051 NR Description: UTP-glucose glucosyltransferase
MGHVIPVIELGKRLSANNGFHVTVFVLETDAASAQSKFLNSTGVDIVKLPSPDIYGLVDPDDHVVTKIGVIMRAAVPALRSKIAAMHQKPTALIVDLFGTDALCLAKEFNMLSYVFIPTNARFLGVSIYYPNLDKDIKEEHTVQRNPLAIPGCEPVRFEDTLDAYLVPDEPVYRDFVRHGLAYPKADGILVNTWEEMEPKSLKSLLNPKLLGRVARVPVYPIGPLCRPIQSSETDHPVLDWLNEQPNESVLYISFGSGGCLSAKQLTELAWGLEQSQQRFVWVVRPPVDGSCCSEYVSANGGGTEDNTPEYLPEGFVSRTSDRGFVVPSWAPQAEILSHRAVGGFLTHCGWSSTLESVVGGVPMIAWPLFAEQNMNAALLSDELGIAVRLDDPKEDISRWKIEALVRKVMTEKEGEAMRRKVKKLRDSAEMSLSIDGGGLAHESLCRVTKECQRFLERVVDLSRGA

SEQ ID NO: 42770 - DNA, 1819 bp, Arabidopsis thaliana
  misc_feature (1)..(1819): Ceres Seq. ID no. 12489090
  misc_feature: MA Experiment ID: 108435 Result: Up-regulated in Transcription
  misc_feature: MA Experiment 108435 PARAMETER Experiment Name: At_stm_Mutants_cDNA_P Parameter: Plant Line Value: wt Landsburg vs stm
  misc_feature: MA Experiment 108435 PARAMETER Experiment Name: At_stm_Mutants_cDNA_P Parameter: Tissue Value: Shoot Apical Meristem Region
  misc_feature: MA Experiment ID: 108462 Result: Up-regulated in Transcription
  misc_feature: MA Experiment 108462 PARAMETER Experiment Name: At_Germinating_Seeds_cDNA_P Parameter: Age (day) Value: 2 vs. 0
  misc_feature: MA Experiment 108462 PARAMETER Experiment Name: At_Germinating_Seeds_cDNA_P Parameter: Tissue Value: Germinating Seeds
  misc_feature: MA Experiment ID: 108473 Result: Down-regulated in Transcription
  misc_feature: MA Experiment 108473 PARAMETER Experiment Name: At_Drought_Flowers_cDNA_P Parameter: Timepoint (hr) Value: 7 d
  misc_feature: MA Experiment 108473 PARAMETER Experiment Name: At_Drought_Flowers_cDNA_P Parameter: Tissue Value: Flower
  misc_feature: MA Experiment 108473 PARAMETER Experiment Name: At_Drought_Flowers_cDNA_P Parameter: Treatment Value: Drought vs. No Drought
  misc_feature: MA Experiment ID: 108501 Result: Down-regulated in Transcription
  misc_feature: MA Experiment 108501 PARAMETER Experiment Name: At_ap2_floral_buds_cDNA_P Parameter: Plant Line Value: ap2 (Ler.)
  misc_feature: MA Experiment 108501 PARAMETER Experiment Name: At_ap2_floral_buds_cDNA_P Parameter: Tissue Value: Closed Flower
  misc_feature: MA Experiment ID: 108595 Result: Up-regulated in Transcription
  misc_feature: MA Experiment 108595 PARAMETER Experiment Name: At_Ler-pi_Ovule_cDNA_P Parameter: Plant Line Value: null
  misc_feature: MA Experiment ID: 20000264 Result: Up-regulated in Transcription
  misc_feature: MA Experiment 20000264 PARAMETER Experiment Name: At_Open_Flower_P Parameter: Age (day) Value: 21
  misc_feature: MA Experiment 20000264 PARAMETER Experiment Name: At_Open_Flower_P Parameter: Plant Line Value: WS
  misc_feature: MA Experiment 20000264 PARAMETER Experiment Name: At_Open_Flower_P Parameter: Tissue Value: Open Flower vs. Whole Plant
  misc_feature: MA Experiment ID: 20000265 Result: Up-regulated in Transcription
  misc_feature: MA Experiment 20000265 PARAMETER Experiment Name: At_Open_Flower_P Parameter: Age (day) Value: 21
  misc_feature: MA Experiment 20000265 PARAMETER Experiment Name: At_Open_Flower_P Parameter: Plant Line Value: WS
  misc_feature: MA Experiment 20000265 PARAMETER Experiment Name: At_Open_Flower_P Parameter: Tissue Value: Closed Flower vs. Whole Plant
  misc_feature: MA Experiment ID: 20000286 Result: Up-regulated in Transcription
  misc_feature: MA Experiment 20000286 PARAMETER Experiment Name: At_Open_Flower_P Parameter: Age (day) Value: 21
  misc_feature: MA Experiment 20000286 PARAMETER Experiment Name: At_Open_Flower_P Parameter: Plant Line Value: WS
  misc_feature: MA Experiment 20000286 PARAMETER Experiment Name: At_Open_Flower_P Parameter: Tissue Value: Half Open vs. Whole Plant
  misc_feature: MA Experiment ID: 20001906 Result: Down-regulated in Transcription
  misc_feature: MA Experiment 20001906 PARAMETER Experiment Name: At_Drought_Reproduction_P Parameter: Age (day) Value: 35
  misc_feature: MA Experiment 20001906 PARAMETER Experiment Name: At_Drought_Reproduction_P Parameter: Organism Value: A. thaliana
  misc_feature: MA Experiment 20001906 PARAMETER Experiment Name: At_Drought_Reproduction_P Parameter: Plant Line Value: WS
  misc_feature: MA Experiment 20001906 PARAMETER Experiment Name: At_Drought_Reproduction_P Parameter: Timepoint (day) Value: 5
  misc_feature: MA Experiment 20001906 PARAMETER Experiment Name: At_Drought_Reproduction_P Parameter: Tissue Value: Siliques
  misc_feature: MA Experiment 20001906 PARAMETER Experiment Name: At_Drought_Reproduction_P Parameter: Treatment Value: Drought vs. No Drought
  misc_feature: MA Experiment ID: 20001911 Result: Down-regulated in Transcription
  misc_feature: MA Experiment 20001911 PARAMETER Experiment Name: At_Drought_Reproduction_P Parameter: Age (day) Value: 40
  misc_feature: MA Experiment 20001911 PARAMETER Experiment Name: At_Drought_Reproduction_P Parameter: Organism Value: A. thaliana
  misc_feature: MA Experiment 20001911 PARAMETER Experiment Name: At_Drought_Reproduction_P Parameter: Plant Line Value: WS
  misc_feature: MA Experiment 20001911 PARAMETER Experiment Name: At_Drought_Reproduction_P Parameter: Timepoint (day) Value: 10
  misc_feature: MA Experiment 20001911 PARAMETER Experiment Name: At_Drought_Reproduction_P Parameter: Tissue Value: Flowers
  misc_feature: MA Experiment 20001911 PARAMETER Experiment Name: At_Drought_Reproduction_P Parameter: Treatment Value: Drought vs. No Drought
atatccattctcaccttccaaatctccccactctctctctctctctctctctctctctctctctctctctctctatctctctctatctctctctatcttctcttttctcctctctccaacttcttcactaatgggagctcaggagaaacggcgccgtttcgagcagatatcaaagtgcgatgttaaggaccggtccaaccataccgtggccgctgatctagacggaacactactaatctctcgtagcgccttcccttactatttcctcgtagccctcgaggcagggagcttgctccgagcgttgatcctacttgtgtccgtaccattcgtttatcttacgtacttgaccatctccgagactttagccatcaacgtatttgtcttcatcacgttcgcgggtctcaagatccgagacgttgagctagtggtccgttccgtcctcccgaggttctatgcggaggacgtgaggcccgatacctggcgtatcttcaacacgttcgggaaacggtacataataactgcgagccctcgaattatggtcgagccattcgtgaaaacattcctaggagttgataaagttcttggaacagagctagaggtctccaaatcgggtcgggcaaccgggttcaccagaaaaccaggtattctcgtcggtcagtacaaacgtgacgtcgttttgagagagtttggtggcctagcgtctgatttacctgatttggggctcggcgatagcaagacggaccacgacttcatgtccatctgcaaggaaggttacatggtgccacgtacgaaatgcgaaccattaccaagaaacaaactcttaagccccataatattccacgagggcagattagtccaacgcccaacgccgttagttgctctgttaactttcctctggcttcccgtcggtttcgtcctctctatcatccgcgtctacacgaatattccgttaccggaacgtatcgcccgttacaactacaagcttactggcatcaagctagtcgtcaacggccaccctcctccgccgccaaaacctggccagccaggccatcttttggtctgcaaccaccgcaccgttctcgatcctgtggtcacagctgtcgcactcggccggaaaatcagctgcgtcacttacagcatcagcaagttctctgagctaatctcaccaatcaaagccgttgcgttgactcgtcaacgtgagaaagacgcagcgaacatcaagcgtcttttggaggaaggcgatctcgtgatatgtcccgagggaaccacgtgccgtgagcctttccttctccggtttagtgctcttttcgctgagctcacggaccggatcgttcccgtggcgatcaacacaaagcagagcatgttcaatggtaccaccacacgtggatacaagcttcttgatccttactttgcgttcatgaacccgaggccgacgtatgagatcacgttcctcaaacagattccagctgagctgacgtgtaaaggaggcaaatctccgatagaggttgcgaattacatacagagggttttgggaggaaccttaggttttgagtgcaccaatttcacaagaaaggataagtacgcaatgcttgctggtactgacggtagggttccggtgaagaaggagaagacgtgattattgatcggaggatggagaaaacaaagaaataatacaaagattggaatctttttcatttggatggttaattatcaatacttaaggggcaaagaattgataagtttgtttttgttgttacctttatcttctctgcttcggtgaatgtttcttcaagttttacatttagtacaataacggttt

SEQ ID NO: 42771 - protein, 544 aa, Arabidopsis thaliana
  peptide (1)..(544): Ceres Seq. ID no. 12489091
  misc_feature (69)..(262): Pfam Name: haloacid dehalogenase-like hydrolase Pfam Description: haloacid dehalogenase-like hydrolase
  misc_feature (69)..(262): Pfam Name: haloacid dehalogenase-like hydrolase Pfam Description: haloacid dehalogenase-like hydrolase
  misc_feature (59)..(537): Homolog of NCBI NO: 18390661 NR Description: expressed protein
  misc_feature (59)..(537): Homolog of NCBI NO: 21618047 NR Description: unknown [Arabidopsis thaliana]
  misc_feature (65)..(537): Homolog of NCBI NO: 15239924 NR Description: putative protein; protein id: At5g06090.1
  misc_feature (65)..(537): Homolog of NCBI NO: 15229747 NR Description: unknown protein; protein id: At3g11430.1
  misc_feature (90)..(540): Homolog of NCBI NO: 29788867 NR Description: hypothetical protein [Oryza sativa (japonica
  misc_feature (59)..(537): Homolog of NCBI NO: 18390661 NR Description: expressed protein
  misc_feature (65)..(537): Homolog of NCBI NO: 15239924 NR Description: putative protein; protein id: At5g06090.1
  misc_feature (90)..(540): Homolog of NCBI NO: 29788867 NR Description: hypothetical protein [Oryza sativa (japonica
  misc_feature (44)..(544): Homolog of NCBI NO: 15224445 NR Description: unknown protein
  misc_feature (44)..(544): Homolog of NCBI NO: 15223437 NR Description: hypothetical protein
  misc_feature (44)..(544): Homolog of NCBI NO: 17064780 NR Description: Unknown protein [Arabidopsis thaliana]
  misc_feature (53)..(540): Homolog of NCBI NO: 38000002 NR Description: unknown protein [Oryza sativa (japonica
  misc_feature (53)..(537): Homolog of NCBI NO: 37534314 NR Description: hypothetical protein [Oryza sativa (japonica
  misc_feature (65)..(537): Homolog of NCBI NO: 15229747 NR Description: unknown protein; protein id: At3g11430.1
  misc_feature (59)..(537): Homolog of NCBI NO: 21618047 NR Description: unknown [Arabidopsis thaliana]
  misc_feature (53)..(537): Homolog of NCBI NO: 37534314 NR Description: hypothetical protein [Oryza sativa (japonica
  misc_feature (53)..(540): Homolog of NCBI NO: 38000002 NR Description: unknown protein [Oryza sativa (japonica
  misc_feature (44)..(544): Homolog of NCBI NO: 17064780 NR Description: Unknown protein [Arabidopsis thaliana]
  misc_feature (44)..(544): Homolog of NCBI NO: 15223437 NR Description: hypothetical protein
  misc_feature (44)..(544): Homolog of NCBI NO: 15224445 NR Description: unknown protein
YPFSPSKSPHSLSLSLSLSLSLSLYLSLSLSIFSFLLSPTSSLMGAQEKRRRFEQISKCDVKDRSNHTVAADLDGTLLISRSAFPYYFLVALEAGSLLRALILLVSVPFVYLTYLTISETLAINVFVFITFAGLKIRDVELVVRSVLPRFYAEDVRPDTWRIFNTFGKRYIITASPRIMVEPFVKTFLGVDKVLGTELEVSKSGRATGFTRKPGILVGQYKRDVVLREFGGLASDLPDLGLGDSKTDHDFMSICKEGYMVPRTKCEPLPRNKLLSPIIFHEGRLVQRPTPLVALLTFLWLPVGFVLSIIRVYTNIPLPERIARYNYKLTGIKLVVNGHPPPPPKPGQPGHLLVCNHRTVLDPVVTAVALGRKISCVTYSISKFSELISPIKAVALTRQREKDAANIKRLLEEGDLVICPEGTTCREPFLLRFSALFAELTDRIVPVAINTKQSMFNGTTTRGYKLLDPYFAFMNPRPTYEITFLKQIPAELTCKGGKSPIEVANYIQRVLGGTLGFECTNFTRKDKYAMLAGTDGRVPVKKEKT

SEQ ID NO: 42772 - protein, 501 aa, Arabidopsis thaliana [sequence omitted]

SEQ ID NO: 42773 - protein, 366 aa, Arabidopsis thaliana
  peptide (1)..(366): Ceres Seq. ID no. 12489093
  misc_feature (1)..(84): Pfam Name: haloacid dehalogenase-like hydrolase Pfam Description: haloacid dehalogenase-like hydrolase
  misc_feature (1)..(84): Pfam Name: haloacid dehalogenase-like hydrolase Pfam Description: haloacid dehalogenase-like hydrolase
  misc_feature (1)..(359): Homolog of NCBI NO: 18390661 NR Description: expressed protein
  misc_feature (1)..(359): Homolog of NCBI NO: 21618047 NR Description: unknown [Arabidopsis thaliana]
  misc_feature (1)..(359): Homolog of NCBI NO: 15239924 NR Description: putative protein; protein id: At5g06090.1
  misc_feature (1)..(359): Homolog of NCBI NO: 15229747 NR Description: unknown protein; protein id: At3g11430.1
  misc_feature (1)..(362): Homolog of NCBI NO: 29788867 NR Description: hypothetical protein [Oryza sativa (japonica
  misc_feature (1)..(359): Homolog of NCBI NO: 18390661 NR Description: expressed protein
  misc_feature (1)..(359): Homolog of NCBI NO: 15239924 NR Description: putative protein; protein id: At5g06090.1
  misc_feature (1)..(362): Homolog of NCBI NO: 29788867 NR Description: hypothetical protein [Oryza sativa (japonica
  misc_feature (1)..(366): Homolog of NCBI NO: 15224445 NR Description: unknown protein
  misc_feature (1)..(366): Homolog of NCBI NO: 15223437 NR Description: hypothetical protein
  misc_feature (1)..(366): Homolog of NCBI NO: 17064780 NR Description: Unknown protein [Arabidopsis thaliana]
  misc_feature (1)..(362): Homolog of NCBI NO: 38000002 NR Description: unknown protein [Oryza sativa (japonica
  misc_feature (1)..(359): Homolog of NCBI NO: 37534314 NR Description: hypothetical protein [Oryza sativa (japonica
  misc_feature (1)..(359): Homolog of NCBI NO: 15229747 NR Description: unknown protein; protein id: At3g11430.1
  misc_feature (1)..(359): Homolog of NCBI NO: 21618047 NR Description: unknown [Arabidopsis thaliana]
  misc_feature (1)..(359): Homolog of NCBI NO: 37534314 NR Description: hypothetical protein [Oryza sativa (japonica
  misc_feature (1)..(362): Homolog of NCBI NO: 38000002 NR Description: unknown protein [Oryza sativa (japonica
  misc_feature (1)..(366): Homolog of NCBI NO: 17064780 NR Description: Unknown protein [Arabidopsis thaliana]
  misc_feature (1)..(366): Homolog of NCBI NO: 15223437 NR Description: hypothetical protein
  misc_feature (1)..(366): Homolog of NCBI NO: 15224445 NR Description: unknown protein
MVEPFVKTFLGVDKVLGTELEVSKSGRATGFTRKPGILVGQYKRDVVLREFGGLASDLPDLGLGDSKTDHDFMSICKEGYMVPRTKCEPLPRNKLLSPIIFHEGRLVQRPTPLVALLTFLWLPVGFVLSIIRVYTNIPLPERIARYNYKLTGIKLVVNGHPPPPPKPGQPGHLLVCNHRTVLDPVVTAVALGRKISCVTYSISKFSELISPIKAVALTRQREKDAANIKRLLEEGDLVICPEGTTCREPFLLRFSALFAELTDRIVPVAINTKQSMFNGTTTRGYKLLDPYFAFMNPRPTYEITFLKQIPAELTCKGGKSPIEVANYIQRVLGGTLGFECTNFTRKDKYAMLAGTDGRVPVKKEKT

SEQ ID NO: 42774 - DNA, 1368 bp, Arabidopsis thaliana; identical to SEQ ID NO: 39317
  misc_feature (1)..(1368): Ceres Seq. ID no. 12558338
  misc_feature: MA Experiment ID: 108434 Result: Down-regulated in Transcription
  misc_feature: MA Experiment 108434 PARAMETER Experiment Name: At_Root_Tips_cDNA_P Parameter: Tissue Value: Root Tips
  misc_feature: MA Experiment ID: 108464 Result: Up-regulated in Transcription
  misc_feature: MA Experiment 108464 PARAMETER Experiment Name: At_Germinating_Seeds_cDNA_P Parameter: Age (day) Value: 4 vs. 0
  misc_feature: MA Experiment 108464 PARAMETER Experiment Name: At_Germinating_Seeds_cDNA_P Parameter: Tissue Value: Germinating Seeds
  misc_feature: MA Experiment ID: 108577 Result: Down-regulated in Transcription
  misc_feature: MA Experiment 108577 PARAMETER Experiment Name: At_42deg_Heat_cDNA_P Parameter: Temperature (deg C) Value: 42 vs. 22
  misc_feature: MA Experiment 108577 PARAMETER Experiment Name: At_42deg_Heat_cDNA_P Parameter: Timepoint (hr) Value: 6
  misc_feature: MA Experiment 108577 PARAMETER Experiment Name: At_42deg_Heat_cDNA_P Parameter: Tissue Value: Aerial
  misc_feature: MA Experiment ID: 108585 Result: Up-regulated in Transcription
  misc_feature: MA Experiment 108585 PARAMETER Experiment Name: At_5mM_NaNP_cDNA_P Parameter: Timepoint (hr) Value: 6
  misc_feature: MA Experiment 108585 PARAMETER Experiment Name: At_5mM_NaNP_cDNA_P Parameter: Tissue Value: Aerial
  misc_feature: MA Experiment 108585 PARAMETER Experiment Name: At_5mM_NaNP_cDNA_P Parameter: Treatment Value: null
  misc_feature: MA Experiment ID: 20000227 Result: Down-regulated in Transcription
  misc_feature: MA Experiment 20000227 PARAMETER Experiment Name: At_Root-Tips-vs-Tops_P Parameter: Tissue Value: Root Tips vs. Root Tops
  misc_feature: MA Experiment ID: 20000234 Result: Down-regulated in Transcription
  misc_feature: MA Experiment 20000234 PARAMETER Experiment Name: At_Siliques_P Parameter: Age (day) Value: 21
  misc_feature: MA Experiment 20000234 PARAMETER Experiment Name: At_Siliques_P Parameter: Organism Value: A. thaliana
  misc_feature: MA Experiment 20000234 PARAMETER Experiment Name: At_Siliques_P Parameter: Plant Line Value: WS
  misc_feature: MA Experiment 20000234 PARAMETER Experiment Name: At_Siliques_P Parameter: Tissue Value: Less Than 5mm Siliques vs. Whole Plant
  misc_feature: MA Experiment ID: 20000264 Result: Down-regulated in Transcription
  misc_feature: MA Experiment 20000264 PARAMETER Experiment Name: At_Open_Flower_P Parameter: Age (day) Value: 21
  misc_feature: MA Experiment 20000264 PARAMETER Experiment Name: At_Open_Flower_P Parameter: Plant Line Value: WS
  misc_feature: MA Experiment 20000264 PARAMETER Experiment Name: At_Open_Flower_P Parameter: Tissue Value: Open Flower vs. Whole Plant
  misc_feature: MA Experiment ID: 20000265 Result: Down-regulated in Transcription
  misc_feature: MA Experiment 20000265 PARAMETER Experiment Name: At_Open_Flower_P Parameter: Age (day) Value: 21
  misc_feature: MA Experiment 20000265 PARAMETER Experiment Name: At_Open_Flower_P Parameter: Plant Line Value: WS
  misc_feature: MA Experiment 20000265 PARAMETER Experiment Name: At_Open_Flower_P Parameter: Tissue Value: Closed Flower vs. Whole Plant
  misc_feature: MA Experiment ID: 20000286 Result: Down-regulated in Transcription
  misc_feature: MA Experiment 20000286 PARAMETER Experiment Name: At_Open_Flower_P Parameter: Age (day) Value: 21
  misc_feature: MA Experiment 20000286 PARAMETER Experiment Name: At_Open_Flower_P Parameter: Plant Line Value: WS
  misc_feature: MA Experiment 20000286 PARAMETER Experiment Name: At_Open_Flower_P Parameter: Tissue Value: Half Open vs. Whole Plant
  misc_feature: MA Experiment ID: 20000794 Result: Down-regulated in Transcription
  misc_feature: MA Experiment 20000794 PARAMETER Experiment Name: At_Petals_P Parameter: Age (day) Value: 23-25 days
  misc_feature: MA Experiment 20000794 PARAMETER Experiment Name: At_Petals_P Parameter: Plant Line Value: WS
  misc_feature: MA Experiment 20000794 PARAMETER Experiment Name: At_Petals_P Parameter: Tissue Value: Petals vs. Whole plant
  misc_feature: MA Experiment ID: 20001248 Result: Down-regulated in Transcription
  misc_feature: MA Experiment 20001248 PARAMETER Experiment Name: At_Far-red-induction_P Parameter: Age (day) Value: 7
  misc_feature: MA Experiment 20001248 PARAMETER Experiment Name: At_Far-red-induction_P Parameter: Light Value: Far-red vs. White
  misc_feature: MA Experiment 20001248 PARAMETER Experiment Name: At_Far-red-induction_P Parameter: Organism Value: A. thaliana
  misc_feature: MA Experiment 20001248 PARAMETER Experiment Name: At_Far-red-induction_P Parameter: Plant Line Value: Columbia
  misc_feature: MA Experiment 20001248 PARAMETER Experiment Name: At_Far-red-induction_P Parameter: Timepoint (hr) Value: 4
  misc_feature: MA Experiment 20001248 PARAMETER Experiment Name: At_Far-red-induction_P Parameter: Tissue Value: Whole Plant
  misc_feature: MA Experiment ID: 20001451 Result: Down-regulated in Transcription
  misc_feature: MA Experiment 20001451 PARAMETER Experiment Name: At_Far-red-induction_P Parameter: Age (day) Value: 7
  misc_feature: MA Experiment 20001451 PARAMETER Experiment Name: At_Far-red-induction_P Parameter: Light Value: Far-red vs. White
  misc_feature: MA Experiment 20001451 PARAMETER Experiment Name: At_Far-red-induction_P Parameter: Organism Value: A. thaliana
  misc_feature: MA Experiment 20001451 PARAMETER Experiment Name: At_Far-red-induction_P Parameter: Plant Line Value: Columbia
  misc_feature: MA Experiment 20001451 PARAMETER Experiment Name: At_Far-red-induction_P Parameter: Timepoint (hr) Value: 24
  misc_feature: MA Experiment 20001451 PARAMETER Experiment Name: At_Far-red-induction_P Parameter: Tissue Value: Whole Plant

SEQ ID NO: 42775 - protein, 321 aa, Arabidopsis thaliana; identical to SEQ ID NO: 39318
  peptide (1)..(321): Ceres Seq. ID no. 12558339
  misc_feature (63)..(300): Homolog of NCBI NO: 18398816 NR Description: unknown protein; protein id: At2g18680.1
  misc_feature (32)..(292): Homolog of NCBI NO: 18398818 NR Description: expressed protein
  misc_feature (15)..(292): Homolog of NCBI NO: 27817928 NR Description: P0453E05.2 [Oryza sativa (japonica
  misc_feature (15)..(287): Homolog of NCBI NO: 9295718 NR Description: T24P13.3 [Arabidopsis thaliana]
  misc_feature (15)..(292): Homolog of NCBI NO: 15222319 NR Description: unknown protein; protein id: At1g69430.1
  misc_feature (1)..(320): Homolog of NCBI NO: 34908936 NR Description: P0691E06.20 [Oryza sativa (japonica
  misc_feature (1)..(321): Homolog of NCBI NO: 7485737 NR Description: hypothetical protein F18F4.50 - Arabidopsis
  misc_feature (1)..(321): Homolog of NCBI NO: 30684945 NR Description: expressed protein [Arabidopsis thaliana]
  misc_feature (1)..(321): Homolog of NCBI NO: 15241607 NR Description: putative protein
  misc_feature (1)..(321): Homolog of NCBI NO: 18397813 NR Description: expressed protein
  misc_feature (63)..(300): Homolog of NCBI NO: 18398816 NR Description: unknown protein; protein id: At2g18680.1
  misc_feature (32)..(292): Homolog of NCBI NO: 18398818 NR Description: expressed protein
  misc_feature (15)..(292): Homolog of NCBI NO: 27817928 NR Description: P0453E05.2 [Oryza sativa (japonica
  misc_feature (15)..(287): Homolog of NCBI NO: 9295718 NR Description: T24P13.3 [Arabidopsis thaliana]
  misc_feature (15)..(292): Homolog of NCBI NO: 15222319 NR Description: unknown protein; protein id: At1g69430.1
  misc_feature (1)..(320): Homolog of NCBI NO: 34908936 NR Description: P0691E06.20 [Oryza sativa (japonica
  misc_feature (1)..(321): Homolog of NCBI NO: 7485737 NR Description: hypothetical protein F18F4.50 - Arabidopsis
  misc_feature (1)..(321): Homolog of NCBI NO: 30684945 NR Description: expressed protein [Arabidopsis thaliana]
  misc_feature (1)..(321): Homolog of NCBI NO: 15241607 NR Description: putative protein
  misc_feature (1)..(321): Homolog of NCBI NO: 18397813 NR Description: expressed protein

SEQ ID NO: 42776 - protein, 182 aa, Arabidopsis thaliana; identical to SEQ ID NO: 39319
  peptide (1)..(182): Ceres Seq. ID no. 12558340
  misc_feature (1)..(161): Homolog of NCBI NO: 18398816 NR Description: unknown protein; protein id: At2g18680.1
  misc_feature (1)..(153): Homolog of NCBI NO: 18398818 NR Description: expressed protein
  misc_feature (1)..(153): Homolog of NCBI NO: 27817928 NR Description: P0453E05.2 [Oryza sativa (japonica
  misc_feature (1)..(148): Homolog of NCBI NO: 9295718 NR Description: T24P13.3 [Arabidopsis thaliana]
  misc_feature (1)..(153): Homolog of NCBI NO: 15222319 NR Description: unknown protein; protein id: At1g69430.1
  misc_feature (1)..(181): Homolog of NCBI NO: 34908936 NR Description: P0691E06.20 [Oryza sativa (japonica
  misc_feature (1)..(182): Homolog of NCBI NO: 7485737 NR Description: hypothetical protein F18F4.50 - Arabidopsis
  misc_feature (1)..(182): Homolog of NCBI NO: 30684945 NR Description: expressed protein [Arabidopsis thaliana]
  misc_feature (1)..(182): Homolog of NCBI NO: 15241607 NR Description: putative protein
  misc_feature (1)..(182): Homolog of NCBI NO: 18397813 NR Description: expressed protein
  misc_feature (1)..(161): Homolog of NCBI NO: 18398816 NR Description: unknown protein; protein id: At2g18680.1
  misc_feature (1)..(153): Homolog of NCBI NO: 18398818 NR Description: expressed protein
  misc_feature (1)..(153): Homolog of NCBI NO: 27817928 NR Description: P0453E05.2 [Oryza sativa (japonica
  misc_feature (1)..(148): Homolog of NCBI NO: 9295718 NR Description: T24P13.3 [Arabidopsis thaliana]
  misc_feature (1)..(153): Homolog of NCBI NO: 15222319 NR Description: unknown protein; protein id: At1g69430.1
  misc_feature (1)..(181): Homolog of NCBI NO: 34908936 NR Description: P0691E06.20 [Oryza sativa (japonica
  misc_feature (1)..(182): Homolog of NCBI NO: 7485737 NR Description: hypothetical protein F18F4.50 - Arabidopsis
  misc_feature (1)..(182): Homolog of NCBI NO: 30684945 NR Description: expressed protein [Arabidopsis thaliana]
  misc_feature (1)..(182): Homolog of NCBI NO: 15241607 NR Description: putative protein
  misc_feature (1)..(182): Homolog of NCBI NO: 18397813 NR Description: expressed protein

SEQ ID NO: 42777 - protein, 169 aa, Arabidopsis thaliana; identical to SEQ ID NO: 39320
  peptide (1)..(169): Ceres Seq. ID no. 12558341
  misc_feature (1)..(148): Homolog of NCBI NO: 18398816 NR Description: unknown protein; protein id: At2g18680.1
  misc_feature (1)..(140): Homolog of NCBI NO: 18398818 NR Description: expressed protein
  misc_feature (1)..(140): Homolog of NCBI NO: 27817928 NR Description: P0453E05.2 [Oryza sativa (japonica
  misc_feature (1)..(135): Homolog of NCBI NO: 9295718 NR Description: T24P13.3 [Arabidopsis thaliana]
  misc_feature (1)..(140): Homolog of NCBI NO: 15222319 NR Description: unknown protein; protein id: At1g69430.1
  misc_feature (1)..(168): Homolog of NCBI NO: 34908936 NR Description: P0691E06.20 [Oryza sativa (japonica
  misc_feature (1)..(169): Homolog of NCBI NO: 7485737 NR Description: hypothetical protein F18F4.50 - Arabidopsis
  misc_feature (1)..(169): Homolog of NCBI NO: 30684945 NR Description: expressed protein [Arabidopsis thaliana]
  misc_feature (1)..(169): Homolog of NCBI NO: 15241607 NR Description: putative protein
  misc_feature (1)..(169): Homolog of NCBI NO: 18397813 NR Description: expressed protein
  misc_feature (1)..(148): Homolog of NCBI NO: 18398816 NR Description: unknown protein; protein id: At2g18680.1
  misc_feature (1)..(140): Homolog of NCBI NO: 18398818 NR Description: expressed protein
  misc_feature (1)..(140): Homolog of NCBI NO: 27817928 NR Description: P0453E05.2 [Oryza sativa (japonica
  misc_feature (1)..(135): Homolog of NCBI NO: 9295718 NR Description: T24P13.3 [Arabidopsis thaliana]
  misc_feature (1)..(140): Homolog of NCBI NO: 15222319 NR Description: unknown protein; protein id: At1g69430.1
  misc_feature (1)..(168): Homolog of NCBI NO: 34908936 NR Description: P0691E06.20 [Oryza sativa (japonica
  misc_feature (1)..(169): Homolog of NCBI NO: 7485737 NR Description: hypothetical protein F18F4.50 - Arabidopsis
  misc_feature (1)..(169): Homolog of NCBI NO: 30684945 NR Description: expressed protein [Arabidopsis thaliana]
  misc_feature (1)..(169): Homolog of NCBI NO: 15241607 NR Description: putative protein
  misc_feature (1)..(169): Homolog of NCBI NO: 18397813 NR Description: expressed protein

SEQ ID NO: 42778 - DNA, 1356 bp, Arabidopsis thaliana
  misc_feature (1)..(1356): Ceres Seq. ID no. 12339492
  misc_feature: MA Experiment ID: 108573 Result: Up-regulated in Transcription
  misc_feature: MA Experiment 108573 PARAMETER Experiment Name: At_Drought_cDNA_P Parameter: Timepoint (hr) Value: 6
  misc_feature: MA Experiment 108573 PARAMETER Experiment Name: At_Drought_cDNA_P Parameter: Tissue Value: Aerial
  misc_feature: MA Experiment 108573 PARAMETER Experiment Name: At_Drought_cDNA_P Parameter: Treatment Value: Drought vs. No Drought
  misc_feature: MA Experiment ID: 108577 Result: Down-regulated in Transcription
  misc_feature: MA Experiment 108577 PARAMETER Experiment Name: At_42deg_Heat_cDNA_P Parameter: Temperature (deg C) Value: 42 vs. 22
  misc_feature: MA Experiment 108577 PARAMETER Experiment Name: At_42deg_Heat_cDNA_P Parameter: Timepoint (hr) Value: 6
  misc_feature: MA Experiment 108577 PARAMETER Experiment Name: At_42deg_Heat_cDNA_P Parameter: Tissue Value: Aerial
  misc_feature: MA Experiment ID: 20000111 Result: Down-regulated in Transcription
  misc_feature: MA Experiment 20000111 PARAMETER Experiment Name: At_42deg_Heat_cDNA_P Parameter: Temperature (deg C) Value: 42 vs. 22
  misc_feature: MA Experiment 20000111 PARAMETER Experiment Name: At_42deg_Heat_cDNA_P Parameter: Timepoint (hr) Value: 6
  misc_feature: MA Experiment 20000111 PARAMETER Experiment Name: At_42deg_Heat_cDNA_P Parameter: Tissue Value: Aerial
  misc_feature: MA Experiment ID: 20000224 Result: Down-regulated in Transcription
aactttcaatctcagctaatatcaagtaacgtggaaaggatttgttccgtcaaaggttggtgattatacagagactgagttcctgataagttggattgagcttgttttcaattgcggatctttgagaaaaaagtttgcaactttatggctctggaacaacaacatgtttgtgaaaagcggcttcaagccaagaccttttctacccaagagtttcagttgactctcaattgggatgatttaacttgtcccatttgtttggatttccctcacaatggtgtgcttctccagtgttcttcttacggaaacggttgccgtgcttttgtctgcaatactgatcaccttcactctaactgtttggatcgtttcattagcgcctgtggtactgaatcacctcctgctcctgatgagcctcgctctaaggttttagaagagagttgcaaacctgtgtgtccactgtgtagaggagaagttactggctggcttgttgtagaagaagctcgtcttcgtcttgatgagaaaaaacgttgctgtgaggaagaacgatgcaggtttatgggtacttacttggagcttcgcaaacatgctcagtcagagcatccggattctcgtccttcagaaattgatccagcacggaagcttgactgggagaatttccagcagtcgtctgaaataatcgacgtgttgagcacaattcactcagaagttccaagaggagtggttttaggggactatgtgatcgaatatggagatgatgacacaggagatgaatttgaggatgttcccaacaatgaaggaaactggtggacatcttgtattctctatcaaatgtttgacaatataaggaatgccaggaatcgaagaagatcaagaatgagtgagagtaggagagggagtcgccgctctagctatgagaattccaactctgatgacagctcagtagcatccatagagtttccggagtatagagtagatgagatcgatgacgagttcatcagcacaagtggagctaacagaagtagctctatgcaccaaagttcaagaaggcgtcgaacccgcttctatgaaaattagtcagctggaaaatgaagcgaagcaaatgatgcagaccagcctatttgtagccagtgttcttggttttggacctctttcttctttttgtttttgtttctacacataaattttattttaggtttgtcttgtgacattactcgcagcagtcgcagcctttgtacaaaaactaaacaaaaagcctttttgggatattgtagtacccttttgtcgttgtctcttctttgttttacatgcatctctggacaatgtagatattgagagtaaatcagaagtcaacgttcgtgt

SEQ ID NO: 42779 - protein, 308 aa, Arabidopsis thaliana
  peptide (1)..(308): Ceres Seq. ID no. 12339493
  misc_feature (11)..(304): Homolog of NCBI NO: 15221290 NR Description: unknown protein
  misc_feature (29)..(216): Homolog of NCBI NO: 30699285 NR Description: expressed protein [Arabidopsis thaliana]
  misc_feature (29)..(216): Homolog of NCBI NO: 25365932 NR Description: unknown protein T32E8.10 [imported] - Arabidopsis
  misc_feature (29)..(216): Homolog of NCBI NO: 15236507 NR Description: hypothetical protein
  misc_feature (29)..(74): Homolog of NCBI NO: 38346521 NR Description: OSJNBa0027H09.16 [Oryza sativa (japonica
  misc_feature (102)..(262): Homolog of NCBI NO: 38346521 NR Description: OSJNBa0027H09.16 [Oryza sativa (japonica
  misc_feature (30)..(87): Homolog of NCBI NO: 15230170 NR Description: unknown protein
  misc_feature (102)..(308): Homolog of NCBI NO: 15230170 NR Description: unknown protein
  misc_feature (1)..(308): Homolog of NCBI NO: 18417801 NR Description: expressed protein
  misc_feature (1)..(298): Homolog of NCBI NO: 7486671 NR Description: hypothetical protein F8F16.230 - Arabidopsis
MALEQQHVCEKRLQAKTFSTQEFQLTLNWDDLTCPICLDFPHNGVLLQCSSYGNGCRAFVCNTDHLHSNCLDRFISACGTESPPAPDEPRSKVLEESCKPVCPLCRGEVTGWLVVEEARLRLDEKKRCCEEERCRFMGTYLELRKHAQSEHPDSRPSEIDPARKLDWENFQQSSEIIDVLSTIHSEVPRGVVLGDYVIEYGDDDTGDEFEDVPNNEGNWWTSCILYQMFDNIRNARNRRRSRMSESRRGSRRSSYENSNSDDSSVASIEFPEYRVDEIDDEFISTSGANRSSSMHQSSRRRRTRFYEN

SEQ ID NO: 42780 - protein, 172 aa, Arabidopsis thaliana
  peptide (1)..(172): Ceres Seq. ID no. 12339495
  misc_feature (1)..(49): Homolog of NCBI NO: 34912600 NR Description: P0046B10.17 [Oryza sativa (japonica
  misc_feature (1)..(74): Homolog of NCBI NO: 38344827 NR Description: OSJNBa0064H22.8 [Oryza sativa (japonica
  misc_feature (1)..(168): Homolog of NCBI NO: 15221290 NR Description: unknown protein
  misc_feature (1)..(80): Homolog of NCBI NO: 30699285 NR Description: expressed protein [Arabidopsis thaliana]
  misc_feature (1)..(80): Homolog of NCBI NO: 25365932 NR Description: unknown protein T32E8.10 [imported] - Arabidopsis
  misc_feature (1)..(80): Homolog of NCBI NO: 15236507 NR Description: hypothetical protein
  misc_feature (1)..(126): Homolog of NCBI NO: 38346521 NR Description: OSJNBa0027H09.16 [Oryza sativa (japonica
  misc_feature (1)..(172): Homolog of NCBI NO: 15230170 NR Description: unknown protein
  misc_feature (1)..(172): Homolog of NCBI NO: 18417801 NR Description: expressed protein
  misc_feature (1)..(162): Homolog of NCBI NO: 7486671 NR Description: hypothetical protein F8F16.230 - Arabidopsis
MGTYLELRKHAQSEHPDSRPSEIDPARKLDWENFQQSSEIIDVLSTIHSEVPRGVVLGDYVIEYGDDDTGDEFEDVPNNEGNWWTSCILYQMFDNIRNARNRRRSRMSESRRGSRRSSYENSNSDDSSVASIEFPEYRVDEIDDEFISTSGANRSSSMHQSSRRRRTRFYEN

SEQ ID NO: 42781 - DNA, 1258 bp, Arabidopsis thaliana
  misc_feature (1)..(1258): Ceres Seq. ID no. 13645975
  misc_feature: MA Experiment ID: 20000173 Result: Down-regulated in Transcription
  misc_feature: MA Experiment 20000173 PARAMETER Experiment Name: At_42deg_Heat_P Parameter: Age (day) Value: 14
  misc_feature: MA Experiment 20000173 PARAMETER Experiment Name: At_42deg_Heat_P Parameter: Organism Value: A. thaliana
  misc_feature: MA Experiment 20000173 PARAMETER Experiment Name: At_42deg_Heat_P Parameter: Plant Line Value: WS
  misc_feature: MA Experiment 20000173 PARAMETER Experiment Name: At_42deg_Heat_P Parameter: Temperature (deg C) Value: 42 vs. 22
  misc_feature: MA Experiment 20000173 PARAMETER Experiment Name: At_42deg_Heat_P Parameter: Timepoint (hr) Value: 6
  misc_feature: MA Experiment 20000173 PARAMETER Experiment Name: At_42deg_Heat_P Parameter: Tissue Value: Aerial
  misc_feature: MA Experiment ID: 20000179 Result: Down-regulated in Transcription
  misc_feature: MA Experiment 20000179 PARAMETER Experiment Name: At_Germinating_Seeds_P Parameter: Age (hr) Value: 6 vs. 0
  misc_feature: MA Experiment 20000179 PARAMETER Experiment Name: At_Germinating_Seeds_P Parameter: Tissue Value: Germinating Seeds
  misc_feature: MA Experiment ID: 20000180 Result: Down-regulated in Transcription
  misc_feature: MA Experiment 20000180 PARAMETER Experiment Name: At_Germinating_Seeds_P Parameter: Age (hr) Value: 24 vs. 0
  misc_feature: MA Experiment 20000180 PARAMETER Experiment Name: At_Germinating_Seeds_P Parameter: Tissue Value: Germinating Seeds
  misc_feature: MA Experiment ID: 20000184 Result: Down-regulated in Transcription
  misc_feature: MA Experiment 20000184 PARAMETER Experiment Name: At_Shoots__P Parameter: Age (day) Value: 7
  misc_feature: MA Experiment 20000184 PARAMETER Experiment Name: At_Shoots__P Parameter: Tissue Value: Shoots vs. Whole Plant
  misc_feature: MA Experiment ID: 20000185 Result: Down-regulated in Transcription
  misc_feature: MA Experiment 20000185 PARAMETER Experiment Name: At_Roots__P Parameter: Age (day) Value: 7 vs. 21
  misc_feature: MA Experiment 20000185 PARAMETER Experiment Name: At_Roots__P Parameter: Organism Value: A. thaliana
  misc_feature: MA Experiment 20000185 PARAMETER Experiment Name: At_Roots__P Parameter: Tissue Value: Roots vs. Whole Plant
  misc_feature: MA Experiment ID: 20000234 Result: Down-regulated in Transcription
  misc_feature: MA Experiment 20000234 PARAMETER Experiment Name: At_Siliques_P Parameter: Age (day) Value: 21
  misc_feature: MA Experiment 20000234 PARAMETER Experiment Name: At_Siliques_P Parameter: Organism Value: A. thaliana
  misc_feature: MA Experiment 20000234 PARAMETER Experiment Name: At_Siliques_P Parameter: Plant Line Value: WS
  misc_feature: MA Experiment 20000234 PARAMETER Experiment Name: At_Siliques_P Parameter: Tissue Value: Less Than 5mm Siliques vs. Whole Plant
  misc_feature: MA Experiment ID: 20000437 Result: Up-regulated in Transcription
  misc_feature: MA Experiment 20000437 PARAMETER Experiment Name: At_Drought_P Parameter: Age (day) Value: 8
  misc_feature: MA Experiment 20000437 PARAMETER Experiment Name: At_Drought_P Parameter: Organism Value: A. thaliana
  misc_feature: MA Experiment 20000437 PARAMETER Experiment Name: At_Drought_P Parameter: Plant Line Value: WS
  misc_feature: MA Experiment 20000437 PARAMETER Experiment Name: At_Drought_P Parameter: Timepoint (hr) Value: 24
  misc_feature: MA Experiment 20000437 PARAMETER Experiment Name: At_Drought_P Parameter: Tissue Value: Whole Plant
  misc_feature: MA Experiment 20000437 PARAMETER Experiment Name: At_Drought_P Parameter: Treatment Value: Drought vs. No Drought
  misc_feature: MA Experiment ID: 20000438 Result: Down-regulated in Transcription
  misc_feature: MA Experiment 20000438 PARAMETER Experiment Name: At_Shoots__P Parameter: Age (day) Value: 14
  misc_feature: MA Experiment 20000438 PARAMETER Experiment Name: At_Shoots__P Parameter: Tissue Value: Shoots vs. Whole Plant
  misc_feature: MA Experiment ID: 20000439 Result: Down-regulated in Transcription
  misc_feature: MA Experiment 20000439 PARAMETER Experiment Name: At_Roots__P Parameter: Age (day) Value: 14 vs. 21
  misc_feature: MA Experiment 20000439 PARAMETER Experiment Name: At_Roots__P Parameter: Organism Value: A. thaliana
  misc_feature: MA Experiment 20000439 PARAMETER Experiment Name: At_Roots__P Parameter: Tissue Value: Roots vs. Whole Plant
  misc_feature: MA Experiment ID: 20000709 Result: Down-regulated in Transcription
  misc_feature: MA Experiment 20000709 PARAMETER Experiment Name: At_15mM_NH4NO3_L-to-H_P Parameter: Age (hr) Value: 14
  misc_feature: MA Experiment 20000709 PARAMETER Experiment Name: At_15mM_NH4NO3_L-to-H_P Parameter: Organism Value: A. thaliana
  misc_feature: MA Experiment 20000709 PARAMETER Experiment Name: At_15mM_NH4NO3_L-to-H_P Parameter: Plant Line Value: WS
  misc_feature: MA Experiment 20000709 PARAMETER Experiment Name: At_15mM_NH4NO3_L-to-H_P Parameter: Timepoint (hr) Value: 4
  misc_feature: MA Experiment 20000709 PARAMETER Experiment Name: At_15mM_NH4NO3_L-to-H_P Parameter: Tissue Value: Aerial
  misc_feature: MA Experiment 20000709 PARAMETER Experiment Name: At_15mM_NH4NO3_L-to-H_P Parameter: Treatment Value: 15mM NH4NO3 vs. 30mM Mannitol
  misc_feature: MA Experiment ID: 20001247 Result: Down-regulated in Transcription
  misc_feature: MA Experiment 20001247 PARAMETER Experiment Name: At_Far-red-induction_P Parameter: Age (day) Value: 7
  misc_feature: MA Experiment 20001247 PARAMETER Experiment Name: At_Far-red-induction_P Parameter: Light Value: Far-red vs. White
  misc_feature: MA Experiment 20001247 PARAMETER Experiment Name: At_Far-red-induction_P Parameter: Organism Value: A. thaliana
  misc_feature: MA Experiment 20001247 PARAMETER Experiment Name: At_Far-red-induction_P Parameter: Plant Line Value: Columbia
  misc_feature: MA Experiment 20001247 PARAMETER Experiment Name: At_Far-red-induction_P Parameter: Timepoint (hr) Value: 1
  misc_feature: MA Experiment 20001247 PARAMETER Experiment Name: At_Far-red-induction_P Parameter: Tissue Value: Whole Plant
  misc_feature: MA Experiment ID: 20001557 Result: Down-regulated in Transcription
  misc_feature: MA Experiment 20001557 PARAMETER Experiment Name: At_Drought_Soil_Dry_P Parameter: Age (day) Value: 27
  misc_feature: MA Experiment 20001557 PARAMETER Experiment Name: At_Drought_Soil_Dry_P Parameter: Organism Value: A. thaliana
  misc_feature: MA Experiment 20001557 PARAMETER Experiment Name: At_Drought_Soil_Dry_P Parameter: Plant Line Value: WS
  misc_feature: MA Experiment 20001557 PARAMETER Experiment Name: At_Drought_Soil_Dry_P Parameter: Post Timepoint (hr) Value: 3
  misc_feature: MA Experiment 20001557 PARAMETER Experiment Name: At_Drought_Soil_Dry_P Parameter: Post-Treatment Value: Re-Water vs. No Drought
  misc_feature: MA Experiment 20001557 PARAMETER Experiment Name: At_Drought_Soil_Dry_P Parameter: Timepoint (day) Value: 13
  misc_feature: MA Experiment 20001557 PARAMETER Experiment Name: At_Drought_Soil_Dry_P Parameter: Treatment Value: Drought vs. No Drought
  misc_feature: MA Experiment ID: 20001558 Result: Down-regulated in Transcription
  misc_feature: MA Experiment 20001558 PARAMETER Experiment Name: At_Drought_Soil_Dry_P Parameter: Age (day) Value: 27
  misc_feature: MA Experiment 20001558 PARAMETER Experiment Name: At_Drought_Soil_Dry_P Parameter: Organism Value: A. thaliana
  misc_feature: MA Experiment 20001558 PARAMETER Experiment Name: At_Drought_Soil_Dry_P Parameter: Plant Line Value: WS
  misc_feature: MA Experiment 20001558 PARAMETER Experiment Name: At_Drought_Soil_Dry_P Parameter: Post Timepoint (hr) Value: 6
  misc_feature: MA Experiment 20001558 PARAMETER Experiment Name: At_Drought_Soil_Dry_P Parameter: Post-Treatment Value: Re-Water vs. No Drought
  misc_feature: MA Experiment 20001558 PARAMETER Experiment Name: At_Drought_Soil_Dry_P Parameter: Timepoint (day) Value: 13
  misc_feature: MA Experiment 20001558 PARAMETER Experiment Name: At_Drought_Soil_Dry_P Parameter: Treatment Value: Drought vs. No Drought
  misc_feature: MA Experiment ID: 20001906 Result: Down-regulated in Transcription
  misc_feature: MA Experiment 20001906 PARAMETER Experiment Name: At_Drought_Reproduction_P Parameter: Age (day) Value: 35
  misc_feature: MA Experiment 20001906 PARAMETER Experiment Name: At_Drought_Reproduction_P Parameter: Organism Value: A. thaliana
  misc_feature: MA Experiment 20001906 PARAMETER Experiment Name: At_Drought_Reproduction_P Parameter: Plant Line Value: WS
  misc_feature: MA Experiment 20001906 PARAMETER Experiment Name: At_Drought_Reproduction_P Parameter: Timepoint (day) Value: 5
  misc_feature: MA Experiment 20001906 PARAMETER Experiment Name: At_Drought_Reproduction_P Parameter: Tissue Value: Siliques
  misc_feature: MA Experiment 20001906 PARAMETER Experiment Name: At_Drought_Reproduction_P Parameter: Treatment Value: Drought vs. No Drought
  misc_feature: MA Experiment ID: 20001908 Result: Down-regulated in Transcription
  misc_feature: MA Experiment 20001908 PARAMETER Experiment Name: At_Drought_Reproduction_P Parameter: Age (day) Value: 40
  misc_feature: MA Experiment 20001908 PARAMETER Experiment Name: At_Drought_Reproduction_P Parameter: Organism Value: A. thaliana
  misc_feature: MA Experiment 20001908 PARAMETER Experiment Name: At_Drought_Reproduction_P Parameter: Plant Line Value: WS
  misc_feature: MA Experiment 20001908 PARAMETER Experiment Name: At_Drought_Reproduction_P Parameter: Timepoint (day) Value: 10
  misc_feature: MA Experiment 20001908 PARAMETER Experiment Name: At_Drought_Reproduction_P Parameter: Tissue Value: Siliques
  misc_feature: MA Experiment 20001908 PARAMETER Experiment Name: At_Drought_Reproduction_P Parameter: Treatment Value: Drought vs. No Drought
  misc_feature: MA Experiment ID: 20001911 Result: Down-regulated in Transcription
  misc_feature: MA Experiment 20001911 PARAMETER Experiment Name: At_Drought_Reproduction_P Parameter: Age (day) Value: 40
  misc_feature: MA Experiment 20001911 PARAMETER Experiment Name: At_Drought_Reproduction_P Parameter: Organism Value: A. thaliana
  misc_feature: MA Experiment 20001911 PARAMETER Experiment Name: At_Drought_Reproduction_P Parameter: Plant Line Value: WS
  misc_feature: MA Experiment 20001911 PARAMETER Experiment Name: At_Drought_Reproduction_P Parameter: Timepoint (day) Value: 10
  misc_feature: MA Experiment 20001911 PARAMETER Experiment Name: At_Drought_Reproduction_P Parameter: Tissue Value: Flowers
  misc_feature: MA Experiment 20001911 PARAMETER Experiment Name: At_Drought_Reproduction_P Parameter: Treatment Value: Drought vs. No Drought
gaaatatcatcaaaaaggccaaaacagaggacaacaaaaacagcaagcagcaagaagaagatgaagaatggtttgataatcataaactgtattatcctcactataggaacatgtggaggtcctttgttaactcgtctctacttcaccaatggcggaaaacgaatctggttcatgagcttcctatcaaccgctggttttccaatcatcctcatccctctcttggtctccttcctcagccgtcgccgcagcaaccgcaaccctaacaacgcggaaaacaagcggaaaacaaagctcttcctcatggaaactcctctgtttatcgcctccattgtcatagggttgctcacaggacttgacaactacttatattcttacggattagcatatctgccagtttcaacttcatcgctcataatcggaactcaactagctttcaacgctctcttcgctttcttgttagtcaagcaaaagttcactccgttctccataaacgccgtcgttttgttgacggttggtatcgggatccttgcgttacacagtgatggagacaaaccggctaaggagagcaagaaagagtatgtggttgggttcttgatgactgtggttgcagctcttctctatgcttttatattaccgctcgttgagctaacttacaagaaagctcgtcaagaaatcactttcccacttgtgcttgagattcagatggtcatgtgccttgctgctacttttttctgtgtcattggcatgttcatcgttggagattttaaggtgatagcaagagaagcaagagagttcaagattggaggatcagtgttttactatgcattgatagtgatcacaggaataatatggcaaggtttcttcttaggagccatagggattgtgttttgtgcatcatcactagcttctggtgttctgataagtgttctgcttccggtgactgaagttttcgccgtcgtttgtttccgggagaagtttcaggcagagaaaggtgtctctctacttctttctctttggggatttgtctcttacttctacggcgagtttaaatccggcaagaaagttgttgataaacctcaaccgccggagacagaactgcctattcttcctgttagtgattatgttgcttaatttctataactctataggattataacagagcattactgttatgttttgttcctaatattatgtgtgattgtgtgttttgttattgttcttgtgtataagtatgaataaatttgaaagatattgagct

SEQ ID NO: 42782 - protein, 376 aa, Arabidopsis thaliana
  peptide (1)..(376): Ceres Seq. ID no. 13645976
  misc_feature (179)..(362): Pfam Name: Domain of unknown function, DUF250 Pfam Description: Domain of unknown function, DUF250
  misc_feature (32)..(373): Homolog of NCBI NO: 15236799 NR Description: purine permease family [Arabidopsis thaliana]
  misc_feature (42)..(365): Homolog of NCBI NO: 30684325 NR Description: purine permease family [Arabidopsis thaliana]
  misc_feature (25)..(346): Homolog of NCBI NO: 15219436 NR Description: purine permease family [Arabidopsis thaliana]
  misc_feature (7)..(354): Homolog of NCBI NO: 18397682 NR Description: purine permease-related [Arabidopsis thaliana]
  misc_feature (15)..(368): Homolog of NCBI NO: 34902418 NR Description: Hypothetical protein [Oryza sativa (japonica
  misc_feature (21)..(373): Homolog of NCBI NO: 15217872 NR Description: purine permease, putative [Arabidopsis thaliana]
  misc_feature (21)..(376): Homolog of NCBI NO: 25350217 NR Description: hypothetical protein At2g33750 [imported] -
  misc_feature (20)..(376): Homolog of NCBI NO: 30685825 NR Description: purine permease family [Arabidopsis thaliana]
  misc_feature (21)..(376): Homolog of NCBI NO: 7620007 NR Description: purine permease [Arabidopsis thaliana]
  misc_feature (21)..(376): Homolog of NCBI NO: 15217873 NR Description: purine permease [Arabidopsis thaliana]
EISSKRPKQRTTKTASSKKKMKNGLIIINCIILTIGTCGGPLLTRLYFTNGGKRIWFMSFLSTAGFPIILIPLLVSFLSRRRSNRNPNNAENKRKTKLFLMETPLFIASIVIGLLTGLDNYLYSYGLAYLPVSTSSLIIGTQLAFNALFAFLLVKQKFTPFSINAVVLLTVGIGILALHSDGDKPAKESKKEYVVGFLMTVVAALLYAFILPLVELTYKKARQEITFPLVLEIQMVMCLAATFFCVIGMFIVGDFKVIAREAREFKIGGSVFYYALIVITGIIWQGFFLGAIGIVFCASSLASGVLISVLLPVTEVFAVVCFREKFQAEKGVSLLLSLWGFVSYFYGEFKSGKKVVDKPQPPETELPILPVSDYVA

SEQ ID NO: 42783 - protein, 356 aa, Arabidopsis thaliana
  peptide (1)..(356): Ceres Seq. ID no. 13645977
  misc_feature (159)..(342): Pfam Name: Domain of unknown function, DUF250 Pfam Description: Domain of unknown function, DUF250
  misc_feature (12)..(353): Homolog of NCBI NO: 15236799 NR Description: purine permease family [Arabidopsis thaliana]
  misc_feature (22)..(345): Homolog of NCBI NO: 30684325 NR Description: purine permease family [Arabidopsis thaliana]
  misc_feature (5)..(326): Homolog of NCBI NO: 15219436 NR Description: purine permease family [Arabidopsis thaliana]
  misc_feature (1)..(334): Homolog of NCBI NO: 18397682 NR Description: purine permease-related [Arabidopsis thaliana]
  misc_feature (1)..(348): Homolog of NCBI NO: 34902418 NR Description: Hypothetical protein [Oryza sativa (japonica
  misc_feature (1)..(353): Homolog of NCBI NO: 15217872 NR Description: purine permease, putative [Arabidopsis thaliana]
  misc_feature (1)..(356): Homolog of NCBI NO: 25350217 NR Description: hypothetical protein At2g33750 [imported] -
  misc_feature (1)..(356): Homolog of NCBI NO: 30685825 NR Description: purine permease family [Arabidopsis thaliana]
  misc_feature (1)..(356): Homolog of NCBI NO: 7620007 NR Description: purine permease [Arabidopsis thaliana]
  misc_feature (1)..(356): Homolog of NCBI NO: 15217873 NR Description: purine permease [Arabidopsis thaliana]
MKNGLIIINCIILTIGTCGGPLLTRLYFTNGGKRIWFMSFLSTAGFPIILIPLLVSFLSRRRSNRNPNNAENKRKTKLFLMETPLFIASIVIGLLTGLDNYLYSYGLAYLPVSTSSLIIGTQLAFNALFAFLLVKQKFTPFSINAVVLLTVGIGILALHSDGDKPAKESKKEYVVGFLMTVVAALLYAFILPLVELTYKKARQEITFPLVLEIQMVMCLAATFFCVIGMFIVGDFKVIAREAREFKIGGSVFYYALIVITGIIWQGFFLGAIGIVFCASSLASGVLISVLLPVTEVFAVVCFREKFQAEKGVSLLLSLWGFVSYFYGEFKSGKKVVDKPQPPETELPILPVSDYVA

SEQ ID NO: 42784 - protein, 319 aa, Arabidopsis thaliana
  peptide (1)..(319): Ceres Seq. ID no. 13645978
  misc_feature (122)..(305): Pfam Name: Domain of unknown function, DUF250 Pfam Description: Domain of unknown function, DUF250
  misc_feature (1)..(316): Homolog of NCBI NO: 15236799 NR Description: purine permease family [Arabidopsis thaliana]
  misc_feature (1)..(308): Homolog of NCBI NO: 30684325 NR Description: purine permease family [Arabidopsis thaliana]
  misc_feature (1)..(289): Homolog of NCBI NO: 15219436 NR Description: purine permease family [Arabidopsis thaliana]
  misc_feature (1)..(297): Homolog of NCBI NO: 18397682 NR Description: purine permease-related [Arabidopsis thaliana]
  misc_feature (1)..(311): Homolog of NCBI NO: 34902418 NR Description: Hypothetical protein [Oryza sativa (japonica
  misc_feature (1)..(316): Homolog of NCBI NO: 15217872 NR Description: purine permease, putative [Arabidopsis thaliana]
  misc_feature (1)..(319): Homolog of NCBI NO: 25350217 NR Description: hypothetical protein At2g33750 [imported] -
  misc_feature (1)..(319): Homolog of NCBI NO: 30685825 NR Description: purine permease family [Arabidopsis thaliana]
  misc_feature (1)..(319): Homolog of NCBI NO: 7620007 NR Description: purine permease [Arabidopsis thaliana]
  misc_feature (1)..(319): Homolog of NCBI NO: 15217873 NR Description: purine permease [Arabidopsis thaliana]
MSFLSTAGFPIILIPLLVSFLSRRRSNRNPNNAENKRKTKLFLMETPLFIASIVIGLLTGLDNYLYSYGLAYLPVSTSSLIIGTQLAFNALFAFLLVKQKFTPFSINAVVLLTVGIGILALHSDGDKPAKESKKEYVVGFLMTVVAALLYAFILPLVELTYKKARQEITFPLVLEIQMVMCLAATFFCVIGMFIVGDFKVIAREAREFKIGGSVFYYALIVITGIIWQGFFLGAIGIVFCASSLASGVLISVLLPVTEVFAVVCFREKFQAEKGVSLLLSLWGFVSYFYGEFKSGKKVVDKPQPPETELPILPVSDYVA

SEQ ID NO: 42785 - DNA, 1307 bp, Arabidopsis thaliana
  misc_feature (1)..(1307): Ceres Seq. ID no. 13497235
  misc_feature: MA Experiment ID: 108461 Result: Up-regulated in Transcription
  misc_feature: MA Experiment 108461 PARAMETER Experiment Name: At_Germinating_Seeds_cDNA_P Parameter: Age (day) Value: 1 vs. 0
  misc_feature: MA Experiment 108461 PARAMETER Experiment Name: At_Germinating_Seeds_cDNA_P Parameter: Tissue Value: Germinating Seeds
  misc_feature: MA Experiment ID: 108462 Result: Up-regulated in Transcription
  misc_feature: MA Experiment 108462 PARAMETER Experiment Name: At_Germinating_Seeds_cDNA_P Parameter: Age (day) Value: 2 vs. 0
  misc_feature: MA Experiment 108462 PARAMETER Experiment Name: At_Germinating_Seeds_cDNA_P Parameter: Tissue Value: Germinating Seeds
  misc_feature: MA Experiment ID: 108463 Result: Up-regulated in Transcription
  misc_feature: MA Experiment 108463 PARAMETER Experiment Name: At_Germinating_Seeds_cDNA_P Parameter: Age (day) Value: 3 vs. 0
  misc_feature: MA Experiment 108463 PARAMETER Experiment Name: At_Germinating_Seeds_cDNA_P Parameter: Tissue Value: Germinating Seeds
  misc_feature: MA Experiment ID: 108464 Result: Up-regulated in Transcription
  misc_feature: MA Experiment 108464 PARAMETER Experiment Name: At_Germinating_Seeds_cDNA_P Parameter: Age (day) Value: 4 vs. 0
  misc_feature: MA Experiment 108464 PARAMETER Experiment Name: At_Germinating_Seeds_cDNA_P Parameter: Tissue Value: Germinating Seeds
  misc_feature: MA Experiment ID: 108561 Result: Up-regulated in Transcription
  misc_feature: MA Experiment 108561 PARAMETER Experiment Name: At_100uM_ABA_cDNA_P Parameter: Timepoint (hr) Value: 6
  misc_feature: MA Experiment 108561 PARAMETER Experiment Name: At_100uM_ABA_cDNA_P Parameter: Tissue Value: Aerial
  misc_feature: MA Experiment 108561 PARAMETER Experiment Name: At_100uM_ABA_cDNA_P Parameter: Treatment Value: 100uM ABA vs. No Treatment
  misc_feature: MA Experiment ID: 108569 Result: Up-regulated in Transcription
  misc_feature: MA Experiment 108569 PARAMETER Experiment Name: At_0.001%_MeJA__cDNA_P Parameter: Timepoint (hr) Value: 6
  misc_feature: MA Experiment 108569 PARAMETER Experiment Name: At_0.001%_MeJA__cDNA_P Parameter: Tissue Value: Aerial
  misc_feature: MA Experiment 108569 PARAMETER Experiment Name: At_0.001%_MeJA__cDNA_P Parameter: Treatment Value: 0.001% MeJA vs. No Treatment
  misc_feature: MA Experiment ID: 108572 Result: Up-regulated in Transcription
  misc_feature: MA Experiment 108572 PARAMETER Experiment Name: At_Drought_cDNA_P Parameter: Timepoint (hr) Value: 1
  misc_feature: MA Experiment 108572 PARAMETER Experiment Name: At_Drought_cDNA_P Parameter: Tissue Value: Aerial
  misc_feature: MA Experiment 108572 PARAMETER Experiment Name: At_Drought_cDNA_P Parameter: Treatment Value: Drought vs. No Drought
  misc_feature: MA Experiment ID: 108573 Result: Up-regulated in Transcription
  misc_feature: MA Experiment 108573 PARAMETER Experiment Name: At_Drought_cDNA_P Parameter: Timepoint (hr) Value: 6
  misc_feature: MA Experiment 108573 PARAMETER Experiment Name: At_Drought_cDNA_P Parameter: Tissue Value: Aerial
  misc_feature: MA Experiment 108573 PARAMETER Experiment Name: At_Drought_cDNA_P Parameter: Treatment Value: Drought vs. No Drought
  misc_feature: MA Experiment ID: 108594 Result: Down-regulated in Transcription
  misc_feature: MA Experiment 108594 PARAMETER Experiment Name: At_Ler-rhl_Root_cDNA_P Parameter: Plant Line Value: null
  misc_feature: MA Experiment ID: 108595 Result: Down-regulated in Transcription
  misc_feature: MA Experiment 108595 PARAMETER Experiment Name: At_Ler-pi_Ovule_cDNA_P Parameter: Plant Line Value: null
  misc_feature: MA Experiment ID: 108605 Result: Up-regulated in Transcription
  misc_feature: MA Experiment 108605 PARAMETER Experiment Name: At_100uM_ABA_cDNA_P Parameter: Timepoint (hr) Value: 6
  misc_feature: MA Experiment 108605 PARAMETER Experiment Name: At_100uM_ABA_cDNA_P Parameter: Tissue Value: Aerial
  misc_feature: MA Experiment 108605 PARAMETER Experiment Name: At_100uM_ABA_cDNA_P Parameter: Treatment Value: 100uM ABA vs. No Treatment
  misc_feature: MA Experiment ID: 108607 Result: Up-regulated in Transcription
  misc_feature: MA Experiment 108607 PARAMETER Experiment Name: At_100uM_ABA_cDNA_P Parameter: Timepoint (hr) Value: 4
  misc_feature: MA Experiment 108607 PARAMETER Experiment Name: At_100uM_ABA_cDNA_P Parameter: Tissue Value: Aerial
  misc_feature: MA Experiment 108607 PARAMETER Experiment Name: At_100uM_ABA_cDNA_P Parameter: Treatment Value: 100uM ABA vs. No Treatment
  misc_feature: MA Experiment ID: 20000069 Result: Up-regulated in Transcription
  misc_feature: MA Experiment 20000069 PARAMETER Experiment Name: At_100uM_ABA_Mutants_cDNA_P Parameter: Plant Line Value: CS23
  misc_feature: MA Experiment 20000069 PARAMETER Experiment Name: At_100uM_ABA_Mutants_cDNA_P Parameter: Timepoint (hr) Value: 6
  misc_feature: MA Experiment 20000069 PARAMETER Experiment Name: At_100uM_ABA_Mutants_cDNA_P Parameter: Tissue Value: Aerial
  misc_feature: MA Experiment 20000069 PARAMETER Experiment Name: At_100uM_ABA_Mutants_cDNA_P Parameter: Treatment Value: 100uM ABA vs. No Treatment
  misc_feature: MA Experiment ID: 20000070 Result: Up-regulated in Transcription
  misc_feature: MA Experiment 20000070 PARAMETER Experiment Name: At_100uM_ABA_Mutants_cDNA_P Parameter: Plant Line Value: CS24
  misc_feature: MA Experiment 20000070 PARAMETER Experiment Name: At_100uM_ABA_Mutants_cDNA_P Parameter: Timepoint (hr) Value: 6
  misc_feature: MA Experiment 20000070 PARAMETER Experiment Name: At_100uM_ABA_Mutants_cDNA_P Parameter: Tissue Value: Aerial
  misc_feature: MA Experiment 20000070 PARAMETER Experiment Name: At_100uM_ABA_Mutants_cDNA_P Parameter: Treatment Value: 100uM ABA vs. No Treatment
  misc_feature: MA Experiment ID: 20000071 Result: Up-regulated in Transcription
  misc_feature: MA Experiment 20000071 PARAMETER Experiment Name: At_100uM_ABA_Mutants_cDNA_P Parameter: Plant Line Value: CS8104
  misc_feature: MA Experiment 20000071 PARAMETER Experiment Name: At_100uM_ABA_Mutants_cDNA_P Parameter: Timepoint (hr) Value: 6
  misc_feature: MA Experiment 20000071 PARAMETER Experiment Name: At_100uM_ABA_Mutants_cDNA_P Parameter: Tissue Value: Aerial
  misc_feature: MA Experiment 20000071 PARAMETER Experiment Name: At_100uM_ABA_Mutants_cDNA_P Parameter: Treatment Value: 100uM ABA vs. No Treatment
  misc_feature: MA Experiment ID: 20000072 Result: Up-regulated in Transcription
  misc_feature: MA Experiment 20000072 PARAMETER Experiment Name: At_100uM_ABA_Mutants_cDNA_P Parameter: Plant Line Value: CS8105
  misc_feature: MA Experiment 20000072 PARAMETER Experiment Name: At_100uM_ABA_Mutants_cDNA_P Parameter: Timepoint (hr) Value: 6
  misc_feature: MA Experiment 20000072 PARAMETER Experiment Name: At_100uM_ABA_Mutants_cDNA_P Parameter: Tissue Value: Aerial
  misc_feature: MA Experiment 20000072 PARAMETER Experiment Name: At_100uM_ABA_Mutants_cDNA_P Parameter: Treatment Value: 100uM ABA vs. No Treatment
  misc_feature: MA Experiment ID: 20000086 Result: Up-regulated in Transcription
  misc_feature: MA Experiment 20000086 PARAMETER Experiment Name: At_100uM_ABA_Mutants_cDNA_P Parameter: Plant Line Value: CS22
  misc_feature: MA Experiment 20000086 PARAMETER Experiment Name: At_100uM_ABA_Mutants_cDNA_P Parameter: Timepoint (hr) Value: 6
  misc_feature: MA Experiment 20000086 PARAMETER Experiment Name: At_100uM_ABA_Mutants_cDNA_P Parameter: Tissue Value: Aerial
  misc_feature: MA Experiment 20000086 PARAMETER Experiment Name: At_100uM_ABA_Mutants_cDNA_P Parameter: Treatment Value: 100uM ABA vs. No Treatment
  misc_feature: MA Experiment ID: 20000087 Result: Up-regulated in Transcription
  misc_feature: MA Experiment 20000087 PARAMETER Experiment Name: At_100uM_ABA_Mutants_cDNA_P Parameter: Plant Line Value: WS
  misc_feature: MA Experiment 20000087 PARAMETER Experiment Name: At_100uM_ABA_Mutants_cDNA_P Parameter: Timepoint (hr) Value: 6
  misc_feature: MA Experiment 20000087 PARAMETER Experiment Name: At_100uM_ABA_Mutants_cDNA_P Parameter: Tissue Value: Aerial
  misc_feature: MA Experiment 20000087 PARAMETER Experiment Name: At_100uM_ABA_Mutants_cDNA_P Parameter: Treatment Value: 100uM ABA vs. No Treatment
  misc_feature: MA Experiment ID: 20000088 Result: Up-regulated in Transcription
  misc_feature: MA Experiment 20000088 PARAMETER Experiment Name: At_100uM_ABA_Mutants_cDNA_P Parameter: Plant Line Value: Landsberg
  misc_feature: MA Experiment 20000088 PARAMETER Experiment Name: At_100uM_ABA_Mutants_cDNA_P Parameter: Timepoint (hr) Value: 6
  misc_feature: MA Experiment 20000088 PARAMETER Experiment Name: At_100uM_ABA_Mutants_cDNA_P Parameter: Tissue Value: Aerial
  misc_feature: MA Experiment 20000088 PARAMETER Experiment Name: At_100uM_ABA_Mutants_cDNA_P Parameter: Treatment Value: 100uM ABA vs. No Treatment
  misc_feature: MA Experiment ID: 20000089 Result: Up-regulated in Transcription
  misc_feature: MA Experiment ID: 20000117 Result: Up-regulated in Transcription
  misc_feature: MA Experiment 20000117 PARAMETER Experiment Name: At_100uM_ABA_Mutants_cDNA_P Parameter: Plant Line Value: Columbia
  misc_feature: MA Experiment 20000117 PARAMETER Experiment Name: At_100uM_ABA_Mutants_cDNA_P Parameter: Timepoint (hr) Value: 6
  misc_feature: MA Experiment 20000117 PARAMETER Experiment Name: At_100uM_ABA_Mutants_cDNA_P Parameter: Tissue Value: Aerial
  misc_feature: MA Experiment 20000117 PARAMETER Experiment Name: At_100uM_ABA_Mutants_cDNA_P Parameter: Treatment Value: 100uM ABA vs. No Treatment
  misc_feature: MA Experiment ID: 20000169 Result: Up-regulated in Transcription
  misc_feature: MA Experiment 20000169 PARAMETER Experiment Name: At_100uM_ABA_P Parameter: Age (day) Value: 14
  misc_feature: MA Experiment 20000169 PARAMETER Experiment Name: At_100uM_ABA_P Parameter: Organism Value: A. thaliana
  misc_feature: MA Experiment 20000169 PARAMETER Experiment Name: At_100uM_ABA_P Parameter: Plant Line Value: WS
  misc_feature: MA Experiment 20000169 PARAMETER Experiment Name: At_100uM_ABA_P Parameter: Timepoint (hr) Value: 6
  misc_feature: MA Experiment 20000169 PARAMETER Experiment Name: At_100uM_ABA_P Parameter: Tissue Value: Aerial
  misc_feature: MA Experiment 20000169 PARAMETER Experiment Name: At_100uM_ABA_P Parameter: Treatment Value: 100uM ABA vs. No Treatment
  misc_feature: MA Experiment ID: 20000180 Result: Up-regulated in Transcription
  misc_feature: MA Experiment 20000180 PARAMETER Experiment Name: At_Germinating_Seeds_P Parameter: Age (hr) Value: 24 vs. 0
  misc_feature: MA Experiment 20000180 PARAMETER Experiment Name: At_Germinating_Seeds_P Parameter: Tissue Value: Germinating Seeds
  misc_feature: MA Experiment ID: 20000184 Result: Up-regulated in Transcription
  misc_feature: MA Experiment 20000184 PARAMETER Experiment Name: At_Shoots__P Parameter: Age (day) Value: 7
  misc_feature: MA Experiment 20000184 PARAMETER Experiment Name: At_Shoots__P Parameter: Tissue Value: Shoots vs. Whole Plant
  misc_feature: MA Experiment ID: 20000185 Result: Up-regulated in Transcription
  misc_feature: MA Experiment 20000185 PARAMETER Experiment Name: At_Roots__P Parameter: Age (day) Value: 7 vs. 21
  misc_feature: MA Experiment 20000185 PARAMETER Experiment Name: At_Roots__P Parameter: Organism Value: A. thaliana
  misc_feature: MA Experiment 20000185 PARAMETER Experiment Name: At_Roots__P Parameter: Tissue Value: Roots vs. Whole Plant
  misc_feature: MA Experiment ID: 20000227 Result: Down-regulated in Transcription
  misc_feature: MA Experiment 20000227 PARAMETER Experiment Name: At_Root-Tips-vs-Tops_P Parameter: Tissue Value: Root Tips vs. Root Tops
  misc_feature: MA Experiment ID: 20000269 Result: Down-regulated in Transcription
  misc_feature: MA Experiment 20000269 PARAMETER Experiment Name: At_1mM_KNO3_L-vs-H_Roots_P Parameter: Age (day) Value: 7,10,12
  misc_feature: MA Experiment 20000269 PARAMETER Experiment Name: At_1mM_KNO3_L-vs-H_Roots_P Parameter: Organism Value: A. thaliana
  misc_feature: MA Experiment 20000269 PARAMETER Experiment Name: At_1mM_KNO3_L-vs-H_Roots_P Parameter: Plant Line Value: WS
  misc_feature: MA Experiment 20000269 PARAMETER Experiment Name: At_1mM_KNO3_L-vs-H_Roots_P Parameter: Timepoint (day) Value: 7,10,12
  misc_feature: MA Experiment 20000269 PARAMETER Experiment Name: At_1mM_KNO3_L-vs-H_Roots_P Parameter: Tissue Value: Roots
  misc_feature: MA Experiment 20000269 PARAMETER Experiment Name: At_1mM_KNO3_L-vs-H_Roots_P Parameter: Treatment Value: 1mM KNO3 vs. 50mM KNO3
  misc_feature: MA Experiment ID: 20000438 Result: Up-regulated in Transcription
  misc_feature: MA Experiment 20000438 PARAMETER Experiment Name: At_Shoots__P Parameter: Age (day) Value: 14
  misc_feature: MA Experiment 20000438 PARAMETER Experiment Name: At_Shoots__P Parameter: Tissue Value: Shoots vs. Whole Plant
  misc_feature: MA Experiment ID: 20000439 Result: Up-regulated in Transcription
  misc_feature: MA Experiment 20000439 PARAMETER Experiment Name: At_Roots__P Parameter: Age (day) Value: 14 vs. 21
  misc_feature: MA Experiment 20000439 PARAMETER Experiment Name: At_Roots__P Parameter: Organism Value: A. thaliana
  misc_feature: MA Experiment 20000439 PARAMETER Experiment Name: At_Roots__P Parameter: Tissue Value: Roots vs. Whole Plant
  misc_feature: MA Experiment ID: 20000453 Result: Up-regulated in Transcription
  misc_feature: MA Experiment 20000453 PARAMETER Experiment Name: At_100uM_ABA_P Parameter: Age (day) Value: 15
  misc_feature: MA Experiment 20000453 PARAMETER Experiment Name: At_100uM_ABA_P Parameter: Organism Value: A. thaliana
  misc_feature: MA Experiment 20000453 PARAMETER Experiment Name: At_100uM_ABA_P Parameter: Plant Line Value: WS
  misc_feature: MA Experiment 20000453 PARAMETER Experiment Name: At_100uM_ABA_P Parameter: Timepoint (hr) Value: 24
  misc_feature: MA Experiment 20000453 PARAMETER Experiment Name: At_100uM_ABA_P Parameter: Tissue Value: Aerial
  misc_feature: MA Experiment 20000453 PARAMETER Experiment Name: At_100uM_ABA_P Parameter: Treatment Value: 100uM ABA vs. No Treatment
  misc_feature: MA Experiment ID: 20000794 Result: Up-regulated in Transcription
  misc_feature: MA Experiment 20000794 PARAMETER Experiment Name: At_Petals_P Parameter: Age (day) Value: 23-25 days
  misc_feature: MA Experiment 20000794 PARAMETER Experiment Name: At_Petals_P Parameter: Plant Line Value: WS
  misc_feature: MA Experiment 20000794 PARAMETER Experiment Name: At_Petals_P Parameter: Tissue Value: Petals vs. Whole plant
  misc_feature: MA Experiment ID: 20001248 Result: Down-regulated in Transcription
  misc_feature: MA Experiment 20001248 PARAMETER Experiment Name: At_Far-red-induction_P Parameter: Age (day) Value: 7
  misc_feature: MA Experiment 20001248 PARAMETER Experiment Name: At_Far-red-induction_P Parameter: Light Value: Far-red vs. White
  misc_feature: MA Experiment 20001248 PARAMETER Experiment Name: At_Far-red-induction_P Parameter: Organism Value: A. thaliana
  misc_feature: MA Experiment 20001248 PARAMETER Experiment Name: At_Far-red-induction_P Parameter: Plant Line Value: Columbia
  misc_feature: MA Experiment 20001248 PARAMETER Experiment Name: At_Far-red-induction_P Parameter: Timepoint (hr) Value: 4
  misc_feature: MA Experiment 20001248 PARAMETER Experiment Name: At_Far-red-induction_P Parameter: Tissue Value: Whole Plant
  misc_feature: MA Experiment ID: 20001450 Result: Down-regulated in Transcription
  misc_feature: MA Experiment 20001450 PARAMETER Experiment Name: At_Far-red-induction_P Parameter: Age (day) Value: 7
  misc_feature: MA Experiment 20001450 PARAMETER Experiment Name: At_Far-red-induction_P Parameter: Light Value: Far-red vs. White
  misc_feature: MA Experiment 20001450 PARAMETER Experiment Name: At_Far-red-induction_P Parameter: Organism Value: A. thaliana
  misc_feature: MA Experiment 20001450 PARAMETER Experiment Name: At_Far-red-induction_P Parameter: Plant Line Value: Columbia
  misc_feature: MA Experiment 20001450 PARAMETER Experiment Name: At_Far-red-induction_P Parameter: Timepoint (hr) Value: 8
  misc_feature: MA Experiment 20001450 PARAMETER Experiment Name: At_Far-red-induction_P Parameter: Tissue Value: Whole Plant
  misc_feature: MA Experiment ID: 20001451 Result: Down-regulated in Transcription
  misc_feature: MA Experiment 20001451 PARAMETER Experiment Name: At_Far-red-induction_P Parameter: Age (day) Value: 7
  misc_feature: MA Experiment 20001451 PARAMETER Experiment Name: At_Far-red-induction_P Parameter: Light Value: Far-red vs. White
  misc_feature: MA Experiment 20001451 PARAMETER Experiment Name: At_Far-red-induction_P Parameter: Organism Value: A. thaliana
  misc_feature: MA Experiment 20001451 PARAMETER Experiment Name: At_Far-red-induction_P Parameter: Plant Line Value: Columbia
  misc_feature: MA Experiment 20001451 PARAMETER Experiment Name: At_Far-red-induction_P Parameter: Timepoint (hr) Value: 24
  misc_feature: MA Experiment 20001451 PARAMETER Experiment Name: At_Far-red-induction_P Parameter: Tissue Value: Whole Plant
  misc_feature: MA Experiment ID: 20001554 Result: Up-regulated in Transcription
  misc_feature: MA Experiment 20001554 PARAMETER Experiment Name: At_Drought_Soil_Dry_P Parameter: Age (day) Value: 21
  misc_feature: MA Experiment 20001554 PARAMETER Experiment Name: At_Drought_Soil_Dry_P Parameter: Organism Value: A. thaliana
  misc_feature: MA Experiment 20001554 PARAMETER Experiment Name: At_Drought_Soil_Dry_P Parameter: Plant Line Value: WS
  misc_feature: MA Experiment 20001554 PARAMETER Experiment Name: At_Drought_Soil_Dry_P Parameter: Post Timepoint (hr) Value: None
  misc_feature: MA Experiment 20001554 PARAMETER Experiment Name: At_Drought_Soil_Dry_P Parameter: Post-Treatment Value: None
  misc_feature: MA Experiment 20001554 PARAMETER Experiment Name: At_Drought_Soil_Dry_P Parameter: Timepoint (day) Value: 7
  misc_feature: MA Experiment 20001554 PARAMETER Experiment Name: At_Drought_Soil_Dry_P Parameter: Treatment Value: Drought vs. No Drought
  misc_feature: MA Experiment ID: 20001555 Result: Up-regulated in Transcription
  misc_feature: MA Experiment 20001555 PARAMETER Experiment Name: At_Drought_Soil_Dry_P Parameter: Age (day) Value: 24
  misc_feature: MA Experiment 20001555 PARAMETER Experiment Name: At_Drought_Soil_Dry_P Parameter: Organism Value: A. thaliana
  misc_feature: MA Experiment 20001555 PARAMETER Experiment Name: At_Drought_Soil_Dry_P Parameter: Plant Line Value: WS
  misc_feature: MA Experiment 20001555 PARAMETER Experiment Name: At_Drought_Soil_Dry_P Parameter: Post Timepoint (hr) Value: None
  misc_feature: MA Experiment 20001555 PARAMETER Experiment Name: At_Drought_Soil_Dry_P Parameter: Post-Treatment Value: None
  misc_feature: MA Experiment 20001555 PARAMETER Experiment Name: At_Drought_Soil_Dry_P Parameter: Timepoint (day) Value: 10
  misc_feature: MA Experiment 20001555 PARAMETER Experiment Name: At_Drought_Soil_Dry_P Parameter: Treatment Value: Drought vs. No Drought
  misc_feature: MA Experiment ID: 20001556 Result: Up-regulated in Transcription
  misc_feature: MA Experiment 20001556 PARAMETER Experiment Name: At_Drought_Soil_Dry_P Parameter: Age (day) Value: 26
  misc_feature: MA Experiment 20001556 PARAMETER Experiment Name: At_Drought_Soil_Dry_P Parameter: Organism Value: A. thaliana
  misc_feature: MA Experiment 20001556 PARAMETER Experiment Name: At_Drought_Soil_Dry_P Parameter: Plant Line Value: WS
  misc_feature: MA Experiment 20001556 PARAMETER Experiment Name: At_Drought_Soil_Dry_P Parameter: Post Timepoint (hr) Value: None
  misc_feature: MA Experiment 20001556 PARAMETER Experiment Name: At_Drought_Soil_Dry_P Parameter: Post-Treatment Value: None
  misc_feature: MA Experiment 20001556 PARAMETER Experiment Name: At_Drought_Soil_Dry_P Parameter: Timepoint (day) Value: 12
  misc_feature: MA Experiment 20001556 PARAMETER Experiment Name: At_Drought_Soil_Dry_P Parameter: Treatment Value: Drought vs. No Drought
  misc_feature: MA Experiment ID: 20001559 Result: Up-regulated in Transcription
  misc_feature: MA Experiment 20001559 PARAMETER Experiment Name: At_Drought_Soil_Dry_P Parameter: Age (day) Value: 28
  misc_feature: MA Experiment 20001559 PARAMETER Experiment Name: At_Drought_Soil_Dry_P Parameter: Organism Value: A. thaliana
  misc_feature: MA Experiment 20001559 PARAMETER Experiment Name: At_Drought_Soil_Dry_P Parameter: Plant Line Value: WS
  misc_feature: MA Experiment 20001559 PARAMETER Experiment Name: At_Drought_Soil_Dry_P Parameter: Post Timepoint (hr) Value: 29
  misc_feature: MA Experiment 20001559 PARAMETER Experiment Name: At_Drought_Soil_Dry_P Parameter: Post-Treatment Value: Re-Water vs. No Drought
  misc_feature: MA Experiment 20001559 PARAMETER Experiment Name: At_Drought_Soil_Dry_P Parameter: Timepoint (day) Value: 14
  misc_feature: MA Experiment 20001559 PARAMETER Experiment Name: At_Drought_Soil_Dry_P Parameter: Treatment Value: Drought vs. No Drought
  misc_feature: MA Experiment ID: 20001904 Result: Up-regulated in Transcription
  misc_feature: MA Experiment 20001904 PARAMETER Experiment Name: At_Drought_Reproduction_P Parameter: Age (day) Value: 37
  misc_feature: MA Experiment 20001904 PARAMETER Experiment Name: At_Drought_Reproduction_P Parameter: Organism Value: A. thaliana
  misc_feature: MA Experiment 20001904 PARAMETER Experiment Name: At_Drought_Reproduction_P Parameter: Plant Line Value: WS
  misc_feature: MA Experiment 20001904 PARAMETER Experiment Name: At_Drought_Reproduction_P Parameter: Timepoint (day) Value: 7
  misc_feature: MA Experiment 20001904 PARAMETER Experiment Name: At_Drought_Reproduction_P Parameter: Tissue Value: Rosettes
  misc_feature: MA Experiment 20001904 PARAMETER Experiment Name: At_Drought_Reproduction_P Parameter: Treatment Value: Drought vs. No Drought
  misc_feature: MA Experiment ID: 20001906 Result: Up-regulated in Transcription
  misc_feature: MA Experiment 20001906 PARAMETER Experiment Name: At_Drought_Reproduction_P Parameter: Age (day) Value: 35
  misc_feature: MA Experiment 20001906 PARAMETER Experiment Name: At_Drought_Reproduction_P Parameter: Organism Value: A. thaliana
  misc_feature: MA Experiment 20001906 PARAMETER Experiment Name: At_Drought_Reproduction_P Parameter: Plant Line Value: WS
  misc_feature: MA Experiment 20001906 PARAMETER Experiment Name: At_Drought_Reproduction_P Parameter: Timepoint (day) Value: 5
  misc_feature: MA Experiment 20001906 PARAMETER Experiment Name: At_Drought_Reproduction_P Parameter: Tissue Value: Siliques
  misc_feature: MA Experiment 20001906 PARAMETER Experiment Name: At_Drought_Reproduction_P Parameter: Treatment Value: Drought vs. No Drought
gaagaagaagaatccaaagacatgaaacttttctttattgttctcatctcttttctttccctcctccaagcatcaaaaggattcgatttcgacgaaaaagaattagaaaccgaagagaacgtatggaagctctatgagaggtggagaggccaccactctgtatccagagcctcccacgaggcaataaagcggttcaacgtttttagacacaatgtccttcatgtccacaggactaacaaaaagaacaagccttacaaactcaagatcaatagattcgccgacataacgcaccacgagtttagaagctcctacgctggctctaatgttaagcatcaccgaatgcttcgtggaccgaagcgcggatctggtggtttcatgtatgagaatgtgaccagagttccgagttctgttgattggcgagagaaaggagctgtcactgaggtcaagaatcaacaagattgtggaagttgctgggcgttttcgacggttgcagcagtggaagggataaacaagatcagaacaaacaaactggtttcattgtctgaacaagagcttgtggattgtgacactgaagagaatcaaggttgtgcaggaggtctcatggaacctgcgtttgaatttataaagaacaatggtggcatcaaaaccgaagagacttatccttacgattccagtgacgttcaattctgtagagctaatagtattggtggagaaactgtaaccatcgatggacacgaacacgtccctgagaatgatgaggaagaacttctcaaagctgttgctcaccagcctgtctctgtagctattgatgctgggagctcagatttccagctttactctgagggtgtgtttatcggagaatgcgggactcagttgaaccacggggtggtgattgttgggtatggagagaccaaaaatggaacaaaatattggatagtaaggaactcatggggacctgaatggggagaaggaggctatgttcggatagaaagaggaatatcggagaatgaaggacgttgcggtatagccatggaggcttcttatcccaccaagctctcttcgactccttctactcatgagtcagtagttcgtgatgatgttaaagacgagctctagagactttaagtcattgaaaactgaatttcgaaccattcttctagtgagcttacactgagtttattattttatggattgaggttcatgggtttcagtttacacatttatcgtgtattcatcttaaattgagacgatttttatctccttgtaatattggccagcatttgctttgcggaaaaatggcgttaaat

SEQ ID NO: 42786 - protein, 371 aa, Arabidopsis thaliana
  peptide (1)..(371): Ceres Seq. ID no. 13497236
  misc_feature (133)..(350): Pfam Name: Papain family cysteine protease Pfam Description: Papain family cysteine protease
  misc_feature (9)..(367): Homolog of NCBI NO: 7435774 NR Description: cysteine proteinase (EC 3.4.22.-) - kidney bean
  misc_feature (9)..(367): Homolog of NCBI NO: 1345573 NR Description: endopeptidase (EP-C1) [Phaseolus vulgaris]
  misc_feature (9)..(367): Homolog of NCBI NO: 1223922 NR Description: cysteinyl endopeptidase [Vigna radiata]
  misc_feature (9)..(371): Homolog of NCBI NO: 22331686 NR Description: cysteine proteinase, putative [Arabidopsis
  misc_feature (8)..(371): Homolog of NCBI NO: 18423124 NR Description: cysteine proteinase [Arabidopsis thaliana]
  misc_feature (9)..(367): Homolog of NCBI NO: 445927 NR Description: Cys endopeptidase
  misc_feature (9)..(367): Homolog of NCBI NO: 118158 NR Description: Vignain precursor (Bean endopeptidase) (Cysteine
  misc_feature (8)..(371): Homolog of NCBI NO: 7435817 NR Description: cysteine endopeptidase (EC 3.4.22.-) precursor -
  misc_feature (9)..(371): Homolog of NCBI NO: 7435811 NR Description: cysteine proteinase (EC 3.4.22.-) T29H11.140 -
  misc_feature (8)..(371): Homolog of NCBI NO: 18408616 NR Description: cysteine proteinase, putative [Arabidopsis
EEEESKDMKLFFIVLISFLSLLQASKGFDFDEKELETEENVWKLYERWRGHHSVSRASHEAIKRFNVFRHNVLHVHRTNKKNKPYKLKINRFADITHHEFRSSYAGSNVKHHRMLRGPKRGSGGFMYENVTRVPSSVDWREKGAVTEVKNQQDCGSCWAFSTVAAVEGINKIRTNKLVSLSEQELVDCDTEENQGCAGGLMEPAFEFIKNNGGIKTEETYPYDSSDVQFCRANSIGGETVTIDGHEHVPENDEEELLKAVAHQPVSVAIDAGSSDFQLYSEGVFIGECGTQLNHGVVIVGYGETKNGTKYWIVRNSWGPEWGEGGYVRIERGISENEGRCGIAMEASYPTKLSSTPSTHESVVRDDVKDEL

SEQ ID NO: 42787 - protein, 364 aa, Arabidopsis thaliana
  peptide (1)..(364): Ceres Seq. ID no. 13497237
  misc_feature (126)..(343): Pfam Name: Papain family cysteine protease Pfam Description: Papain family cysteine protease
  misc_feature (2)..(360): Homolog of NCBI NO: 7435774 NR Description: cysteine proteinase (EC 3.4.22.-) - kidney bean
  misc_feature (2)..(360): Homolog of NCBI NO: 1345573 NR Description: endopeptidase (EP-C1) [Phaseolus vulgaris]
  misc_feature (2)..(360): Homolog of NCBI NO: 1223922 NR Description: cysteinyl endopeptidase [Vigna radiata]
  misc_feature (2)..(364): Homolog of NCBI NO: 22331686 NR Description: cysteine proteinase, putative [Arabidopsis
  misc_feature (1)..(364): Homolog of NCBI NO: 18423124 NR Description: cysteine proteinase [Arabidopsis thaliana]
  misc_feature (2)..(360): Homolog of NCBI NO: 445927 NR Description: Cys endopeptidase
  misc_feature (2)..(360): Homolog of NCBI NO: 118158 NR Description: Vignain precursor (Bean endopeptidase) (Cysteine
  misc_feature (1)..(364): Homolog of NCBI NO: 7435817 NR Description: cysteine endopeptidase (EC 3.4.22.-) precursor -
  misc_feature (2)..(364): Homolog of NCBI NO: 7435811 NR Description: cysteine proteinase (EC 3.4.22.-) T29H11.140 -
  misc_feature (1)..(364): Homolog of NCBI NO: 18408616 NR Description: cysteine proteinase, putative [Arabidopsis
MKLFFIVLISFLSLLQASKGFDFDEKELETEENVWKLYERWRGHHSVSRASHEAIKRFNVFRHNVLHVHRTNKKNKPYKLKINRFADITHHEFRSSYAGSNVKHHRMLRGPKRGSGGFMYENVTRVPSSVDWREKGAVTEVKNQQDCGSCWAFSTVAAVEGINKIRTNKLVSLSEQELVDCDTEENQGCAGGLMEPAFEFIKNNGGIKTEETYPYDSSDVQFCRANSIGGETVTIDGHEHVPENDEEELLKAVAHQPVSVAIDAGSSDFQLYSEGVFIGECGTQLNHGVVIVGYGETKNGTKYWIVRNSWGPEWGEGGYVRIERGISENEGRCGIAMEASYPTKLSSTPSTHESVVRDDVKDEL

SEQ ID NO: 42788 - protein, 258 aa, Arabidopsis thaliana
  peptide (1)..(258): Ceres Seq. ID no. 13497238
  misc_feature (20)..(237): Pfam Name: Papain family cysteine protease Pfam Description: Papain family cysteine protease
  misc_feature (1)..(254): Homolog of NCBI NO: 7435774 NR Description: cysteine proteinase (EC 3.4.22.-) - kidney bean
  misc_feature (1)..(254): Homolog of NCBI NO: 1345573 NR Description: endopeptidase (EP-C1) [Phaseolus vulgaris]
  misc_feature (1)..(254): Homolog of NCBI NO: 1223922 NR Description: cysteinyl endopeptidase [Vigna radiata]
  misc_feature (1)..(258): Homolog of NCBI NO: 22331686 NR Description: cysteine proteinase, putative [Arabidopsis
  misc_feature (1)..(258): Homolog of NCBI NO: 18423124 NR Description: cysteine proteinase [Arabidopsis thaliana]
  misc_feature (1)..(254): Homolog of NCBI NO: 445927 NR Description: Cys endopeptidase
  misc_feature (1)..(254): Homolog of NCBI NO: 118158 NR Description: Vignain precursor (Bean endopeptidase) (Cysteine
  misc_feature (1)..(258): Homolog of NCBI NO: 7435817 NR Description: cysteine endopeptidase (EC 3.4.22.-) precursor -
  misc_feature (1)..(258): Homolog of NCBI NO: 7435811 NR Description: cysteine proteinase (EC 3.4.22.-) T29H11.140 -
  misc_feature (1)..(258): Homolog of NCBI NO: 18408616 NR Description: cysteine proteinase, putative [Arabidopsis
MLRGPKRGSGGFMYENVTRVPSSVDWREKGAVTEVKNQQDCGSCWAFSTVAAVEGINKIRTNKLVSLSEQELVDCDTEENQGCAGGLMEPAFEFIKNNGGIKTEETYPYDSSDVQFCRANSIGGETVTIDGHEHVPENDEEELLKAVAHQPVSVAIDAGSSDFQLYSEGVFIGECGTQLNHGVVIVGYGETKNGTKYWIVRNSWGPEWGEGGYVRIERGISENEGRCGIAMEASYPTKLSSTPSTHESVVRDDVKDEL

SEQ ID NO: 42789 - DNA, 1276 bp, Arabidopsis thaliana
  misc_feature (1)..(1276): Ceres Seq. ID no. 12603046
  misc_feature: MA Experiment ID: 20000307 Result: Up-regulated in Transcription
  misc_feature: MA Experiment 20000307 PARAMETER Experiment Name: At_Germinating_Seeds_Sub_P Parameter: Age (hr) Value: 24 vs. 0
  misc_feature: MA Experiment 20000307 PARAMETER Experiment Name: At_Germinating_Seeds_Sub_P Parameter: Organism Value: A. thaliana
  misc_feature: MA Experiment 20000307 PARAMETER Experiment Name: At_Germinating_Seeds_Sub_P Parameter: Plant Line Value: WS
  misc_feature: MA Experiment 20000307 PARAMETER Experiment Name: At_Germinating_Seeds_Sub_P Parameter: Tissue Value: Germinating Seeds
  misc_feature: MA Experiment ID: 20000314 Result: Down-regulated in Transcription
  misc_feature: MA Experiment 20000314 PARAMETER Experiment Name: At_14day_Shoots-Roots_Sub_P Parameter: Age (day) Value: 14
  misc_feature: MA Experiment 20000314 PARAMETER Experiment Name: At_14day_Shoots-Roots_Sub_P Parameter: Organism Value: A. thaliana
  misc_feature: MA Experiment 20000314 PARAMETER Experiment Name: At_14day_Shoots-Roots_Sub_P Parameter: Plant Line Value: WS
  misc_feature: MA Experiment 20000314 PARAMETER Experiment Name: At_14day_Shoots-Roots_Sub_P Parameter: Tissue Value: Roots vs. Whole Plant
  misc_feature: MA Experiment ID: 20000315 Result: Down-regulated in Transcription
  misc_feature: MA Experiment 20000315 PARAMETER Experiment Name: At_14day_Shoots-Roots_Sub_P Parameter: Age (day) Value: 14
  misc_feature: MA Experiment 20000315 PARAMETER Experiment Name: At_14day_Shoots-Roots_Sub_P Parameter: Organism Value: A. thaliana
  misc_feature: MA Experiment 20000315 PARAMETER Experiment Name: At_14day_Shoots-Roots_Sub_P Parameter: Plant Line Value: WS
  misc_feature: MA Experiment 20000315 PARAMETER Experiment Name: At_14day_Shoots-Roots_Sub_P Parameter: Tissue Value: Shoots vs. Whole Plant
  misc_feature: MA Experiment ID: 20000328 Result: Down-regulated in Transcription
  misc_feature: MA Experiment 20000328 PARAMETER Experiment Name: At_42deg_Heat_Sub_P Parameter: Age (day) Value: 14
  misc_feature: MA Experiment 20000328 PARAMETER Experiment Name: At_42deg_Heat_Sub_P Parameter: Organism Value: A. thaliana
  misc_feature: MA Experiment 20000328 PARAMETER Experiment Name: At_42deg_Heat_Sub_P Parameter: Plant Line Value: WS
  misc_feature: MA Experiment 20000328 PARAMETER Experiment Name: At_42deg_Heat_Sub_P Parameter: Temperature (deg C) Value: 42 vs. 22
  misc_feature: MA Experiment 20000328 PARAMETER Experiment Name: At_42deg_Heat_Sub_P Parameter: Timepoint (hr) Value: 6
  misc_feature: MA Experiment 20000328 PARAMETER Experiment Name: At_42deg_Heat_Sub_P Parameter: Tissue Value: Aerial
  misc_feature: MA Experiment ID: 20000329 Result: Up-regulated in Transcription
  misc_feature: MA Experiment 20000329 PARAMETER Experiment Name: At_4deg_Cold_Sub_P Parameter: Age (day) Value: 14
  misc_feature: MA Experiment 20000329 PARAMETER Experiment Name: At_4deg_Cold_Sub_P Parameter: Organism Value: A. thaliana
  misc_feature: MA Experiment 20000329 PARAMETER Experiment Name: At_4deg_Cold_Sub_P Parameter: Plant Line Value: WS
  misc_feature: MA Experiment 20000329 PARAMETER Experiment Name: At_4deg_Cold_Sub_P Parameter: Temperature (deg C) Value: 4 vs. 22
  misc_feature: MA Experiment 20000329 PARAMETER Experiment Name: At_4deg_Cold_Sub_P Parameter: Timepoint (hr) Value: 6
  misc_feature: MA Experiment 20000329 PARAMETER Experiment Name: At_4deg_Cold_Sub_P Parameter: Tissue Value: Aerial
  misc_feature: MA Experiment ID: 20000348 Result: Down-regulated in Transcription
  misc_feature: MA Experiment 20000348 PARAMETER Experiment Name: At_100uM_ABA_Sub_P Parameter: Age (day) Value: 14
  misc_feature: MA Experiment 20000348 PARAMETER Experiment Name: At_100uM_ABA_Sub_P Parameter: Organism Value: A. thaliana
  misc_feature: MA Experiment 20000348 PARAMETER Experiment Name: At_100uM_ABA_Sub_P Parameter: Plant Line Value: WS
  misc_feature: MA Experiment 20000348 PARAMETER Experiment Name: At_100uM_ABA_Sub_P Parameter: Timepoint (hr) Value: 1
  misc_feature: MA Experiment 20000348 PARAMETER Experiment Name: At_100uM_ABA_Sub_P Parameter: Tissue Value: Aerial
  misc_feature: MA Experiment 20000348 PARAMETER Experiment Name: At_100uM_ABA_Sub_P Parameter: Treatment Value: 100uM ABA vs. No Treatment
  misc_feature: MA Experiment ID: 20000349 Result: Down-regulated in Transcription
  misc_feature: MA Experiment 20000349 PARAMETER Experiment Name: At_100uM_ABA_Sub_P Parameter: Age (day) Value: 14
  misc_feature: MA Experiment 20000349 PARAMETER Experiment Name: At_100uM_ABA_Sub_P Parameter: Organism Value: A. thaliana
  misc_feature: MA Experiment 20000349 PARAMETER Experiment Name: At_100uM_ABA_Sub_P Parameter: Plant Line Value: WS
  misc_feature: MA Experiment 20000349 PARAMETER Experiment Name: At_100uM_ABA_Sub_P Parameter: Timepoint (hr) Value: 6
  misc_feature: MA Experiment 20000349 PARAMETER Experiment Name: At_100uM_ABA_Sub_P Parameter: Tissue Value: Aerial
  misc_feature: MA Experiment 20000349 PARAMETER Experiment Name: At_100uM_ABA_Sub_P Parameter: Treatment Value: 100uM ABA vs. No Treatment
  misc_feature: MA Experiment ID: 20000352 Result: Down-regulated in Transcription
  misc_feature: MA Experiment 20000352 PARAMETER Experiment Name: At_Drought_Sub_P Parameter: Age (day) Value: 7
  misc_feature: MA Experiment 20000352 PARAMETER Experiment Name: At_Drought_Sub_P Parameter: Organism Value: A. thaliana
  misc_feature: MA Experiment 20000352 PARAMETER Experiment Name: At_Drought_Sub_P Parameter: Plant Line Value: WS
  misc_feature: MA Experiment 20000352 PARAMETER Experiment Name: At_Drought_Sub_P Parameter: Timepoint (hr) Value: 6
  misc_feature: MA Experiment 20000352 PARAMETER Experiment Name: At_Drought_Sub_P Parameter: Tissue Value: Whole Plant
  misc_feature: MA Experiment 20000352 PARAMETER Experiment Name: At_Drought_Sub_P Parameter: Treatment Value: Drought vs. No Drought
  misc_feature: MA Experiment ID: 20000355 Result: Down-regulated in Transcription
  misc_feature: MA Experiment 20000355 PARAMETER Experiment Name: At_Siliques_Sub_P Parameter: Age (day) Value: 21
  misc_feature: MA Experiment 20000355 PARAMETER Experiment Name: At_Siliques_Sub_P Parameter: Organism Value: A. thaliana
  misc_feature: MA Experiment 20000355 PARAMETER Experiment Name: At_Siliques_Sub_P Parameter: Plant Line Value: WS
  misc_feature: MA Experiment 20000355 PARAMETER Experiment Name: At_Siliques_Sub_P Parameter: Tissue Value: Less Than 5mm Siliques vs. Whole Plant
  misc_feature: MA Experiment ID: 20000440 Result: Down-regulated in Transcription
  misc_feature: MA Experiment 20000440 PARAMETER Experiment Name: At_Closed-Flower__Sub_P Parameter: Tissue Value: Closed Flower vs. Whole Plant
aatttaagataaagaagagaagaatcaagcaaaagttgtgtttctcataaagatctcaaagatattcctactacacatgggttctcttgacttgccttacgcttcatcgttcaagggaggaagtgaaacctttctccagaatgtatttgaaagtatactgaaaacgtatttgaggaagaacccgatggcgaagacgatatgggaactagttaagtcggtggacaacgaaaagatctcttacgaccacttctttttcaggacatttaaggtcgatggttatggaattgattccctggcgagttttttcatggattatggatataaagttggaggcagacttgattttccaaagaagaaagtacaagttctctggctttctcctccggatgttcacttccccgataatggttacggtattggcaatggccctttgccaagacttgttatagctgagcttcttgtggaggaactaagccctgagtcacaggagataataaggaagtatttgaaaccggaaggtggtaagcaagctgttctttcaagtactttggggtctttaatttgggagaagccaacatcaaccgatttcaatcaacttgccaaagaaagcgaatttgccgcatggacgcttgtctacggctacacaatgaaccatcttgctttcgcggttcatcgtcttaaacacagtttcagcgacatcaaatgcgtcaaagagtattttgaagaaaagggtttcgaactcaacaaggatggaggagttctcaaagtgagtcaagacggtctactgttacaagtgtcggctatgtcggagaaacttgtggttgaatttgcagacggagtaactcaaatcgtcccggcttcatacattgagttcgttgaacgtctagttcttccacagttcaaagatatgccgtgtgatgagatcaaagagtttcatagacgcgagggcttggagcaagctagcgcctaccacataatggaaagcacccgtttcacagcgtaaatatagaaccagcttgttttgttccgctcaatatgtcaagtatgtgtacgtactattaaaatgttttgtatcttatttggacaatttgtgtgtgagatatttctgttcttgtgttgtgaagtgacggtataacttaatattacccgttaccgacgaataatggaaaacaaagtgtcatggtggggtgtggtatttgtggtgtttttgcatgtaatatcttttgatagtaacgtgacacttgattttggtgactcgtaacacctcttggggttg

SEQ ID NO: 42790 - protein, 308 aa, Arabidopsis thaliana
  peptide (1)..(308): Ceres Seq. ID no. 12603047
  misc_feature (18)..(269): Homolog of NCBI NO: 24372211 NR Description: conserved hypothetical protein [Shewanella
  misc_feature (23)..(304): Homolog of NCBI NO: 27364716 NR Description: Conserved hypothetical protein [Vibrio vulnificus
  misc_feature (23)..(269): Homolog of NCBI NO: 28899568 NR Description: conserved hypothetical protein
  misc_feature (23)..(289): Homolog of NCBI NO: 15642610 NR Description: conserved hypothetical protein [Vibrio cholerae]
  misc_feature (90)..(307): Homolog of NCBI NO: 22973852 NR Description: hypothetical protein [Chloroflexus aurantiacus]
  misc_feature (9)..(304): Homolog of NCBI NO: 37535166 NR Description: unknown protein [Oryza sativa (japonica
  misc_feature (1)..(304): Homolog of NCBI NO: 18390717 NR Description: expressed protein
  misc_feature (1)..(307): Homolog of NCBI NO: 18396149 NR Description: expressed protein
  misc_feature (1)..(308): Homolog of NCBI NO: 15223410 NR Description: unknown protein; protein id: At1g27020.1
MGSLDLPYASSFKGGSETFLQNVFESILKTYLRKNPMAKTIWELVKSVDNEKISYDHFFFRTFKVDGYGIDSLASFFMDYGYKVGGRLDFPKKKVQVLWLSPPDVHFPDNGYGIGNGPLPRLVIAELLVEELSPESQEIIRKYLKPEGGKQAVLSSTLGSLIWEKPTSTDFNQLAKESEFAAWTLVYGYTMNHLAFAVHRLKHSFSDIKCVKEYFEEKGFELNKDGGVLKVSQDGLLLQVSAMSEKLVVEFADGVTQIVPASYIEFVERLVLPQFKDMPCDEIKEFHRREGLEQASAYHIMESTRFTA

SEQ ID NO: 42791 - protein, 272 aa, Arabidopsis thaliana
  peptide (1)..(272): Ceres Seq. ID no. 12603048
  misc_feature (1)..(233): Homolog of NCBI NO: 24372211 NR Description: conserved hypothetical protein [Shewanella
  misc_feature (1)..(268): Homolog of NCBI NO: 27364716 NR Description: Conserved hypothetical protein [Vibrio vulnificus
  misc_feature (1)..(233): Homolog of NCBI NO: 28899568 NR Description: conserved hypothetical protein
  misc_feature (1)..(253): Homolog of NCBI NO: 15642610 NR Description: conserved hypothetical protein [Vibrio cholerae]
  misc_feature (54)..(271): Homolog of NCBI NO: 22973852 NR Description: hypothetical protein [Chloroflexus aurantiacus]
  misc_feature (1)..(268): Homolog of NCBI NO: 37535166 NR Description: unknown protein [Oryza sativa (japonica
  misc_feature (1)..(268): Homolog of NCBI NO: 18390717 NR Description: expressed protein
  misc_feature (1)..(271): Homolog of NCBI NO: 18396149 NR Description: expressed protein
  misc_feature (1)..(272): Homolog of NCBI NO: 15223410 NR Description: unknown protein; protein id: At1g27020.1
MAKTIWELVKSVDNEKISYDHFFFRTFKVDGYGIDSLASFFMDYGYKVGGRLDFPKKKVQVLWLSPPDVHFPDNGYGIGNGPLPRLVIAELLVEELSPESQEIIRKYLKPEGGKQAVLSSTLGSLIWEKPTSTDFNQLAKESEFAAWTLVYGYTMNHLAFAVHRLKHSFSDIKCVKEYFEEKGFELNKDGGVLKVSQDGLLLQVSAMSEKLVVEFADGVTQIVPASYIEFVERLVLPQFKDMPCDEIKEFHRREGLEQASAYHIMESTRFTA

SEQ ID NO: 42792 - protein, 231 aa, Arabidopsis thaliana
  peptide (1)..(231): Ceres Seq. ID no. 12603049
  misc_feature (1)..(192): Homolog of NCBI NO: 24372211 NR Description: conserved hypothetical protein [Shewanella
  misc_feature (1)..(227): Homolog of NCBI NO: 27364716 NR Description: Conserved hypothetical protein [Vibrio vulnificus
  misc_feature (1)..(192): Homolog of NCBI NO: 28899568 NR Description: conserved hypothetical protein
  misc_feature (1)..(212): Homolog of NCBI NO: 15642610 NR Description: conserved hypothetical protein [Vibrio cholerae]
  misc_feature (13)..(230): Homolog of NCBI NO: 22973852 NR Description: hypothetical protein [Chloroflexus aurantiacus]
  misc_feature (1)..(227): Homolog of NCBI NO: 37535166 NR Description: unknown protein [Oryza sativa (japonica
  misc_feature (1)..(227): Homolog of NCBI NO: 18390717 NR Description: expressed protein
  misc_feature (1)..(230): Homolog of NCBI NO: 18396149 NR Description: expressed protein
  misc_feature (1)..(231): Homolog of NCBI NO: 15223410 NR Description: unknown protein; protein id: At1g27020.1
MDYGYKVGGRLDFPKKKVQVLWLSPPDVHFPDNGYGIGNGPLPRLVIAELLVEELSPESQEIIRKYLKPEGGKQAVLSSTLGSLIWEKPTSTDFNQLAKESEFAAWTLVYGYTMNHLAFAVHRLKHSFSDIKCVKEYFEEKGFELNKDGGVLKVSQDGLLLQVSAMSEKLVVEFADGVTQIVPASYIEFVERLVLPQFKDMPCDEIKEFHRREGLEQASAYHIMESTRFTA

SEQ ID NO: 42793 - DNA, 1300 bp, Arabidopsis thaliana
  misc_feature (1)..(1300): Ceres Seq. ID no. 12604792
  misc_feature: MA Experiment ID: 20000169 Result: Down-regulated in Transcription
  misc_feature: MA Experiment 20000169 PARAMETER Experiment Name: At_100uM_ABA_P Parameter: Age (day) Value: 14
  misc_feature: MA Experiment 20000169 PARAMETER Experiment Name: At_100uM_ABA_P Parameter: Organism Value: A. thaliana
  misc_feature: MA Experiment 20000169 PARAMETER Experiment Name: At_100uM_ABA_P Parameter: Plant Line Value: WS
  misc_feature: MA Experiment 20000169 PARAMETER Experiment Name: At_100uM_ABA_P Parameter: Timepoint (hr) Value: 6
  misc_feature: MA Experiment 20000169 PARAMETER Experiment Name: At_100uM_ABA_P Parameter: Tissue Value: Aerial
  misc_feature: MA Experiment 20000169 PARAMETER Experiment Name: At_100uM_ABA_P Parameter: Treatment Value: 100uM ABA vs. No Treatment
  misc_feature: MA Experiment ID: 20000182 Result: Up-regulated in Transcription
  misc_feature: MA Experiment 20000182 PARAMETER Experiment Name: At_2mM_SA_P Parameter: Age (day) Value: 14
  misc_feature: MA Experiment 20000182 PARAMETER Experiment Name: At_2mM_SA_P Parameter: Organism Value: A. thaliana
  misc_feature: MA Experiment 20000182 PARAMETER Experiment Name: At_2mM_SA_P Parameter: Plant Line Value: WS
  misc_feature: MA Experiment 20000182 PARAMETER Experiment Name: At_2mM_SA_P Parameter: Timepoint (hr) Value: 6
  misc_feature: MA Experiment 20000182 PARAMETER Experiment Name: At_2mM_SA_P Parameter: Tissue Value: Aerial
  misc_feature: MA Experiment 20000182 PARAMETER Experiment Name: At_2mM_SA_P Parameter: Treatment Value: 2mM SA vs. No Treatment
  misc_feature: MA Experiment ID: 20000211 Result: Up-regulated in Transcription
  misc_feature: MA Experiment 20000211 PARAMETER Experiment Name: At_0.001percent_MeJA__P Parameter: Age (day) Value: 14
  misc_feature: MA Experiment 20000211 PARAMETER Experiment Name: At_0.001percent_MeJA__P Parameter: Organism Value: A. thaliana
  misc_feature: MA Experiment 20000211 PARAMETER Experiment Name: At_0.001percent_MeJA__P Parameter: Plant Line Value: WS
  misc_feature: MA Experiment 20000211 PARAMETER Experiment Name: At_0.001percent_MeJA__P Parameter: Timepoint (hr) Value: 1
  misc_feature: MA Experiment 20000211 PARAMETER Experiment Name: At_0.001percent_MeJA__P Parameter: Tissue Value: Aerial
  misc_feature: MA Experiment 20000211 PARAMETER Experiment Name: At_0.001percent_MeJA__P Parameter: Treatment Value: 0.001percent MeJA vs. No Treatment
  misc_feature: MA Experiment ID: 20000438 Result: Down-regulated in Transcription
  misc_feature: MA Experiment 20000438 PARAMETER Experiment Name: At_Shoots__P Parameter: Age (day) Value: 14
  misc_feature: MA Experiment 20000438 PARAMETER Experiment Name: At_Shoots__P Parameter: Tissue Value: Shoots vs. Whole Plant
  misc_feature: MA Experiment ID: 20000527 Result: Up-regulated in Transcription
  misc_feature: MA Experiment 20000527 PARAMETER Experiment Name: At_10percent_PEG_P Parameter: Age (day) Value: 20
  misc_feature: MA Experiment 20000527 PARAMETER Experiment Name: At_10percent_PEG_P Parameter: Organism Value: A. thaliana
  misc_feature: MA Experiment 20000527 PARAMETER Experiment Name: At_10percent_PEG_P Parameter: Plant Line Value: WS
  misc_feature: MA Experiment 20000527 PARAMETER Experiment Name: At_10percent_PEG_P Parameter: Timepoint (day) Value: 20
  misc_feature: MA Experiment 20000527 PARAMETER Experiment Name: At_10percent_PEG_P Parameter: Tissue Value: Whole Plant
  misc_feature: MA Experiment 20000527 PARAMETER Experiment Name: At_10percent_PEG_P Parameter: Treatment Value: 10percent PEG vs. No Treatment
  misc_feature: MA Experiment ID: 20000573 Result: Up-regulated in Transcription
  misc_feature: MA Experiment 20000573 PARAMETER Experiment Name: At_100uM_ABA_Mutants__P Parameter: Organism Value: A. thaliana
  misc_feature: MA Experiment 20000573 PARAMETER Experiment Name: At_100uM_ABA_Mutants__P Parameter: Plant Line Value: CS22 vs. Ler wt
  misc_feature: MA Experiment 20000573 PARAMETER Experiment Name: At_100uM_ABA_Mutants__P Parameter: Timepoint (hr) Value: N/A
  misc_feature: MA Experiment 20000573 PARAMETER Experiment Name: At_100uM_ABA_Mutants__P Parameter: Tissue Value: Whole Plant
  misc_feature: MA Experiment 20000573 PARAMETER Experiment Name: At_100uM_ABA_Mutants__P Parameter: Treatment Value: None
  misc_feature: MA Experiment ID: 20000574 Result: Up-regulated in Transcription
  misc_feature: MA Experiment 20000574 PARAMETER Experiment Name: At_100uM_ABA_Mutants__P Parameter: Organism Value: A. thaliana
  misc_feature: MA Experiment 20000574 PARAMETER Experiment Name: At_100uM_ABA_Mutants__P Parameter: Plant Line Value: CS23 vs. Ler wt
  misc_feature: MA Experiment 20000574 PARAMETER Experiment Name: At_100uM_ABA_Mutants__P Parameter: Timepoint (hr) Value: N/A
  misc_feature: MA Experiment 20000574 PARAMETER Experiment Name: At_100uM_ABA_Mutants__P Parameter: Tissue Value: Whole Plant
  misc_feature: MA Experiment 20000574 PARAMETER Experiment Name: At_100uM_ABA_Mutants__P Parameter: Treatment Value: None
  misc_feature: MA Experiment ID: 20000575 Result: Down-regulated in Transcription
  misc_feature: MA Experiment 20000575 PARAMETER Experiment Name: At_100uM_ABA_Mutants__P Parameter: Organism Value: A. thaliana
  misc_feature: MA Experiment 20000575 PARAMETER Experiment Name: At_100uM_ABA_Mutants__P Parameter: Plant Line Value: CS22
  misc_feature: MA Experiment 20000575 PARAMETER Experiment Name: At_100uM_ABA_Mutants__P Parameter: Timepoint (hr) Value: 6
  misc_feature: MA Experiment 20000575 PARAMETER Experiment Name: At_100uM_ABA_Mutants__P Parameter: Tissue Value: Whole Plant
  misc_feature: MA Experiment 20000575 PARAMETER Experiment Name: At_100uM_ABA_Mutants__P Parameter: Treatment Value: 1uM ABA vs. No Treatment
  misc_feature: MA Experiment ID: 20000576 Result: Down-regulated in Transcription
  misc_feature: MA Experiment 20000576 PARAMETER Experiment Name: At_100uM_ABA_Mutants__P Parameter: Organism Value: A. thaliana
  misc_feature: MA Experiment 20000576 PARAMETER Experiment Name: At_100uM_ABA_Mutants__P Parameter: Plant Line Value: CS23
  misc_feature: MA Experiment 20000576 PARAMETER Experiment Name: At_100uM_ABA_Mutants__P Parameter: Timepoint (hr) Value: 6
  misc_feature: MA Experiment 20000576 PARAMETER Experiment Name: At_100uM_ABA_Mutants__P Parameter: Tissue Value: Whole Plant
  misc_feature: MA Experiment 20000576 PARAMETER Experiment Name: At_100uM_ABA_Mutants__P Parameter: Treatment Value: 1uM ABA vs. No Treatment
  misc_feature: MA Experiment ID: 20000709 Result: Up-regulated in Transcription
  misc_feature: MA Experiment 20000709 PARAMETER Experiment Name: At_15mM_NH4NO3_L-to-H_P Parameter: Age (hr) Value: 14
  misc_feature: MA Experiment 20000709 PARAMETER Experiment Name: At_15mM_NH4NO3_L-to-H_P Parameter: Organism Value: A. thaliana
  misc_feature: MA Experiment 20000709 PARAMETER Experiment Name: At_15mM_NH4NO3_L-to-H_P Parameter: Plant Line Value: WS
  misc_feature: MA Experiment 20000709 PARAMETER Experiment Name: At_15mM_NH4NO3_L-to-H_P Parameter: Timepoint (hr) Value: 4
  misc_feature: MA Experiment 20000709 PARAMETER Experiment Name: At_15mM_NH4NO3_L-to-H_P Parameter: Tissue Value: Aerial
  misc_feature: MA Experiment 20000709 PARAMETER Experiment Name: At_15mM_NH4NO3_L-to-H_P Parameter: Treatment Value: 15mM NH4NO3 vs. 30mM Mannitol
  misc_feature: MA Experiment ID: 20001248 Result: Up-regulated in Transcription
  misc_feature: MA Experiment 20001248 PARAMETER Experiment Name: At_Far-red-induction_P Parameter: Age (day) Value: 7
  misc_feature: MA Experiment 20001248 PARAMETER Experiment Name: At_Far-red-induction_P Parameter: Light Value: Far-red vs. White
  misc_feature: MA Experiment 20001248 PARAMETER Experiment Name: At_Far-red-induction_P Parameter: Organism Value: A. thaliana
  misc_feature: MA Experiment 20001248 PARAMETER Experiment Name: At_Far-red-induction_P Parameter: Plant Line Value: Columbia
  misc_feature: MA Experiment 20001248 PARAMETER Experiment Name: At_Far-red-induction_P Parameter: Timepoint (hr) Value: 4
  misc_feature: MA Experiment 20001248 PARAMETER Experiment Name: At_Far-red-induction_P Parameter: Tissue Value: Whole Plant
  misc_feature: MA Experiment ID: 20001450 Result: Down-regulated in Transcription
  misc_feature: MA Experiment 20001450 PARAMETER Experiment Name: At_Far-red-induction_P Parameter: Age (day) Value: 7
  misc_feature: MA Experiment 20001450 PARAMETER Experiment Name: At_Far-red-induction_P Parameter: Light Value: Far-red vs. White
  misc_feature: MA Experiment 20001450 PARAMETER Experiment Name: At_Far-red-induction_P Parameter: Organism Value: A. thaliana
  misc_feature: MA Experiment 20001450 PARAMETER Experiment Name: At_Far-red-induction_P Parameter: Plant Line Value: Columbia
  misc_feature: MA Experiment 20001450 PARAMETER Experiment Name: At_Far-red-induction_P Parameter: Timepoint (hr) Value: 8
  misc_feature: MA Experiment 20001450 PARAMETER Experiment Name: At_Far-red-induction_P Parameter: Tissue Value: Whole Plant
  misc_feature: MA Experiment ID: 20001451 Result: Down-regulated in Transcription
  misc_feature: MA Experiment 20001451 PARAMETER Experiment Name: At_Far-red-induction_P Parameter: Age (day) Value: 7
  misc_feature: MA Experiment 20001451 PARAMETER Experiment Name: At_Far-red-induction_P Parameter: Light Value: Far-red vs. White
  misc_feature: MA Experiment 20001451 PARAMETER Experiment Name: At_Far-red-induction_P Parameter: Organism Value: A. thaliana
  misc_feature: MA Experiment 20001451 PARAMETER Experiment Name: At_Far-red-induction_P Parameter: Plant Line Value: Columbia
  misc_feature: MA Experiment 20001451 PARAMETER Experiment Name: At_Far-red-induction_P Parameter: Timepoint (hr) Value: 24
  misc_feature: MA Experiment 20001451 PARAMETER Experiment Name: At_Far-red-induction_P Parameter: Tissue Value: Whole Plant
  misc_feature: MA Experiment ID: 20001770 Result: Up-regulated in Transcription
  misc_feature: MA Experiment 20001770 PARAMETER Experiment Name: At_Far-red-enriched-adult_P Parameter: Age (day) Value: 28
  misc_feature: MA Experiment 20001770 PARAMETER Experiment Name: At_Far-red-enriched-adult_P Parameter: Light Value: Far-red enriched vs. White
  misc_feature: MA Experiment 20001770 PARAMETER Experiment Name: At_Far-red-enriched-adult_P Parameter: Organism Value: A. thaliana
  misc_feature: MA Experiment 20001770 PARAMETER Experiment Name: At_Far-red-enriched-adult_P Parameter: Plant Line Value: Columbia
  misc_feature: MA Experiment 20001770 PARAMETER Experiment Name: At_Far-red-enriched-adult_P Parameter: Timepoint (hr) Value: 8
  misc_feature: MA Experiment 20001770 PARAMETER Experiment Name: At_Far-red-enriched-adult_P Parameter: Tissue Value: Aerial
  misc_feature: MA Experiment ID: 20001904 Result: Down-regulated in Transcription
  misc_feature: MA Experiment 20001904 PARAMETER Experiment Name: At_Drought_Reproduction_P Parameter: Age (day) Value: 37
  misc_feature: MA Experiment 20001904 PARAMETER Experiment Name: At_Drought_Reproduction_P Parameter: Organism Value: A. thaliana
  misc_feature: MA Experiment 20001904 PARAMETER Experiment Name: At_Drought_Reproduction_P Parameter: Plant Line Value: WS
  misc_feature: MA Experiment 20001904 PARAMETER Experiment Name: At_Drought_Reproduction_P Parameter: Timepoint (day) Value: 7
  misc_feature: MA Experiment 20001904 PARAMETER Experiment Name: At_Drought_Reproduction_P Parameter: Tissue Value: Rosettes
  misc_feature: MA Experiment 20001904 PARAMETER Experiment Name: At_Drought_Reproduction_P Parameter: Treatment Value: Drought vs. No Drought
gggctgctccgtttggcctttagaaatcctaagggacaatttttaatgtgtatttatacaaatgagataaccatttatggtaatatatcatcgcaaagtagtctttacgtacgtaagagcaaagcgtttctatcatttccttaatattgaaatggtgacagacttcaaatccctactaccagttatcgacatcagtcctttactggccaaatgtgatgatttcgacatggctgaggatgcgggggttgtggaagtagtcggaaaactggacagggcatgtcgggacgtcggattcttctacgtgattggtcatggaatatcggatgatcttataaataaggtgaaagagatgacgcatcagttcttcgagcttccttacgaggagaaacttaagatcaagattactccaactgctggatacagaggataccaaagaattggagtaaattttacgagtgggaaacaagatatgcacgaagccattgattgttacagagagttcaagcaagggaaacatggggacatcggaaaggtcttggaagggccaaaccagtggccaggaaatcctcaagagtacaaagatttaatggaggagtatattaagctgtgcacagatctttctagaaatatcttaaggggaatctcattagcccttggtggatcaccttatgagtttgagggaaagatgcttagagaccctttttgggtaatgcgtttcattggttatccaggtgtaaaccaagaaaatgttattggatgtggagctcacactgactatggcttgttgacgcttataaatcaagatgatgataaaactgctcttcaggtgaaaaacgtggacggtgattggataccagctattccgatccctggatcatttatctgcaacatcggtgacatgttaacgatactatcaaacggagtttaccaatccacactacataaagtaatcaataactctcctaaataccgtgtatgtgttgcatttttctacgagactaacttcgaggcggaggtagagccacttgatatctttaaagagaagcatccacgaaaagaaacatctcaagttgccaaaagagtcgtctatggacagcatctgattaacaaagtcctgacaacctttgcaaatttagtggaaaacagttaatatggttgatgggctttggatggtaattgttttacctaagcatggatttcgagttttagtaaaataaaagaagttctaggcgacaataaaaataaatgaagaagaaattgtaatttggtttctaatattaataaaactacaggtttgttt

SEQ ID NO: 42794 - protein, 357 aa, Arabidopsis thaliana
  peptide (1)..(357): Ceres Seq. ID no. 12604793
  misc_feature (208)..(308): Pfam Name: 2OG-Fe(II) oxygenase superfamily Pfam Description: 2OG-Fe(II) oxygenase superfamily
  misc_feature (23)..(319): Homolog of NCBI NO: 23130050 NR Description: hypothetical protein [Nostoc punctiforme]
  misc_feature (1)..(148): Homolog of NCBI NO: 10834554 NR Description: 2-oxoacid-dependent oxidase [Arabidopsis thaliana]
  misc_feature (26)..(350): Homolog of NCBI NO: 6984228 NR Description: putative flavonol synthase-like protein
  misc_feature (26)..(351): Homolog of NCBI NO: 11255902 NR Description: flavonol synthase-like protein - Arabidopsis
  misc_feature (26)..(351): Homolog of NCBI NO: 21554579 NR Description: flavonol synthase-like protein [Arabidopsis
  misc_feature (26)..(351): Homolog of NCBI NO: 18409039 NR Description: flavonol synthase - like protein
  misc_feature (22)..(357): Homolog of NCBI NO: 15229181 NR Description: putative protein; protein id: At3g49630.1
  misc_feature (26)..(357): Homolog of NCBI NO: 11255891 NR Description: hypothetical protein T9C5.210 - Arabidopsis
  misc_feature (3)..(357): Homolog of NCBI NO: 19423910 NR Description: unknown protein [Arabidopsis thaliana]
  misc_feature (1)..(357): Homolog of NCBI NO: 22331716 NR Description: oxidoreductase (din11), putative; protein id:
MVIYHRKVVFTYVRAKRFYHFLNIEMVTDFKSLLPVIDISPLLAKCDDFDMAEDAGVVEVVGKLDRACRDVGFFYVIGHGISDDLINKVKEMTHQFFELPYEEKLKIKITPTAGYRGYQRIGVNFTSGKQDMHEAIDCYREFKQGKHGDIGKVLEGPNQWPGNPQEYKDLMEEYIKLCTDLSRNILRGISLALGGSPYEFEGKMLRDPFWVMRFIGYPGVNQENVIGCGAHTDYGLLTLINQDDDKTALQVKNVDGDWIPAIPIPGSFICNIGDMLTILSNGVYQSTLHKVINNSPKYRVCVAFFYETNFEAEVEPLDIFKEKHPRKETSQVAKRVVYGQHLINKVLTTFANLVENS

SEQ ID NO: 42795 - protein, 332 aa, Arabidopsis thaliana
  peptide (1)..(332): Ceres Seq. ID no. 12604794
  misc_feature (183)..(283): Pfam Name: 2OG-Fe(II) oxygenase superfamily Pfam Description: 2OG-Fe(II) oxygenase superfamily
  misc_feature (1)..(294): Homolog of NCBI NO: 23130050 NR Description: hypothetical protein [Nostoc punctiforme]
  misc_feature (1)..(123): Homolog of NCBI NO: 10834554 NR Description: 2-oxoacid-dependent oxidase [Arabidopsis thaliana]
  misc_feature (1)..(325): Homolog of NCBI NO: 6984228 NR Description: putative flavonol synthase-like protein
  misc_feature (1)..(326): Homolog of NCBI NO: 11255902 NR Description: flavonol synthase-like protein - Arabidopsis
  misc_feature (1)..(326): Homolog of NCBI NO: 21554579 NR Description: flavonol synthase-like protein [Arabidopsis
  misc_feature (1)..(326): Homolog of NCBI NO: 18409039 NR Description: flavonol synthase - like protein
  misc_feature (1)..(332): Homolog of NCBI NO: 15229181 NR Description: putative protein; protein id: At3g49630.1
  misc_feature (1)..(332): Homolog of NCBI NO: 11255891 NR Description: hypothetical protein T9C5.210 - Arabidopsis
  misc_feature (1)..(332): Homolog of NCBI NO: 19423910 NR Description: unknown protein [Arabidopsis thaliana]
  misc_feature (1)..(332): Homolog of NCBI NO: 22331716 NR Description: oxidoreductase (din11), putative; protein id:
MVTDFKSLLPVIDISPLLAKCDDFDMAEDAGVVEVVGKLDRACRDVGFFYVIGHGISDDLINKVKEMTHQFFELPYEEKLKIKITPTAGYRGYQRIGVNFTSGKQDMHEAIDCYREFKQGKHGDIGKVLEGPNQWPGNPQEYKDLMEEYIKLCTDLSRNILRGISLALGGSPYEFEGKMLRDPFWVMRFIGYPGVNQENVIGCGAHTDYGLLTLINQDDDKTALQVKNVDGDWIPAIPIPGSFICNIGDMLTILSNGVYQSTLHKVINNSPKYRVCVAFFYETNFEAEVEPLDIFKEKHPRKETSQVAKRVVYGQHLINKVLTTFANLVENS

SEQ ID NO: 42796 - protein, 307 aa, Arabidopsis thaliana
  peptide (1)..(307): Ceres Seq. ID no. 12604795
  misc_feature (158)..(258): Pfam Name: 2OG-Fe(II) oxygenase superfamily Pfam Description: 2OG-Fe(II) oxygenase superfamily
  misc_feature (1)..(269): Homolog of NCBI NO: 23130050 NR Description: hypothetical protein [Nostoc punctiforme]
  misc_feature (1)..(98): Homolog of NCBI NO: 10834554 NR Description: 2-oxoacid-dependent oxidase [Arabidopsis thaliana]
  misc_feature (1)..(300): Homolog of NCBI NO: 6984228 NR Description: putative flavonol synthase-like protein
  misc_feature (1)..(301): Homolog of NCBI NO: 11255902 NR Description: flavonol synthase-like protein - Arabidopsis
  misc_feature (1)..(301): Homolog of NCBI NO: 21554579 NR Description: flavonol synthase-like protein [Arabidopsis
  misc_feature (1)..(301): Homolog of NCBI NO: 18409039 NR Description: flavonol synthase - like protein
  misc_feature (1)..(307): Homolog of NCBI NO: 15229181 NR Description: putative protein; protein id: At3g49630.1
  misc_feature (1)..(307): Homolog of NCBI NO: 11255891 NR Description: hypothetical protein T9C5.210 - Arabidopsis
  misc_feature (1)..(307): Homolog of NCBI NO: 19423910 NR Description: unknown protein [Arabidopsis thaliana]
  misc_feature (1)..(307): Homolog of NCBI NO: 22331716 NR Description: oxidoreductase (din11), putative; protein id:
MAEDAGVVEVVGKLDRACRDVGFFYVIGHGISDDLINKVKEMTHQFFELPYEEKLKIKITPTAGYRGYQRIGVNFTSGKQDMHEAIDCYREFKQGKHGDIGKVLEGPNQWPGNPQEYKDLMEEYIKLCTDLSRNILRGISLALGGSPYEFEGKMLRDPFWVMRFIGYPGVNQENVIGCGAHTDYGLLTLINQDDDKTALQVKNVDGDWIPAIPIPGSFICNIGDMLTILSNGVYQSTLHKVINNSPKYRVCVAFFYETNFEAEVEPLDIFKEKHPRKETSQVAKRVVYGQHLINKVLTTFANLVENS

SEQ ID NO: 42797 - DNA, 1251 bp, Arabidopsis thaliana
  misc_feature (1)..(1251): Ceres Seq. ID no. 12338485
  misc_feature: MA Experiment ID: 108434 Result: Up-regulated in Transcription
  misc_feature: MA Experiment 108434 PARAMETER Experiment Name: At_Root_Tips_cDNA_P Parameter: Tissue Value: Root Tips
  misc_feature: MA Experiment ID: 108462 Result: Down-regulated in Transcription
  misc_feature: MA Experiment 108462 PARAMETER Experiment Name: At_Germinating_Seeds_cDNA_P Parameter: Age (day) Value: 2 vs. 0
  misc_feature: MA Experiment 108462 PARAMETER Experiment Name: At_Germinating_Seeds_cDNA_P Parameter: Tissue Value: Germinating Seeds
  misc_feature: MA Experiment ID: 108463 Result: Down-regulated in Transcription
  misc_feature: MA Experiment 108463 PARAMETER Experiment Name: At_Germinating_Seeds_cDNA_P Parameter: Age (day) Value: 3 vs. 0
  misc_feature: MA Experiment 108463 PARAMETER Experiment Name: At_Germinating_Seeds_cDNA_P Parameter: Tissue Value: Germinating Seeds
  misc_feature: MA Experiment ID: 108464 Result: Down-regulated in Transcription
  misc_feature: MA Experiment 108464 PARAMETER Experiment Name: At_Germinating_Seeds_cDNA_P Parameter: Age (day) Value: 4 vs. 0
  misc_feature: MA Experiment 108464 PARAMETER Experiment Name: At_Germinating_Seeds_cDNA_P Parameter: Tissue Value: Germinating Seeds
  misc_feature: MA Experiment ID: 108561 Result: Down-regulated in Transcription
  misc_feature: MA Experiment 108561 PARAMETER Experiment Name: At_100uM_ABA_cDNA_P Parameter: Timepoint (hr) Value: 6
  misc_feature: MA Experiment 108561 PARAMETER Experiment Name: At_100uM_ABA_cDNA_P Parameter: Tissue Value: Aerial
  misc_feature: MA Experiment 108561 PARAMETER Experiment Name: At_100uM_ABA_cDNA_P Parameter: Treatment Value: 100uM ABA vs. No Treatment
  misc_feature: MA Experiment ID: 108572 Result: Down-regulated in Transcription
  misc_feature: MA Experiment 108572 PARAMETER Experiment Name: At_Drought_cDNA_P Parameter: Timepoint (hr) Value: 1
  misc_feature: MA Experiment 108572 PARAMETER Experiment Name: At_Drought_cDNA_P Parameter: Tissue Value: Aerial
  misc_feature: MA Experiment 108572 PARAMETER Experiment Name: At_Drought_cDNA_P Parameter: Treatment Value: Drought vs. No Drought
  misc_feature: MA Experiment ID: 108573 Result: Down-regulated in Transcription
  misc_feature: MA Experiment 108573 PARAMETER Experiment Name: At_Drought_cDNA_P Parameter: Timepoint (hr) Value: 6
  misc_feature: MA Experiment 108573 PARAMETER Experiment Name: At_Drought_cDNA_P Parameter: Tissue Value: Aerial
  misc_feature: MA Experiment 108573 PARAMETER Experiment Name: At_Drought_cDNA_P Parameter: Treatment Value: Drought vs. No Drought
  misc_feature: MA Experiment ID: 108576 Result: Down-regulated in Transcription
  misc_feature: MA Experiment 108576 PARAMETER Experiment Name: At_42deg_Heat_cDNA_P Parameter: Temperature (deg C) Value: 42 vs. 22
  misc_feature: MA Experiment 108576 PARAMETER Experiment Name: At_42deg_Heat_cDNA_P Parameter: Timepoint (hr) Value: 1
  misc_feature: MA Experiment 108576 PARAMETER Experiment Name: At_42deg_Heat_cDNA_P Parameter: Tissue Value: Aerial
  misc_feature: MA Experiment ID: 108577 Result: Down-regulated in Transcription
  misc_feature: MA Experiment 108577 PARAMETER Experiment Name: At_42deg_Heat_cDNA_P Parameter: Temperature (deg C) Value: 42 vs. 22
  misc_feature: MA Experiment 108577 PARAMETER Experiment Name: At_42deg_Heat_cDNA_P Parameter: Timepoint (hr) Value: 6
  misc_feature: MA Experiment 108577 PARAMETER Experiment Name: At_42deg_Heat_cDNA_P Parameter: Tissue Value: Aerial
  misc_feature: MA Experiment ID: 108579 Result: Down-regulated in Transcription
  misc_feature: MA Experiment 108579 PARAMETER Experiment Name: At_4deg_Cold_cDNA_P Parameter: Temperature (deg C) Value: 4 vs. 22
  misc_feature: MA Experiment 108579 PARAMETER Experiment Name: At_4deg_Cold_cDNA_P Parameter: Timepoint (hr) Value: 6
  misc_feature: MA Experiment 108579 PARAMETER Experiment Name: At_4deg_Cold_cDNA_P Parameter: Tissue Value: Aerial
  misc_feature: MA Experiment ID: 108585 Result: Down-regulated in Transcription
  misc_feature: MA Experiment 108585 PARAMETER Experiment Name: At_5mM_NaNP_cDNA_P Parameter: Timepoint (hr) Value: 6
  misc_feature: MA Experiment 108585 PARAMETER Experiment Name: At_5mM_NaNP_cDNA_P Parameter: Tissue Value: Aerial
  misc_feature: MA Experiment 108585 PARAMETER Experiment Name: At_5mM_NaNP_cDNA_P Parameter: Treatment Value: null
  misc_feature: MA Experiment ID: 108595 Result: Down-regulated in Transcription
  misc_feature: MA Experiment 108595 PARAMETER Experiment Name: At_Ler-pi_Ovule_cDNA_P Parameter: Plant Line Value: null
  misc_feature: MA Experiment ID: 108605 Result: Down-regulated in Transcription
  misc_feature: MA Experiment 108605 PARAMETER Experiment Name: At_100uM_ABA_cDNA_P Parameter: Timepoint (hr) Value: 6
  misc_feature: MA Experiment 108605 PARAMETER Experiment Name: At_100uM_ABA_cDNA_P Parameter: Tissue Value: Aerial
  misc_feature: MA Experiment 108605 PARAMETER Experiment Name: At_100uM_ABA_cDNA_P Parameter: Treatment Value: 100uM ABA vs. No Treatment
  misc_feature: MA Experiment ID: 108607 Result: Down-regulated in Transcription
  misc_feature: MA Experiment 108607 PARAMETER Experiment Name: At_100uM_ABA_cDNA_P Parameter: Timepoint (hr) Value: 4
  misc_feature: MA Experiment 108607 PARAMETER Experiment Name: At_100uM_ABA_cDNA_P Parameter: Tissue Value: Aerial
  misc_feature: MA Experiment 108607 PARAMETER Experiment Name: At_100uM_ABA_cDNA_P Parameter: Treatment Value: 100uM ABA vs. No Treatment
  misc_feature: MA Experiment ID: 108609 Result: Down-regulated in Transcription
  misc_feature: MA Experiment 108609 PARAMETER Experiment Name: At_100uM_ABA_cDNA_P Parameter: Timepoint (hr) Value: 24
  misc_feature: MA Experiment 108609 PARAMETER Experiment Name: At_100uM_ABA_cDNA_P Parameter: Tissue Value: Aerial
  misc_feature: MA Experiment 108609 PARAMETER Experiment Name: At_100uM_ABA_cDNA_P Parameter: Treatment Value: 100uM ABA vs. No Treatment
  misc_feature: MA Experiment ID: 20000069 Result: Down-regulated in Transcription
  misc_feature: MA Experiment 20000069 PARAMETER Experiment Name: At_100uM_ABA_Mutants_cDNA_P Parameter: Plant Line Value: CS23
  misc_feature: MA Experiment 20000069 PARAMETER Experiment Name: At_100uM_ABA_Mutants_cDNA_P Parameter: Timepoint (hr) Value: 6
  misc_feature: MA Experiment 20000069 PARAMETER Experiment Name: At_100uM_ABA_Mutants_cDNA_P Parameter: Tissue Value: Aerial
  misc_feature: MA Experiment 20000069 PARAMETER Experiment Name: At_100uM_ABA_Mutants_cDNA_P Parameter: Treatment Value: 100uM ABA vs. No Treatment
  misc_feature: MA Experiment ID: 20000070 Result: Down-regulated in Transcription
  misc_feature: MA Experiment 20000070 PARAMETER Experiment Name: At_100uM_ABA_Mutants_cDNA_P Parameter: Plant Line Value: CS24
  misc_feature: MA Experiment 20000070 PARAMETER Experiment Name: At_100uM_ABA_Mutants_cDNA_P Parameter: Timepoint (hr) Value: 6
  misc_feature: MA Experiment 20000070 PARAMETER Experiment Name: At_100uM_ABA_Mutants_cDNA_P Parameter: Tissue Value: Aerial
  misc_feature: MA Experiment 20000070 PARAMETER Experiment Name: At_100uM_ABA_Mutants_cDNA_P Parameter: Treatment Value: 100uM ABA vs. No Treatment
  misc_feature: MA Experiment ID: 20000072 Result: Down-regulated in Transcription
  misc_feature: MA Experiment 20000072 PARAMETER Experiment Name: At_100uM_ABA_Mutants_cDNA_P Parameter: Plant Line Value: CS8105
  misc_feature: MA Experiment 20000072 PARAMETER Experiment Name: At_100uM_ABA_Mutants_cDNA_P Parameter: Timepoint (hr) Value: 6
  misc_feature: MA Experiment 20000072 PARAMETER Experiment Name: At_100uM_ABA_Mutants_cDNA_P Parameter: Tissue Value: Aerial
  misc_feature: MA Experiment 20000072 PARAMETER Experiment Name: At_100uM_ABA_Mutants_cDNA_P Parameter: Treatment Value: 100uM ABA vs. No Treatment
  misc_feature: MA Experiment ID: 20000086 Result: Down-regulated in Transcription
  misc_feature: MA Experiment 20000086 PARAMETER Experiment Name: At_100uM_ABA_Mutants_cDNA_P Parameter: Plant Line Value: CS22
  misc_feature: MA Experiment 20000086 PARAMETER Experiment Name: At_100uM_ABA_Mutants_cDNA_P Parameter: Timepoint (hr) Value: 6
  misc_feature: MA Experiment 20000086 PARAMETER Experiment Name: At_100uM_ABA_Mutants_cDNA_P Parameter: Tissue Value: Aerial
  misc_feature: MA Experiment 20000086 PARAMETER Experiment Name: At_100uM_ABA_Mutants_cDNA_P Parameter: Treatment Value: 100uM ABA vs. No Treatment
  misc_feature: MA Experiment ID: 20000087 Result: Down-regulated in Transcription
  misc_feature: MA Experiment 20000087 PARAMETER Experiment Name: At_100uM_ABA_Mutants_cDNA_P Parameter: Plant Line Value: WS
  misc_feature: MA Experiment 20000087 PARAMETER Experiment Name: At_100uM_ABA_Mutants_cDNA_P Parameter: Timepoint (hr) Value: 6
  misc_feature: MA Experiment 20000087 PARAMETER Experiment Name: At_100uM_ABA_Mutants_cDNA_P Parameter: Tissue Value: Aerial
  misc_feature: MA Experiment 20000087 PARAMETER Experiment Name: At_100uM_ABA_Mutants_cDNA_P Parameter: Treatment Value: 100uM ABA vs. No Treatment
  misc_feature: MA Experiment ID: 20000088 Result: Down-regulated in Transcription
  misc_feature: MA Experiment 20000088 PARAMETER Experiment Name: At_100uM_ABA_Mutants_cDNA_P Parameter: Plant Line Value: Landsberg
  misc_feature: MA Experiment 20000088 PARAMETER Experiment Name: At_100uM_ABA_Mutants_cDNA_P Parameter: Timepoint (hr) Value: 6
  misc_feature: MA Experiment 20000088 PARAMETER Experiment Name: At_100uM_ABA_Mutants_cDNA_P Parameter: Tissue Value: Aerial
  misc_feature: MA Experiment 20000088 PARAMETER Experiment Name: At_100uM_ABA_Mutants_cDNA_P Parameter: Treatment Value: 100uM ABA vs. No Treatment
  misc_feature: MA Experiment ID: 20000111 Result: Down-regulated in Transcription
  misc_feature: MA Experiment 20000111 PARAMETER Experiment Name: At_42deg_Heat_cDNA_P Parameter: Temperature (deg C) Value: 42 vs. 22
  misc_feature: MA Experiment 20000111 PARAMETER Experiment Name: At_42deg_Heat_cDNA_P Parameter: Timepoint (hr) Value: 6
  misc_feature: MA Experiment 20000111 PARAMETER Experiment Name: At_42deg_Heat_cDNA_P Parameter: Tissue Value: Aerial
  misc_feature: MA Experiment ID: 20000112 Result: Down-regulated in Transcription
  misc_feature: MA Experiment 20000112 PARAMETER Experiment Name: At_42deg_Heat_cDNA_P Parameter: Temperature (deg C) Value: 42 vs. 22
  misc_feature: MA Experiment 20000112 PARAMETER Experiment Name: At_42deg_Heat_cDNA_P Parameter: Timepoint (hr) Value: 2
  misc_feature: MA Experiment 20000112 PARAMETER Experiment Name: At_42deg_Heat_cDNA_P Parameter: Tissue Value: Aerial
  misc_feature: MA Experiment ID: 20000117 Result: Down-regulated in Transcription
  misc_feature: MA Experiment 20000117 PARAMETER Experiment Name: At_100uM_ABA_Mutants_cDNA_P Parameter: Plant Line Value: Columbia
  misc_feature: MA Experiment 20000117 PARAMETER Experiment Name: At_100uM_ABA_Mutants_cDNA_P Parameter: Timepoint (hr) Value: 6
  misc_feature: MA Experiment 20000117 PARAMETER Experiment Name: At_100uM_ABA_Mutants_cDNA_P Parameter: Tissue Value: Aerial
  misc_feature: MA Experiment 20000117 PARAMETER Experiment Name: At_100uM_ABA_Mutants_cDNA_P Parameter: Treatment Value: 100uM ABA vs. No Treatment
  misc_feature: MA Experiment ID: 20000169 Result: Down-regulated in Transcription
  misc_feature: MA Experiment 20000169 PARAMETER Experiment Name: At_100uM_ABA_P Parameter: Age (day) Value: 14
  misc_feature: MA Experiment 20000169 PARAMETER Experiment Name: At_100uM_ABA_P Parameter: Organism Value: A. thaliana
  misc_feature: MA Experiment 20000169 PARAMETER Experiment Name: At_100uM_ABA_P Parameter: Plant Line Value: WS
  misc_feature: MA Experiment 20000169 PARAMETER Experiment Name: At_100uM_ABA_P Parameter: Timepoint (hr) Value: 6
  misc_feature: MA Experiment 20000169 PARAMETER Experiment Name: At_100uM_ABA_P Parameter: Tissue Value: Aerial
  misc_feature: MA Experiment 20000169 PARAMETER Experiment Name: At_100uM_ABA_P Parameter: Treatment Value: 100uM ABA vs. No Treatment
  misc_feature: MA Experiment ID: 20000180 Result: Down-regulated in Transcription
  misc_feature: MA Experiment 20000180 PARAMETER Experiment Name: At_Germinating_Seeds_P Parameter: Age (hr) Value: 24 vs. 0
  misc_feature: MA Experiment 20000180 PARAMETER Experiment Name: At_Germinating_Seeds_P Parameter: Tissue Value: Germinating Seeds
  misc_feature: MA Experiment ID: 20000184 Result: Up-regulated in Transcription
  misc_feature: MA Experiment 20000184 PARAMETER Experiment Name: At_Shoots__P Parameter: Age (day) Value: 7
  misc_feature: MA Experiment 20000184 PARAMETER Experiment Name: At_Shoots__P Parameter: Tissue Value: Shoots vs. Whole Plant
  misc_feature: MA Experiment ID: 20000267 Result: Down-regulated in Transcription
  misc_feature: MA Experiment 20000267 PARAMETER Experiment Name: At_Drought_P Parameter: Age (day) Value: 7
  misc_feature: MA Experiment 20000267 PARAMETER Experiment Name: At_Drought_P Parameter: Organism Value: A. thaliana
  misc_feature: MA Experiment 20000267 PARAMETER Experiment Name: At_Drought_P Parameter: Plant Line Value: WS
  misc_feature: MA Experiment 20000267 PARAMETER Experiment Name: At_Drought_P Parameter: Timepoint (hr) Value: 6
  misc_feature: MA Experiment 20000267 PARAMETER Experiment Name: At_Drought_P Parameter: Tissue Value: Whole Plant
  misc_feature: MA Experiment 20000267 PARAMETER Experiment Name: At_Drought_P Parameter: Treatment Value: Drought vs. No Drought
  misc_feature: MA Experiment ID: 20000286 Result: Up-regulated in Transcription
  misc_feature: MA Experiment 20000286 PARAMETER Experiment Name: At_Open_Flower_P Parameter: Age (day) Value: 21
  misc_feature: MA Experiment 20000286 PARAMETER Experiment Name: At_Open_Flower_P Parameter: Plant Line Value: WS
  misc_feature: MA Experiment 20000286 PARAMETER Experiment Name: At_Open_Flower_P Parameter: Tissue Value: Half Open vs. Whole Plant
  misc_feature: MA Experiment ID: 20000436 Result: Down-regulated in Transcription
  misc_feature: MA Experiment 20000436 PARAMETER Experiment Name: At_Drought_P Parameter: Age (day) Value: 7
  misc_feature: MA Experiment 20000436 PARAMETER Experiment Name: At_Drought_P Parameter: Organism Value: A. thaliana
  misc_feature: MA Experiment 20000436 PARAMETER Experiment Name: At_Drought_P Parameter: Plant Line Value: WS
  misc_feature: MA Experiment 20000436 PARAMETER Experiment Name: At_Drought_P Parameter: Timepoint (hr) Value: 12
  misc_feature: MA Experiment 20000436 PARAMETER Experiment Name: At_Drought_P Parameter: Tissue Value: Whole Plant
  misc_feature: MA Experiment 20000436 PARAMETER Experiment Name: At_Drought_P Parameter: Treatment Value: Drought vs. No Drought
  misc_feature: MA Experiment ID: 20000437 Result: Down-regulated in Transcription
  misc_feature: MA Experiment 20000437 PARAMETER Experiment Name: At_Drought_P Parameter: Age (day) Value: 8
  misc_feature: MA Experiment 20000437 PARAMETER Experiment Name: At_Drought_P Parameter: Organism Value: A. thaliana
  misc_feature: MA Experiment 20000437 PARAMETER Experiment Name: At_Drought_P Parameter: Plant Line Value: WS
  misc_feature: MA Experiment 20000437 PARAMETER Experiment Name: At_Drought_P Parameter: Timepoint (hr) Value: 24
  misc_feature: MA Experiment 20000437 PARAMETER Experiment Name: At_Drought_P Parameter: Tissue Value: Whole Plant
  misc_feature: MA Experiment 20000437 PARAMETER Experiment Name: At_Drought_P Parameter: Treatment Value: Drought vs. No Drought
  misc_feature: MA Experiment ID: 20000438 Result: Up-regulated in Transcription
  misc_feature: MA Experiment 20000438 PARAMETER Experiment Name: At_Shoots__P Parameter: Age (day) Value: 14
  misc_feature: MA Experiment 20000438 PARAMETER Experiment Name: At_Shoots__P Parameter: Tissue Value: Shoots vs. Whole Plant
  misc_feature: MA Experiment ID: 20000451 Result: Up-regulated in Transcription
  misc_feature: MA Experiment 20000451 PARAMETER Experiment Name: At_CS6879_Shoots-Roots_P Parameter: Age (day) Value: 14
  misc_feature: MA Experiment 20000451 PARAMETER Experiment Name: At_CS6879_Shoots-Roots_P Parameter: Organism Value: A. thaliana
  misc_feature: MA Experiment 20000451 PARAMETER Experiment Name: At_CS6879_Shoots-Roots_P Parameter: Plant Line Value: CS6879 vs. WS
  misc_feature: MA Experiment 20000451 PARAMETER Experiment Name: At_CS6879_Shoots-Roots_P Parameter: Tissue Value: Roots
  misc_feature: MA Experiment ID: 20000453 Result: Down-regulated in Transcription
  misc_feature: MA Experiment 20000453 PARAMETER Experiment Name: At_100uM_ABA_P Parameter: Age (day) Value: 15
  misc_feature: MA Experiment 20000453 PARAMETER Experiment Name: At_100uM_ABA_P Parameter: Organism Value: A. thaliana
  misc_feature: MA Experiment 20000453 PARAMETER Experiment Name: At_100uM_ABA_P Parameter: Plant Line Value: WS
  misc_feature: MA Experiment 20000453 PARAMETER Experiment Name: At_100uM_ABA_P Parameter: Timepoint (hr) Value: 24
  misc_feature: MA Experiment 20000453 PARAMETER Experiment Name: At_100uM_ABA_P Parameter: Tissue Value: Aerial
  misc_feature: MA Experiment 20000453 PARAMETER Experiment Name: At_100uM_ABA_P Parameter: Treatment Value: 100uM ABA vs. No Treatment
  misc_feature: MA Experiment ID: 20000573 Result: Down-regulated in Transcription
  misc_feature: MA Experiment 20000573 PARAMETER Experiment Name: At_100uM_ABA_Mutants__P Parameter: Organism Value: A. thaliana
  misc_feature: MA Experiment 20000573 PARAMETER Experiment Name: At_100uM_ABA_Mutants__P Parameter: Plant Line Value: CS22 vs. Ler wt
  misc_feature: MA Experiment 20000573 PARAMETER Experiment Name: At_100uM_ABA_Mutants__P Parameter: Timepoint (hr) Value: N/A
  misc_feature: MA Experiment 20000573 PARAMETER Experiment Name: At_100uM_ABA_Mutants__P Parameter: Tissue Value: Whole Plant
  misc_feature: MA Experiment 20000573 PARAMETER Experiment Name: At_100uM_ABA_Mutants__P Parameter: Treatment Value: None
  misc_feature: MA Experiment ID: 20001248 Result: Up-regulated in Transcription
  misc_feature: MA Experiment 20001248 PARAMETER Experiment Name: At_Far-red-induction_P Parameter: Age (day) Value: 7
  misc_feature: MA Experiment 20001248 PARAMETER Experiment Name: At_Far-red-induction_P Parameter: Light Value: Far-red vs. White
  misc_feature: MA Experiment 20001248 PARAMETER Experiment Name: At_Far-red-induction_P Parameter: Organism Value: A. thaliana
  misc_feature: MA Experiment 20001248 PARAMETER Experiment Name: At_Far-red-induction_P Parameter: Plant Line Value: Columbia
  misc_feature: MA Experiment 20001248 PARAMETER Experiment Name: At_Far-red-induction_P Parameter: Timepoint (hr) Value: 4
  misc_feature: MA Experiment 20001248 PARAMETER Experiment Name: At_Far-red-induction_P Parameter: Tissue Value: Whole Plant
  misc_feature: MA Experiment ID: 20001450 Result: Up-regulated in Transcription
  misc_feature: MA Experiment 20001450 PARAMETER Experiment Name: At_Far-red-induction_P Parameter: Age (day) Value: 7
  misc_feature: MA Experiment 20001450 PARAMETER Experiment Name: At_Far-red-induction_P Parameter: Light Value: Far-red vs. White
  misc_feature: MA Experiment 20001450 PARAMETER Experiment Name: At_Far-red-induction_P Parameter: Organism Value: A. thaliana
  misc_feature: MA Experiment 20001450 PARAMETER Experiment Name: At_Far-red-induction_P Parameter: Plant Line Value: Columbia
  misc_feature: MA Experiment 20001450 PARAMETER Experiment Name: At_Far-red-induction_P Parameter: Timepoint (hr) Value: 8
  misc_feature: MA Experiment 20001450 PARAMETER Experiment Name: At_Far-red-induction_P Parameter: Tissue Value: Whole Plant
  misc_feature: MA Experiment ID: 20001554 Result: Down-regulated in Transcription
  misc_feature: MA Experiment 20001554 PARAMETER Experiment Name: At_Drought_Soil_Dry_P Parameter: Age (day) Value: 21
  misc_feature: MA Experiment 20001554 PARAMETER Experiment Name: At_Drought_Soil_Dry_P Parameter: Organism Value: A. thaliana
  misc_feature: MA Experiment 20001554 PARAMETER Experiment Name: At_Drought_Soil_Dry_P Parameter: Plant Line Value: WS
  misc_feature: MA Experiment 20001554 PARAMETER Experiment Name: At_Drought_Soil_Dry_P Parameter: Post Timepoint (hr) Value: None
  misc_feature: MA Experiment 20001554 PARAMETER Experiment Name: At_Drought_Soil_Dry_P Parameter: Post-Treatment Value: None
  misc_feature: MA Experiment 20001554 PARAMETER Experiment Name: At_Drought_Soil_Dry_P Parameter: Timepoint (day) Value: 7
  misc_feature: MA Experiment 20001554 PARAMETER Experiment Name: At_Drought_Soil_Dry_P Parameter: Treatment Value: Drought vs. No Drought
  misc_feature: MA Experiment ID: 20001555 Result: Down-regulated in Transcription
  misc_feature: MA Experiment 20001555 PARAMETER Experiment Name: At_Drought_Soil_Dry_P Parameter: Age (day) Value: 24
  misc_feature: MA Experiment 20001555 PARAMETER Experiment Name: At_Drought_Soil_Dry_P Parameter: Organism Value: A. thaliana
  misc_feature: MA Experiment 20001555 PARAMETER Experiment Name: At_Drought_Soil_Dry_P Parameter: Plant Line Value: WS
  misc_feature: MA Experiment 20001555 PARAMETER Experiment Name: At_Drought_Soil_Dry_P Parameter: Post Timepoint (hr) Value: None
  misc_feature: MA Experiment 20001555 PARAMETER Experiment Name: At_Drought_Soil_Dry_P Parameter: Post-Treatment Value: None
  misc_feature: MA Experiment 20001555 PARAMETER Experiment Name: At_Drought_Soil_Dry_P Parameter: Timepoint (day) Value: 10
  misc_feature: MA Experiment 20001555 PARAMETER Experiment Name: At_Drought_Soil_Dry_P Parameter: Treatment Value: Drought vs. No Drought
  misc_feature: MA Experiment ID: 20001556 Result: Down-regulated in Transcription
  misc_feature: MA Experiment 20001556 PARAMETER Experiment Name: At_Drought_Soil_Dry_P Parameter: Age (day) Value: 26
  misc_feature: MA Experiment 20001556 PARAMETER Experiment Name: At_Drought_Soil_Dry_P Parameter: Organism Value: A. thaliana
  misc_feature: MA Experiment 20001556 PARAMETER Experiment Name: At_Drought_Soil_Dry_P Parameter: Plant Line Value: WS
  misc_feature: MA Experiment 20001556 PARAMETER Experiment Name: At_Drought_Soil_Dry_P Parameter: Post Timepoint (hr) Value: None
  misc_feature: MA Experiment 20001556 PARAMETER Experiment Name: At_Drought_Soil_Dry_P Parameter: Post-Treatment Value: None
  misc_feature: MA Experiment 20001556 PARAMETER Experiment Name: At_Drought_Soil_Dry_P Parameter: Timepoint (day) Value: 12
  misc_feature: MA Experiment 20001556 PARAMETER Experiment Name: At_Drought_Soil_Dry_P Parameter: Treatment Value: Drought vs. No Drought
  misc_feature: MA Experiment ID: 20001557 Result: Up-regulated in Transcription
  misc_feature: MA Experiment 20001557 PARAMETER Experiment Name: At_Drought_Soil_Dry_P Parameter: Age (day) Value: 27
  misc_feature: MA Experiment 20001557 PARAMETER Experiment Name: At_Drought_Soil_Dry_P Parameter: Organism Value: A. thaliana
  misc_feature: MA Experiment 20001557 PARAMETER Experiment Name: At_Drought_Soil_Dry_P Parameter: Plant Line Value: WS
  misc_feature: MA Experiment 20001557 PARAMETER Experiment Name: At_Drought_Soil_Dry_P Parameter: Post Timepoint (hr) Value: 3
  misc_feature: MA Experiment 20001557 PARAMETER Experiment Name: At_Drought_Soil_Dry_P Parameter: Post-Treatment Value: Re-Water vs. No Drought
  misc_feature: MA Experiment 20001557 PARAMETER Experiment Name: At_Drought_Soil_Dry_P Parameter: Timepoint (day) Value: 13
  misc_feature: MA Experiment 20001557 PARAMETER Experiment Name: At_Drought_Soil_Dry_P Parameter: Treatment Value: Drought vs. No Drought
  misc_feature: MA Experiment ID: 20001558 Result: Up-regulated in Transcription
  misc_feature: MA Experiment 20001558 PARAMETER Experiment Name: At_Drought_Soil_Dry_P Parameter: Age (day) Value: 27
  misc_feature: MA Experiment 20001558 PARAMETER Experiment Name: At_Drought_Soil_Dry_P Parameter: Organism Value: A. thaliana
  misc_feature: MA Experiment 20001558 PARAMETER Experiment Name: At_Drought_Soil_Dry_P Parameter: Plant Line Value: WS
  misc_feature: MA Experiment 20001558 PARAMETER Experiment Name: At_Drought_Soil_Dry_P Parameter: Post Timepoint (hr) Value: 6
  misc_feature: MA Experiment 20001558 PARAMETER Experiment Name: At_Drought_Soil_Dry_P Parameter: Post-Treatment Value: Re-Water vs. No Drought
  misc_feature: MA Experiment 20001558 PARAMETER Experiment Name: At_Drought_Soil_Dry_P Parameter: Timepoint (day) Value: 13
  misc_feature: MA Experiment 20001558 PARAMETER Experiment Name: At_Drought_Soil_Dry_P Parameter: Treatment Value: Drought vs. No Drought
  misc_feature: MA Experiment ID: 20001559 Result: Down-regulated in Transcription
  misc_feature: MA Experiment 20001559 PARAMETER Experiment Name: At_Drought_Soil_Dry_P Parameter: Age (day) Value: 28
  misc_feature: MA Experiment 20001559 PARAMETER Experiment Name: At_Drought_Soil_Dry_P Parameter: Organism Value: A. thaliana
  misc_feature: MA Experiment 20001559 PARAMETER Experiment Name: At_Drought_Soil_Dry_P Parameter: Plant Line Value: WS
  misc_feature: MA Experiment 20001559 PARAMETER Experiment Name: At_Drought_Soil_Dry_P Parameter: Post Timepoint (hr) Value: 29
  misc_feature: MA Experiment 20001559 PARAMETER Experiment Name: At_Drought_Soil_Dry_P Parameter: Post-Treatment Value: Re-Water vs. No Drought
  misc_feature: MA Experiment 20001559 PARAMETER Experiment Name: At_Drought_Soil_Dry_P Parameter: Timepoint (day) Value: 14
  misc_feature: MA Experiment 20001559 PARAMETER Experiment Name: At_Drought_Soil_Dry_P Parameter: Treatment Value: Drought vs. No Drought
  misc_feature: MA Experiment ID: 20001757 Result: Up-regulated in Transcription
  misc_feature: MA Experiment 20001757 PARAMETER Experiment Name: At_50mM_NH4NO3_L-to-H_P Parameter: Timepoint (hr) Value: 6
  misc_feature: MA Experiment 20001757 PARAMETER Experiment Name: At_50mM_NH4NO3_L-to-H_P Parameter: Tissue Value: Leaf
  misc_feature: MA Experiment 20001757 PARAMETER Experiment Name: At_50mM_NH4NO3_L-to-H_P Parameter: Treatment Value: 50mM NH4NO3 vs 100mM Mannitol
  misc_feature: MA Experiment ID: 20001905 Result: Down-regulated in Transcription
  misc_feature: MA Experiment 20001905 PARAMETER Experiment Name: At_Drought_Reproduction_P Parameter: Age (day) Value: 40
  misc_feature: MA Experiment 20001905 PARAMETER Experiment Name: At_Drought_Reproduction_P Parameter: Organism Value: A. thaliana
  misc_feature: MA Experiment 20001905 PARAMETER Experiment Name: At_Drought_Reproduction_P Parameter: Plant Line Value: WS
  misc_feature: MA Experiment 20001905 PARAMETER Experiment Name: At_Drought_Reproduction_P Parameter: Timepoint (day) Value: 10
  misc_feature: MA Experiment 20001905 PARAMETER Experiment Name: At_Drought_Reproduction_P Parameter: Tissue Value: Rosettes
  misc_feature: MA Experiment 20001905 PARAMETER Experiment Name: At_Drought_Reproduction_P Parameter: Treatment Value: Drought vs. No Drought
  misc_feature: MA Experiment ID: 20001906 Result: Down-regulated in Transcription
  misc_feature: MA Experiment 20001906 PARAMETER Experiment Name: At_Drought_Reproduction_P Parameter: Age (day) Value: 35
  misc_feature: MA Experiment 20001906 PARAMETER Experiment Name: At_Drought_Reproduction_P Parameter: Organism Value: A. thaliana
  misc_feature: MA Experiment 20001906 PARAMETER Experiment Name: At_Drought_Reproduction_P Parameter: Plant Line Value: WS
  misc_feature: MA Experiment 20001906 PARAMETER Experiment Name: At_Drought_Reproduction_P Parameter: Timepoint (day) Value: 5
  misc_feature: MA Experiment 20001906 PARAMETER Experiment Name: At_Drought_Reproduction_P Parameter: Tissue Value: Siliques
  misc_feature: MA Experiment 20001906 PARAMETER Experiment Name: At_Drought_Reproduction_P Parameter: Treatment Value: Drought vs. No Drought
  misc_feature: MA Experiment ID: 20001908 Result: Down-regulated in Transcription
  misc_feature: MA Experiment 20001908 PARAMETER Experiment Name: At_Drought_Reproduction_P Parameter: Age (day) Value: 40
  misc_feature: MA Experiment 20001908 PARAMETER Experiment Name: At_Drought_Reproduction_P Parameter: Organism Value: A. thaliana
  misc_feature: MA Experiment 20001908 PARAMETER Experiment Name: At_Drought_Reproduction_P Parameter: Plant Line Value: WS
  misc_feature: MA Experiment 20001908 PARAMETER Experiment Name: At_Drought_Reproduction_P Parameter: Timepoint (day) Value: 10
  misc_feature: MA Experiment 20001908 PARAMETER Experiment Name: At_Drought_Reproduction_P Parameter: Tissue Value: Siliques
  misc_feature: MA Experiment 20001908 PARAMETER Experiment Name: At_Drought_Reproduction_P Parameter: Treatment Value: Drought vs. No Drought
  misc_feature: MA Experiment ID: 20001911 Result: Down-regulated in Transcription
  misc_feature: MA Experiment 20001911 PARAMETER Experiment Name: At_Drought_Reproduction_P Parameter: Age (day) Value: 40
  misc_feature: MA Experiment 20001911 PARAMETER Experiment Name: At_Drought_Reproduction_P Parameter: Organism Value: A. thaliana
  misc_feature: MA Experiment 20001911 PARAMETER Experiment Name: At_Drought_Reproduction_P Parameter: Plant Line Value: WS
  misc_feature: MA Experiment 20001911 PARAMETER Experiment Name: At_Drought_Reproduction_P Parameter: Timepoint (day) Value: 10
  misc_feature: MA Experiment 20001911 PARAMETER Experiment Name: At_Drought_Reproduction_P Parameter: Tissue Value: Flowers
  misc_feature: MA Experiment 20001911 PARAMETER Experiment Name: At_Drought_Reproduction_P Parameter: Treatment Value: Drought vs. No Drought
aattacattttacactcatctcgttctctcttccgtcaatatggaaggcgtcaccgtcgtgtctttcttccttcttttcatcgccaccgccatggccgccaagtccaccgtctccttccgtgacggcatgttaccaaacggagacttcgagctaggaccaaaaccatcagacatgaaaggaacagaaatactaaacaaactagcaataccaaactgggaagtcacaggattcgtcgaatacattaaatcaggacataaacaaggagacatgcttctcgttgttcccgccggtaaattcgcttgctgctagaacttgtgcacaagacgagagacttaacatatctgtagcacctgactccggtgtgattccgattcagacggtttatagtagtagtggttgggatttatatgcttgggcgtttcaagctgagagtgatgttgctgaagttgtgattcataatcctggtgttgaggaagatccagcttgtggtccacttattgatggtgttgctatgagatctctttaccctcctagaccaactaataagaacattttgaaaaacggaggatttgaagaaggtccattagtattacccggctcgacaactggagttttgatcccaccgtttatagaagacgaccactctcctttacctggatggatggtggagtctctcaaagctgtcaagtacgtagacgttgaacatttctcagtcccacagggtcgcagagctattgagcttgtagcgggtaaagagagtgccatcgctcaagtggttcggactgtcattgggaagacttacgtgctgtcttttgcggttggagacgccaacaatgcttgcaaaggatcaatggtggttgaggcttttgcaggaaaagatacacttaaggtcccttacgagtcgaaaggcacaggagggtttaaacgagtttctattcgatttgtggcggtttcgacccgatcaagaattatgttctacagcactttctatgccatgaggagcgatgatttctcgtcattgtgtgggcctgtgatcgatgatgtcaagcttataagcgttcgtaaaccatagatgaatcaccaatcctattacaagaaaatgcatcgtgtggtcttcttttattttccttaaactgtctttggtgtgtgttggattttattgaaacgagaaggtgaaaaaaacatagttttatttacgaggttagggttttatataggcaaataggcctttgcttatattgtattttcct

SEQ ID NO: 42798 - protein, 186 aa, Arabidopsis thaliana
  peptide (1)..(186): Ceres Seq. ID no. 12338486
  misc_feature (1)..(184): Pfam Name: Protein of unknown function, DUF642 Pfam Description: Protein of unknown function, DUF642
  misc_feature (1)..(185): Homolog of NCBI NO: 7488741 NR Description: hypothetical protein precursor - alfalfa
  misc_feature (1)..(186): Homolog of NCBI NO: 7486632 NR Description: hypothetical protein F8B4.160 - Arabidopsis
  misc_feature (1)..(186): Homolog of NCBI NO: 7488898 NR Description: hypothetical protein - castor bean
  misc_feature (1)..(186): Homolog of NCBI NO: 18418018 NR Description: putative protein
  misc_feature (1)..(186): Homolog of NCBI NO: 21554402 NR Description: unknown [Arabidopsis thaliana]
  misc_feature (1)..(186): Homolog of NCBI NO: 23397043 NR Description: unknown protein [Arabidopsis thaliana]
  misc_feature (1)..(186): Homolog of NCBI NO: 15239049 NR Description: putative protein
  misc_feature (1)..(186): Homolog of NCBI NO: 21537379 NR Description: unknown [Arabidopsis thaliana]
  misc_feature (1)..(186): Homolog of NCBI NO: 15809822 NR Description: AT5g25460/F18G18_200 [Arabidopsis thaliana]
  misc_feature (1)..(186): Homolog of NCBI NO: 15239438 NR Description: putative protein
MRSLYPPRPTNKNILKNGGFEEGPLVLPGSTTGVLIPPFIEDDHSPLPGWMVESLKAVKYVDVEHFSVPQGRRAIELVAGKESAIAQVVRTVIGKTYVLSFAVGDANNACKGSMVVEAFAGKDTLKVPYESKGTGGFKRVSIRFVAVSTRSRIMFYSTFYAMRSDDFSSLCGPVIDDVKLISVRKP

SEQ ID NO: 42799 - protein, 136 aa, Arabidopsis thaliana
  peptide (1)..(136): Ceres Seq. ID no. 12338488
  misc_feature (1)..(134): Pfam Name: Protein of unknown function, DUF642 Pfam Description: Protein of unknown function, DUF642
  misc_feature (1)..(135): Homolog of NCBI NO: 7488741 NR Description: hypothetical protein precursor - alfalfa
  misc_feature (1)..(136): Homolog of NCBI NO: 7486632 NR Description: hypothetical protein F8B4.160 - Arabidopsis
  misc_feature (1)..(136): Homolog of NCBI NO: 7488898 NR Description: hypothetical protein - castor bean
  misc_feature (1)..(136): Homolog of NCBI NO: 18418018 NR Description: putative protein
  misc_feature (1)..(136): Homolog of NCBI NO: 21554402 NR Description: unknown [Arabidopsis thaliana]
  misc_feature (1)..(136): Homolog of NCBI NO: 23397043 NR Description: unknown protein [Arabidopsis thaliana]
  misc_feature (1)..(136): Homolog of NCBI NO: 15239049 NR Description: putative protein
  misc_feature (1)..(136): Homolog of NCBI NO: 21537379 NR Description: unknown [Arabidopsis thaliana]
  misc_feature (1)..(136): Homolog of NCBI NO: 15809822 NR Description: AT5g25460/F18G18_200 [Arabidopsis thaliana]
  misc_feature (1)..(136): Homolog of NCBI NO: 15239438 NR Description: putative protein
MVESLKAVKYVDVEHFSVPQGRRAIELVAGKESAIAQVVRTVIGKTYVLSFAVGDANNACKGSMVVEAFAGKDTLKVPYESKGTGGFKRVSIRFVAVSTRSRIMFYSTFYAMRSDDFSSLCGPVIDDVKLISVRKP

SEQ ID NO: 42800 - protein, 102 aa, Arabidopsis thaliana
  peptide (1)..(102): Ceres Seq. ID no. 12338489
  misc_feature (13)..(100): Homolog of NCBI NO: 7488741 NR Description: hypothetical protein precursor - alfalfa
  misc_feature (58)..(100): Homolog of NCBI NO: 7486632 NR Description: hypothetical protein F8B4.160 - Arabidopsis
  misc_feature (24)..(100): Homolog of NCBI NO: 7488898 NR Description: hypothetical protein - castor bean
  misc_feature (39)..(100): Homolog of NCBI NO: 18418018 NR Description: putative protein
  misc_feature (14)..(100): Homolog of NCBI NO: 21554402 NR Description: unknown [Arabidopsis thaliana]
  misc_feature (14)..(100): Homolog of NCBI NO: 23397043 NR Description: unknown protein [Arabidopsis thaliana]
  misc_feature (14)..(100): Homolog of NCBI NO: 15239049 NR Description: putative protein
  misc_feature (14)..(100): Homolog of NCBI NO: 21537379 NR Description: unknown [Arabidopsis thaliana]
  misc_feature (14)..(100): Homolog of NCBI NO: 15809822 NR Description: AT5g25460/F18G18_200 [Arabidopsis thaliana]
  misc_feature (14)..(100): Homolog of NCBI NO: 15239438 NR Description: putative protein
ITFYTHLVLSSVNMEGVTVVSFFLLFIATAMAAKSTVSFRDGMLPNGDFELGPKPSDMKGTEILNKLAIPNWEVTGFVEYIKSGHKQGDMLLVVPAGKFACC

SEQ ID NO: 42801 - DNA, 1099 bp, Arabidopsis thaliana
  misc_feature (1)..(1099): Ceres Seq. ID no. 12330378
  misc_feature: MA Experiment ID: 108435 Result: Down-regulated in Transcription
  misc_feature: MA Experiment 108435 PARAMETER Experiment Name: At_stm_Mutants_cDNA_P Parameter: Plant Line Value: wt Landsburg vs stm
  misc_feature: MA Experiment 108435 PARAMETER Experiment Name: At_stm_Mutants_cDNA_P Parameter: Tissue Value: Shoot Apical Meristem Region
  misc_feature: MA Experiment ID: 108461 Result: Up-regulated in Transcription
  misc_feature: MA Experiment 108461 PARAMETER Experiment Name: At_Germinating_Seeds_cDNA_P Parameter: Age (day) Value: 1 vs. 0
  misc_feature: MA Experiment 108461 PARAMETER Experiment Name: At_Germinating_Seeds_cDNA_P Parameter: Tissue Value: Germinating Seeds
  misc_feature: MA Experiment ID: 108462 Result: Up-regulated in Transcription
  misc_feature: MA Experiment 108462 PARAMETER Experiment Name: At_Germinating_Seeds_cDNA_P Parameter: Age (day) Value: 2 vs. 0
  misc_feature: MA Experiment 108462 PARAMETER Experiment Name: At_Germinating_Seeds_cDNA_P Parameter: Tissue Value: Germinating Seeds
  misc_feature: MA Experiment ID: 108463 Result: Up-regulated in Transcription
  misc_feature: MA Experiment 108463 PARAMETER Experiment Name: At_Germinating_Seeds_cDNA_P Parameter: Age (day) Value: 3 vs. 0
  misc_feature: MA Experiment 108463 PARAMETER Experiment Name: At_Germinating_Seeds_cDNA_P Parameter: Tissue Value: Germinating Seeds
  misc_feature: MA Experiment ID: 108464 Result: Up-regulated in Transcription
  misc_feature: MA Experiment 108464 PARAMETER Experiment Name: At_Germinating_Seeds_cDNA_P Parameter: Age (day) Value: 4 vs. 0
  misc_feature: MA Experiment 108464 PARAMETER Experiment Name: At_Germinating_Seeds_cDNA_P Parameter: Tissue Value: Germinating Seeds
  misc_feature: MA Experiment ID: 108488 Result: Up-regulated in Transcription
  misc_feature: MA Experiment ID: 108579 Result: Down-regulated in Transcription
  misc_feature: MA Experiment 108579 PARAMETER Experiment Name: At_4deg_Cold_cDNA_P Parameter: Temperature (deg C) Value: 4 vs. 22
  misc_feature: MA Experiment 108579 PARAMETER Experiment Name: At_4deg_Cold_cDNA_P Parameter: Timepoint (hr) Value: 6
  misc_feature: MA Experiment 108579 PARAMETER Experiment Name: At_4deg_Cold_cDNA_P Parameter: Tissue Value: Aerial
  misc_feature: MA Experiment ID: 108585 Result: Down-regulated in Transcription
  misc_feature: MA Experiment 108585 PARAMETER Experiment Name: At_5mM_NaNP_cDNA_P Parameter: Timepoint (hr) Value: 6
  misc_feature: MA Experiment 108585 PARAMETER Experiment Name: At_5mM_NaNP_cDNA_P Parameter: Tissue Value: Aerial
  misc_feature: MA Experiment 108585 PARAMETER Experiment Name: At_5mM_NaNP_cDNA_P Parameter: Treatment Value: null
  misc_feature: MA Experiment ID: 108595 Result: Down-regulated in Transcription
  misc_feature: MA Experiment 108595 PARAMETER Experiment Name: At_Ler-pi_Ovule_cDNA_P Parameter: Plant Line Value: null
  misc_feature: MA Experiment ID: 20000180 Result: Up-regulated in Transcription
  misc_feature: MA Experiment 20000180 PARAMETER Experiment Name: At_Germinating_Seeds_P Parameter: Age (hr) Value: 24 vs. 0
  misc_feature: MA Experiment 20000180 PARAMETER Experiment Name: At_Germinating_Seeds_P Parameter: Tissue Value: Germinating Seeds
  misc_feature: MA Experiment ID: 20000185 Result: Down-regulated in Transcription
  misc_feature: MA Experiment 20000185 PARAMETER Experiment Name: At_Roots__P Parameter: Age (day) Value: 7 vs. 21
  misc_feature: MA Experiment 20000185 PARAMETER Experiment Name: At_Roots__P Parameter: Organism Value: A. thaliana
  misc_feature: MA Experiment 20000185 PARAMETER Experiment Name: At_Roots__P Parameter: Tissue Value: Roots vs. Whole Plant
  misc_feature: MA Experiment ID: 20000286 Result: Down-regulated in Transcription
  misc_feature: MA Experiment 20000286 PARAMETER Experiment Name: At_Open_Flower_P Parameter: Age (day) Value: 21
  misc_feature: MA Experiment 20000286 PARAMETER Experiment Name: At_Open_Flower_P Parameter: Plant Line Value: WS
  misc_feature: MA Experiment 20000286 PARAMETER Experiment Name: At_Open_Flower_P Parameter: Tissue Value: Half Open vs. Whole Plant
  misc_feature: MA Experiment ID: 20000439 Result: Down-regulated in Transcription
  misc_feature: MA Experiment 20000439 PARAMETER Experiment Name: At_Roots__P Parameter: Age (day) Value: 14 vs. 21
  misc_feature: MA Experiment 20000439 PARAMETER Experiment Name: At_Roots__P Parameter: Organism Value: A. thaliana
  misc_feature: MA Experiment 20000439 PARAMETER Experiment Name: At_Roots__P Parameter: Tissue Value: Roots vs. Whole Plant
  misc_feature: MA Experiment ID: 20000794 Result: Down-regulated in Transcription
  misc_feature: MA Experiment 20000794 PARAMETER Experiment Name: At_Petals_P Parameter: Age (day) Value: 23-25 days
  misc_feature: MA Experiment 20000794 PARAMETER Experiment Name: At_Petals_P Parameter: Plant Line Value: WS
  misc_feature: MA Experiment 20000794 PARAMETER Experiment Name: At_Petals_P Parameter: Tissue Value: Petals vs. Whole plant
  misc_feature: MA Experiment ID: 20001451 Result: Up-regulated in Transcription
  misc_feature: MA Experiment 20001451 PARAMETER Experiment Name: At_Far-red-induction_P Parameter: Age (day) Value: 7
  misc_feature: MA Experiment 20001451 PARAMETER Experiment Name: At_Far-red-induction_P Parameter: Light Value: Far-red vs. White
  misc_feature: MA Experiment 20001451 PARAMETER Experiment Name: At_Far-red-induction_P Parameter: Organism Value: A. thaliana
  misc_feature: MA Experiment 20001451 PARAMETER Experiment Name: At_Far-red-induction_P Parameter: Plant Line Value: Columbia
  misc_feature: MA Experiment 20001451 PARAMETER Experiment Name: At_Far-red-induction_P Parameter: Timepoint (hr) Value: 24
  misc_feature: MA Experiment 20001451 PARAMETER Experiment Name: At_Far-red-induction_P Parameter: Tissue Value: Whole Plant
  misc_feature: MA Experiment ID: 20001557 Result: Down-regulated in Transcription
  misc_feature: MA Experiment 20001557 PARAMETER Experiment Name: At_Drought_Soil_Dry_P Parameter: Age (day) Value: 27
  misc_feature: MA Experiment 20001557 PARAMETER Experiment Name: At_Drought_Soil_Dry_P Parameter: Organism Value: A. thaliana
  misc_feature: MA Experiment 20001557 PARAMETER Experiment Name: At_Drought_Soil_Dry_P Parameter: Plant Line Value: WS
  misc_feature: MA Experiment 20001557 PARAMETER Experiment Name: At_Drought_Soil_Dry_P Parameter: Post Timepoint (hr) Value: 3
  misc_feature: MA Experiment 20001557 PARAMETER Experiment Name: At_Drought_Soil_Dry_P Parameter: Post-Treatment Value: Re-Water vs. No Drought
  misc_feature: MA Experiment 20001557 PARAMETER Experiment Name: At_Drought_Soil_Dry_P Parameter: Timepoint (day) Value: 13
  misc_feature: MA Experiment 20001557 PARAMETER Experiment Name: At_Drought_Soil_Dry_P Parameter: Treatment Value: Drought vs. No Drought
  misc_feature: MA Experiment ID: 20001905 Result: Down-regulated in Transcription
  misc_feature: MA Experiment 20001905 PARAMETER Experiment Name: At_Drought_Reproduction_P Parameter: Age (day) Value: 40
  misc_feature: MA Experiment 20001905 PARAMETER Experiment Name: At_Drought_Reproduction_P Parameter: Organism Value: A. thaliana
  misc_feature: MA Experiment 20001905 PARAMETER Experiment Name: At_Drought_Reproduction_P Parameter: Plant Line Value: WS
  misc_feature: MA Experiment 20001905 PARAMETER Experiment Name: At_Drought_Reproduction_P Parameter: Timepoint (day) Value: 10
  misc_feature: MA Experiment 20001905 PARAMETER Experiment Name: At_Drought_Reproduction_P Parameter: Tissue Value: Rosettes
  misc_feature: MA Experiment 20001905 PARAMETER Experiment Name: At_Drought_Reproduction_P Parameter: Treatment Value: Drought vs. No Drought
cttacaatggctgcatcgttagcctctctttcctccttagctaaagccggagcaccacggtcactgttcaaccgccatggcagccaccgccttcctcctccacaaatcatacctcttgcttcctctatcaagaaacatatcacgacgagcttctataggagaggaagttctctgaagaacatttatgccctcgagacctctgacggcgccattaacgtggaggtcgatgatgatgaggaagaagaagcgtgtgagcttgttaacggaacagaagtgtccgttgacggtgttgaaggttatcttttaacggcggtgaagaacaataacggaactggattgcttctactctctgatgtctttggctttcaagattcagctacacgcgatttcgcttaccgtgtggcttgcaatggctataacgttcttgtcccggacttgtttcgtggagatccatggtcgaaaaaccgaccaaagtccgaatacgaggaatggagaagaggacatgaccctaaccgtatcagacaagacactactaccttcacaaaatggatggttgaggaatttgcagcggctggaatctccaagaagctaggagtgatggggttctgttttggcggtggacgtgtggttgacgtgttagccacggatgagagcggttactttagcaccggtgtctcgttctacagtacgagaatagactcggcggtggcgggagatgtgaaagtgccagtcttgtttattgctggagatagagacccgctttgtgaagtgaagggtttgtatgaaattgaggagaagattggtgaaggttcaaaggttgttgtgtatgaaggaagaggtcacggctttgttcaccggcccgagacacccgaagatgatcgagacgctgaggaagcgtttgctctcatgagaaattggttacatcatcatttgatttgaagccaattgtttttctctactctttgtacatccaagttaaaataaaactcggattctagtaaatatccaaataaatgttacttaataatataactaatgaagaggaatgtcgagaaaaccatataaaagttcaatctctaatcaaatcatgttttccttc

SEQ ID NO: 42802 - protein, 312 aa, Arabidopsis thaliana
  peptide (1)..(312): Ceres Seq. ID no. 12330379
  misc_feature (97)..(311): Pfam Name: Dienelactone hydrolase family Pfam Description: Dienelactone hydrolase family
  misc_feature (113)..(311): Homolog of NCBI NO: 24899687 NR Description: Unknown protein [Arabidopsis thaliana]
  misc_feature (113)..(311): Homolog of NCBI NO: 18403812 NR Description: expressed protein
  misc_feature (66)..(311): Homolog of NCBI NO: 40253306 NR Description: putative Endo-1,3;1,4-beta-D-glucanase precursor
  misc_feature (88)..(306): Homolog of NCBI NO: 18403820 NR Description: expressed protein
  misc_feature (93)..(311): Homolog of NCBI NO: 40253303 NR Description: putative Endo-1,3;1,4-beta-D-glucanase precursor
  misc_feature (89)..(311): Homolog of NCBI NO: 34854915 NR Description: similar to Ab2-225 [Rattus norvegicus]
  misc_feature (89)..(311): Homolog of NCBI NO: 18676733 NR Description: unnamed protein product [Homo sapiens]
  misc_feature (89)..(311): Homolog of NCBI NO: 20270371 NR Description: hypothetical protein BC001573 [Homo sapiens]
  misc_feature (3)..(312): Homolog of NCBI NO: 18399662 NR Description: expressed protein
  misc_feature (3)..(312): Homolog of NCBI NO: 21553574 NR Description: unknown [Arabidopsis thaliana]
LTMAASLASLSSLAKAGAPRSLFNRHGSHRLPPPQIIPLASSIKKHITTSFYRRGSSLKNIYALETSDGAINVEVDDDEEEEACELVNGTEVSVDGVEGYLLTAVKNNNGTGLLLLSDVFGFQDSATRDFAYRVACNGYNVLVPDLFRGDPWSKNRPKSEYEEWRRGHDPNRIRQDTTTFTKWMVEEFAAAGISKKLGVMGFCFGGGRVVDVLATDESGYFSTGVSFYSTRIDSAVAGDVKVPVLFIAGDRDPLCEVKGLYEIEEKIGEGSKVVVYEGRGHGFVHRPETPEDDRDAEEAFALMRNWLHHHLI

SEQ ID NO: 42803 - protein, 310 aa, Arabidopsis thaliana
  peptide (1)..(310): Ceres Seq. ID no. 12330380
  misc_feature (95)..(309): Pfam Name: Dienelactone hydrolase family Pfam Description: Dienelactone hydrolase family
  misc_feature (111)..(309): Homolog of NCBI NO: 24899687 NR Description: Unknown protein [Arabidopsis thaliana]
  misc_feature (111)..(309): Homolog of NCBI NO: 18403812 NR Description: expressed protein
  misc_feature (64)..(309): Homolog of NCBI NO: 40253306 NR Description: putative Endo-1,3;1,4-beta-D-glucanase precursor
  misc_feature (86)..(304): Homolog of NCBI NO: 18403820 NR Description: expressed protein
  misc_feature (91)..(309): Homolog of NCBI NO: 40253303 NR Description: putative Endo-1,3;1,4-beta-D-glucanase precursor
  misc_feature (87)..(309): Homolog of NCBI NO: 34854915 NR Description: similar to Ab2-225 [Rattus norvegicus]
  misc_feature (87)..(309): Homolog of NCBI NO: 18676733 NR Description: unnamed protein product [Homo sapiens]
  misc_feature (87)..(309): Homolog of NCBI NO: 20270371 NR Description: hypothetical protein BC001573 [Homo sapiens]
  misc_feature (1)..(310): Homolog of NCBI NO: 18399662 NR Description: expressed protein
  misc_feature (1)..(310): Homolog of NCBI NO: 21553574 NR Description: unknown [Arabidopsis thaliana]
MAASLASLSSLAKAGAPRSLFNRHGSHRLPPPQIIPLASSIKKHITTSFYRRGSSLKNIYALETSDGAINVEVDDDEEEEACELVNGTEVSVDGVEGYLLTAVKNNNGTGLLLLSDVFGFQDSATRDFAYRVACNGYNVLVPDLFRGDPWSKNRPKSEYEEWRRGHDPNRIRQDTTTFTKWMVEEFAAAGISKKLGVMGFCFGGGRVVDVLATDESGYFSTGVSFYSTRIDSAVAGDVKVPVLFIAGDRDPLCEVKGLYEIEEKIGEGSKVVVYEGRGHGFVHRPETPEDDRDAEEAFALMRNWLHHHLI

SEQ ID NO: 42804 - DNA, 1947 bp, Arabidopsis thaliana
  misc_feature (1)..(1947): Ceres Seq. ID no. 12562508
  misc_feature: MA Experiment ID: 108434 Result: Up-regulated in Transcription
  misc_feature: MA Experiment 108434 PARAMETER Experiment Name: At_Root_Tips_cDNA_P Parameter: Tissue Value: Root Tips
  misc_feature: MA Experiment ID: 108461 Result: Up-regulated in Transcription
  misc_feature: MA Experiment 108461 PARAMETER Experiment Name: At_Germinating_Seeds_cDNA_P Parameter: Age (day) Value: 1 vs. 0
  misc_feature: MA Experiment 108461 PARAMETER Experiment Name: At_Germinating_Seeds_cDNA_P Parameter: Tissue Value: Germinating Seeds
  misc_feature: MA Experiment ID: 108462 Result: Up-regulated in Transcription
  misc_feature: MA Experiment 108462 PARAMETER Experiment Name: At_Germinating_Seeds_cDNA_P Parameter: Age (day) Value: 2 vs. 0
  misc_feature: MA Experiment 108462 PARAMETER Experiment Name: At_Germinating_Seeds_cDNA_P Parameter: Tissue Value: Germinating Seeds
  misc_feature: MA Experiment ID: 108463 Result: Up-regulated in Transcription
  misc_feature: MA Experiment 108463 PARAMETER Experiment Name: At_Germinating_Seeds_cDNA_P Parameter: Age (day) Value: 3 vs. 0
  misc_feature: MA Experiment 108463 PARAMETER Experiment Name: At_Germinating_Seeds_cDNA_P Parameter: Tissue Value: Germinating Seeds
  misc_feature: MA Experiment ID: 108572 Result: Up-regulated in Transcription
  misc_feature: MA Experiment 108572 PARAMETER Experiment Name: At_Drought_cDNA_P Parameter: Timepoint (hr) Value: 1
  misc_feature: MA Experiment 108572 PARAMETER Experiment Name: At_Drought_cDNA_P Parameter: Tissue Value: Aerial
  misc_feature: MA Experiment 108572 PARAMETER Experiment Name: At_Drought_cDNA_P Parameter: Treatment Value: Drought vs. No Drought
  misc_feature: MA Experiment ID: 108573 Result: Up-regulated in Transcription
  misc_feature: MA Experiment 108573 PARAMETER Experiment Name: At_Drought_cDNA_P Parameter: Timepoint (hr) Value: 6
  misc_feature: MA Experiment 108573 PARAMETER Experiment Name: At_Drought_cDNA_P Parameter: Tissue Value: Aerial
  misc_feature: MA Experiment 108573 PARAMETER Experiment Name: At_Drought_cDNA_P Parameter: Treatment Value: Drought vs. No Drought
  misc_feature: MA Experiment ID: 108585 Result: Up-regulated in Transcription
  misc_feature: MA Experiment 108585 PARAMETER Experiment Name: At_5mM_NaNP_cDNA_P Parameter: Timepoint (hr) Value: 6
  misc_feature: MA Experiment 108585 PARAMETER Experiment Name: At_5mM_NaNP_cDNA_P Parameter: Tissue Value: Aerial
  misc_feature: MA Experiment 108585 PARAMETER Experiment Name: At_5mM_NaNP_cDNA_P Parameter: Treatment Value: null
  misc_feature: MA Experiment ID: 108668 Result: Up-regulated in Transcription
  misc_feature: MA Experiment 108668 PARAMETER Experiment Name: At_2mM_SA_cDNA_P Parameter: Plant Line Value: WS
  misc_feature: MA Experiment 108668 PARAMETER Experiment Name: At_2mM_SA_cDNA_P Parameter: Timepoint (hr) Value: 6
  misc_feature: MA Experiment 108668 PARAMETER Experiment Name: At_2mM_SA_cDNA_P Parameter: Treatment Value: 2mM SA vs. No Treatment
  misc_feature: MA Experiment ID: 20000180 Result: Up-regulated in Transcription
  misc_feature: MA Experiment 20000180 PARAMETER Experiment Name: At_Germinating_Seeds_P Parameter: Age (hr) Value: 24 vs. 0
  misc_feature: MA Experiment 20000180 PARAMETER Experiment Name: At_Germinating_Seeds_P Parameter: Tissue Value: Germinating Seeds
  misc_feature: MA Experiment ID: 20000182 Result: Up-regulated in Transcription
  misc_feature: MA Experiment 20000182 PARAMETER Experiment Name: At_2mM_SA_P Parameter: Age (day) Value: 14
  misc_feature: MA Experiment 20000182 PARAMETER Experiment Name: At_2mM_SA_P Parameter: Organism Value: A. thaliana
  misc_feature: MA Experiment 20000182 PARAMETER Experiment Name: At_2mM_SA_P Parameter: Plant Line Value: WS
  misc_feature: MA Experiment 20000182 PARAMETER Experiment Name: At_2mM_SA_P Parameter: Timepoint (hr) Value: 6
  misc_feature: MA Experiment 20000182 PARAMETER Experiment Name: At_2mM_SA_P Parameter: Tissue Value: Aerial
  misc_feature: MA Experiment 20000182 PARAMETER Experiment Name: At_2mM_SA_P Parameter: Treatment Value: 2mM SA vs. No Treatment
  misc_feature: MA Experiment ID: 20000185 Result: Up-regulated in Transcription
  misc_feature: MA Experiment 20000185 PARAMETER Experiment Name: At_Roots__P Parameter: Age (day) Value: 7 vs. 21
  misc_feature: MA Experiment 20000185 PARAMETER Experiment Name: At_Roots__P Parameter: Organism Value: A. thaliana
  misc_feature: MA Experiment 20000185 PARAMETER Experiment Name: At_Roots__P Parameter: Tissue Value: Roots vs. Whole Plant
  misc_feature: MA Experiment ID: 20000224 Result: Down-regulated in Transcription
  misc_feature: MA Experiment ID: 20000437 Result: Up-regulated in Transcription
  misc_feature: MA Experiment 20000437 PARAMETER Experiment Name: At_Drought_P Parameter: Age (day) Value: 8
  misc_feature: MA Experiment 20000437 PARAMETER Experiment Name: At_Drought_P Parameter: Organism Value: A. thaliana
  misc_feature: MA Experiment 20000437 PARAMETER Experiment Name: At_Drought_P Parameter: Plant Line Value: WS
  misc_feature: MA Experiment 20000437 PARAMETER Experiment Name: At_Drought_P Parameter: Timepoint (hr) Value: 24
  misc_feature: MA Experiment 20000437 PARAMETER Experiment Name: At_Drought_P Parameter: Tissue Value: Whole Plant
  misc_feature: MA Experiment 20000437 PARAMETER Experiment Name: At_Drought_P Parameter: Treatment Value: Drought vs. No Drought
  misc_feature: MA Experiment ID: 20000439 Result: Up-regulated in Transcription
  misc_feature: MA Experiment 20000439 PARAMETER Experiment Name: At_Roots__P Parameter: Age (day) Value: 14 vs. 21
  misc_feature: MA Experiment 20000439 PARAMETER Experiment Name: At_Roots__P Parameter: Organism Value: A. thaliana
  misc_feature: MA Experiment 20000439 PARAMETER Experiment Name: At_Roots__P Parameter: Tissue Value: Roots vs. Whole Plant
  misc_feature: MA Experiment ID: 20000495 Result: Up-regulated in Transcription
  misc_feature: MA Experiment 20000495 PARAMETER Experiment Name: At_Guard_Cells_P Parameter: Harvest Date Value: 8/2/2002
  misc_feature: MA Experiment 20000495 PARAMETER Experiment Name: At_Guard_Cells_P Parameter: Organism Value: A. thaliana
  misc_feature: MA Experiment 20000495 PARAMETER Experiment Name: At_Guard_Cells_P Parameter: Tissue Value: Guard Cells vs. Leaves
  misc_feature: MA Experiment ID: 20001905 Result: Up-regulated in Transcription
  misc_feature: MA Experiment 20001905 PARAMETER Experiment Name: At_Drought_Reproduction_P Parameter: Age (day) Value: 40
  misc_feature: MA Experiment 20001905 PARAMETER Experiment Name: At_Drought_Reproduction_P Parameter: Organism Value: A. thaliana
  misc_feature: MA Experiment 20001905 PARAMETER Experiment Name: At_Drought_Reproduction_P Parameter: Plant Line Value: WS
  misc_feature: MA Experiment 20001905 PARAMETER Experiment Name: At_Drought_Reproduction_P Parameter: Timepoint (day) Value: 10
  misc_feature: MA Experiment 20001905 PARAMETER Experiment Name: At_Drought_Reproduction_P Parameter: Tissue Value: Rosettes
  misc_feature: MA Experiment 20001905 PARAMETER Experiment Name: At_Drought_Reproduction_P Parameter: Treatment Value: Drought vs. No Drought
tatttgggttcgtctctgttaggttcgtgagggaggggttgatttagttgttgttgttaggatttggatcgattcttttcatggaagggtgtctcttattgatacccgtacgagaagattattctttagatttggattagagctaggttttttttgtttcaataggaaatgtctgttgctgatgttgctttaagcccgattcatagaggatcggcgtttgctgttggtggtttcggacaatcgacgacgacgcattactctgttaaatcggttttggtgttccttagtgtttctggttctacgatgcctatgctcatcttggagtctgattctattgctgaggttaaacttaggatccagacttgtaatggttttagggttagaagacagaaacttgttttcagtggtcgagagcttgccaggaatgcctcacgtgtgaaggactatggtgtgactggtggtagtgtgttgcatttggtgcttaagctctatgatcctttgcttgttactgtgattactacttgcggcaaggtctttcagtttcatgtggatcgtcgtagaaatgttgggtatttgaagaaacggatctctaaagagggtaaagggtttcctgaggttgatgatcaagagatcttgtttaaaggagagaagcttgatgacaacagaatcattgatgggatttgtaaagatggaaactctgtaatccatttgctggttaagaaatcggtggaagacacggtgaaaagagaagaagacactgctactggtaaagactccttgttagagccgttgttcttaaccccgatgtgaaattacctgaggttctcgaggatatgattgaccggacggttgatgggttgaacaaaggtagtccaccagtgagatcagctgaagggacaggagggacatatctgatgcaagattcttcaggtctcaactatgtatctgtgttcaagcctatggatgaagaaccaatggctgtgaacaatcctcagcagcttcctgtgtcatcagacggtcagggattgaagagaggaactagagtaggagaaggggcaacaagagaagttgcagcttacttgttagatcatccaaagagcggactaagatctgtgtctaaagaagttatgggttttgccggtgtgccaccaactgctatggtcagaagctcacacaaagtgtataactacccaaatgggttcagcatctgtgctacaaaagatgccaaagttggttctttgcaaatgttcatgaagaacaatggaagctgcgaagacatcggccctggagcgtttcctgttgaggaagtgcacaaaatctgtgtctttgacataagaatggcaaatgcagatcgacatgctggaaacatattgaccgggaaaagcgaagaaggaaaaactcttcttattcccatcgatcatggttattgtttgcccgagaattttgaagattgcacatttgagtggctctactggccgcaagcgaaactcccgttttctgcagacaccattgactacataaactctctagactccgaacaagacattgcgcttctgcaactccatggctggaatgttcctgaagctgtctcacgcaacctacgtatctccacgatgctgctgaagaaaggcgttgagagaaacctgacgccatatcaaataggaagcgtaatgtgcagagaaacggtgaacaaagactcagcgattgaagagatagtgagagaagctcataactcggtgttgcctgcgtcaagcgaggctacgtttcttgaagcagtatctgtggccatggatcgtcgtctggacgagctaactaagtaaccagtcttaagtacataataaagtttggttttatggtatgtatatgtatatgatgtaatgtatctattatgtttgttttcgttgagaaaaacgttgataggctcttcttggataattttttccttcc

SEQ ID NO: 42805 - protein, 328 aa, Arabidopsis thaliana
  peptide (1)..(328): Ceres Seq. ID no. 12562509
  misc_feature (22)..(283): Pfam Name: Phosphatidylinositol 3- and 4-kinase Pfam Description: Phosphatidylinositol 3- and 4-kinase
  misc_feature (9)..(309): Homolog of NCBI NO: 18395825 NR Description: expressed protein
  misc_feature (1)..(302): Homolog of NCBI NO: 25363315 NR Description: hypothetical protein At2g03890 [imported] -
  misc_feature (1)..(302): Homolog of NCBI NO: 18395629 NR Description: expressed protein
  misc_feature (1)..(308): Homolog of NCBI NO: 15226765 NR Description: hypothetical protein
  misc_feature (1)..(302): Homolog of NCBI NO: 32488384 NR Description: OSJNBa0043A12.14 [Oryza sativa (japonica
  misc_feature (1)..(328): Homolog of NCBI NO: 34904388 NR Description: unnamed protein product [Oryza sativa (japonica
  misc_feature (1)..(325): Homolog of NCBI NO: 15237921 NR Description: ubiquitin; protein id: At5g24240.1 [Arabidopsis
  misc_feature (28)..(328): Homolog of NCBI NO: 15217655 NR Description: unknown protein; protein id: At1g64460.1
  misc_feature (1)..(324): Homolog of NCBI NO: 18407090 NR Description: expressed protein
  misc_feature (22)..(328): Homolog of NCBI NO: 6633833 NR Description: F1N19.4 [Arabidopsis thaliana]
MIDRTVDGLNKGSPPVRSAEGTGGTYLMQDSSGLNYVSVFKPMDEEPMAVNNPQQLPVSSDGQGLKRGTRVGEGATREVAAYLLDHPKSGLRSVSKEVMGFAGVPPTAMVRSSHKVYNYPNGFSICATKDAKVGSLQMFMKNNGSCEDIGPGAFPVEEVHKICVFDIRMANADRHAGNILTGKSEEGKTLLIPIDHGYCLPENFEDCTFEWLYWPQAKLPFSADTIDYINSLDSEQDIALLQLHGWNVPEAVSRNLRISTMLLKKGVERNLTPYQIGSVMCRETVNKDSAIEEIVREAHNSVLPASSEATFLEAVSVAMDRRLDELTK

SEQ ID NO: 42806 - protein, 301 aa, Arabidopsis thaliana
  peptide (1)..(301): Ceres Seq. ID no. 12562510
  misc_feature (1)..(256): Pfam Name: Phosphatidylinositol 3- and 4-kinase Pfam Description: Phosphatidylinositol 3- and 4-kinase
  misc_feature (1)..(282): Homolog of NCBI NO: 18395825 NR Description: expressed protein
  misc_feature (1)..(275): Homolog of NCBI NO: 25363315 NR Description: hypothetical protein At2g03890 [imported] -
  misc_feature (1)..(275): Homolog of NCBI NO: 18395629 NR Description: expressed protein
  misc_feature (1)..(281): Homolog of NCBI NO: 15226765 NR Description: hypothetical protein
  misc_feature (1)..(275): Homolog of NCBI NO: 32488384 NR Description: OSJNBa0043A12.14 [Oryza sativa (japonica
  misc_feature (1)..(301): Homolog of NCBI NO: 34904388 NR Description: unnamed protein product [Oryza sativa (japonica
  misc_feature (1)..(298): Homolog of NCBI NO: 15237921 NR Description: ubiquitin; protein id: At5g24240.1 [Arabidopsis
  misc_feature (1)..(301): Homolog of NCBI NO: 15217655 NR Description: unknown protein; protein id: At1g64460.1
  misc_feature (1)..(297): Homolog of NCBI NO: 18407090 NR Description: expressed protein
  misc_feature (1)..(301): Homolog of NCBI NO: 6633833 NR Description: F1N19.4 [Arabidopsis thaliana]
MQDSSGLNYVSVFKPMDEEPMAVNNPQQLPVSSDGQGLKRGTRVGEGATREVAAYLLDHPKSGLRSVSKEVMGFAGVPPTAMVRSSHKVYNYPNGFSICATKDAKVGSLQMFMKNNGSCEDIGPGAFPVEEVHKICVFDIRMANADRHAGNILTGKSEEGKTLLIPIDHGYCLPENFEDCTFEWLYWPQAKLPFSADTIDYINSLDSEQDIALLQLHGWNVPEAVSRNLRISTMLLKKGVERNLTPYQIGSVMCRETVNKDSAIEEIVREAHNSVLPASSEATFLEAVSVAMDRRLDELTK

SEQ ID NO: 42807 - protein, 286 aa, Arabidopsis thaliana
  peptide (1)..(286): Ceres Seq. ID no. 12562511
  misc_feature (1)..(241): Pfam Name: Phosphatidylinositol 3- and 4-kinase Pfam Description: Phosphatidylinositol 3- and 4-kinase
  misc_feature (1)..(267): Homolog of NCBI NO: 18395825 NR Description: expressed protein
  misc_feature (1)..(260): Homolog of NCBI NO: 25363315 NR Description: hypothetical protein At2g03890 [imported] -
  misc_feature (1)..(260): Homolog of NCBI NO: 18395629 NR Description: expressed protein
  misc_feature (1)..(266): Homolog of NCBI NO: 15226765 NR Description: hypothetical protein
  misc_feature (1)..(260): Homolog of NCBI NO: 32488384 NR Description: OSJNBa0043A12.14 [Oryza sativa (japonica
  misc_feature (1)..(286): Homolog of NCBI NO: 34904388 NR Description: unnamed protein product [Oryza sativa (japonica
  misc_feature (1)..(283): Homolog of NCBI NO: 15237921 NR Description: ubiquitin; protein id: At5g24240.1 [Arabidopsis
  misc_feature (1)..(286): Homolog of NCBI NO: 15217655 NR Description: unknown protein; protein id: At1g64460.1
  misc_feature (1)..(282): Homolog of NCBI NO: 18407090 NR Description: expressed protein
  misc_feature (1)..(286): Homolog of NCBI NO: 6633833 NR Description: F1N19.4 [Arabidopsis thaliana]
MDEEPMAVNNPQQLPVSSDGQGLKRGTRVGEGATREVAAYLLDHPKSGLRSVSKEVMGFAGVPPTAMVRSSHKVYNYPNGFSICATKDAKVGSLQMFMKNNGSCEDIGPGAFPVEEVHKICVFDIRMANADRHAGNILTGKSEEGKTLLIPIDHGYCLPENFEDCTFEWLYWPQAKLPFSADTIDYINSLDSEQDIALLQLHGWNVPEAVSRNLRISTMLLKKGVERNLTPYQIGSVMCRETVNKDSAIEEIVREAHNSVLPASSEATFLEAVSVAMDRRLDELTK

SEQ ID NO: 42808 - DNA, 1328 bp, Arabidopsis thaliana
  misc_feature (1)..(1328): Ceres Seq. ID no. 12370857
  misc_feature: MA Experiment ID: 108434 Result: Down-regulated in Transcription
  misc_feature: MA Experiment 108434 PARAMETER Experiment Name: At_Root_Tips_cDNA_P Parameter: Tissue Value: Root Tips
  misc_feature: MA Experiment ID: 108573 Result: Up-regulated in Transcription
  misc_feature: MA Experiment 108573 PARAMETER Experiment Name: At_Drought_cDNA_P Parameter: Timepoint (hr) Value: 6
  misc_feature: MA Experiment 108573 PARAMETER Experiment Name: At_Drought_cDNA_P Parameter: Tissue Value: Aerial
  misc_feature: MA Experiment 108573 PARAMETER Experiment Name: At_Drought_cDNA_P Parameter: Treatment Value: Drought vs. No Drought
  misc_feature: MA Experiment ID: 108595 Result: Up-regulated in Transcription
  misc_feature: MA Experiment 108595 PARAMETER Experiment Name: At_Ler-pi_Ovule_cDNA_P Parameter: Plant Line Value: null
  misc_feature: MA Experiment ID: 108668 Result: Up-regulated in Transcription
  misc_feature: MA Experiment 108668 PARAMETER Experiment Name: At_2mM_SA_cDNA_P Parameter: Plant Line Value: WS
  misc_feature: MA Experiment 108668 PARAMETER Experiment Name: At_2mM_SA_cDNA_P Parameter: Timepoint (hr) Value: 6
  misc_feature: MA Experiment 108668 PARAMETER Experiment Name: At_2mM_SA_cDNA_P Parameter: Treatment Value: 2mM SA vs. No Treatment
  misc_feature: MA Experiment ID: 20000182 Result: Up-regulated in Transcription
  misc_feature: MA Experiment 20000182 PARAMETER Experiment Name: At_2mM_SA_P Parameter: Age (day) Value: 14
  misc_feature: MA Experiment 20000182 PARAMETER Experiment Name: At_2mM_SA_P Parameter: Organism Value: A. thaliana
  misc_feature: MA Experiment 20000182 PARAMETER Experiment Name: At_2mM_SA_P Parameter: Plant Line Value: WS
  misc_feature: MA Experiment 20000182 PARAMETER Experiment Name: At_2mM_SA_P Parameter: Timepoint (hr) Value: 6
  misc_feature: MA Experiment 20000182 PARAMETER Experiment Name: At_2mM_SA_P Parameter: Tissue Value: Aerial
  misc_feature: MA Experiment 20000182 PARAMETER Experiment Name: At_2mM_SA_P Parameter: Treatment Value: 2mM SA vs. No Treatment
  misc_feature: MA Experiment ID: 20000227 Result: Up-regulated in Transcription
  misc_feature: MA Experiment 20000227 PARAMETER Experiment Name: At_Root-Tips-vs-Tops_P Parameter: Tissue Value: Root Tips vs. Root Tops
  misc_feature: MA Experiment ID: 20000265 Result: Up-regulated in Transcription
  misc_feature: MA Experiment 20000265 PARAMETER Experiment Name: At_Open_Flower_P Parameter: Age (day) Value: 21
  misc_feature: MA Experiment 20000265 PARAMETER Experiment Name: At_Open_Flower_P Parameter: Plant Line Value: WS
  misc_feature: MA Experiment 20000265 PARAMETER Experiment Name: At_Open_Flower_P Parameter: Tissue Value: Closed Flower vs. Whole Plant
  misc_feature: MA Experiment ID: 20000437 Result: Up-regulated in Transcription
  misc_feature: MA Experiment 20000437 PARAMETER Experiment Name: At_Drought_P Parameter: Age (day) Value: 8
  misc_feature: MA Experiment 20000437 PARAMETER Experiment Name: At_Drought_P Parameter: Organism Value: A. thaliana
  misc_feature: MA Experiment 20000437 PARAMETER Experiment Name: At_Drought_P Parameter: Plant Line Value: WS
  misc_feature: MA Experiment 20000437 PARAMETER Experiment Name: At_Drought_P Parameter: Timepoint (hr) Value: 24
  misc_feature: MA Experiment 20000437 PARAMETER Experiment Name: At_Drought_P Parameter: Tissue Value: Whole Plant
  misc_feature: MA Experiment 20000437 PARAMETER Experiment Name: At_Drought_P Parameter: Treatment Value: Drought vs. No Drought
  misc_feature: MA Experiment ID: 20000438 Result: Down-regulated in Transcription
  misc_feature: MA Experiment 20000438 PARAMETER Experiment Name: At_Shoots__P Parameter: Age (day) Value: 14
  misc_feature: MA Experiment 20000438 PARAMETER Experiment Name: At_Shoots__P Parameter: Tissue Value: Shoots vs. Whole Plant
  misc_feature: MA Experiment ID: 20000453 Result: Up-regulated in Transcription
  misc_feature: MA Experiment 20000453 PARAMETER Experiment Name: At_100uM_ABA_P Parameter: Age (day) Value: 15
  misc_feature: MA Experiment 20000453 PARAMETER Experiment Name: At_100uM_ABA_P Parameter: Organism Value: A. thaliana
  misc_feature: MA Experiment 20000453 PARAMETER Experiment Name: At_100uM_ABA_P Parameter: Plant Line Value: WS
  misc_feature: MA Experiment 20000453 PARAMETER Experiment Name: At_100uM_ABA_P Parameter: Timepoint (hr) Value: 24
  misc_feature: MA Experiment 20000453 PARAMETER Experiment Name: At_100uM_ABA_P Parameter: Tissue Value: Aerial
  misc_feature: MA Experiment 20000453 PARAMETER Experiment Name: At_100uM_ABA_P Parameter: Treatment Value: 100uM ABA vs. No Treatment
  misc_feature: MA Experiment ID: 20000495 Result: Down-regulated in Transcription
  misc_feature: MA Experiment 20000495 PARAMETER Experiment Name: At_Guard_Cells_P Parameter: Harvest Date Value: 8/2/2002
  misc_feature: MA Experiment 20000495 PARAMETER Experiment Name: At_Guard_Cells_P Parameter: Organism Value: A. thaliana
  misc_feature: MA Experiment 20000495 PARAMETER Experiment Name: At_Guard_Cells_P Parameter: Tissue Value: Guard Cells vs. Leaves
  misc_feature: MA Experiment ID: 20001557 Result: Up-regulated in Transcription
  misc_feature: MA Experiment 20001557 PARAMETER Experiment Name: At_Drought_Soil_Dry_P Parameter: Age (day) Value: 27
  misc_feature: MA Experiment 20001557 PARAMETER Experiment Name: At_Drought_Soil_Dry_P Parameter: Organism Value: A. thaliana
  misc_feature: MA Experiment 20001557 PARAMETER Experiment Name: At_Drought_Soil_Dry_P Parameter: Plant Line Value: WS
  misc_feature: MA Experiment 20001557 PARAMETER Experiment Name: At_Drought_Soil_Dry_P Parameter: Post Timepoint (hr) Value: 3
  misc_feature: MA Experiment 20001557 PARAMETER Experiment Name: At_Drought_Soil_Dry_P Parameter: Post-Treatment Value: Re-Water vs. No Drought
  misc_feature: MA Experiment 20001557 PARAMETER Experiment Name: At_Drought_Soil_Dry_P Parameter: Timepoint (day) Value: 13
  misc_feature: MA Experiment 20001557 PARAMETER Experiment Name: At_Drought_Soil_Dry_P Parameter: Treatment Value: Drought vs. No Drought
  misc_feature: MA Experiment ID: 20001904 Result: Up-regulated in Transcription
  misc_feature: MA Experiment 20001904 PARAMETER Experiment Name: At_Drought_Reproduction_P Parameter: Age (day) Value: 37
  misc_feature: MA Experiment 20001904 PARAMETER Experiment Name: At_Drought_Reproduction_P Parameter: Organism Value: A. thaliana
  misc_feature: MA Experiment 20001904 PARAMETER Experiment Name: At_Drought_Reproduction_P Parameter: Plant Line Value: WS
  misc_feature: MA Experiment 20001904 PARAMETER Experiment Name: At_Drought_Reproduction_P Parameter: Timepoint (day) Value: 7
  misc_feature: MA Experiment 20001904 PARAMETER Experiment Name: At_Drought_Reproduction_P Parameter: Tissue Value: Rosettes
  misc_feature: MA Experiment 20001904 PARAMETER Experiment Name: At_Drought_Reproduction_P Parameter: Treatment Value: Drought vs. No Drought
  misc_feature: MA Experiment ID: 20001905 Result: Up-regulated in Transcription
  misc_feature: MA Experiment 20001905 PARAMETER Experiment Name: At_Drought_Reproduction_P Parameter: Age (day) Value: 40
  misc_feature: MA Experiment 20001905 PARAMETER Experiment Name: At_Drought_Reproduction_P Parameter: Organism Value: A. thaliana
  misc_feature: MA Experiment 20001905 PARAMETER Experiment Name: At_Drought_Reproduction_P Parameter: Plant Line Value: WS
  misc_feature: MA Experiment 20001905 PARAMETER Experiment Name: At_Drought_Reproduction_P Parameter: Timepoint (day) Value: 10
  misc_feature: MA Experiment 20001905 PARAMETER Experiment Name: At_Drought_Reproduction_P Parameter: Tissue Value: Rosettes
  misc_feature: MA Experiment 20001905 PARAMETER Experiment Name: At_Drought_Reproduction_P Parameter: Treatment Value: Drought vs. No Drought
  misc_feature: MA Experiment ID: 20001906 Result: Up-regulated in Transcription
  misc_feature: MA Experiment 20001906 PARAMETER Experiment Name: At_Drought_Reproduction_P Parameter: Age (day) Value: 35
  misc_feature: MA Experiment 20001906 PARAMETER Experiment Name: At_Drought_Reproduction_P Parameter: Organism Value: A. thaliana
  misc_feature: MA Experiment 20001906 PARAMETER Experiment Name: At_Drought_Reproduction_P Parameter: Plant Line Value: WS
  misc_feature: MA Experiment 20001906 PARAMETER Experiment Name: At_Drought_Reproduction_P Parameter: Timepoint (day) Value: 5
  misc_feature: MA Experiment 20001906 PARAMETER Experiment Name: At_Drought_Reproduction_P Parameter: Tissue Value: Siliques
  misc_feature: MA Experiment 20001906 PARAMETER Experiment Name: At_Drought_Reproduction_P Parameter: Treatment Value: Drought vs. No Drought
  misc_feature: MA Experiment ID: 20001908 Result: Up-regulated in Transcription
  misc_feature: MA Experiment 20001908 PARAMETER Experiment Name: At_Drought_Reproduction_P Parameter: Age (day) Value: 40
  misc_feature: MA Experiment 20001908 PARAMETER Experiment Name: At_Drought_Reproduction_P Parameter: Organism Value: A. thaliana
  misc_feature: MA Experiment 20001908 PARAMETER Experiment Name: At_Drought_Reproduction_P Parameter: Plant Line Value: WS
  misc_feature: MA Experiment 20001908 PARAMETER Experiment Name: At_Drought_Reproduction_P Parameter: Timepoint (day) Value: 10
  misc_feature: MA Experiment 20001908 PARAMETER Experiment Name: At_Drought_Reproduction_P Parameter: Tissue Value: Siliques
  misc_feature: MA Experiment 20001908 PARAMETER Experiment Name: At_Drought_Reproduction_P Parameter: Treatment Value: Drought vs. No Drought
  misc_feature: MA Experiment ID: 20001911 Result: Up-regulated in Transcription
  misc_feature: MA Experiment 20001911 PARAMETER Experiment Name: At_Drought_Reproduction_P Parameter: Age (day) Value: 40
  misc_feature: MA Experiment 20001911 PARAMETER Experiment Name: At_Drought_Reproduction_P Parameter: Organism Value: A. thaliana
  misc_feature: MA Experiment 20001911 PARAMETER Experiment Name: At_Drought_Reproduction_P Parameter: Plant Line Value: WS
  misc_feature: MA Experiment 20001911 PARAMETER Experiment Name: At_Drought_Reproduction_P Parameter: Timepoint (day) Value: 10
  misc_feature: MA Experiment 20001911 PARAMETER Experiment Name: At_Drought_Reproduction_P Parameter: Tissue Value: Flowers
  misc_feature: MA Experiment 20001911 PARAMETER Experiment Name: At_Drought_Reproduction_P Parameter: Treatment Value: Drought vs. No Drought
aaaaaaaccgtaaactcttgcgcgtcgtataaaacaacaaacctgaactagaatcgagagatattgttgcccccatttacatttctgcacgatcatcatcatggtgaaagagactgaatactacgagatcttaggcgtcaaaactgatgcttcagatgctgagattaaaaaggcttactacttaaaagcaaggaaagttcatccagacaagaaccctggagaccctcaagctgctaaaaactttcaggttttaggtgaggcttatcaggttctaagcaatccggataagcgagcagcttatgacaaatatggcaaagaaggggtccaacaggatgcaatggttgatcctgcagctgtatttggtatgcttttcggaagcgaagtctttgaagaatacgttggccagcttgcacttgcttatttggcatctatcgaagctgacttagaatcacatgaccctgaaatcagaaagcaaatgcttcaagacaagatcaaagctcttcaaaaggagagggaagacaagctcgccgctacattgaaaaacaaacttgaaccctttgtggaaagacaaacagatgaatttatcgaatgggcaaacgaagaggcaaagcggctttcttctgccggttttggcgaggcaatgatgcatactattggttacatttacacaagaaaagctgctaaagaaatcgggaaagacaagcgatatatgaaagtaccattcttagctgaatgggtgcgtgacaaaggccaccatatgaaatctcaagtgatggctgcttctggtgcggtttcgttacttcagctgcaggatgaagtaaacaagttgaatgaacaccaaggagagaacaaagaggaacatattcagaaagctattgaagctaaaatggatgctttgcttcaatctctttggcaaatcaatgttctcgacatcgaatccacgctatctcgtgtttgccaatctgtgcttaaagatccaagtgtttcgaaggatgttcttcgagctcgtgccataggactgaagaaacttggaacgatcttccagggtgctaagaagccgtacacgagaggaagcagcttgcgtcgggaagccaccaccgtgaaaatggacaccggaggttcttcaaaggcgacgtcttgaaactccggaacttaaaatgctgtttcttttattggttgaagttggatttgtccttcgttttttactttccccagttttgtagagattgctttctatgttaacttttttctcgtgtagatgttacatttaaggtggtgcattactgcattctcattaaaatcttttcgtcacattattcaaatttctc

SEQ ID NO: 42809 - protein, 346 aa, Arabidopsis thaliana
  peptide (1)..(346): Ceres Seq. ID no. 12370858
  misc_feature (6)..(71): Pfam Name: DnaJ domain Pfam Description: DnaJ domain
  misc_feature (1)..(346): Homolog of NCBI NO: 30699227 NR Description: DnaJ protein family [Arabidopsis thaliana]
  misc_feature (1)..(318): Homolog of NCBI NO: 18394951 NR Description: expressed protein
  misc_feature (230)..(315): Homolog of NCBI NO: 25458468 NR Description: dnaJ-like protein [imported] - rice
  misc_feature (1)..(199): Homolog of NCBI NO: 25458468 NR Description: dnaJ-like protein [imported] - rice
  misc_feature (1)..(318): Homolog of NCBI NO: 26449747 NR Description: putative DnaJ protein [Arabidopsis thaliana]
  misc_feature (1)..(318): Homolog of NCBI NO: 15223142 NR Description: putative DnaJ protein; protein id: At1g76700.1
  misc_feature (1)..(133): Homolog of NCBI NO: 27817868 NR Description: OJ1081_B12.17 [Oryza sativa (japonica
  misc_feature (133)..(346): Homolog of NCBI NO: 27817868 NR Description: OJ1081_B12.17 [Oryza sativa (japonica
  misc_feature (1)..(343): Homolog of NCBI NO: 15234962 NR Description: dnaJ-like protein
  misc_feature (1)..(346): Homolog of NCBI NO: 15226572 NR Description: putative DnaJ protein
MVKETEYYEILGVKTDASDAEIKKAYYLKARKVHPDKNPGDPQAAKNFQVLGEAYQVLSNPDKRAAYDKYGKEGVQQDAMVDPAAVFGMLFGSEVFEEYVGQLALAYLASIEADLESHDPEIRKQMLQDKIKALQKEREDKLAATLKNKLEPFVERQTDEFIEWANEEAKRLSSAGFGEAMMHTIGYIYTRKAAKEIGKDKRYMKVPFLAEWVRDKGHHMKSQVMAASGAVSLLQLQDEVNKLNEHQGENKEEHIQKAIEAKMDALLQSLWQINVLDIESTLSRVCQSVLKDPSVSKDVLRARAIGLKKLGTIFQGAKKPYTRGSSLRREATTVKMDTGGSSKATS

SEQ ID NO: 42810 - protein, 267 aa, Arabidopsis thaliana
  peptide (1)..(267): Ceres Seq. ID no. 12370859
  misc_feature (1)..(267): Homolog of NCBI NO: 30699227 NR Description: DnaJ protein family [Arabidopsis thaliana]
  misc_feature (1)..(239): Homolog of NCBI NO: 18394951 NR Description: expressed protein
  misc_feature (151)..(236): Homolog of NCBI NO: 25458468 NR Description: dnaJ-like protein [imported] - rice
  misc_feature (1)..(120): Homolog of NCBI NO: 25458468 NR Description: dnaJ-like protein [imported] - rice
  misc_feature (1)..(239): Homolog of NCBI NO: 26449747 NR Description: putative DnaJ protein [Arabidopsis thaliana]
  misc_feature (1)..(239): Homolog of NCBI NO: 15223142 NR Description: putative DnaJ protein; protein id: At1g76700.1
  misc_feature (1)..(54): Homolog of NCBI NO: 27817868 NR Description: OJ1081_B12.17 [Oryza sativa (japonica
  misc_feature (54)..(267): Homolog of NCBI NO: 27817868 NR Description: OJ1081_B12.17 [Oryza sativa (japonica
  misc_feature (1)..(264): Homolog of NCBI NO: 15234962 NR Description: dnaJ-like protein
  misc_feature (1)..(267): Homolog of NCBI NO: 15226572 NR Description: putative DnaJ protein
MVDPAAVFGMLFGSEVFEEYVGQLALAYLASIEADLESHDPEIRKQMLQDKIKALQKEREDKLAATLKNKLEPFVERQTDEFIEWANEEAKRLSSAGFGEAMMHTIGYIYTRKAAKEIGKDKRYMKVPFLAEWVRDKGHHMKSQVMAASGAVSLLQLQDEVNKLNEHQGENKEEHIQKAIEAKMDALLQSLWQINVLDIESTLSRVCQSVLKDPSVSKDVLRARAIGLKKLGTIFQGAKKPYTRGSSLRREATTVKMDTGGSSKATS

SEQ ID NO: 42811 - protein, 258 aa, Arabidopsis thaliana
  peptide (1)..(258): Ceres Seq. ID no. 12370860
  misc_feature (1)..(258): Homolog of NCBI NO: 30699227 NR Description: DnaJ protein family [Arabidopsis thaliana]
  misc_feature (1)..(230): Homolog of NCBI NO: 18394951 NR Description: expressed protein
  misc_feature (142)..(227): Homolog of NCBI NO: 25458468 NR Description: dnaJ-like protein [imported] - rice
  misc_feature (1)..(111): Homolog of NCBI NO: 25458468 NR Description: dnaJ-like protein [imported] - rice
  misc_feature (1)..(230): Homolog of NCBI NO: 26449747 NR Description: putative DnaJ protein [Arabidopsis thaliana]
  misc_feature (1)..(230): Homolog of NCBI NO: 15223142 NR Description: putative DnaJ protein; protein id: At1g76700.1
  misc_feature (1)..(45): Homolog of NCBI NO: 27817868 NR Description: OJ1081_B12.17 [Oryza sativa (japonica
  misc_feature (45)..(258): Homolog of NCBI NO: 27817868 NR Description: OJ1081_B12.17 [Oryza sativa (japonica
  misc_feature (1)..(255): Homolog of NCBI NO: 15234962 NR Description: dnaJ-like protein
  misc_feature (1)..(258): Homolog of NCBI NO: 15226572 NR Description: putative DnaJ protein
MLFGSEVFEEYVGQLALAYLASIEADLESHDPEIRKQMLQDKIKALQKEREDKLAATLKNKLEPFVERQTDEFIEWANEEAKRLSSAGFGEAMMHTIGYIYTRKAAKEIGKDKRYMKVPFLAEWVRDKGHHMKSQVMAASGAVSLLQLQDEVNKLNEHQGENKEEHIQKAIEAKMDALLQSLWQINVLDIESTLSRVCQSVLKDPSVSKDVLRARAIGLKKLGTIFQGAKKPYTRGSSLRREATTVKMDTGGSSKATS

SEQ ID NO: 42812 - DNA, 1183 bp, Arabidopsis thaliana; identical to SEQ ID NO: 36985
  misc_feature (1)..(1183): Ceres Seq. ID no. 12482638
  misc_feature: MA Experiment ID: 108461 Result: Up-regulated in Transcription
  misc_feature: MA Experiment 108461 PARAMETER Experiment Name: At_Germinating_Seeds_cDNA_P Parameter: Age (day) Value: 1 vs. 0
  misc_feature: MA Experiment 108461 PARAMETER Experiment Name: At_Germinating_Seeds_cDNA_P Parameter: Tissue Value: Germinating Seeds
  misc_feature: MA Experiment ID: 108462 Result: Up-regulated in Transcription
  misc_feature: MA Experiment 108462 PARAMETER Experiment Name: At_Germinating_Seeds_cDNA_P Parameter: Age (day) Value: 2 vs. 0
  misc_feature: MA Experiment 108462 PARAMETER Experiment Name: At_Germinating_Seeds_cDNA_P Parameter: Tissue Value: Germinating Seeds
  misc_feature: MA Experiment ID: 108579 Result: Up-regulated in Transcription
  misc_feature: MA Experiment 108579 PARAMETER Experiment Name: At_4deg_Cold_cDNA_P Parameter: Temperature (deg C) Value: 4 vs. 22
  misc_feature: MA Experiment 108579 PARAMETER Experiment Name: At_4deg_Cold_cDNA_P Parameter: Timepoint (hr) Value: 6
  misc_feature: MA Experiment 108579 PARAMETER Experiment Name: At_4deg_Cold_cDNA_P Parameter: Tissue Value: Aerial
  misc_feature: MA Experiment ID: 108595 Result: Down-regulated in Transcription
  misc_feature: MA Experiment 108595 PARAMETER Experiment Name: At_Ler-pi_Ovule_cDNA_P Parameter: Plant Line Value: null
  misc_feature: MA Experiment ID: 20000180 Result: Up-regulated in Transcription
  misc_feature: MA Experiment 20000180 PARAMETER Experiment Name: At_Germinating_Seeds_P Parameter: Age (hr) Value: 24 vs. 0
  misc_feature: MA Experiment 20000180 PARAMETER Experiment Name: At_Germinating_Seeds_P Parameter: Tissue Value: Germinating Seeds
  misc_feature: MA Experiment ID: 20000185 Result: Down-regulated in Transcription
  misc_feature: MA Experiment 20000185 PARAMETER Experiment Name: At_Roots__P Parameter: Age (day) Value: 7 vs. 21
  misc_feature: MA Experiment 20000185 PARAMETER Experiment Name: At_Roots__P Parameter: Organism Value: A. thaliana
  misc_feature: MA Experiment 20000185 PARAMETER Experiment Name: At_Roots__P Parameter: Tissue Value: Roots vs. Whole Plant
  misc_feature: MA Experiment ID: 20000439 Result: Down-regulated in Transcription
  misc_feature: MA Experiment 20000439 PARAMETER Experiment Name: At_Roots__P Parameter: Age (day) Value: 14 vs. 21
  misc_feature: MA Experiment 20000439 PARAMETER Experiment Name: At_Roots__P Parameter: Organism Value: A. thaliana
  misc_feature: MA Experiment 20000439 PARAMETER Experiment Name: At_Roots__P Parameter: Tissue Value: Roots vs. Whole Plant
  misc_feature: MA Experiment ID: 20001247 Result: Up-regulated in Transcription
  misc_feature: MA Experiment 20001247 PARAMETER Experiment Name: At_Far-red-induction_P Parameter: Age (day) Value: 7
  misc_feature: MA Experiment 20001247 PARAMETER Experiment Name: At_Far-red-induction_P Parameter: Light Value: Far-red vs. White
  misc_feature: MA Experiment 20001247 PARAMETER Experiment Name: At_Far-red-induction_P Parameter: Organism Value: A. thaliana
  misc_feature: MA Experiment 20001247 PARAMETER Experiment Name: At_Far-red-induction_P Parameter: Plant Line Value: Columbia
  misc_feature: MA Experiment 20001247 PARAMETER Experiment Name: At_Far-red-induction_P Parameter: Timepoint (hr) Value: 1
  misc_feature: MA Experiment 20001247 PARAMETER Experiment Name: At_Far-red-induction_P Parameter: Tissue Value: Whole Plant
  misc_feature: MA Experiment ID: 20001905 Result: Down-regulated in Transcription
  misc_feature: MA Experiment 20001905 PARAMETER Experiment Name: At_Drought_Reproduction_P Parameter: Age (day) Value: 40
  misc_feature: MA Experiment 20001905 PARAMETER Experiment Name: At_Drought_Reproduction_P Parameter: Organism Value: A. thaliana
  misc_feature: MA Experiment 20001905 PARAMETER Experiment Name: At_Drought_Reproduction_P Parameter: Plant Line Value: WS
  misc_feature: MA Experiment 20001905 PARAMETER Experiment Name: At_Drought_Reproduction_P Parameter: Timepoint (day) Value: 10
  misc_feature: MA Experiment 20001905 PARAMETER Experiment Name: At_Drought_Reproduction_P Parameter: Tissue Value: Rosettes
  misc_feature: MA Experiment 20001905 PARAMETER Experiment Name: At_Drought_Reproduction_P Parameter: Treatment Value: Drought vs. No Drought
  misc_feature: MA Experiment ID: 20001906 Result: Down-regulated in Transcription
  misc_feature: MA Experiment 20001906 PARAMETER Experiment Name: At_Drought_Reproduction_P Parameter: Age (day) Value: 35
  misc_feature: MA Experiment 20001906 PARAMETER Experiment Name: At_Drought_Reproduction_P Parameter: Organism Value: A. thaliana
  misc_feature: MA Experiment 20001906 PARAMETER Experiment Name: At_Drought_Reproduction_P Parameter: Plant Line Value: WS
  misc_feature: MA Experiment 20001906 PARAMETER Experiment Name: At_Drought_Reproduction_P Parameter: Timepoint (day) Value: 5
  misc_feature: MA Experiment 20001906 PARAMETER Experiment Name: At_Drought_Reproduction_P Parameter: Tissue Value: Siliques
  misc_feature: MA Experiment 20001906 PARAMETER Experiment Name: At_Drought_Reproduction_P Parameter: Treatment Value: Drought vs. No Drought
  misc_feature: MA Experiment ID: 20001908 Result: Down-regulated in Transcription
  misc_feature: MA Experiment 20001908 PARAMETER Experiment Name: At_Drought_Reproduction_P Parameter: Age (day) Value: 40
  misc_feature: MA Experiment 20001908 PARAMETER Experiment Name: At_Drought_Reproduction_P Parameter: Organism Value: A. thaliana
  misc_feature: MA Experiment 20001908 PARAMETER Experiment Name: At_Drought_Reproduction_P Parameter: Plant Line Value: WS
  misc_feature: MA Experiment 20001908 PARAMETER Experiment Name: At_Drought_Reproduction_P Parameter: Timepoint (day) Value: 10
  misc_feature: MA Experiment 20001908 PARAMETER Experiment Name: At_Drought_Reproduction_P Parameter: Tissue Value: Siliques
  misc_feature: MA Experiment 20001908 PARAMETER Experiment Name: At_Drought_Reproduction_P Parameter: Treatment Value: Drought vs. No Drought
  misc_feature: MA Experiment ID: 20001911 Result: Down-regulated in Transcription
  misc_feature: MA Experiment 20001911 PARAMETER Experiment Name: At_Drought_Reproduction_P Parameter: Age (day) Value: 40
  misc_feature: MA Experiment 20001911 PARAMETER Experiment Name: At_Drought_Reproduction_P Parameter: Organism Value: A. thaliana
  misc_feature: MA Experiment 20001911 PARAMETER Experiment Name: At_Drought_Reproduction_P Parameter: Plant Line Value: WS
  misc_feature: MA Experiment 20001911 PARAMETER Experiment Name: At_Drought_Reproduction_P Parameter: Timepoint (day) Value: 10
  misc_feature: MA Experiment 20001911 PARAMETER Experiment Name: At_Drought_Reproduction_P Parameter: Tissue Value: Flowers
  misc_feature: MA Experiment 20001911 PARAMETER Experiment Name: At_Drought_Reproduction_P Parameter: Treatment Value: Drought vs. No Drought

SEQ ID NO: 42813 - protein, 329 aa, Arabidopsis thaliana; identical to SEQ ID NO: 36986
  peptide (1)..(329): Ceres Seq. ID no. 12482639
  misc_feature (1)..(316): Homolog of NCBI NO: 9759321 NR Description: gb|AAF00670.1~gene_id:MBL20.11~strong similarity
  misc_feature (1)..(318): Homolog of NCBI NO: 15228743 NR Description: putative protein
  misc_feature (1)..(318): Homolog of NCBI NO: 21592371 NR Description: unknown [Arabidopsis thaliana]
  misc_feature (1)..(318): Homolog of NCBI NO: 15242021 NR Description: putative protein
  misc_feature (1)..(322): Homolog of NCBI NO: 15239856 NR Description: putative protein; protein id: At5g49340.1
  misc_feature (1)..(316): Homolog of NCBI NO: 22330347 NR Description: hypothetical protein
  misc_feature (1)..(328): Homolog of NCBI NO: 15229945 NR Description: hypothetical protein; protein id: At3g12060.1
  misc_feature (39)..(329): Homolog of NCBI NO: 18415287 NR Description: putative protein
  misc_feature (1)..(329): Homolog of NCBI NO: 21618305 NR Description: unknown [Arabidopsis thaliana]
  misc_feature (1)..(329): Homolog of NCBI NO: 9759298 NR Description: emb|CAB82953.1~gene_id:MPH15.5~strong similarity
  misc_feature (1)..(316): Homolog of NCBI NO: 9759321 NR Description: gb|AAF00670.1~gene_id:MBL20.11~strong similarity
  misc_feature (1)..(318): Homolog of NCBI NO: 15228743 NR Description: putative protein
  misc_feature (1)..(318): Homolog of NCBI NO: 21592371 NR Description: unknown [Arabidopsis thaliana]
  misc_feature (1)..(318): Homolog of NCBI NO: 15242021 NR Description: putative protein
  misc_feature (1)..(322): Homolog of NCBI NO: 15239856 NR Description: putative protein; protein id: At5g49340.1
  misc_feature (1)..(316): Homolog of NCBI NO: 22330347 NR Description: hypothetical protein
  misc_feature (1)..(328): Homolog of NCBI NO: 15229945 NR Description: hypothetical protein; protein id: At3g12060.1
  misc_feature (39)..(329): Homolog of NCBI NO: 18415287 NR Description: putative protein
  misc_feature (1)..(329): Homolog of NCBI NO: 21618305 NR Description: unknown [Arabidopsis thaliana]
  misc_feature (1)..(329): Homolog of NCBI NO: 9759298 NR Description: emb|CAB82953.1~gene_id:MPH15.5~strong similarity

SEQ ID NO: 42814 - protein, 291 aa, Arabidopsis thaliana; identical to SEQ ID NO: 36987
  peptide (1)..(291): Ceres Seq. ID no. 12482640
  misc_feature (1)..(278): Homolog of NCBI NO: 9759321 NR Description: gb|AAF00670.1~gene_id:MBL20.11~strong similarity
  misc_feature (1)..(280): Homolog of NCBI NO: 15228743 NR Description: putative protein
  misc_feature (1)..(280): Homolog of NCBI NO: 21592371 NR Description: unknown [Arabidopsis thaliana]
  misc_feature (1)..(280): Homolog of NCBI NO: 15242021 NR Description: putative protein
  misc_feature (1)..(284): Homolog of NCBI NO: 15239856 NR Description: putative protein; protein id: At5g49340.1
  misc_feature (1)..(278): Homolog of NCBI NO: 22330347 NR Description: hypothetical protein
  misc_feature (1)..(290): Homolog of NCBI NO: 15229945 NR Description: hypothetical protein; protein id: At3g12060.1
  misc_feature (1)..(291): Homolog of NCBI NO: 18415287 NR Description: putative protein
  misc_feature (1)..(291): Homolog of NCBI NO: 21618305 NR Description: unknown [Arabidopsis thaliana]
  misc_feature (1)..(291): Homolog of NCBI NO: 9759298 NR Description: emb|CAB82953.1~gene_id:MPH15.5~strong similarity
  misc_feature (1)..(278): Homolog of NCBI NO: 9759321 NR Description: gb|AAF00670.1~gene_id:MBL20.11~strong similarity
  misc_feature (1)..(280): Homolog of NCBI NO: 15228743 NR Description: putative protein
  misc_feature (1)..(280): Homolog of NCBI NO: 21592371 NR Description: unknown [Arabidopsis thaliana]
  misc_feature (1)..(280): Homolog of NCBI NO: 15242021 NR Description: putative protein
  misc_feature (1)..(284): Homolog of NCBI NO: 15239856 NR Description: putative protein; protein id: At5g49340.1
  misc_feature (1)..(278): Homolog of NCBI NO: 22330347 NR Description: hypothetical protein
  misc_feature (1)..(290): Homolog of NCBI NO: 15229945 NR Description: hypothetical protein; protein id: At3g12060.1
  misc_feature (1)..(291): Homolog of NCBI NO: 18415287 NR Description: putative protein
  misc_feature (1)..(291): Homolog of NCBI NO: 21618305 NR Description: unknown [Arabidopsis thaliana]
  misc_feature (1)..(291): Homolog of NCBI NO: 9759298 NR Description: emb|CAB82953.1~gene_id:MPH15.5~strong similarity

SEQ ID NO: 42815 - protein, 274 aa, Arabidopsis thaliana; identical to SEQ ID NO: 36988
  peptide (1)..(274): Ceres Seq. ID no. 12482641
  misc_feature (1)..(261): Homolog of NCBI NO: 9759321 NR Description: gb|AAF00670.1~gene_id:MBL20.11~strong similarity
  misc_feature (1)..(263): Homolog of NCBI NO: 15228743 NR Description: putative protein
  misc_feature (1)..(263): Homolog of NCBI NO: 21592371 NR Description: unknown [Arabidopsis thaliana]
  misc_feature (1)..(263): Homolog of NCBI NO: 15242021 NR Description: putative protein
  misc_feature (1)..(267): Homolog of NCBI NO: 15239856 NR Description: putative protein; protein id: At5g49340.1
  misc_feature (1)..(261): Homolog of NCBI NO: 22330347 NR Description: hypothetical protein
  misc_feature (1)..(273): Homolog of NCBI NO: 15229945 NR Description: hypothetical protein; protein id: At3g12060.1
  misc_feature (1)..(274): Homolog of NCBI NO: 18415287 NR Description: putative protein
  misc_feature (1)..(274): Homolog of NCBI NO: 21618305 NR Description: unknown [Arabidopsis thaliana]
  misc_feature (1)..(274): Homolog of NCBI NO: 9759298 NR Description: emb|CAB82953.1~gene_id:MPH15.5~strong similarity
  misc_feature (1)..(261): Homolog of NCBI NO: 9759321 NR Description: gb|AAF00670.1~gene_id:MBL20.11~strong similarity
  misc_feature (1)..(263): Homolog of NCBI NO: 15228743 NR Description: putative protein
  misc_feature (1)..(263): Homolog of NCBI NO: 21592371 NR Description: unknown [Arabidopsis thaliana]
  misc_feature (1)..(263): Homolog of NCBI NO: 15242021 NR Description: putative protein
  misc_feature (1)..(267): Homolog of NCBI NO: 15239856 NR Description: putative protein; protein id: At5g49340.1
  misc_feature (1)..(261): Homolog of NCBI NO: 22330347 NR Description: hypothetical protein
  misc_feature (1)..(273): Homolog of NCBI NO: 15229945 NR Description: hypothetical protein; protein id: At3g12060.1
  misc_feature (1)..(274): Homolog of NCBI NO: 18415287 NR Description: putative protein
  misc_feature (1)..(274): Homolog of NCBI NO: 21618305 NR Description: unknown [Arabidopsis thaliana]
  misc_feature (1)..(274): Homolog of NCBI NO: 9759298 NR Description: emb|CAB82953.1~gene_id:MPH15.5~strong similarity

SEQ ID NO: 42816 - DNA, 746 bp, Arabidopsis thaliana
  misc_feature (1)..(746): Ceres Seq. ID no. 12326520
  misc_feature: MA Experiment ID: 108435 Result: Down-regulated in Transcription
  misc_feature: MA Experiment 108435 PARAMETER Experiment Name: At_stm_Mutants_cDNA_P Parameter: Plant Line Value: wt Landsburg vs stm
  misc_feature: MA Experiment 108435 PARAMETER Experiment Name: At_stm_Mutants_cDNA_P Parameter: Tissue Value: Shoot Apical Meristem Region
  misc_feature: MA Experiment ID: 108462 Result: Up-regulated in Transcription
  misc_feature: MA Experiment 108462 PARAMETER Experiment Name: At_Germinating_Seeds_cDNA_P Parameter: Age (day) Value: 2 vs. 0
  misc_feature: MA Experiment 108462 PARAMETER Experiment Name: At_Germinating_Seeds_cDNA_P Parameter: Tissue Value: Germinating Seeds
  misc_feature: MA Experiment ID: 108463 Result: Up-regulated in Transcription
  misc_feature: MA Experiment 108463 PARAMETER Experiment Name: At_Germinating_Seeds_cDNA_P Parameter: Age (day) Value: 3 vs. 0
  misc_feature: MA Experiment 108463 PARAMETER Experiment Name: At_Germinating_Seeds_cDNA_P Parameter: Tissue Value: Germinating Seeds
  misc_feature: MA Experiment ID: 108489 Result: Down-regulated in Transcription
  misc_feature: MA Experiment ID: 108595 Result: Down-regulated in Transcription
  misc_feature: MA Experiment 108595 PARAMETER Experiment Name: At_Ler-pi_Ovule_cDNA_P Parameter: Plant Line Value: null
  misc_feature: MA Experiment ID: 20000184 Result: Up-regulated in Transcription
  misc_feature: MA Experiment 20000184 PARAMETER Experiment Name: At_Shoots__P Parameter: Age (day) Value: 7
  misc_feature: MA Experiment 20000184 PARAMETER Experiment Name: At_Shoots__P Parameter: Tissue Value: Shoots vs. Whole Plant
  misc_feature: MA Experiment ID: 20000438 Result: Up-regulated in Transcription
  misc_feature: MA Experiment 20000438 PARAMETER Experiment Name: At_Shoots__P Parameter: Age (day) Value: 14
  misc_feature: MA Experiment 20000438 PARAMETER Experiment Name: At_Shoots__P Parameter: Tissue Value: Shoots vs. Whole Plant
  misc_feature: MA Experiment ID: 20000495 Result: Down-regulated in Transcription
  misc_feature: MA Experiment 20000495 PARAMETER Experiment Name: At_Guard_Cells_P Parameter: Harvest Date Value: 8/2/2002
  misc_feature: MA Experiment 20000495 PARAMETER Experiment Name: At_Guard_Cells_P Parameter: Organism Value: A. thaliana
  misc_feature: MA Experiment 20000495 PARAMETER Experiment Name: At_Guard_Cells_P Parameter: Tissue Value: Guard Cells vs. Leaves
atttcctacacaaaattcccactcaccacacacaacaaaagaatagtgatcgaagctcatggcgtctcttgcaaccgtcgccgctgtgaaaccatccgccgccataaaaggactcggcggcagctcactcgccggagctaagctctccatcaagccttcccgcctgagctttaaacccaaatccatccgggctaatggtgtggtggctaagtatggagacaaaagtgtctactttgacttagaagatttgggtaacacaacaggtcaatgggacgtatacggctctgatgctccttctccttacaatcctcttcaggtttcttcatctcataacctaacttcacttttctacttcaatcaaacactattctgagaagagattctcttctactttggttacttgtagagcaagttctttgagacattcgctgccccattcacaaagagaggattgctcctcaagttcttgatccttggaggaggctctttgcttacttatgtcagcgctacctctaccggcgaagttcttcccatcaagagaggtcctcaggagccgcctaagctcggtcctcgcggcaagctctgatctatattcatgttacctttctcttcttccttctaaaactcatcaacatttctcaatactgcaaacccttttaagtaattttatgtatattatgtttatctgttacatttgaaacgttttttcttcccctaattttacaaaagaaatcttttttttttcc

SEQ ID NO: 42817 - protein, 104 aa, Arabidopsis thaliana
  peptide (1)..(104): Ceres Seq. ID no. 12326521
  misc_feature (6)..(86): Pfam Name: Photosystem I reaction centre subunit VI Pfam Description: Photosystem I reaction centre subunit VI
  misc_feature (1)..(86): Homolog of NCBI NO: 445929 NR Description: photosystem I:SUBUNIT=PS I-H
  misc_feature (1)..(86): Homolog of NCBI NO: 445928 NR Description: photosystem I:SUBUNIT=PS I-H
  misc_feature (1)..(86): Homolog of NCBI NO: 7443140 NR Description: photosystem I psaH precursor - wood tobacco
  misc_feature (1)..(86): Homolog of NCBI NO: 7443139 NR Description: photosystem I protein psaH precursor - wood
  misc_feature (1)..(86): Homolog of NCBI NO: 33520419 NR Description: photosystem I psaH protein [Trifolium pratense]
  misc_feature (1)..(86): Homolog of NCBI NO: 131199 NR Description: Photosystem I reaction center subunit VI,
  misc_feature (1)..(86): Homolog of NCBI NO: 7443138 NR Description: photosystem I protein psaH precursor - wood
  misc_feature (1)..(86): Homolog of NCBI NO: 3914442 NR Description: Photosystem I reaction center subunit VI,
  misc_feature (1)..(86): Homolog of NCBI NO: 15218186 NR Description: photosystem I subunit VI precursor
  misc_feature (1)..(86): Homolog of NCBI NO: 15233291 NR Description: photosystem I subunit VI precursor
MASLATVAAVKPSAAIKGLGGSSLAGAKLSIKPSRLSFKPKSIRANGVVAKYGDKSVYFDLEDLGNTTGQWDVYGSDAPSPYNPLQVSSSHNLTSLFYFNQTLF

SEQ ID NO: 42818 - protein, 66 aa, Arabidopsis thaliana
  peptide (1)..(66): Ceres Seq. ID no. 12326522
MSALPLPAKFFPSREVLRSRLSSVLAASSDLYSCYLSLLPSKTHQHFSILQTLLSNFMYIMFICYI

SEQ ID NO: 42819 - DNA, 1168 bp, Arabidopsis thaliana
  misc_feature (1)..(1168): Ceres Seq. ID no. 13489552
  misc_feature: MA Experiment ID: 108434 Result: Down-regulated in Transcription
  misc_feature: MA Experiment 108434 PARAMETER Experiment Name: At_Root_Tips_cDNA_P Parameter: Tissue Value: Root Tips
  misc_feature: MA Experiment ID: 108585 Result: Up-regulated in Transcription
  misc_feature: MA Experiment 108585 PARAMETER Experiment Name: At_5mM_NaNP_cDNA_P Parameter: Timepoint (hr) Value: 6
  misc_feature: MA Experiment 108585 PARAMETER Experiment Name: At_5mM_NaNP_cDNA_P Parameter: Tissue Value: Aerial
  misc_feature: MA Experiment 108585 PARAMETER Experiment Name: At_5mM_NaNP_cDNA_P Parameter: Treatment Value: null
  misc_feature: MA Experiment ID: 20000184 Result: Down-regulated in Transcription
  misc_feature: MA Experiment 20000184 PARAMETER Experiment Name: At_Shoots__P Parameter: Age (day) Value: 7
  misc_feature: MA Experiment 20000184 PARAMETER Experiment Name: At_Shoots__P Parameter: Tissue Value: Shoots vs. Whole Plant
  misc_feature: MA Experiment ID: 20001247 Result: Up-regulated in Transcription
  misc_feature: MA Experiment 20001247 PARAMETER Experiment Name: At_Far-red-induction_P Parameter: Age (day) Value: 7
  misc_feature: MA Experiment 20001247 PARAMETER Experiment Name: At_Far-red-induction_P Parameter: Light Value: Far-red vs. White
  misc_feature: MA Experiment 20001247 PARAMETER Experiment Name: At_Far-red-induction_P Parameter: Organism Value: A. thaliana
  misc_feature: MA Experiment 20001247 PARAMETER Experiment Name: At_Far-red-induction_P Parameter: Plant Line Value: Columbia
  misc_feature: MA Experiment 20001247 PARAMETER Experiment Name: At_Far-red-induction_P Parameter: Timepoint (hr) Value: 1
  misc_feature: MA Experiment 20001247 PARAMETER Experiment Name: At_Far-red-induction_P Parameter: Tissue Value: Whole Plant
caacgcggaagggaaaaaaaaaaaaggcgcaattgaaagaaaaaaattgataatcggtagatttgatgtcccggcgtccggtcgttttgatcaccgtgagaaatggattcttcgaattgttgttctgagtaaaactcactcaccgtcaccggagaagaaagtgtaaatggattccgaagaaacgacgtcgtcggtaacgactacaaagaagcaaaagagggttttctcttcgttagctttgcgattccgtacagtgatagttttctcgatcattagcttcgtcgtcttgtcgtttctattaggaatcttagtgattttcatcggtgaattgtgggtttattcttcttcatctgcttctgcttctcttcattctcgctgcaaaattgtttccagctctgttgatcttaggtcttctaaagtgtgtggcattggactattgaacgtcaaagcacaacatgtgttttacccttttgagagagataaattcagatgtcgttatgattactactgggcttctgtcttcaaggtagagtataaagataacttaatgggtcaaacacggttagcgttttcagaagcaccaaatgaagctcttcctcctgagtgcagacctaactttggtgctgcattacttaccaaagataacttcaaggttaatgagacttacgattgctggtacacattagggattccaaagataaagctttatcgggatagctttttcggttgccaagcagatgatctttctttcactgacattgctaagcaatactctattgtaatctctaaacttttacagtcatggcttaatggagaatcaacaccaaagtactggaaatatgatgtgatcgctggcattgtctctggcttcgcaacttccataatcacagtcttcatcataaggatcttaagacatgcaaaatcttggttccctcaagcttgttgttcagttaagagccagttttctaaggtgaatatattggtacaagtgaaacgtgcatgtttgcttcttgtttacttctcggttctcggatggatggctacacaatacttaaaaattctttttccaaatgcttaggaaaaaacattacttgagagtcagtgagtatgtaatgattcgtagacagttgtgtgatgtaatcttaaatcatttacagaaaaagaaagc

SEQ ID NO: 42820 - protein, 303 aa, Arabidopsis thaliana
  peptide (1)..(303): Ceres Seq. ID no. 13489553
  misc_feature (37)..(299): Homolog of NCBI NO: 38345775 NR Description: OSJNBa0083N12.13 [Oryza sativa (japonica
  misc_feature (77)..(303): Homolog of NCBI NO: 7459450 NR Description: hypothetical protein T18B16.110 - Arabidopsis
  misc_feature (1)..(303): Homolog of NCBI NO: 18415248 NR Description: expressed protein [Arabidopsis thaliana]
  misc_feature (1)..(303): Homolog of NCBI NO: 21553578 NR Description: unknown [Arabidopsis thaliana]
MDSEETTSSVTTTKKQKRVFSSLALRFRTVIVFSIISFVVLSFLLGILVIFIGELWVYSSSSASASLHSRCKIVSSSVDLRSSKVCGIGLLNVKAQHVFYPFERDKFRCRYDYYWASVFKVEYKDNLMGQTRLAFSEAPNEALPPECRPNFGAALLTKDNFKVNETYDCWYTLGIPKIKLYRDSFFGCQADDLSFTDIAKQYSIVISKLLQSWLNGESTPKYWKYDVIAGIVSGFATSIITVFIIRILRHAKSWFPQACCSVKSQFSKVNILVQVKRACLLLVYFSVLGWMATQYLKILFPNA

SEQ ID NO: 42821 - protein, 176 aa, Arabidopsis thaliana
  peptide (1)..(176): Ceres Seq. ID no. 13489554
  misc_feature (1)..(172): Homolog of NCBI NO: 38345775 NR Description: OSJNBa0083N12.13 [Oryza sativa (japonica
  misc_feature (1)..(176): Homolog of NCBI NO: 7459450 NR Description: hypothetical protein T18B16.110 - Arabidopsis
  misc_feature (1)..(176): Homolog of NCBI NO: 18415248 NR Description: expressed protein [Arabidopsis thaliana]
  misc_feature (1)..(176): Homolog of NCBI NO: 21553578 NR Description: unknown [Arabidopsis thaliana]
MGQTRLAFSEAPNEALPPECRPNFGAALLTKDNFKVNETYDCWYTLGIPKIKLYRDSFFGCQADDLSFTDIAKQYSIVISKLLQSWLNGESTPKYWKYDVIAGIVSGFATSIITVFIIRILRHAKSWFPQACCSVKSQFSKVNILVQVKRACLLLVYFSVLGWMATQYLKILFPNA

SEQ ID NO: 42822 - DNA, 663 bp, Arabidopsis thaliana
  misc_feature (1)..(663): Ceres Seq. ID no. 12395161
  misc_feature: MA Experiment ID: 108474 Result: Down-regulated in Transcription
  misc_feature: MA Experiment 108474 PARAMETER Experiment Name: At_Drought_Flowers_cDNA_P Parameter: Timepoint (hr) Value: null
  misc_feature: MA Experiment 108474 PARAMETER Experiment Name: At_Drought_Flowers_cDNA_P Parameter: Treatment Value: Drought vs. No Drought
  misc_feature: MA Experiment ID: 108488 Result: Down-regulated in Transcription
  misc_feature: MA Experiment ID: 108574 Result: Up-regulated in Transcription
  misc_feature: MA Experiment 108574 PARAMETER Experiment Name: At_Wounding__cDNA_P Parameter: Timepoint (hr) Value: 1
  misc_feature: MA Experiment 108574 PARAMETER Experiment Name: At_Wounding__cDNA_P Parameter: Tissue Value: Aerial
  misc_feature: MA Experiment 108574 PARAMETER Experiment Name: At_Wounding__cDNA_P Parameter: Treatment Value: Wounding vs. No Wounding
  misc_feature: MA Experiment ID: 108595 Result: Up-regulated in Transcription
  misc_feature: MA Experiment 108595 PARAMETER Experiment Name: At_Ler-pi_Ovule_cDNA_P Parameter: Plant Line Value: null
  misc_feature: MA Experiment ID: 108607 Result: Up-regulated in Transcription
  misc_feature: MA Experiment 108607 PARAMETER Experiment Name: At_100uM_ABA_cDNA_P Parameter: Timepoint (hr) Value: 4
  misc_feature: MA Experiment 108607 PARAMETER Experiment Name: At_100uM_ABA_cDNA_P Parameter: Tissue Value: Aerial
  misc_feature: MA Experiment 108607 PARAMETER Experiment Name: At_100uM_ABA_cDNA_P Parameter: Treatment Value: 100uM ABA vs. No Treatment
  misc_feature: MA Experiment ID: 108608 Result: Up-regulated in Transcription
  misc_feature: MA Experiment 108608 PARAMETER Experiment Name: At_100uM_ABA_cDNA_P Parameter: Timepoint (hr) Value: 1
  misc_feature: MA Experiment 108608 PARAMETER Experiment Name: At_100uM_ABA_cDNA_P Parameter: Tissue Value: Aerial
  misc_feature: MA Experiment 108608 PARAMETER Experiment Name: At_100uM_ABA_cDNA_P Parameter: Treatment Value: 100uM ABA vs. No Treatment
  misc_feature: MA Experiment ID: 108609 Result: Up-regulated in Transcription
  misc_feature: MA Experiment 108609 PARAMETER Experiment Name: At_100uM_ABA_cDNA_P Parameter: Timepoint (hr) Value: 24
  misc_feature: MA Experiment 108609 PARAMETER Experiment Name: At_100uM_ABA_cDNA_P Parameter: Tissue Value: Aerial
  misc_feature: MA Experiment 108609 PARAMETER Experiment Name: At_100uM_ABA_cDNA_P Parameter: Treatment Value: 100uM ABA vs. No Treatment
  misc_feature: MA Experiment ID: 108667 Result: Up-regulated in Transcription
  misc_feature: MA Experiment 108667 PARAMETER Experiment Name: At_2mM_SA_cDNA_P Parameter: Plant Line Value: WS
  misc_feature: MA Experiment 108667 PARAMETER Experiment Name: At_2mM_SA_cDNA_P Parameter: Timepoint (hr) Value: 1
  misc_feature: MA Experiment 108667 PARAMETER Experiment Name: At_2mM_SA_cDNA_P Parameter: Treatment Value: 2mM SA vs. No Treatment
  misc_feature: MA Experiment ID: 108668 Result: Up-regulated in Transcription
  misc_feature: MA Experiment 108668 PARAMETER Experiment Name: At_2mM_SA_cDNA_P Parameter: Plant Line Value: WS
  misc_feature: MA Experiment 108668 PARAMETER Experiment Name: At_2mM_SA_cDNA_P Parameter: Timepoint (hr) Value: 6
  misc_feature: MA Experiment 108668 PARAMETER Experiment Name: At_2mM_SA_cDNA_P Parameter: Treatment Value: 2mM SA vs. No Treatment
  misc_feature: MA Experiment ID: 20000069 Result: Up-regulated in Transcription
  misc_feature: MA Experiment 20000069 PARAMETER Experiment Name: At_100uM_ABA_Mutants_cDNA_P Parameter: Plant Line Value: CS23
  misc_feature: MA Experiment 20000069 PARAMETER Experiment Name: At_100uM_ABA_Mutants_cDNA_P Parameter: Timepoint (hr) Value: 6
  misc_feature: MA Experiment 20000069 PARAMETER Experiment Name: At_100uM_ABA_Mutants_cDNA_P Parameter: Tissue Value: Aerial
  misc_feature: MA Experiment 20000069 PARAMETER Experiment Name: At_100uM_ABA_Mutants_cDNA_P Parameter: Treatment Value: 100uM ABA vs. No Treatment
  misc_feature: MA Experiment ID: 20000070 Result: Up-regulated in Transcription
  misc_feature: MA Experiment 20000070 PARAMETER Experiment Name: At_100uM_ABA_Mutants_cDNA_P Parameter: Plant Line Value: CS24
  misc_feature: MA Experiment 20000070 PARAMETER Experiment Name: At_100uM_ABA_Mutants_cDNA_P Parameter: Timepoint (hr) Value: 6
  misc_feature: MA Experiment 20000070 PARAMETER Experiment Name: At_100uM_ABA_Mutants_cDNA_P Parameter: Tissue Value: Aerial
  misc_feature: MA Experiment 20000070 PARAMETER Experiment Name: At_100uM_ABA_Mutants_cDNA_P Parameter: Treatment Value: 100uM ABA vs. No Treatment
  misc_feature: MA Experiment ID: 20000071 Result: Up-regulated in Transcription
  misc_feature: MA Experiment 20000071 PARAMETER Experiment Name: At_100uM_ABA_Mutants_cDNA_P Parameter: Plant Line Value: CS8104
  misc_feature: MA Experiment 20000071 PARAMETER Experiment Name: At_100uM_ABA_Mutants_cDNA_P Parameter: Timepoint (hr) Value: 6
  misc_feature: MA Experiment 20000071 PARAMETER Experiment Name: At_100uM_ABA_Mutants_cDNA_P Parameter: Tissue Value: Aerial
  misc_feature: MA Experiment 20000071 PARAMETER Experiment Name: At_100uM_ABA_Mutants_cDNA_P Parameter: Treatment Value: 100uM ABA vs. No Treatment
  misc_feature: MA Experiment ID: 20000087 Result: Up-regulated in Transcription
  misc_feature: MA Experiment 20000087 PARAMETER Experiment Name: At_100uM_ABA_Mutants_cDNA_P Parameter: Plant Line Value: WS
  misc_feature: MA Experiment 20000087 PARAMETER Experiment Name: At_100uM_ABA_Mutants_cDNA_P Parameter: Timepoint (hr) Value: 6
  misc_feature: MA Experiment 20000087 PARAMETER Experiment Name: At_100uM_ABA_Mutants_cDNA_P Parameter: Tissue Value: Aerial
  misc_feature: MA Experiment 20000087 PARAMETER Experiment Name: At_100uM_ABA_Mutants_cDNA_P Parameter: Treatment Value: 100uM ABA vs. No Treatment
  misc_feature: MA Experiment ID: 20000088 Result: Up-regulated in Transcription
  misc_feature: MA Experiment 20000088 PARAMETER Experiment Name: At_100uM_ABA_Mutants_cDNA_P Parameter: Plant Line Value: Landsberg
  misc_feature: MA Experiment 20000088 PARAMETER Experiment Name: At_100uM_ABA_Mutants_cDNA_P Parameter: Timepoint (hr) Value: 6
  misc_feature: MA Experiment 20000088 PARAMETER Experiment Name: At_100uM_ABA_Mutants_cDNA_P Parameter: Tissue Value: Aerial
  misc_feature: MA Experiment 20000088 PARAMETER Experiment Name: At_100uM_ABA_Mutants_cDNA_P Parameter: Treatment Value: 100uM ABA vs. No Treatment
  misc_feature: MA Experiment ID: 20000112 Result: Up-regulated in Transcription
  misc_feature: MA Experiment 20000112 PARAMETER Experiment Name: At_42deg_Heat_cDNA_P Parameter: Temperature (deg C) Value: 42 vs. 22
  misc_feature: MA Experiment 20000112 PARAMETER Experiment Name: At_42deg_Heat_cDNA_P Parameter: Timepoint (hr) Value: 2
  misc_feature: MA Experiment 20000112 PARAMETER Experiment Name: At_42deg_Heat_cDNA_P Parameter: Tissue Value: Aerial
  misc_feature: MA Experiment ID: 20000117 Result: Up-regulated in Transcription
  misc_feature: MA Experiment 20000117 PARAMETER Experiment Name: At_100uM_ABA_Mutants_cDNA_P Parameter: Plant Line Value: Columbia
  misc_feature: MA Experiment 20000117 PARAMETER Experiment Name: At_100uM_ABA_Mutants_cDNA_P Parameter: Timepoint (hr) Value: 6
  misc_feature: MA Experiment 20000117 PARAMETER Experiment Name: At_100uM_ABA_Mutants_cDNA_P Parameter: Tissue Value: Aerial
  misc_feature: MA Experiment 20000117 PARAMETER Experiment Name: At_100uM_ABA_Mutants_cDNA_P Parameter: Treatment Value: 100uM ABA vs. No Treatment
  misc_feature: MA Experiment ID: 20000144 Result: Up-regulated in Transcription
  misc_feature: MA Experiment 20000144 PARAMETER Experiment Name: At_42deg_Heat_cDNA_P Parameter: Temperature (deg C) Value: 42 vs. 22
  misc_feature: MA Experiment 20000144 PARAMETER Experiment Name: At_42deg_Heat_cDNA_P Parameter: Timepoint (hr) Value: 1
  misc_feature: MA Experiment 20000144 PARAMETER Experiment Name: At_42deg_Heat_cDNA_P Parameter: Tissue Value: Aerial
  misc_feature: MA Experiment ID: 20000185 Result: Up-regulated in Transcription
  misc_feature: MA Experiment 20000185 PARAMETER Experiment Name: At_Roots__P Parameter: Age (day) Value: 7 vs. 21
  misc_feature: MA Experiment 20000185 PARAMETER Experiment Name: At_Roots__P Parameter: Organism Value: A. thaliana
  misc_feature: MA Experiment 20000185 PARAMETER Experiment Name: At_Roots__P Parameter: Tissue Value: Roots vs. Whole Plant
  misc_feature: MA Experiment ID: 20000286 Result: Up-regulated in Transcription
  misc_feature: MA Experiment 20000286 PARAMETER Experiment Name: At_Open_Flower_P Parameter: Age (day) Value: 21
  misc_feature: MA Experiment 20000286 PARAMETER Experiment Name: At_Open_Flower_P Parameter: Plant Line Value: WS
  misc_feature: MA Experiment 20000286 PARAMETER Experiment Name: At_Open_Flower_P Parameter: Tissue Value: Half Open vs. Whole Plant
  misc_feature: MA Experiment ID: 20001555 Result: Up-regulated in Transcription
  misc_feature: MA Experiment 20001555 PARAMETER Experiment Name: At_Drought_Soil_Dry_P Parameter: Age (day) Value: 24
  misc_feature: MA Experiment 20001555 PARAMETER Experiment Name: At_Drought_Soil_Dry_P Parameter: Organism Value: A. thaliana
  misc_feature: MA Experiment 20001555 PARAMETER Experiment Name: At_Drought_Soil_Dry_P Parameter: Plant Line Value: WS
  misc_feature: MA Experiment 20001555 PARAMETER Experiment Name: At_Drought_Soil_Dry_P Parameter: Post Timepoint (hr) Value: None
  misc_feature: MA Experiment 20001555 PARAMETER Experiment Name: At_Drought_Soil_Dry_P Parameter: Post-Treatment Value: None
  misc_feature: MA Experiment 20001555 PARAMETER Experiment Name: At_Drought_Soil_Dry_P Parameter: Timepoint (day) Value: 10
  misc_feature: MA Experiment 20001555 PARAMETER Experiment Name: At_Drought_Soil_Dry_P Parameter: Treatment Value: Drought vs. No Drought
  misc_feature: MA Experiment ID: 20001904 Result: Up-regulated in Transcription
  misc_feature: MA Experiment 20001904 PARAMETER Experiment Name: At_Drought_Reproduction_P Parameter: Age (day) Value: 37
  misc_feature: MA Experiment 20001904 PARAMETER Experiment Name: At_Drought_Reproduction_P Parameter: Organism Value: A. thaliana
  misc_feature: MA Experiment 20001904 PARAMETER Experiment Name: At_Drought_Reproduction_P Parameter: Plant Line Value: WS
  misc_feature: MA Experiment 20001904 PARAMETER Experiment Name: At_Drought_Reproduction_P Parameter: Timepoint (day) Value: 7
  misc_feature: MA Experiment 20001904 PARAMETER Experiment Name: At_Drought_Reproduction_P Parameter: Tissue Value: Rosettes
  misc_feature: MA Experiment 20001904 PARAMETER Experiment Name: At_Drought_Reproduction_P Parameter: Treatment Value: Drought vs. No Drought
  misc_feature: MA Experiment ID: 20001905 Result: Up-regulated in Transcription
  misc_feature: MA Experiment 20001905 PARAMETER Experiment Name: At_Drought_Reproduction_P Parameter: Age (day) Value: 40
  misc_feature: MA Experiment 20001905 PARAMETER Experiment Name: At_Drought_Reproduction_P Parameter: Organism Value: A. thaliana
  misc_feature: MA Experiment 20001905 PARAMETER Experiment Name: At_Drought_Reproduction_P Parameter: Plant Line Value: WS
  misc_feature: MA Experiment 20001905 PARAMETER Experiment Name: At_Drought_Reproduction_P Parameter: Timepoint (day) Value: 10
  misc_feature: MA Experiment 20001905 PARAMETER Experiment Name: At_Drought_Reproduction_P Parameter: Tissue Value: Rosettes
  misc_feature: MA Experiment 20001905 PARAMETER Experiment Name: At_Drought_Reproduction_P Parameter: Treatment Value: Drought vs. No Drought
aatccaaaactctctctctctctctctgtctcttgtcttattatttatctctctaacggcgaggcaatgggttttccggtgggatattctgagctacttctcccaaaaatctttttctacttgttatctttcttaggtttgatacgtaaactcatctccacaatgttcaagatcattggtctaccagatttcttagaacctgaaccgacggctgacgaattgtcgacatatatttcatcggggatgtttggaccgttggatgatgggttataatcagatgacgtgtccactttgtcgtacacagtttatacctgatcatcttcaactggagtttaatcaaaggctctggtctcaatcttctgctgtttcttctcaacttcttgatgaatcatcatcttaggacgtattaaatctttgtccaaacaaaaaaagaaagacatattaaatccttttttttggtactttcattgggaattgggtttggtgtgagatcgatgtaaatattaaaaaaaaaaaaaaaaaggtagtggttacaggttaatgaaaaaagaaagaagaagaaaatttgtacttatccatccctgaaagatgaaattacattttgagttattataaagttgtaaacttttttttttttgttaaggaaaaaaaaaatcatttgct

SEQ ID NO: 42823 - protein, 90 aa, Arabidopsis thaliana
  peptide (1)..(90): Ceres Seq. ID no. 12395162
  misc_feature (23)..(77): Homolog of NCBI NO: 15233117 NR Description: RING finger protein
  misc_feature (23)..(75): Homolog of NCBI NO: 21554155 NR Description: RING zinc finger protein-like [Arabidopsis
  misc_feature (23)..(75): Homolog of NCBI NO: 15238072 NR Description: RING zinc finger protein-like
  misc_feature (23)..(71): Homolog of NCBI NO: 15222553 NR Description: putative RING zinc finger protein
NPKLSLSLSVSCLIIYLSNGEAMGFPVGYSELLLPKIFFYLLSFLGLIRKLISTMFKIIGLPDFLEPEPTADELSTYISSGMFGPLDDGL

SEQ ID NO: 42824 - protein, 68 aa, Arabidopsis thaliana
  peptide (1)..(68): Ceres Seq. ID no. 12395163
  misc_feature (1)..(55): Homolog of NCBI NO: 15233117 NR Description: RING finger protein
  misc_feature (1)..(53): Homolog of NCBI NO: 21554155 NR Description: RING zinc finger protein-like [Arabidopsis
  misc_feature (1)..(53): Homolog of NCBI NO: 15238072 NR Description: RING zinc finger protein-like
  misc_feature (1)..(49): Homolog of NCBI NO: 15222553 NR Description: putative RING zinc finger protein
MGFPVGYSELLLPKIFFYLLSFLGLIRKLISTMFKIIGLPDFLEPEPTADELSTYISSGMFGPLDDGL

SEQ ID NO: 42825 - protein, 46 aa, Arabidopsis thaliana
  peptide (1)..(46): Ceres Seq. ID no. 12395164
  misc_feature (1)..(18): Homolog of NCBI NO: 38345870 NR Description: OSJNBa0064M23.12 [Oryza sativa (japonica
  misc_feature (1)..(19): Homolog of NCBI NO: 18411282 NR Description: similar to RING finger protein; protein id:
  misc_feature (1)..(34): Homolog of NCBI NO: 11358776 NR Description: RING-H2 finger protein RHA1a [imported] -
  misc_feature (1)..(33): Homolog of NCBI NO: 15233350 NR Description: RING-H2 finger protein RHA1b
  misc_feature (1)..(33): Homolog of NCBI NO: 11358777 NR Description: RING-H2 finger protein RHA1b [imported] -
  misc_feature (1)..(34): Homolog of NCBI NO: 15233352 NR Description: RING-H2 finger protein RHA1a -like protein
  misc_feature (1)..(33): Homolog of NCBI NO: 15233117 NR Description: RING finger protein
  misc_feature (1)..(37): Homolog of NCBI NO: 21554155 NR Description: RING zinc finger protein-like [Arabidopsis
  misc_feature (1)..(37): Homolog of NCBI NO: 15238072 NR Description: RING zinc finger protein-like
  misc_feature (1)..(46): Homolog of NCBI NO: 15222553 NR Description: putative RING zinc finger protein
MMGYNQMTCPLCRTQFIPDHLQLEFNQRLWSQSSAVSSQLLDESSS

SEQ ID NO: 42826 - DNA, 1913 bp, Arabidopsis thaliana
  misc_feature (1)..(1913): Ceres Seq. ID no. 13592068
  misc_feature: MA Experiment ID: 108595 Result: Up-regulated in Transcription
  misc_feature: MA Experiment 108595 PARAMETER Experiment Name: At_Ler-pi_Ovule_cDNA_P Parameter: Plant Line Value: null
  misc_feature: MA Experiment ID: 20000070 Result: Down-regulated in Transcription
  misc_feature: MA Experiment 20000070 PARAMETER Experiment Name: At_100uM_ABA_Mutants_cDNA_P Parameter: Plant Line Value: CS24
  misc_feature: MA Experiment 20000070 PARAMETER Experiment Name: At_100uM_ABA_Mutants_cDNA_P Parameter: Timepoint (hr) Value: 6
  misc_feature: MA Experiment 20000070 PARAMETER Experiment Name: At_100uM_ABA_Mutants_cDNA_P Parameter: Tissue Value: Aerial
  misc_feature: MA Experiment 20000070 PARAMETER Experiment Name: At_100uM_ABA_Mutants_cDNA_P Parameter: Treatment Value: 100uM ABA vs. No Treatment
  misc_feature: MA Experiment ID: 20000171 Result: Down-regulated in Transcription
  misc_feature: MA Experiment 20000171 PARAMETER Experiment Name: At_42deg_Heat_P Parameter: Age (day) Value: 14
  misc_feature: MA Experiment 20000171 PARAMETER Experiment Name: At_42deg_Heat_P Parameter: Organism Value: A. thaliana
  misc_feature: MA Experiment 20000171 PARAMETER Experiment Name: At_42deg_Heat_P Parameter: Plant Line Value: WS
  misc_feature: MA Experiment 20000171 PARAMETER Experiment Name: At_42deg_Heat_P Parameter: Temperature (deg C) Value: 42 vs. 22
  misc_feature: MA Experiment 20000171 PARAMETER Experiment Name: At_42deg_Heat_P Parameter: Timepoint (hr) Value: 1
  misc_feature: MA Experiment 20000171 PARAMETER Experiment Name: At_42deg_Heat_P Parameter: Tissue Value: Aerial
  misc_feature: MA Experiment ID: 20000184 Result: Up-regulated in Transcription
  misc_feature: MA Experiment 20000184 PARAMETER Experiment Name: At_Shoots__P Parameter: Age (day) Value: 7
  misc_feature: MA Experiment 20000184 PARAMETER Experiment Name: At_Shoots__P Parameter: Tissue Value: Shoots vs. Whole Plant
  misc_feature: MA Experiment ID: 20000185 Result: Up-regulated in Transcription
  misc_feature: MA Experiment 20000185 PARAMETER Experiment Name: At_Roots__P Parameter: Age (day) Value: 7 vs. 21
  misc_feature: MA Experiment 20000185 PARAMETER Experiment Name: At_Roots__P Parameter: Organism Value: A. thaliana
  misc_feature: MA Experiment 20000185 PARAMETER Experiment Name: At_Roots__P Parameter: Tissue Value: Roots vs. Whole Plant
  misc_feature: MA Experiment ID: 20000227 Result: Up-regulated in Transcription
  misc_feature: MA Experiment 20000227 PARAMETER Experiment Name: At_Root-Tips-vs-Tops_P Parameter: Tissue Value: Root Tips vs. Root Tops
  misc_feature: MA Experiment ID: 20000234 Result: Up-regulated in Transcription
  misc_feature: MA Experiment 20000234 PARAMETER Experiment Name: At_Siliques_P Parameter: Age (day) Value: 21
  misc_feature: MA Experiment 20000234 PARAMETER Experiment Name: At_Siliques_P Parameter: Organism Value: A. thaliana
  misc_feature: MA Experiment 20000234 PARAMETER Experiment Name: At_Siliques_P Parameter: Plant Line Value: WS
  misc_feature: MA Experiment 20000234 PARAMETER Experiment Name: At_Siliques_P Parameter: Tissue Value: Less Than 5mm Siliques vs. Whole Plant
  misc_feature: MA Experiment ID: 20000235 Result: Up-regulated in Transcription
  misc_feature: MA Experiment 20000235 PARAMETER Experiment Name: At_Siliques_P Parameter: Age (day) Value: 21
  misc_feature: MA Experiment 20000235 PARAMETER Experiment Name: At_Siliques_P Parameter: Organism Value: A. thaliana
  misc_feature: MA Experiment 20000235 PARAMETER Experiment Name: At_Siliques_P Parameter: Plant Line Value: WS
  misc_feature: MA Experiment 20000235 PARAMETER Experiment Name: At_Siliques_P Parameter: Tissue Value: 5-10mm Siliques vs. Whole Plant
  misc_feature: MA Experiment ID: 20000264 Result: Up-regulated in Transcription
  misc_feature: MA Experiment 20000264 PARAMETER Experiment Name: At_Open_Flower_P Parameter: Age (day) Value: 21
  misc_feature: MA Experiment 20000264 PARAMETER Experiment Name: At_Open_Flower_P Parameter: Plant Line Value: WS
  misc_feature: MA Experiment 20000264 PARAMETER Experiment Name: At_Open_Flower_P Parameter: Tissue Value: Open Flower vs. Whole Plant
  misc_feature: MA Experiment ID: 20000265 Result: Up-regulated in Transcription
  misc_feature: MA Experiment 20000265 PARAMETER Experiment Name: At_Open_Flower_P Parameter: Age (day) Value: 21
  misc_feature: MA Experiment 20000265 PARAMETER Experiment Name: At_Open_Flower_P Parameter: Plant Line Value: WS
  misc_feature: MA Experiment 20000265 PARAMETER Experiment Name: At_Open_Flower_P Parameter: Tissue Value: Closed Flower vs. Whole Plant
  misc_feature: MA Experiment ID: 20000286 Result: Up-regulated in Transcription
  misc_feature: MA Experiment 20000286 PARAMETER Experiment Name: At_Open_Flower_P Parameter: Age (day) Value: 21
  misc_feature: MA Experiment 20000286 PARAMETER Experiment Name: At_Open_Flower_P Parameter: Plant Line Value: WS
  misc_feature: MA Experiment 20000286 PARAMETER Experiment Name: At_Open_Flower_P Parameter: Tissue Value: Half Open vs. Whole Plant
  misc_feature: MA Experiment ID: 20000438 Result: Up-regulated in Transcription
  misc_feature: MA Experiment 20000438 PARAMETER Experiment Name: At_Shoots__P Parameter: Age (day) Value: 14
  misc_feature: MA Experiment 20000438 PARAMETER Experiment Name: At_Shoots__P Parameter: Tissue Value: Shoots vs. Whole Plant
  misc_feature: MA Experiment ID: 20000439 Result: Up-regulated in Transcription
  misc_feature: MA Experiment 20000439 PARAMETER Experiment Name: At_Roots__P Parameter: Age (day) Value: 14 vs. 21
  misc_feature: MA Experiment 20000439 PARAMETER Experiment Name: At_Roots__P Parameter: Organism Value: A. thaliana
  misc_feature: MA Experiment 20000439 PARAMETER Experiment Name: At_Roots__P Parameter: Tissue Value: Roots vs. Whole Plant
  misc_feature: MA Experiment ID: 20000495 Result: Up-regulated in Transcription
  misc_feature: MA Experiment 20000495 PARAMETER Experiment Name: At_Guard_Cells_P Parameter: Harvest Date Value: 8/2/2002
  misc_feature: MA Experiment 20000495 PARAMETER Experiment Name: At_Guard_Cells_P Parameter: Organism Value: A. thaliana
  misc_feature: MA Experiment 20000495 PARAMETER Experiment Name: At_Guard_Cells_P Parameter: Tissue Value: Guard Cells vs. Leaves
  misc_feature: MA Experiment ID: 20000794 Result: Up-regulated in Transcription
  misc_feature: MA Experiment 20000794 PARAMETER Experiment Name: At_Petals_P Parameter: Age (day) Value: 23-25 days
  misc_feature: MA Experiment 20000794 PARAMETER Experiment Name: At_Petals_P Parameter: Plant Line Value: WS
  misc_feature: MA Experiment 20000794 PARAMETER Experiment Name: At_Petals_P Parameter: Tissue Value: Petals vs. Whole plant
atggcttcttcgaaactccatcatcatcctcaccgcagaaaatccccaatacgttgcttctgtctcttaatcataaccatgtcctccattctcatccttctcttctctctcttcctcttctcctctccctcctcctcctcccgtcaccaccaccaccacaattccggcgacacttctccggtcaatccttcgtcgtctctcgccgctcagatccgtctcgcttgtaacgcaactcgttacccagaccaatgcgtctcttccctatccgaacagggtcgggttcctccggatcctaaaccaatccagatcattcactcagcgatctcattctcattccaaaacctcaaaaccgcccaatcaaaaatcaagtctattgtagactcgtccgtagggaatctaaaccgtacaaacgccgcgaacacgtgtctccagcttctcacttactccgagcaccgcactcaatcgacggatcaagctttaacacgtggcaaaatcaaagacgctcgagcttggatgagcgctgctctagtgtaccagtacgattcatggtcagcgctcaagtacgtcaacgacacgagccaagtaggtgaaacgatgtcgtttctcgacggacttatccacgtcaccagcaacgcgcttagcatgatggtatcgtacgataacttcggagacaacgtcgcgtcgtggacttacccagcaacggaacgtgacgggttttgggaaaagactgggcctggtttgggcttagatccgagtacagggcttaatttgggttttccttccggtttaaaagaagacgtgacggtgtgtaaagacggaaaatgcggttacaagacggtgcaagacgccgttaacgctgcgccggaggataacggaatgcgtaagttcgttataaagattagcgaaggagtctacgaggagaacgttattgttccgtttgagaagaagaacgttgtgtttatcggtgacggtatgggcaaaacggtcattacaggttcgttaaacgccggtatgcctgggatcactacgtacaatactgcaactgtcggagtggtaggagatggattcatggctcgtgatctaacgttccagaacacggcgggaccagacgctcaccaagcggtggcgtttagatccgacagcgatttttctctgatcgagaattgcgagttccttgggaaccaagacactctctatgcccatggtcttcgtcagttctacaaaaactgtcgtatccaaggaaatgttgactttatctttgggaattcagctgctgtcttccaagactgtgaaatcctaatcgcaccgcgtcaaattaaccctgaaaagggcgagaaaaacgcagtcactgcccaaggaaggattgacccgtcccagtccacgggtttcgtgttcttgaactgtttgattaacggaacagaggagtacatgaagctgtttaaagctaaccctaaggtgcataagaacttcttggggaggccatggaaagattactcaaggactgtgtttataggttgtaatttagaggctttgattactcctgatggatggttaccttggagcggggatttcgcgctcaagacactttattacggtgaatctaagaacacgggtccgggatcagataggtcacaaagggtttcatggagcagtcagataccggacgagcatgttcatgtgtattcggtggctaactttattcaggctgatgagtgggcttcgatgtctgcttaaatcaatctttaagactataaggggtttaggaatgttttaaaagaagaaaaccatctcattgtaatttagttgataaactgttttaaacataaaagcaaacattgcattcatgttatatcaattgagagttcatagtcttaggactaattgaagtaaaacaataaagtttcaaaacttgg

SEQ ID NO: 42827 - protein, 577 aa, Arabidopsis thaliana
  peptide (1)..(577): Ceres Seq. ID no. 13592069
  misc_feature (266)..(570): Pfam Name: Pectinesterase Pfam Description: Pectinesterase
  misc_feature (266)..(570): Pfam Name: Pectinesterase Pfam Description: Pectinesterase
  misc_feature (23)..(572): Homolog of NCBI NO: 15230019 NR Description: pectinesterase family [Arabidopsis thaliana]
  misc_feature (27)..(572): Homolog of NCBI NO: 15239814 NR Description: pectinesterase family [Arabidopsis thaliana]
  misc_feature (46)..(572): Homolog of NCBI NO: 24250746 NR Description: putative thermostable pectinesterase [Citrus
  misc_feature (259)..(572): Homolog of NCBI NO: 38344075 NR Description: OSJNBa0006B20.19 [Oryza sativa (japonica
  misc_feature (357)..(577): Homolog of NCBI NO: 21554293 NR Description: pectin methylesterase-like protein [Arabidopsis
  misc_feature (23)..(572): Homolog of NCBI NO: 15230019 NR Description: pectinesterase family [Arabidopsis thaliana]
  misc_feature (46)..(572): Homolog of NCBI NO: 24250746 NR Description: putative thermostable pectinesterase [Citrus
  misc_feature (357)..(577): Homolog of NCBI NO: 21554293 NR Description: pectin methylesterase-like protein [Arabidopsis
  misc_feature (27)..(577): Homolog of NCBI NO: 15242495 NR Description: pectinesterase family [Arabidopsis thaliana]
  misc_feature (10)..(577): Homolog of NCBI NO: 22328058 NR Description: pectinesterase family [Arabidopsis thaliana]
  misc_feature (172)..(577): Homolog of NCBI NO: 22135882 NR Description: pectin methylesterase-like protein [Arabidopsis
  misc_feature (32)..(572): Homolog of NCBI NO: 34907404 NR Description: putative pectin methylesterase
  misc_feature (198)..(577): Homolog of NCBI NO: 1552379 NR Description: pectin methylesterase [Silene latifolia subsp.
  misc_feature (259)..(572): Homolog of NCBI NO: 38344075 NR Description: OSJNBa0006B20.19 [Oryza sativa (japonica
  misc_feature (27)..(572): Homolog of NCBI NO: 15239814 NR Description: pectinesterase family [Arabidopsis thaliana]
  misc_feature (198)..(577): Homolog of NCBI NO: 1552379 NR Description: pectin methylesterase [Silene latifolia subsp.
  misc_feature (32)..(572): Homolog of NCBI NO: 34907404 NR Description: putative pectin methylesterase
  misc_feature (172)..(577): Homolog of NCBI NO: 22135882 NR Description: pectin methylesterase-like protein [Arabidopsis
  misc_feature (10)..(577): Homolog of NCBI NO: 22328058 NR Description: pectinesterase family [Arabidopsis thaliana]
  misc_feature (27)..(577): Homolog of NCBI NO: 15242495 NR Description: pectinesterase family [Arabidopsis thaliana]
MASSKLHHHPHRRKSPIRCFCLLIITMSSILILLFSLFLFSSPSSSSRHHHHHNSGDTSPVNPSSSLAAQIRLACNATRYPDQCVSSLSEQGRVPPDPKPIQIIHSAISFSFQNLKTAQSKIKSIVDSSVGNLNRTNAANTCLQLLTYSEHRTQSTDQALTRGKIKDARAWMSAALVYQYDSWSALKYVNDTSQVGETMSFLDGLIHVTSNALSMMVSYDNFGDNVASWTYPATERDGFWEKTGPGLGLDPSTGLNLGFPSGLKEDVTVCKDGKCGYKTVQDAVNAAPEDNGMRKFVIKISEGVYEENVIVPFEKKNVVFIGDGMGKTVITGSLNAGMPGITTYNTATVGVVGDGFMARDLTFQNTAGPDAHQAVAFRSDSDFSLIENCEFLGNQDTLYAHGLRQFYKNCRIQGNVDFIFGNSAAVFQDCEILIAPRQINPEKGEKNAVTAQGRIDPSQSTGFVFLNCLINGTEEYMKLFKANPKVHKNFLGRPWKDYSRTVFIGCNLEALITPDGWLPWSGDFALKTLYYGESKNTGPGSDRSQRVSWSSQIPDEHVHVYSVANFIQADEWASMSA

SEQ ID NO: 42828 - protein, 551 aa, Arabidopsis thaliana
  peptide (1)..(551): Ceres Seq. ID no. 13592070
  misc_feature (240)..(544): Pfam Name: Pectinesterase Pfam Description: Pectinesterase
  misc_feature (240)..(544): Pfam Name: Pectinesterase Pfam Description: Pectinesterase
  misc_feature (1)..(546): Homolog of NCBI NO: 15230019 NR Description: pectinesterase family [Arabidopsis thaliana]
  misc_feature (1)..(546): Homolog of NCBI NO: 15239814 NR Description: pectinesterase family [Arabidopsis thaliana]
  misc_feature (20)..(546): Homolog of NCBI NO: 24250746 NR Description: putative thermostable pectinesterase [Citrus
  misc_feature (233)..(546): Homolog of NCBI NO: 38344075 NR Description: OSJNBa0006B20.19 [Oryza sativa (japonica
  misc_feature (331)..(551): Homolog of NCBI NO: 21554293 NR Description: pectin methylesterase-like protein [Arabidopsis
  misc_feature (1)..(546): Homolog of NCBI NO: 15230019 NR Description: pectinesterase family [Arabidopsis thaliana]
  misc_feature (20)..(546): Homolog of NCBI NO: 24250746 NR Description: putative thermostable pectinesterase [Citrus
  misc_feature (331)..(551): Homolog of NCBI NO: 21554293 NR Description: pectin methylesterase-like protein [Arabidopsis
  misc_feature (1)..(551): Homolog of NCBI NO: 15242495 NR Description: pectinesterase family [Arabidopsis thaliana]
  misc_feature (1)..(551): Homolog of NCBI NO: 22328058 NR Description: pectinesterase family [Arabidopsis thaliana]
  misc_feature (146)..(551): Homolog of NCBI NO: 22135882 NR Description: pectin methylesterase-like protein [Arabidopsis
  misc_feature (6)..(546): Homolog of NCBI NO: 34907404 NR Description: putative pectin methylesterase
  misc_feature (172)..(551): Homolog of NCBI NO: 1552379 NR Description: pectin methylesterase [Silene latifolia subsp.
  misc_feature (233)..(546): Homolog of NCBI NO: 38344075 NR Description: OSJNBa0006B20.19 [Oryza sativa (japonica
  misc_feature (1)..(546): Homolog of NCBI NO: 15239814 NR Description: pectinesterase family [Arabidopsis thaliana]
  misc_feature (172)..(551): Homolog of NCBI NO: 1552379 NR Description: pectin methylesterase [Silene latifolia subsp.
  misc_feature (6)..(546): Homolog of NCBI NO: 34907404 NR Description: putative pectin methylesterase
  misc_feature (146)..(551): Homolog of NCBI NO: 22135882 NR Description: pectin methylesterase-like protein [Arabidopsis
  misc_feature (1)..(551): Homolog of NCBI NO: 22328058 NR Description: pectinesterase family [Arabidopsis thaliana]
  misc_feature (1)..(551): Homolog of NCBI NO: 15242495 NR Description: pectinesterase family [Arabidopsis thaliana]
MSSILILLFSLFLFSSPSSSSRHHHHHNSGDTSPVNPSSSLAAQIRLACNATRYPDQCVSSLSEQGRVPPDPKPIQIIHSAISFSFQNLKTAQSKIKSIVDSSVGNLNRTNAANTCLQLLTYSEHRTQSTDQALTRGKIKDARAWMSAALVYQYDSWSALKYVNDTSQVGETMSFLDGLIHVTSNALSMMVSYDNFGDNVASWTYPATERDGFWEKTGPGLGLDPSTGLNLGFPSGLKEDVTVCKDGKCGYKTVQDAVNAAPEDNGMRKFVIKISEGVYEENVIVPFEKKNVVFIGDGMGKTVITGSLNAGMPGITTYNTATVGVVGDGFMARDLTFQNTAGPDAHQAVAFRSDSDFSLIENCEFLGNQDTLYAHGLRQFYKNCRIQGNVDFIFGNSAAVFQDCEILIAPRQINPEKGEKNAVTAQGRIDPSQSTGFVFLNCLINGTEEYMKLFKANPKVHKNFLGRPWKDYSRTVFIGCNLEALITPDGWLPWSGDFALKTLYYGESKNTGPGSDRSQRVSWSSQIPDEHVHVYSVANFIQADEWASMSA

SEQ ID NO: 42829 - protein, 406 aa, Arabidopsis thaliana
  peptide (1)..(406): Ceres Seq. ID no. 13592071
  misc_feature (95)..(399): Pfam Name: Pectinesterase Pfam Description: Pectinesterase
  misc_feature (95)..(399): Pfam Name: Pectinesterase Pfam Description: Pectinesterase
  misc_feature (1)..(401): Homolog of NCBI NO: 15230019 NR Description: pectinesterase family [Arabidopsis thaliana]
  misc_feature (1)..(401): Homolog of NCBI NO: 15239814 NR Description: pectinesterase family [Arabidopsis thaliana]
  misc_feature (1)..(401): Homolog of NCBI NO: 24250746 NR Description: putative thermostable pectinesterase [Citrus
  misc_feature (88)..(401): Homolog of NCBI NO: 38344075 NR Description: OSJNBa0006B20.19 [Oryza sativa (japonica
  misc_feature (186)..(406): Homolog of NCBI NO: 21554293 NR Description: pectin methylesterase-like protein [Arabidopsis
  misc_feature (1)..(401): Homolog of NCBI NO: 15230019 NR Description: pectinesterase family [Arabidopsis thaliana]
  misc_feature (1)..(401): Homolog of NCBI NO: 24250746 NR Description: putative thermostable pectinesterase [Citrus
  misc_feature (186)..(406): Homolog of NCBI NO: 21554293 NR Description: pectin methylesterase-like protein [Arabidopsis
  misc_feature (1)..(406): Homolog of NCBI NO: 15242495 NR Description: pectinesterase family [Arabidopsis thaliana]
  misc_feature (1)..(406): Homolog of NCBI NO: 22328058 NR Description: pectinesterase family [Arabidopsis thaliana]
  misc_feature (1)..(406): Homolog of NCBI NO: 22135882 NR Description: pectin methylesterase-like protein [Arabidopsis
  misc_feature (1)..(401): Homolog of NCBI NO: 34907404 NR Description: putative pectin methylesterase
  misc_feature (27)..(406): Homolog of NCBI NO: 1552379 NR Description: pectin methylesterase [Silene latifolia subsp.
  misc_feature (88)..(401): Homolog of NCBI NO: 38344075 NR Description: OSJNBa0006B20.19 [Oryza sativa (japonica
  misc_feature (1)..(401): Homolog of NCBI NO: 15239814 NR Description: pectinesterase family [Arabidopsis thaliana]
  misc_feature (27)..(406): Homolog of NCBI NO: 1552379 NR Description: pectin methylesterase [Silene latifolia subsp.
  misc_feature (1)..(401): Homolog of NCBI NO: 34907404 NR Description: putative pectin methylesterase
  misc_feature (1)..(406): Homolog of NCBI NO: 22135882 NR Description: pectin methylesterase-like protein [Arabidopsis
  misc_feature (1)..(406): Homolog of NCBI NO: 22328058 NR Description: pectinesterase family [Arabidopsis thaliana]
  misc_feature (1)..(406): Homolog of NCBI NO: 15242495 NR Description: pectinesterase family [Arabidopsis thaliana]
MSAALVYQYDSWSALKYVNDTSQVGETMSFLDGLIHVTSNALSMMVSYDNFGDNVASWTYPATERDGFWEKTGPGLGLDPSTGLNLGFPSGLKEDVTVCKDGKCGYKTVQDAVNAAPEDNGMRKFVIKISEGVYEENVIVPFEKKNVVFIGDGMGKTVITGSLNAGMPGITTYNTATVGVVGDGFMARDLTFQNTAGPDAHQAVAFRSDSDFSLIENCEFLGNQDTLYAHGLRQFYKNCRIQGNVDFIFGNSAAVFQDCEILIAPRQINPEKGEKNAVTAQGRIDPSQSTGFVFLNCLINGTEEYMKLFKANPKVHKNFLGRPWKDYSRTVFIGCNLEALITPDGWLPWSGDFALKTLYYGESKNTGPGSDRSQRVSWSSQIPDEHVHVYSVANFIQADEWASMSA

SEQ ID NO: 42830 - DNA, 1840 bp, Arabidopsis thaliana
  misc_feature (1)..(1840): Ceres Seq. ID no. 13592995
  misc_feature: MA Experiment ID: 20000224 Result: Down-regulated in Transcription
  misc_feature: MA Experiment ID: 20000437 Result: Up-regulated in Transcription
  misc_feature: MA Experiment 20000437 PARAMETER Experiment Name: At_Drought_P Parameter: Age (day) Value: 8
  misc_feature: MA Experiment 20000437 PARAMETER Experiment Name: At_Drought_P Parameter: Organism Value: A. thaliana
  misc_feature: MA Experiment 20000437 PARAMETER Experiment Name: At_Drought_P Parameter: Plant Line Value: WS
  misc_feature: MA Experiment 20000437 PARAMETER Experiment Name: At_Drought_P Parameter: Timepoint (hr) Value: 24
  misc_feature: MA Experiment 20000437 PARAMETER Experiment Name: At_Drought_P Parameter: Tissue Value: Whole Plant
  misc_feature: MA Experiment 20000437 PARAMETER Experiment Name: At_Drought_P Parameter: Treatment Value: Drought vs. No Drought
  misc_feature: MA Experiment ID: 20000439 Result: Down-regulated in Transcription
  misc_feature: MA Experiment 20000439 PARAMETER Experiment Name: At_Roots__P Parameter: Age (day) Value: 14 vs. 21
  misc_feature: MA Experiment 20000439 PARAMETER Experiment Name: At_Roots__P Parameter: Organism Value: A. thaliana
  misc_feature: MA Experiment 20000439 PARAMETER Experiment Name: At_Roots__P Parameter: Tissue Value: Roots vs. Whole Plant
  misc_feature: MA Experiment ID: 20001247 Result: Up-regulated in Transcription
  misc_feature: MA Experiment 20001247 PARAMETER Experiment Name: At_Far-red-induction_P Parameter: Age (day) Value: 7
  misc_feature: MA Experiment 20001247 PARAMETER Experiment Name: At_Far-red-induction_P Parameter: Light Value: Far-red vs. White
  misc_feature: MA Experiment 20001247 PARAMETER Experiment Name: At_Far-red-induction_P Parameter: Organism Value: A. thaliana
  misc_feature: MA Experiment 20001247 PARAMETER Experiment Name: At_Far-red-induction_P Parameter: Plant Line Value: Columbia
  misc_feature: MA Experiment 20001247 PARAMETER Experiment Name: At_Far-red-induction_P Parameter: Timepoint (hr) Value: 1
  misc_feature: MA Experiment 20001247 PARAMETER Experiment Name: At_Far-red-induction_P Parameter: Tissue Value: Whole Plant
  misc_feature: MA Experiment ID: 20001905 Result: Up-regulated in Transcription
  misc_feature: MA Experiment 20001905 PARAMETER Experiment Name: At_Drought_Reproduction_P Parameter: Age (day) Value: 40
  misc_feature: MA Experiment 20001905 PARAMETER Experiment Name: At_Drought_Reproduction_P Parameter: Organism Value: A. thaliana
  misc_feature: MA Experiment 20001905 PARAMETER Experiment Name: At_Drought_Reproduction_P Parameter: Plant Line Value: WS
  misc_feature: MA Experiment 20001905 PARAMETER Experiment Name: At_Drought_Reproduction_P Parameter: Timepoint (day) Value: 10
  misc_feature: MA Experiment 20001905 PARAMETER Experiment Name: At_Drought_Reproduction_P Parameter: Tissue Value: Rosettes
  misc_feature: MA Experiment 20001905 PARAMETER Experiment Name: At_Drought_Reproduction_P Parameter: Treatment Value: Drought vs. No Drought
aagcacagcaaataatatcagaacacatttttttctttttataatttaatcaattaaatcaccaaactcaattaaataaaaagaaaaaattattattatcccttcttcttcttcttcttcgtcttcgtctttgattctcctgattcatgtcgcttaaatttttagcgatcttcgaatcccattttccttcgggaatctgacattttttctcgggaaattttttacccaaatcggagtaaagtatcgaatctagagaatccgctatggatgagacctattttgatctattgaatttctttaagaatccctcttttacagagacatttgtcgacatcttactatgcgcagttccgatttggctcgccgttatgatcgggttattaatcggatggtcttggcgtccaagatggaccggtttgatctatttagggtttcgttctaagcttcggtttttatggaccgcaccgcctgggtttggtgctcgtcggctttggcttgctttcaccgctctctctgctttctccgtttgccgaaccatctggtcaaggaatgacaccagagctaataaatcggcgaccggttcagcttcgtcgcagacgcctgttgaggataatgatgaatcaggattggcctcaagaggtagcgataacgggacggtgacagaggatattgtgacagagaatgatttagagcatctgcttcagctgcttgaagttggaaatgcagctttggaatggcaatctatgatggataagactactccaaatatgagctaccaggcttggcgtcatgagcctgagacaggtcctgttatttatcgcagccggactgtgtttgaggatgcaactccagatattgttagggatttcttctgggatgatgagtttcgacctaaatgggatttcatgcttgccaacttcaaaacgttggaggaggacactcagacaggaacaatgattgttcagtggagaaaaaagtttccttttttctgtagtgaccgagagtatatcattggccggagaatatgggagtctgggaagaagtattattgtgtcacaaagggagttccttatccagctctaccaaagcgtgataagccaaggcgtgttgagctttatttctcaagttgggttatcagagcggttgaatcccgaaaaggagatggacagcaaacggcttgtgaagtttcccttgtccactacgaagacatgggcatcccaaaagacgtagcaaagttaggtgtccgtcatggcatgtggggagctgtcaagaagctaaactccggtttacgagcgtaccaatccgccagaaaatcagactcatctctatctcggatcgcccaaatggcaagaatctctacaaaactgaacatgaattctgcagaatcatcttcaagagatgaagacagaagcagagcaatggaatatgcgagacaacgggaccatttgagaatggactggaaatgggttgttgtaggaggtgtcgcattggcttgtggcctacactctgggatcattggcaaggctttactggctggagctggccagagactggctcgtaggtgagaaaccttgtattcttattatatcttcccttgacagaaaagagaaacatatgcatataactaagggaaatgtattatttttgcaactcctctgagaagggcatgtggttttggtggtgaaccatgtagagtagtagctttaaactatggagtcataagttatttgagttctatcttgtaccacaggatagtgagatatgtattttataaactatatgaatctacatagcttctaaaagcttaaattctttgcatgtgatgcacttcgtatctccc

SEQ ID NO: 42831 - protein, 433 aa, Arabidopsis thaliana
  peptide (1)..(433): Ceres Seq. ID no. 15221190
  misc_feature (185)..(264): Pfam Name: START domain Pfam Description: START domain
  misc_feature (21)..(52): Homolog of NCBI NO: 15217736 NR Description: membrane related protein CP5 -related
  misc_feature (76)..(432): Homolog of NCBI NO: 15217736 NR Description: membrane related protein CP5 -related
  misc_feature (21)..(52): Homolog of NCBI NO: 22135902 NR Description: membrane related protein CP5, putative
  misc_feature (76)..(432): Homolog of NCBI NO: 22135902 NR Description: membrane related protein CP5, putative
  misc_feature (5)..(42): Homolog of NCBI NO: 34393225 NR Description: putative membrane related protein CP5
  misc_feature (118)..(429): Homolog of NCBI NO: 34393225 NR Description: putative membrane related protein CP5
  misc_feature (9)..(433): Homolog of NCBI NO: 15810257 NR Description: unknown protein [Arabidopsis thaliana]
  misc_feature (9)..(433): Homolog of NCBI NO: 18403635 NR Description: expressed protein [Arabidopsis thaliana]
  misc_feature (1)..(433): Homolog of NCBI NO: 7485064 NR Description: hypothetical protein - Arabidopsis thaliana
  misc_feature (1)..(433): Homolog of NCBI NO: 18414239 NR Description: expressed protein [Arabidopsis thaliana]
MDETYFDLLNFFKNPSFTETFVDILLCAVPIWLAVMIGLLIGWSWRPRWTGLIYLGFRSKLRFLWTAPPGFGARRLWLAFTALSAFSVCRTIWSRNDTRANKSATGSASSQTPVEDNDESGLASRGSDNGTVTEDIVTENDLEHLLQLLEVGNAALEWQSMMDKTTPNMSYQAWRHEPETGPVIYRSRTVFEDATPDIVRDFFWDDEFRPKWDFMLANFKTLEEDTQTGTMIVQWRKKFPFFCSDREYIIGRRIWESGKKYYCVTKGVPYPALPKRDKPRRVELYFSSWVIRAVESRKGDGQQTACEVSLVHYEDMGIPKDVAKLGVRHGMWGAVKKLNSGLRAYQSARKSDSSLSRIAQMARISTKLNMNSAESSSRDEDRSRAMEYARQRDHLRMDWKWVVVGGVALACGLHSGIIGKALLAGAGQRLARR

SEQ ID NO: 42832 - protein, 398 aa, Arabidopsis thaliana
  peptide (1)..(398): Ceres Seq. ID no. 15221191
  misc_feature (150)..(229): Pfam Name: START domain Pfam Description: START domain
  misc_feature (102)..(396): Homolog of NCBI NO: 38344869 NR Description: OSJNBa0020P07.12 [Oryza sativa (japonica
  misc_feature (1)..(17): Homolog of NCBI NO: 15217736 NR Description: membrane related protein CP5 -related
  misc_feature (41)..(397): Homolog of NCBI NO: 15217736 NR Description: membrane related protein CP5 -related
  misc_feature (1)..(17): Homolog of NCBI NO: 22135902 NR Description: membrane related protein CP5, putative
  misc_feature (41)..(397): Homolog of NCBI NO: 22135902 NR Description: membrane related protein CP5, putative
  misc_feature (83)..(394): Homolog of NCBI NO: 34393225 NR Description: putative membrane related protein CP5
  misc_feature (1)..(398): Homolog of NCBI NO: 15810257 NR Description: unknown protein [Arabidopsis thaliana]
  misc_feature (1)..(398): Homolog of NCBI NO: 18403635 NR Description: expressed protein [Arabidopsis thaliana]
  misc_feature (1)..(398): Homolog of NCBI NO: 7485064 NR Description: hypothetical protein - Arabidopsis thaliana
  misc_feature (1)..(398): Homolog of NCBI NO: 18414239 NR Description: expressed protein [Arabidopsis thaliana]
MIGLLIGWSWRPRWTGLIYLGFRSKLRFLWTAPPGFGARRLWLAFTALSAFSVCRTIWSRNDTRANKSATGSASSQTPVEDNDESGLASRGSDNGTVTEDIVTENDLEHLLQLLEVGNAALEWQSMMDKTTPNMSYQAWRHEPETGPVIYRSRTVFEDATPDIVRDFFWDDEFRPKWDFMLANFKTLEEDTQTGTMIVQWRKKFPFFCSDREYIIGRRIWESGKKYYCVTKGVPYPALPKRDKPRRVELYFSSWVIRAVESRKGDGQQTACEVSLVHYEDMGIPKDVAKLGVRHGMWGAVKKLNSGLRAYQSARKSDSSLSRIAQMARISTKLNMNSAESSSRDEDRSRAMEYARQRDHLRMDWKWVVVGGVALACGLHSGIIGKALLAGAGQRLARR

SEQ ID NO: 42833 - protein, 273 aa, Arabidopsis thaliana
  peptide (1)..(273): Ceres Seq. ID no. 15221192
  misc_feature (25)..(104): Pfam Name: START domain Pfam Description: START domain
  misc_feature (1)..(269): Homolog of NCBI NO: 10178166 NR Description: membrane related protein-like [Arabidopsis
  misc_feature (1)..(269): Homolog of NCBI NO: 18033654 NR Description: putative nodule membrane protein [Medicago sativa]
  misc_feature (1)..(271): Homolog of NCBI NO: 38344869 NR Description: OSJNBa0020P07.12 [Oryza sativa (japonica
  misc_feature (1)..(272): Homolog of NCBI NO: 15217736 NR Description: membrane related protein CP5 -related
  misc_feature (1)..(272): Homolog of NCBI NO: 22135902 NR Description: membrane related protein CP5, putative
  misc_feature (1)..(269): Homolog of NCBI NO: 34393225 NR Description: putative membrane related protein CP5
  misc_feature (1)..(273): Homolog of NCBI NO: 15810257 NR Description: unknown protein [Arabidopsis thaliana]
  misc_feature (1)..(273): Homolog of NCBI NO: 18403635 NR Description: expressed protein [Arabidopsis thaliana]
  misc_feature (1)..(273): Homolog of NCBI NO: 7485064 NR Description: hypothetical protein - Arabidopsis thaliana
  misc_feature (1)..(273): Homolog of NCBI NO: 18414239 NR Description: expressed protein [Arabidopsis thaliana]
MMDKTTPNMSYQAWRHEPETGPVIYRSRTVFEDATPDIVRDFFWDDEFRPKWDFMLANFKTLEEDTQTGTMIVQWRKKFPFFCSDREYIIGRRIWESGKKYYCVTKGVPYPALPKRDKPRRVELYFSSWVIRAVESRKGDGQQTACEVSLVHYEDMGIPKDVAKLGVRHGMWGAVKKLNSGLRAYQSARKSDSSLSRIAQMARISTKLNMNSAESSSRDEDRSRAMEYARQRDHLRMDWKWVVVGGVALACGLHSGIIGKALLAGAGQRLARR

SEQ ID NO: 42834 - DNA, 1764 bp, Arabidopsis thaliana
  misc_feature (1)..(1764): Ceres Seq. ID no. 12579999
  misc_feature: MA Experiment ID: 20000307 Result: Up-regulated in Transcription
  misc_feature: MA Experiment 20000307 PARAMETER Experiment Name: At_Germinating_Seeds_Sub_P Parameter: Age (hr) Value: 24 vs. 0
  misc_feature: MA Experiment 20000307 PARAMETER Experiment Name: At_Germinating_Seeds_Sub_P Parameter: Organism Value: A. thaliana
  misc_feature: MA Experiment 20000307 PARAMETER Experiment Name: At_Germinating_Seeds_Sub_P Parameter: Plant Line Value: WS
  misc_feature: MA Experiment 20000307 PARAMETER Experiment Name: At_Germinating_Seeds_Sub_P Parameter: Tissue Value: Germinating Seeds
  misc_feature: MA Experiment ID: 20000314 Result: Down-regulated in Transcription
  misc_feature: MA Experiment 20000314 PARAMETER Experiment Name: At_14day_Shoots-Roots_Sub_P Parameter: Age (day) Value: 14
  misc_feature: MA Experiment 20000314 PARAMETER Experiment Name: At_14day_Shoots-Roots_Sub_P Parameter: Organism Value: A. thaliana
  misc_feature: MA Experiment 20000314 PARAMETER Experiment Name: At_14day_Shoots-Roots_Sub_P Parameter: Plant Line Value: WS
  misc_feature: MA Experiment 20000314 PARAMETER Experiment Name: At_14day_Shoots-Roots_Sub_P Parameter: Tissue Value: Roots vs. Whole Plant
  misc_feature: MA Experiment ID: 20000315 Result: Up-regulated in Transcription
  misc_feature: MA Experiment 20000315 PARAMETER Experiment Name: At_14day_Shoots-Roots_Sub_P Parameter: Age (day) Value: 14
  misc_feature: MA Experiment 20000315 PARAMETER Experiment Name: At_14day_Shoots-Roots_Sub_P Parameter: Organism Value: A. thaliana
  misc_feature: MA Experiment 20000315 PARAMETER Experiment Name: At_14day_Shoots-Roots_Sub_P Parameter: Plant Line Value: WS
  misc_feature: MA Experiment 20000315 PARAMETER Experiment Name: At_14day_Shoots-Roots_Sub_P Parameter: Tissue Value: Shoots vs. Whole Plant
  misc_feature: MA Experiment ID: 20000328 Result: Down-regulated in Transcription
  misc_feature: MA Experiment 20000328 PARAMETER Experiment Name: At_42deg_Heat_Sub_P Parameter: Age (day) Value: 14
  misc_feature: MA Experiment 20000328 PARAMETER Experiment Name: At_42deg_Heat_Sub_P Parameter: Organism Value: A. thaliana
  misc_feature: MA Experiment 20000328 PARAMETER Experiment Name: At_42deg_Heat_Sub_P Parameter: Plant Line Value: WS
  misc_feature: MA Experiment 20000328 PARAMETER Experiment Name: At_42deg_Heat_Sub_P Parameter: Temperature (deg C) Value: 42 vs. 22
  misc_feature: MA Experiment 20000328 PARAMETER Experiment Name: At_42deg_Heat_Sub_P Parameter: Timepoint (hr) Value: 6
  misc_feature: MA Experiment 20000328 PARAMETER Experiment Name: At_42deg_Heat_Sub_P Parameter: Tissue Value: Aerial
  misc_feature: MA Experiment ID: 20000440 Result: Up-regulated in Transcription
  misc_feature: MA Experiment 20000440 PARAMETER Experiment Name: At_Closed-Flower__Sub_P Parameter: Tissue Value: Closed Flower vs. Whole Plant
aatataggtgcatttaaaacataacgttccctctcttgtcttcttatttttgctctctgttctttagaactgccattaacgagagtgagagagagacacacacacacagcgagtgaaaatgtctccggagaagaagagtcaaaacttccctccaataacggaatgcagagacggagagtacgattcgatagccgccgatcttgacgggactctgcttctctcaagaagctccttcccttacttcatgctcgtcgctgttgaagctggaagccttttacgtggactaatcctccttctctcgttaccattcgtcattatctcttacctattcgtatccgaatctcttggtatccagatcctcatcttcatctcattcgctggtctcaaaatccgcgatatcgaacttgtctctcgcgcagttcttccacggttttacgcggcggatgtgaggaaagacagttttgaggtgtttgataagtgtaagaagaaagtggtagtgacggcgaatccgattgtgatggtggaggcgtttgtgaaggattatcttggaggtgataaagttttgggaacagagattgaagttaaccctaaaaccaatagagccactggatttgtgaagaagcctggtgttcttgttggtgatcttaagaggttagccattttaaaagagtttggtaacgaatcacctgatctcggcctcggtgatcgaacctctgatcatgatttcatgtctctctgcaagaaaggttacatggttcatgcgaccaagtcagccacaacgattccaaaagaacgcttaaagaaccgcatagtcttccatgatgggcgtttagcgcaacgtccaactccgttaaacgccattatcacatacctatggcttccttttggtttcatcctctccatcattcgcgtctacttcaacctccctttacctgaaagatttgtccgttacacttacgagatgctcgggatccacttaaccattcgtggtcatcgtcctccacctccttcccctggaactcttggcaacctctatgtccttaaccaccgtaccgcgcttgatcccatcatcgttgctattgctcttggacgtaagatctgttgcgtcacttacagtgtctctcgtctctcccttatgctttctcctattcctgctgttgccctcacccgtgaccgtgccaccgatgctgccaacatgagaaaacttctcgagaaaggcgacttggtgatatgtcccgaaggcacgacgtgcagagaagagtatctactgagatttagcgctctattcgcagagctaagcgaccggattgtgccagtagcgatgaactgtaaacaaggaatgttcaacgggaccacagttaggggtgtgaagttttgggacccttacttcttcttcatgaacccaagaccaagctatgaagccactttcttggatcgtttgcctgaagaaatgactgtcaacggtggtggcaagactcctatagaggtggctaattacgtccagaaagttatcggcgcggttttgggcttcgaatgcaccgaacttactcgcaaggataaatatcttttgcttggaggtaatgacggcaaggtagagtctatcaacaacaccaagaagtgaaaatccaaacaagggttttttcttgttatgtcgtatacgaattttcatgtgtgtaattgctggagctcttgtcatcattatggtacgtttttgttatgtgtaatacgacgtatatatgtttgaataaaactatgtttcggtgg

SEQ ID NO: 42835 - protein, 500 aa, Arabidopsis thaliana
  peptide (1)..(500): Ceres Seq. ID no. 12580000
  misc_feature (286)..(403): Pfam Name: Acyltransferase Pfam Description: Acyltransferase
  misc_feature (1)..(208): Homolog of NCBI NO: 15236810 NR Description: putative protein; protein id: At4g00410.1
  misc_feature (23)..(496): Homolog of NCBI NO: 15239924 NR Description: putative protein; protein id: At5g06090.1
  misc_feature (23)..(496): Homolog of NCBI NO: 15229747 NR Description: unknown protein; protein id: At3g11430.1
  misc_feature (10)..(494): Homolog of NCBI NO: 37534314 NR Description: hypothetical protein [Oryza sativa (japonica
  misc_feature (45)..(500): Homolog of NCBI NO: 29788867 NR Description: hypothetical protein [Oryza sativa (japonica
  misc_feature (10)..(500): Homolog of NCBI NO: 38000002 NR Description: unknown protein [Oryza sativa (japonica
  misc_feature (212)..(500): Homolog of NCBI NO: 15236797 NR Description: putative protein; protein id: At4g00400.1
  misc_feature (1)..(492): Homolog of NCBI NO: 15224445 NR Description: unknown protein
  misc_feature (1)..(499): Homolog of NCBI NO: 17064780 NR Description: Unknown protein [Arabidopsis thaliana]
  misc_feature (1)..(499): Homolog of NCBI NO: 15223437 NR Description: hypothetical protein
MSPEKKSQNFPPITECRDGEYDSIAADLDGTLLLSRSSFPYFMLVAVEAGSLLRGLILLLSLPFVIISYLFVSESLGIQILIFISFAGLKIRDIELVSRAVLPRFYAADVRKDSFEVFDKCKKKVVVTANPIVMVEAFVKDYLGGDKVLGTEIEVNPKTNRATGFVKKPGVLVGDLKRLAILKEFGNESPDLGLGDRTSDHDFMSLCKKGYMVHATKSATTIPKERLKNRIVFHDGRLAQRPTPLNAIITYLWLPFGFILSIIRVYFNLPLPERFVRYTYEMLGIHLTIRGHRPPPPSPGTLGNLYVLNHRTALDPIIVAIALGRKICCVTYSVSRLSLMLSPIPAVALTRDRATDAANMRKLLEKGDLVICPEGTTCREEYLLRFSALFAELSDRIVPVAMNCKQGMFNGTTVRGVKFWDPYFFFMNPRPSYEATFLDRLPEEMTVNGGGKTPIEVANYVQKVIGAVLGFECTELTRKDKYLLLGGNDGKVESINNTKK

SEQ ID NO: 42836 - protein, 458 aa, Arabidopsis thaliana
  peptide (1)..(458): Ceres Seq. ID no. 12580001
  misc_feature (244)..(361): Pfam Name: Acyltransferase Pfam Description: Acyltransferase
  misc_feature (1)..(166): Homolog of NCBI NO: 15236810 NR Description: putative protein; protein id: At4g00410.1
  misc_feature (1)..(454): Homolog of NCBI NO: 15239924 NR Description: putative protein; protein id: At5g06090.1
  misc_feature (1)..(454): Homolog of NCBI NO: 15229747 NR Description: unknown protein; protein id: At3g11430.1
  misc_feature (1)..(452): Homolog of NCBI NO: 37534314 NR Description: hypothetical protein [Oryza sativa (japonica
  misc_feature (3)..(458): Homolog of NCBI NO: 29788867 NR Description: hypothetical protein [Oryza sativa (japonica
  misc_feature (1)..(458): Homolog of NCBI NO: 38000002 NR Description: unknown protein [Oryza sativa (japonica
  misc_feature (170)..(458): Homolog of NCBI NO: 15236797 NR Description: putative protein; protein id: At4g00400.1
  misc_feature (1)..(450): Homolog of NCBI NO: 15224445 NR Description: unknown protein
  misc_feature (1)..(457): Homolog of NCBI NO: 17064780 NR Description: Unknown protein [Arabidopsis thaliana]
  misc_feature (1)..(457): Homolog of NCBI NO: 15223437 NR Description: hypothetical protein
MLVAVEAGSLLRGLILLLSLPFVIISYLFVSESLGIQILIFISFAGLKIRDIELVSRAVLPRFYAADVRKDSFEVFDKCKKKVVVTANPIVMVEAFVKDYLGGDKVLGTEIEVNPKTNRATGFVKKPGVLVGDLKRLAILKEFGNESPDLGLGDRTSDHDFMSLCKKGYMVHATKSATTIPKERLKNRIVFHDGRLAQRPTPLNAIITYLWLPFGFILSIIRVYFNLPLPERFVRYTYEMLGIHLTIRGHRPPPPSPGTLGNLYVLNHRTALDPIIVAIALGRKICCVTYSVSRLSLMLSPIPAVALTRDRATDAANMRKLLEKGDLVICPEGTTCREEYLLRFSALFAELSDRIVPVAMNCKQGMFNGTTVRGVKFWDPYFFFMNPRPSYEATFLDRLPEEMTVNGGGKTPIEVANYVQKVIGAVLGFECTELTRKDKYLLLGGNDGKVESINNTKK

SEQ ID NO: 42837 - protein, 367 aa, Arabidopsis thaliana; identical to SEQ ID NO: 21110
  peptide (1)..(367): Ceres Seq. ID no. 12580002
  misc_feature (153)..(270): Pfam Name: Acyltransferase Pfam Description: Acyltransferase
  misc_feature (1)..(75): Homolog of NCBI NO: 15236810 NR Description: putative protein; protein id: At4g00410.1
  misc_feature (1)..(363): Homolog of NCBI NO: 15239924 NR Description: putative protein; protein id: At5g06090.1
  misc_feature (1)..(363): Homolog of NCBI NO: 15229747 NR Description: unknown protein; protein id: At3g11430.1
  misc_feature (1)..(361): Homolog of NCBI NO: 37534314 NR Description: hypothetical protein [Oryza sativa (japonica
  misc_feature (1)..(367): Homolog of NCBI NO: 29788867 NR Description: hypothetical protein [Oryza sativa (japonica
  misc_feature (1)..(367): Homolog of NCBI NO: 38000002 NR Description: unknown protein [Oryza sativa (japonica
  misc_feature (79)..(367): Homolog of NCBI NO: 15236797 NR Description: putative protein; protein id: At4g00400.1
  misc_feature (1)..(359): Homolog of NCBI NO: 15224445 NR Description: unknown protein
  misc_feature (1)..(366): Homolog of NCBI NO: 17064780 NR Description: Unknown protein [Arabidopsis thaliana]
  misc_feature (1)..(366): Homolog of NCBI NO: 15223437 NR Description: hypothetical protein

SEQ ID NO: 42838 - DNA, 854 bp, Arabidopsis thaliana; identical to SEQ ID NO: 37166
  misc_feature (1)..(854): Ceres Seq. ID no. 13509066
  misc_feature: MA Experiment ID: 20000439 Result: Down-regulated in Transcription
  misc_feature: MA Experiment 20000439 PARAMETER Experiment Name: At_Roots__P Parameter: Age (day) Value: 14 vs. 21
  misc_feature: MA Experiment 20000439 PARAMETER Experiment Name: At_Roots__P Parameter: Organism Value: A. thaliana
  misc_feature: MA Experiment 20000439 PARAMETER Experiment Name: At_Roots__P Parameter: Tissue Value: Roots vs. Whole Plant
  misc_feature: MA Experiment ID: 20000794 Result: Down-regulated in Transcription
  misc_feature: MA Experiment 20000794 PARAMETER Experiment Name: At_Petals_P Parameter: Age (day) Value: 23-25 days
  misc_feature: MA Experiment 20000794 PARAMETER Experiment Name: At_Petals_P Parameter: Plant Line Value: WS
  misc_feature: MA Experiment 20000794 PARAMETER Experiment Name: At_Petals_P Parameter: Tissue Value: Petals vs. Whole plant
  misc_feature: MA Experiment ID: 20001557 Result: Down-regulated in Transcription
  misc_feature: MA Experiment 20001557 PARAMETER Experiment Name: At_Drought_Soil_Dry_P Parameter: Age (day) Value: 27
  misc_feature: MA Experiment 20001557 PARAMETER Experiment Name: At_Drought_Soil_Dry_P Parameter: Organism Value: A. thaliana
  misc_feature: MA Experiment 20001557 PARAMETER Experiment Name: At_Drought_Soil_Dry_P Parameter: Plant Line Value: WS
  misc_feature: MA Experiment 20001557 PARAMETER Experiment Name: At_Drought_Soil_Dry_P Parameter: Post Timepoint (hr) Value: 3
  misc_feature: MA Experiment 20001557 PARAMETER Experiment Name: At_Drought_Soil_Dry_P Parameter: Post-Treatment Value: Re-Water vs. No Drought
  misc_feature: MA Experiment 20001557 PARAMETER Experiment Name: At_Drought_Soil_Dry_P Parameter: Timepoint (day) Value: 13
  misc_feature: MA Experiment 20001557 PARAMETER Experiment Name: At_Drought_Soil_Dry_P Parameter: Treatment Value: Drought vs. No Drought

SEQ ID NO: 42839 - protein, 179 aa, Arabidopsis thaliana; identical to SEQ ID NO: 37167
  peptide (1)..(179): Ceres Seq. ID no. 13509067
  misc_feature (13)..(179): Homolog of NCBI NO: 1388088 NR Description: thioredoxin m
  misc_feature (20)..(179): Homolog of NCBI NO: 38346628 NR Description: OSJNBa0074L08.22 [Oryza sativa (japonica
  misc_feature (21)..(179): Homolog of NCBI NO: 15232567 NR Description: thioredoxin M-type 4, chloroplast precursor
  misc_feature (27)..(179): Homolog of NCBI NO: 15594012 NR Description: putative thioredoxin m2 [Pisum sativum]
  misc_feature (21)..(179): Homolog of NCBI NO: 6539614 NR Description: thioredoxin m4 [Arabidopsis thaliana]
  misc_feature (1)..(179): Homolog of NCBI NO: 21618235 NR Description: putative M-type thioredoxin [Arabidopsis thaliana]
  misc_feature (1)..(179): Homolog of NCBI NO: 6539610 NR Description: thioredoxin m2 [Arabidopsis thaliana]
  misc_feature (1)..(179): Homolog of NCBI NO: 15236327 NR Description: thioredoxin M-type 2, chloroplast precursor
  misc_feature (1)..(179): Homolog of NCBI NO: 11135407 NR Description: Thioredoxin M-type, chloroplast precursor (TRX-M)
  misc_feature (1)..(179): Homolog of NCBI NO: 30678634 NR Description: thioredoxin M-type 1, chloroplast precursor
  misc_feature (13)..(179): Homolog of NCBI NO: 1388088 NR Description: thioredoxin m
  misc_feature (20)..(179): Homolog of NCBI NO: 38346628 NR Description: OSJNBa0074L08.22 [Oryza sativa (japonica
  misc_feature (21)..(179): Homolog of NCBI NO: 15232567 NR Description: thioredoxin M-type 4, chloroplast precursor
  misc_feature (27)..(179): Homolog of NCBI NO: 15594012 NR Description: putative thioredoxin m2 [Pisum sativum]
  misc_feature (21)..(179): Homolog of NCBI NO: 6539614 NR Description: thioredoxin m4 [Arabidopsis thaliana]
  misc_feature (1)..(179): Homolog of NCBI NO: 21618235 NR Description: putative M-type thioredoxin [Arabidopsis thaliana]
  misc_feature (1)..(179): Homolog of NCBI NO: 6539610 NR Description: thioredoxin m2 [Arabidopsis thaliana]
  misc_feature (1)..(179): Homolog of NCBI NO: 15236327 NR Description: thioredoxin M-type 2, chloroplast precursor
  misc_feature (1)..(179): Homolog of NCBI NO: 11135407 NR Description: Thioredoxin M-type, chloroplast precursor (TRX-M)
  misc_feature (1)..(179): Homolog of NCBI NO: 30678634 NR Description: thioredoxin M-type 1, chloroplast precursor

SEQ ID NO: 42840 - protein, 162 aa, Arabidopsis thaliana; identical to SEQ ID NO: 37168
  peptide (1)..(162): Ceres Seq. ID no. 13509068
  misc_feature (1)..(162): Homolog of NCBI NO: 1388088 NR Description: thioredoxin m
  misc_feature (3)..(162): Homolog of NCBI NO: 38346628 NR Description: OSJNBa0074L08.22 [Oryza sativa (japonica
  misc_feature (4)..(162): Homolog of NCBI NO: 15232567 NR Description: thioredoxin M-type 4, chloroplast precursor
  misc_feature (10)..(162): Homolog of NCBI NO: 15594012 NR Description: putative thioredoxin m2 [Pisum sativum]
  misc_feature (4)..(162): Homolog of NCBI NO: 6539614 NR Description: thioredoxin m4 [Arabidopsis thaliana]
  misc_feature (1)..(162): Homolog of NCBI NO: 21618235 NR Description: putative M-type thioredoxin [Arabidopsis thaliana]
  misc_feature (1)..(162): Homolog of NCBI NO: 6539610 NR Description: thioredoxin m2 [Arabidopsis thaliana]
  misc_feature (1)..(162): Homolog of NCBI NO: 15236327 NR Description: thioredoxin M-type 2, chloroplast precursor
  misc_feature (1)..(162): Homolog of NCBI NO: 11135407 NR Description: Thioredoxin M-type, chloroplast precursor (TRX-M)
  misc_feature (1)..(162): Homolog of NCBI NO: 30678634 NR Description: thioredoxin M-type 1, chloroplast precursor
  misc_feature (1)..(162): Homolog of NCBI NO: 1388088 NR Description: thioredoxin m
  misc_feature (3)..(162): Homolog of NCBI NO: 38346628 NR Description: OSJNBa0074L08.22 [Oryza sativa (japonica
  misc_feature (4)..(162): Homolog of NCBI NO: 15232567 NR Description: thioredoxin M-type 4, chloroplast precursor
  misc_feature (10)..(162): Homolog of NCBI NO: 15594012 NR Description: putative thioredoxin m2 [Pisum sativum]
  misc_feature (4)..(162): Homolog of NCBI NO: 6539614 NR Description: thioredoxin m4 [Arabidopsis thaliana]
  misc_feature (1)..(162): Homolog of NCBI NO: 21618235 NR Description: putative M-type thioredoxin [Arabidopsis thaliana]
  misc_feature (1)..(162): Homolog of NCBI NO: 6539610 NR Description: thioredoxin m2 [Arabidopsis thaliana]
  misc_feature (1)..(162): Homolog of NCBI NO: 15236327 NR Description: thioredoxin M-type 2, chloroplast precursor
  misc_feature (1)..(162): Homolog of NCBI NO: 11135407 NR Description: Thioredoxin M-type, chloroplast precursor (TRX-M)
  misc_feature (1)..(162): Homolog of NCBI NO: 30678634 NR Description: thioredoxin M-type 1, chloroplast precursor

SEQ ID NO: 42841 - protein, 147 aa, Arabidopsis thaliana; identical to SEQ ID NO: 37169
  peptide (1)..(147): Ceres Seq. ID no. 13509069
  misc_feature (1)..(147): Homolog of NCBI NO: 1388088 NR Description: thioredoxin m
  misc_feature (1)..(147): Homolog of NCBI NO: 38346628 NR Description: OSJNBa0074L08.22 [Oryza sativa (japonica
  misc_feature (1)..(147): Homolog of NCBI NO: 15232567 NR Description: thioredoxin M-type 4, chloroplast precursor
  misc_feature (1)..(147): Homolog of NCBI NO: 15594012 NR Description: putative thioredoxin m2 [Pisum sativum]
  misc_feature (1)..(147): Homolog of NCBI NO: 6539614 NR Description: thioredoxin m4 [Arabidopsis thaliana]
  misc_feature (1)..(147): Homolog of NCBI NO: 21618235 NR Description: putative M-type thioredoxin [Arabidopsis thaliana]
  misc_feature (1)..(147): Homolog of NCBI NO: 6539610 NR Description: thioredoxin m2 [Arabidopsis thaliana]
  misc_feature (1)..(147): Homolog of NCBI NO: 15236327 NR Description: thioredoxin M-type 2, chloroplast precursor
  misc_feature (1)..(147): Homolog of NCBI NO: 11135407 NR Description: Thioredoxin M-type, chloroplast precursor (TRX-M)
  misc_feature (1)..(147): Homolog of NCBI NO: 30678634 NR Description: thioredoxin M-type 1, chloroplast precursor
  misc_feature (1)..(147): Homolog of NCBI NO: 1388088 NR Description: thioredoxin m
  misc_feature (1)..(147): Homolog of NCBI NO: 38346628 NR Description: OSJNBa0074L08.22 [Oryza sativa (japonica
  misc_feature (1)..(147): Homolog of NCBI NO: 15232567 NR Description: thioredoxin M-type 4, chloroplast precursor
  misc_feature (1)..(147): Homolog of NCBI NO: 15594012 NR Description: putative thioredoxin m2 [Pisum sativum]
  misc_feature (1)..(147): Homolog of NCBI NO: 6539614 NR Description: thioredoxin m4 [Arabidopsis thaliana]
  misc_feature (1)..(147): Homolog of NCBI NO: 21618235 NR Description: putative M-type thioredoxin [Arabidopsis thaliana]
  misc_feature (1)..(147): Homolog of NCBI NO: 6539610 NR Description: thioredoxin m2 [Arabidopsis thaliana]
  misc_feature (1)..(147): Homolog of NCBI NO: 15236327 NR Description: thioredoxin M-type 2, chloroplast precursor
  misc_feature (1)..(147): Homolog of NCBI NO: 11135407 NR Description: Thioredoxin M-type, chloroplast precursor (TRX-M)
  misc_feature (1)..(147): Homolog of NCBI NO: 30678634 NR Description: thioredoxin M-type 1, chloroplast precursor

SEQ ID NO: 42842 - DNA, 976 bp, Arabidopsis thaliana
  misc_feature (1)..(976): Ceres Seq. ID no. 12604796
  misc_feature: MA Experiment ID: 20000185 Result: Down-regulated in Transcription
  misc_feature: MA Experiment 20000185 PARAMETER Experiment Name: At_Roots__P Parameter: Age (day) Value: 7 vs. 21
  misc_feature: MA Experiment 20000185 PARAMETER Experiment Name: At_Roots__P Parameter: Organism Value: A. thaliana
  misc_feature: MA Experiment 20000185 PARAMETER Experiment Name: At_Roots__P Parameter: Tissue Value: Roots vs. Whole Plant
  misc_feature: MA Experiment ID: 20000439 Result: Down-regulated in Transcription
  misc_feature: MA Experiment 20000439 PARAMETER Experiment Name: At_Roots__P Parameter: Age (day) Value: 14 vs. 21
  misc_feature: MA Experiment 20000439 PARAMETER Experiment Name: At_Roots__P Parameter: Organism Value: A. thaliana
  misc_feature: MA Experiment 20000439 PARAMETER Experiment Name: At_Roots__P Parameter: Tissue Value: Roots vs. Whole Plant
  misc_feature: MA Experiment ID: 20000527 Result: Down-regulated in Transcription
  misc_feature: MA Experiment 20000527 PARAMETER Experiment Name: At_10percent_PEG_P Parameter: Age (day) Value: 20
  misc_feature: MA Experiment 20000527 PARAMETER Experiment Name: At_10percent_PEG_P Parameter: Organism Value: A. thaliana
  misc_feature: MA Experiment 20000527 PARAMETER Experiment Name: At_10percent_PEG_P Parameter: Plant Line Value: WS
  misc_feature: MA Experiment 20000527 PARAMETER Experiment Name: At_10percent_PEG_P Parameter: Timepoint (day) Value: 20
  misc_feature: MA Experiment 20000527 PARAMETER Experiment Name: At_10percent_PEG_P Parameter: Tissue Value: Whole Plant
  misc_feature: MA Experiment 20000527 PARAMETER Experiment Name: At_10percent_PEG_P Parameter: Treatment Value: 10percent PEG vs. No Treatment
  misc_feature: MA Experiment ID: 20001907 Result: Down-regulated in Transcription
  misc_feature: MA Experiment 20001907 PARAMETER Experiment Name: At_Drought_Reproduction_P Parameter: Age (day) Value: 37
  misc_feature: MA Experiment 20001907 PARAMETER Experiment Name: At_Drought_Reproduction_P Parameter: Organism Value: A. thaliana
  misc_feature: MA Experiment 20001907 PARAMETER Experiment Name: At_Drought_Reproduction_P Parameter: Plant Line Value: WS
  misc_feature: MA Experiment 20001907 PARAMETER Experiment Name: At_Drought_Reproduction_P Parameter: Timepoint (day) Value: 7
  misc_feature: MA Experiment 20001907 PARAMETER Experiment Name: At_Drought_Reproduction_P Parameter: Tissue Value: Siliques
  misc_feature: MA Experiment 20001907 PARAMETER Experiment Name: At_Drought_Reproduction_P Parameter: Treatment Value: Drought vs. No Drought
atcaactaaactttgtattcatttccaagtatcactctaaatcatctttttcgaattcgcctcccaagatatgtcgacagagtcgtacgaagacgccattaaaagactcggagagcttctcagtaagaaatcggatctcgggaacgtggcagccgcaaagatcaagaagttaacggatgagttagaggaacttgattccaacaagttagatgccgtagaacgaatcaaatccggatttctccatttcaagactaataattatgagaagaatcctactttgtacaattcacttgccaagagccagacccccaagtttttggtgtttgcttgtgcggattcacgagttagtccatctcacatcttgaatttccaacttggggaagccttcatcgttagaaacattgcaaacatggtgccaccttatgacaagacaaagcactctaatgttggtgcggcccttgaatatccaattacagtcctcaacgtggagaacattcttgttattggacacagctgttgtggtggaataaagggactcatggccattgaagataatacagctcccactaagaccgagttcatagaaaactggatccagatctgtgcaccggccaagaacaggatcaagcaggattgtaaagacctaagctttgaagatcagtgcaccaactgtgagaaggaagccgtgaacgtgtccttggggaatcttttgtcttacccattcgtgagagaaagagtggtgaagaacaagcttgccataagaggagctcactatgatttcgtaaaaggaacgtttgatctttgggaacttgacttcaagactacccctgcctttgccttgtcttaaaagattcctcctactcaaatattttctctatgttgtttctaattatgttcttataatcttcttctgttgcttctgtaatgtcatctttgctacttctattccaatagaaatgaataaagctttaaagag

SEQ ID NO: 42843 - protein, 258 aa, Arabidopsis thaliana
  peptide (1)..(258): Ceres Seq. ID no. 12604797
  misc_feature (1)..(257): Homolog of NCBI NO: 21903379 NR Description: Carbonic anhydrase 2 (Carbonate dehydratase 2)
  misc_feature (1)..(257): Homolog of NCBI NO: 30685030 NR Description: CARBONIC ANHYDRASE 2 [Arabidopsis thaliana]
  misc_feature (1)..(257): Homolog of NCBI NO: 22550386 NR Description: beta-carbonic anhydrase [Nicotiana tabacum]
  misc_feature (1)..(257): Homolog of NCBI NO: 7436815 NR Description: carbonate dehydratase (EC 4.2.1.1), chloroplast -
  misc_feature (1)..(257): Homolog of NCBI NO: 115473 NR Description: CARBONIC ANHYDRASE, CHLOROPLAST PRECURSOR
  misc_feature (1)..(257): Homolog of NCBI NO: 3061271 NR Description: NPCA1 [Nicotiana paniculata]
  misc_feature (7)..(248): Homolog of NCBI NO: 27652184 NR Description: carbonic anhydrase 2 [Flaveria bidentis]
  misc_feature (1)..(258): Homolog of NCBI NO: 30698715 NR Description: carbonic anhydrase -related [Arabidopsis
  misc_feature (1)..(258): Homolog of NCBI NO: 15223141 NR Description: carbonic anhydrase, putative
  misc_feature (1)..(258): Homolog of NCBI NO: 15220853 NR Description: putative carbonic anhydrase
MSTESYEDAIKRLGELLSKKSDLGNVAAAKIKKLTDELEELDSNKLDAVERIKSGFLHFKTNNYEKNPTLYNSLAKSQTPKFLVFACADSRVSPSHILNFQLGEAFIVRNIANMVPPYDKTKHSNVGAALEYPITVLNVENILVIGHSCCGGIKGLMAIEDNTAPTKTEFIENWIQICAPAKNRIKQDCKDLSFEDQCTNCEKEAVNVSLGNLLSYPFVRERVVKNKLAIRGAHYDFVKGTFDLWELDFKTTPAFALS

SEQ ID NO: 42844 - protein, 145 aa, Arabidopsis thaliana
  peptide (1)..(145): Ceres Seq. ID no. 12604798
  misc_feature (1)..(144): Homolog of NCBI NO: 21903379 NR Description: Carbonic anhydrase 2 (Carbonate dehydratase 2)
  misc_feature (1)..(144): Homolog of NCBI NO: 30685030 NR Description: CARBONIC ANHYDRASE 2 [Arabidopsis thaliana]
  misc_feature (1)..(144): Homolog of NCBI NO: 22550386 NR Description: beta-carbonic anhydrase [Nicotiana tabacum]
  misc_feature (1)..(144): Homolog of NCBI NO: 7436815 NR Description: carbonate dehydratase (EC 4.2.1.1), chloroplast -
  misc_feature (1)..(144): Homolog of NCBI NO: 115473 NR Description: CARBONIC ANHYDRASE, CHLOROPLAST PRECURSOR
  misc_feature (1)..(144): Homolog of NCBI NO: 3061271 NR Description: NPCA1 [Nicotiana paniculata]
  misc_feature (1)..(135): Homolog of NCBI NO: 27652184 NR Description: carbonic anhydrase 2 [Flaveria bidentis]
  misc_feature (1)..(145): Homolog of NCBI NO: 30698715 NR Description: carbonic anhydrase -related [Arabidopsis
  misc_feature (1)..(145): Homolog of NCBI NO: 15223141 NR Description: carbonic anhydrase, putative
  misc_feature (1)..(145): Homolog of NCBI NO: 15220853 NR Description: putative carbonic anhydrase
MVPPYDKTKHSNVGAALEYPITVLNVENILVIGHSCCGGIKGLMAIEDNTAPTKTEFIENWIQICAPAKNRIKQDCKDLSFEDQCTNCEKEAVNVSLGNLLSYPFVRERVVKNKLAIRGAHYDFVKGTFDLWELDFKTTPAFALS

SEQ ID NO: 42845 - DNA, 1203 bp, Arabidopsis thaliana
  misc_feature (1)..(1203): Ceres Seq. ID no. 12394530
  misc_feature: MA Experiment ID: 108461 Result: Up-regulated in Transcription
  misc_feature: MA Experiment 108461 PARAMETER Experiment Name: At_Germinating_Seeds_cDNA_P Parameter: Age (day) Value: 1 vs. 0
  misc_feature: MA Experiment 108461 PARAMETER Experiment Name: At_Germinating_Seeds_cDNA_P Parameter: Tissue Value: Germinating Seeds
  misc_feature: MA Experiment ID: 108462 Result: Up-regulated in Transcription
  misc_feature: MA Experiment 108462 PARAMETER Experiment Name: At_Germinating_Seeds_cDNA_P Parameter: Age (day) Value: 2 vs. 0
  misc_feature: MA Experiment 108462 PARAMETER Experiment Name: At_Germinating_Seeds_cDNA_P Parameter: Tissue Value: Germinating Seeds
  misc_feature: MA Experiment ID: 108463 Result: Up-regulated in Transcription
  misc_feature: MA Experiment 108463 PARAMETER Experiment Name: At_Germinating_Seeds_cDNA_P Parameter: Age (day) Value: 3 vs. 0
  misc_feature: MA Experiment 108463 PARAMETER Experiment Name: At_Germinating_Seeds_cDNA_P Parameter: Tissue Value: Germinating Seeds
  misc_feature: MA Experiment ID: 108464 Result: Up-regulated in Transcription
  misc_feature: MA Experiment 108464 PARAMETER Experiment Name: At_Germinating_Seeds_cDNA_P Parameter: Age (day) Value: 4 vs. 0
  misc_feature: MA Experiment 108464 PARAMETER Experiment Name: At_Germinating_Seeds_cDNA_P Parameter: Tissue Value: Germinating Seeds
  misc_feature: MA Experiment ID: 108501 Result: Down-regulated in Transcription
  misc_feature: MA Experiment 108501 PARAMETER Experiment Name: At_ap2_floral_buds_cDNA_P Parameter: Plant Line Value: ap2 (Ler.)
  misc_feature: MA Experiment 108501 PARAMETER Experiment Name: At_ap2_floral_buds_cDNA_P Parameter: Tissue Value: Closed Flower
  misc_feature: MA Experiment ID: 20000314 Result: Up-regulated in Transcription
  misc_feature: MA Experiment 20000314 PARAMETER Experiment Name: At_14day_Shoots-Roots_Sub_P Parameter: Age (day) Value: 14
  misc_feature: MA Experiment 20000314 PARAMETER Experiment Name: At_14day_Shoots-Roots_Sub_P Parameter: Organism Value: A. thaliana
  misc_feature: MA Experiment 20000314 PARAMETER Experiment Name: At_14day_Shoots-Roots_Sub_P Parameter: Plant Line Value: WS
  misc_feature: MA Experiment 20000314 PARAMETER Experiment Name: At_14day_Shoots-Roots_Sub_P Parameter: Tissue Value: Roots vs. Whole Plant
  misc_feature: MA Experiment ID: 20000315 Result: Up-regulated in Transcription
  misc_feature: MA Experiment 20000315 PARAMETER Experiment Name: At_14day_Shoots-Roots_Sub_P Parameter: Age (day) Value: 14
  misc_feature: MA Experiment 20000315 PARAMETER Experiment Name: At_14day_Shoots-Roots_Sub_P Parameter: Organism Value: A. thaliana
  misc_feature: MA Experiment 20000315 PARAMETER Experiment Name: At_14day_Shoots-Roots_Sub_P Parameter: Plant Line Value: WS
  misc_feature: MA Experiment 20000315 PARAMETER Experiment Name: At_14day_Shoots-Roots_Sub_P Parameter: Tissue Value: Shoots vs. Whole Plant
  misc_feature: MA Experiment ID: 20000327 Result: Up-regulated in Transcription
  misc_feature: MA Experiment 20000327 PARAMETER Experiment Name: At_42deg_Heat_Sub_P Parameter: Age (day) Value: 14
  misc_feature: MA Experiment 20000327 PARAMETER Experiment Name: At_42deg_Heat_Sub_P Parameter: Organism Value: A. thaliana
  misc_feature: MA Experiment 20000327 PARAMETER Experiment Name: At_42deg_Heat_Sub_P Parameter: Plant Line Value: WS
  misc_feature: MA Experiment 20000327 PARAMETER Experiment Name: At_42deg_Heat_Sub_P Parameter: Temperature (deg C) Value: 42 vs. 22
  misc_feature: MA Experiment 20000327 PARAMETER Experiment Name: At_42deg_Heat_Sub_P Parameter: Timepoint (hr) Value: 1
  misc_feature: MA Experiment 20000327 PARAMETER Experiment Name: At_42deg_Heat_Sub_P Parameter: Tissue Value: Aerial
aatttaaatttctctttctatctactataaaaagtgactctctaagaactccaaagattagaacattgaattgaattagccatggagaagaatacttctcaaaccatcttctccaacttttttcttctccttctcctttcttcatgtgtctctgctcagctccggacaggtttctaccagaactcatgtccgaacgtggaaaccattgtacgtaacgctgtccgtcagaaattccagcagactttcgttaccgctccggccactcttcgcctcttcttccacgattgcttcgttcgtggatgtgatgcgtcaataatgatagcatcaccatcggagagagaccatccagatgacatgtcattggccggagacggattcgacacggtggtgaaggcgaagcaagccgttgatagcaatcccaattgccgcaacaaagtctcatgtgctgacattttggctctcgccactcgtgaagtcgtcgttttgaccggaggaccaagctacccggtggagctagggaggagagatggcagaatctccacgaaggccagcgttcaaagccaattgcctcagcccgagtttaacctaaaccagctcaacggcatgtttagccgtcacggcctctctcaaaccgatatgattgccctctcaggagcacacactataggatttgcacattgtggaaaaatgtcaaagagaatatacaattttagccctacaacacgtatcgacccgagtataaaccgtggatacgtggttcagcttaagcaaatgtgcccgatcggtgtcgacgtaagaatcgcaatcaacatggatccgaccagtccacgtactttcgataatgcttatttcaagaatctccaacaaggaaagggtttgttcacgtcagatcaaatcttgttcacagatcaacggtcaagatctacagttaattcgtttgccaatagtgaaggagcttttagacaagctttcatcacagcgatcacgaagttaggtcgggttggtgttttgactggtaatgctggtgagattcgaagggattgttcacgtgtcaattagtgtgatttgaggttttctttcttttattccttaaagaggattttttttttttaataataaaatttaatttcttgttgtcaaaataaggagttcataagtgtgaaacatggaaacttaaattaataagatgggtttatttcgttg

SEQ ID NO: 42846 - protein, 325 aa, Arabidopsis thaliana
  peptide (1)..(325): Ceres Seq. ID no. 12394531
  misc_feature (43)..(289): Pfam Name: Peroxidase Pfam Description: Peroxidase
  misc_feature (15)..(325): Homolog of NCBI NO: 21554605 NR Description: peroxidase, prxr2 [Arabidopsis thaliana]
  misc_feature (15)..(325): Homolog of NCBI NO: 15235597 NR Description: peroxidase, putative
  misc_feature (16)..(325): Homolog of NCBI NO: 28629828 NR Description: peroxidase 1 [Artemisia annua]
  misc_feature (1)..(325): Homolog of NCBI NO: 17979440 NR Description: putative peroxidase [Arabidopsis thaliana]
  misc_feature (17)..(325): Homolog of NCBI NO: 14485511 NR Description: putative peroxidase [Solanum tuberosum]
  misc_feature (1)..(325): Homolog of NCBI NO: 15235600 NR Description: peroxidase, putative
  misc_feature (9)..(322): Homolog of NCBI NO: 4138647 NR Description: peroxidase [Trifolium repens]
  misc_feature (6)..(325): Homolog of NCBI NO: 15224266 NR Description: peroxidase, putative; protein id: At2g18980.1
  misc_feature (6)..(325): Homolog of NCBI NO: 1620369 NR Description: peroxidase ATP22a [Arabidopsis thaliana]
  misc_feature (1)..(325): Homolog of NCBI NO: 15234648 NR Description: peroxidase, putative
MEKNTSQTIFSNFFLLLLLSSCVSAQLRTGFYQNSCPNVETIVRNAVRQKFQQTFVTAPATLRLFFHDCFVRGCDASIMIASPSERDHPDDMSLAGDGFDTVVKAKQAVDSNPNCRNKVSCADILALATREVVVLTGGPSYPVELGRRDGRISTKASVQSQLPQPEFNLNQLNGMFSRHGLSQTDMIALSGAHTIGFAHCGKMSKRIYNFSPTTRIDPSINRGYVVQLKQMCPIGVDVRIAINMDPTSPRTFDNAYFKNLQQGKGLFTSDQILFTDQRSRSTVNSFANSEGAFRQAFITAITKLGRVGVLTGNAGEIRRDCSRVN

SEQ ID NO: 42847 - protein, 247 aa, Arabidopsis thaliana
  peptide (1)..(247): Ceres Seq. ID no. 12394532
  misc_feature (1)..(211): Pfam Name: Peroxidase Pfam Description: Peroxidase
  misc_feature (1)..(247): Homolog of NCBI NO: 21554605 NR Description: peroxidase, prxr2 [Arabidopsis thaliana]
  misc_feature (1)..(247): Homolog of NCBI NO: 15235597 NR Description: peroxidase, putative
  misc_feature (1)..(247): Homolog of NCBI NO: 28629828 NR Description: peroxidase 1 [Artemisia annua]
  misc_feature (1)..(247): Homolog of NCBI NO: 17979440 NR Description: putative peroxidase [Arabidopsis thaliana]
  misc_feature (1)..(247): Homolog of NCBI NO: 14485511 NR Description: putative peroxidase [Solanum tuberosum]
  misc_feature (1)..(247): Homolog of NCBI NO: 15235600 NR Description: peroxidase, putative
  misc_feature (1)..(244): Homolog of NCBI NO: 4138647 NR Description: peroxidase [Trifolium repens]
  misc_feature (1)..(247): Homolog of NCBI NO: 15224266 NR Description: peroxidase, putative; protein id: At2g18980.1
  misc_feature (1)..(247): Homolog of NCBI NO: 1620369 NR Description: peroxidase ATP22a [Arabidopsis thaliana]
  misc_feature (1)..(247): Homolog of NCBI NO: 15234648 NR Description: peroxidase, putative
MIASPSERDHPDDMSLAGDGFDTVVKAKQAVDSNPNCRNKVSCADILALATREVVVLTGGPSYPVELGRRDGRISTKASVQSQLPQPEFNLNQLNGMFSRHGLSQTDMIALSGAHTIGFAHCGKMSKRIYNFSPTTRIDPSINRGYVVQLKQMCPIGVDVRIAINMDPTSPRTFDNAYFKNLQQGKGLFTSDQILFTDQRSRSTVNSFANSEGAFRQAFITAITKLGRVGVLTGNAGEIRRDCSRVN

SEQ ID NO: 42848 - protein, 234 aa, Arabidopsis thaliana
  peptide (1)..(234): Ceres Seq. ID no. 12394533
  misc_feature (1)..(198): Pfam Name: Peroxidase Pfam Description: Peroxidase
  misc_feature (1)..(234): Homolog of NCBI NO: 21554605 NR Description: peroxidase, prxr2 [Arabidopsis thaliana]
  misc_feature (1)..(234): Homolog of NCBI NO: 15235597 NR Description: peroxidase, putative
  misc_feature (1)..(234): Homolog of NCBI NO: 28629828 NR Description: peroxidase 1 [Artemisia annua]
  misc_feature (1)..(234): Homolog of NCBI NO: 17979440 NR Description: putative peroxidase [Arabidopsis thaliana]
  misc_feature (1)..(234): Homolog of NCBI NO: 14485511 NR Description: putative peroxidase [Solanum tuberosum]
  misc_feature (1)..(234): Homolog of NCBI NO: 15235600 NR Description: peroxidase, putative
  misc_feature (1)..(231): Homolog of NCBI NO: 4138647 NR Description: peroxidase [Trifolium repens]
  misc_feature (1)..(234): Homolog of NCBI NO: 15224266 NR Description: peroxidase, putative; protein id: At2g18980.1
  misc_feature (1)..(234): Homolog of NCBI NO: 1620369 NR Description: peroxidase ATP22a [Arabidopsis thaliana]
  misc_feature (1)..(234): Homolog of NCBI NO: 15234648 NR Description: peroxidase, putative
MSLAGDGFDTVVKAKQAVDSNPNCRNKVSCADILALATREVVVLTGGPSYPVELGRRDGRISTKASVQSQLPQPEFNLNQLNGMFSRHGLSQTDMIALSGAHTIGFAHCGKMSKRIYNFSPTTRIDPSINRGYVVQLKQMCPIGVDVRIAINMDPTSPRTFDNAYFKNLQQGKGLFTSDQILFTDQRSRSTVNSFANSEGAFRQAFITAITKLGRVGVLTGNAGEIRRDCSRVN

SEQ ID NO: 42849 - DNA, 2464 bp, Arabidopsis thaliana; identical to SEQ ID NO: 36543
  misc_feature (1)..(2464): Ceres Seq. ID no. 12377492
  misc_feature: MA Experiment ID: 20000179 Result: Up-regulated in Transcription
  misc_feature: MA Experiment 20000179 PARAMETER Experiment Name: At_Germinating_Seeds_P Parameter: Age (hr) Value: 6 vs. 0
  misc_feature: MA Experiment 20000179 PARAMETER Experiment Name: At_Germinating_Seeds_P Parameter: Tissue Value: Germinating Seeds
  misc_feature: MA Experiment ID: 20000180 Result: Up-regulated in Transcription
  misc_feature: MA Experiment 20000180 PARAMETER Experiment Name: At_Germinating_Seeds_P Parameter: Age (hr) Value: 24 vs. 0
  misc_feature: MA Experiment 20000180 PARAMETER Experiment Name: At_Germinating_Seeds_P Parameter: Tissue Value: Germinating Seeds
  misc_feature: MA Experiment ID: 20000227 Result: Up-regulated in Transcription
  misc_feature: MA Experiment 20000227 PARAMETER Experiment Name: At_Root-Tips-vs-Tops_P Parameter: Tissue Value: Root Tips vs. Root Tops
  misc_feature: MA Experiment ID: 20000234 Result: Up-regulated in Transcription
  misc_feature: MA Experiment 20000234 PARAMETER Experiment Name: At_Siliques_P Parameter: Age (day) Value: 21
  misc_feature: MA Experiment 20000234 PARAMETER Experiment Name: At_Siliques_P Parameter: Organism Value: A. thaliana
  misc_feature: MA Experiment 20000234 PARAMETER Experiment Name: At_Siliques_P Parameter: Plant Line Value: WS
  misc_feature: MA Experiment 20000234 PARAMETER Experiment Name: At_Siliques_P Parameter: Tissue Value: Less Than 5mm Siliques vs. Whole Plant
  misc_feature: MA Experiment ID: 20000235 Result: Up-regulated in Transcription
  misc_feature: MA Experiment 20000235 PARAMETER Experiment Name: At_Siliques_P Parameter: Age (day) Value: 21
  misc_feature: MA Experiment 20000235 PARAMETER Experiment Name: At_Siliques_P Parameter: Organism Value: A. thaliana
  misc_feature: MA Experiment 20000235 PARAMETER Experiment Name: At_Siliques_P Parameter: Plant Line Value: WS
  misc_feature: MA Experiment 20000235 PARAMETER Experiment Name: At_Siliques_P Parameter: Tissue Value: 5-10mm Siliques vs. Whole Plant
  misc_feature: MA Experiment ID: 20000495 Result: Up-regulated in Transcription
  misc_feature: MA Experiment 20000495 PARAMETER Experiment Name: At_Guard_Cells_P Parameter: Harvest Date Value: 8/2/2002
  misc_feature: MA Experiment 20000495 PARAMETER Experiment Name: At_Guard_Cells_P Parameter: Organism Value: A. thaliana
  misc_feature: MA Experiment 20000495 PARAMETER Experiment Name: At_Guard_Cells_P Parameter: Tissue Value: Guard Cells vs. Leaves
  misc_feature: MA Experiment ID: 20000573 Result: Down-regulated in Transcription
  misc_feature: MA Experiment 20000573 PARAMETER Experiment Name: At_100uM_ABA_Mutants__P Parameter: Organism Value: A. thaliana
  misc_feature: MA Experiment 20000573 PARAMETER Experiment Name: At_100uM_ABA_Mutants__P Parameter: Plant Line Value: CS22 vs. Ler wt
  misc_feature: MA Experiment 20000573 PARAMETER Experiment Name: At_100uM_ABA_Mutants__P Parameter: Timepoint (hr) Value: N/A
  misc_feature: MA Experiment 20000573 PARAMETER Experiment Name: At_100uM_ABA_Mutants__P Parameter: Tissue Value: Whole Plant
  misc_feature: MA Experiment 20000573 PARAMETER Experiment Name: At_100uM_ABA_Mutants__P Parameter: Treatment Value: None
  misc_feature: MA Experiment ID: 20000794 Result: Down-regulated in Transcription
  misc_feature: MA Experiment 20000794 PARAMETER Experiment Name: At_Petals_P Parameter: Age (day) Value: 23-25 days
  misc_feature: MA Experiment 20000794 PARAMETER Experiment Name: At_Petals_P Parameter: Plant Line Value: WS
  misc_feature: MA Experiment 20000794 PARAMETER Experiment Name: At_Petals_P Parameter: Tissue Value: Petals vs. Whole plant
  misc_feature: MA Experiment ID: 20001555 Result: Down-regulated in Transcription
  misc_feature: MA Experiment 20001555 PARAMETER Experiment Name: At_Drought_Soil_Dry_P Parameter: Age (day) Value: 24
  misc_feature: MA Experiment 20001555 PARAMETER Experiment Name: At_Drought_Soil_Dry_P Parameter: Organism Value: A. thaliana
  misc_feature: MA Experiment 20001555 PARAMETER Experiment Name: At_Drought_Soil_Dry_P Parameter: Plant Line Value: WS
  misc_feature: MA Experiment 20001555 PARAMETER Experiment Name: At_Drought_Soil_Dry_P Parameter: Post Timepoint (hr) Value: None
  misc_feature: MA Experiment 20001555 PARAMETER Experiment Name: At_Drought_Soil_Dry_P Parameter: Post-Treatment Value: None
  misc_feature: MA Experiment 20001555 PARAMETER Experiment Name: At_Drought_Soil_Dry_P Parameter: Timepoint (day) Value: 10
  misc_feature: MA Experiment 20001555 PARAMETER Experiment Name: At_Drought_Soil_Dry_P Parameter: Treatment Value: Drought vs. No Drought
  misc_feature: MA Experiment ID: 20001560 Result: Up-regulated in Transcription
  misc_feature: MA Experiment 20001560 PARAMETER Experiment Name: At_Drought_Soil_Dry_P Parameter: Age (day) Value: 28
  misc_feature: MA Experiment 20001560 PARAMETER Experiment Name: At_Drought_Soil_Dry_P Parameter: Organism Value: A. thaliana
  misc_feature: MA Experiment 20001560 PARAMETER Experiment Name: At_Drought_Soil_Dry_P Parameter: Plant Line Value: WS
  misc_feature: MA Experiment 20001560 PARAMETER Experiment Name: At_Drought_Soil_Dry_P Parameter: Post Timepoint (hr) Value: None
  misc_feature: MA Experiment 20001560 PARAMETER Experiment Name: At_Drought_Soil_Dry_P Parameter: Post-Treatment Value: None
  misc_feature: MA Experiment 20001560 PARAMETER Experiment Name: At_Drought_Soil_Dry_P Parameter: Timepoint (day) Value: 14
  misc_feature: MA Experiment 20001560 PARAMETER Experiment Name: At_Drought_Soil_Dry_P Parameter: Treatment Value: Drought vs. No Drought
  misc_feature: MA Experiment ID: 20001911 Result: Down-regulated in Transcription
  misc_feature: MA Experiment 20001911 PARAMETER Experiment Name: At_Drought_Reproduction_P Parameter: Age (day) Value: 40
  misc_feature: MA Experiment 20001911 PARAMETER Experiment Name: At_Drought_Reproduction_P Parameter: Organism Value: A. thaliana
  misc_feature: MA Experiment 20001911 PARAMETER Experiment Name: At_Drought_Reproduction_P Parameter: Plant Line Value: WS
  misc_feature: MA Experiment 20001911 PARAMETER Experiment Name: At_Drought_Reproduction_P Parameter: Timepoint (day) Value: 10
  misc_feature: MA Experiment 20001911 PARAMETER Experiment Name: At_Drought_Reproduction_P Parameter: Tissue Value: Flowers
  misc_feature: MA Experiment 20001911 PARAMETER Experiment Name: At_Drought_Reproduction_P Parameter: Treatment Value: Drought vs. No Drought

SEQ ID NO: 42850 - protein, 732 aa, Arabidopsis thaliana; identical to SEQ ID NO: 36544
  peptide (1)..(732): Ceres Seq. ID no. 12377493
  misc_feature (1)..(732): Homolog of NCBI NO: 14970839 NR Description: beta-galactosidase [Fragaria x ananassa]
  misc_feature (1)..(731): Homolog of NCBI NO: 4138137 NR Description: ss-galactosidase [Lycopersicon esculentum]
  misc_feature (1)..(732): Homolog of NCBI NO: 7488063 NR Description: probable beta-galactosidase (EC 3.2.1.23)
  misc_feature (8)..(731): Homolog of NCBI NO: 7939625 NR Description: putative beta-galactosidase [Lycopersicon
  misc_feature (24)..(732): Homolog of NCBI NO: 20514290 NR Description: beta-galactosidase [Oryza sativa (japonica
  misc_feature (1)..(732): Homolog of NCBI NO: 25326166 NR Description: beta-galactosidase like protein [imported] -
  misc_feature (1)..(732): Homolog of NCBI NO: 18419821 NR Description: glycosyl hydrolase family 35 (beta-galactosidase)
  misc_feature (8)..(732): Homolog of NCBI NO: 3860321 NR Description: beta-galactosidase [Cicer arietinum]
  misc_feature (4)..(732): Homolog of NCBI NO: 7682680 NR Description: beta galactosidase [Vigna radiata]
  misc_feature (8)..(731): Homolog of NCBI NO: 15081596 NR Description: putative beta-galactosidase BG1 [Vitis vinifera]
  misc_feature (1)..(732): Homolog of NCBI NO: 14970839 NR Description: beta-galactosidase [Fragaria x ananassa]
  misc_feature (1)..(731): Homolog of NCBI NO: 4138137 NR Description: ss-galactosidase [Lycopersicon esculentum]
  misc_feature (1)..(732): Homolog of NCBI NO: 7488063 NR Description: probable beta-galactosidase (EC 3.2.1.23)
  misc_feature (8)..(731): Homolog of NCBI NO: 7939625 NR Description: putative beta-galactosidase [Lycopersicon
  misc_feature (24)..(732): Homolog of NCBI NO: 20514290 NR Description: beta-galactosidase [Oryza sativa (japonica
  misc_feature (1)..(732): Homolog of NCBI NO: 25326166 NR Description: beta-galactosidase like protein [imported] -
  misc_feature (1)..(732): Homolog of NCBI NO: 18419821 NR Description: glycosyl hydrolase family 35 (beta-galactosidase)
  misc_feature (8)..(732): Homolog of NCBI NO: 3860321 NR Description: beta-galactosidase [Cicer arietinum]
  misc_feature (4)..(732): Homolog of NCBI NO: 7682680 NR Description: beta galactosidase [Vigna radiata]
  misc_feature (8)..(731): Homolog of NCBI NO: 15081596 NR Description: putative beta-galactosidase BG1 [Vitis vinifera]

SEQ ID NO: 42851 - protein, 714 aa, Arabidopsis thaliana; identical to SEQ ID NO: 36545
  peptide (1)..(714): Ceres Seq. ID no. 12377494
  misc_feature (1)..(714): Homolog of NCBI NO: 14970839 NR Description: beta-galactosidase [Fragaria x ananassa]
  misc_feature (1)..(713): Homolog of NCBI NO: 4138137 NR Description: ss-galactosidase [Lycopersicon esculentum]
  misc_feature (1)..(714): Homolog of NCBI NO: 7488063 NR Description: probable beta-galactosidase (EC 3.2.1.23)
  misc_feature (1)..(713): Homolog of NCBI NO: 7939625 NR Description: putative beta-galactosidase [Lycopersicon
  misc_feature (6)..(714): Homolog of NCBI NO: 20514290 NR Description: beta-galactosidase [Oryza sativa (japonica
  misc_feature (1)..(714): Homolog of NCBI NO: 25326166 NR Description: beta-galactosidase like protein [imported] -
  misc_feature (1)..(714): Homolog of NCBI NO: 18419821 NR Description: glycosyl hydrolase family 35 (beta-galactosidase)
  misc_feature (1)..(714): Homolog of NCBI NO: 3860321 NR Description: beta-galactosidase [Cicer arietinum]
  misc_feature (1)..(714): Homolog of NCBI NO: 7682680 NR Description: beta galactosidase [Vigna radiata]
  misc_feature (1)..(713): Homolog of NCBI NO: 15081596 NR Description: putative beta-galactosidase BG1 [Vitis vinifera]
  misc_feature (1)..(714): Homolog of NCBI NO: 14970839 NR Description: beta-galactosidase [Fragaria x ananassa]
  misc_feature (1)..(713): Homolog of NCBI NO: 4138137 NR Description: ss-galactosidase [Lycopersicon esculentum]
  misc_feature (1)..(714): Homolog of NCBI NO: 7488063 NR Description: probable beta-galactosidase (EC 3.2.1.23)
  misc_feature (1)..(713): Homolog of NCBI NO: 7939625 NR Description: putative beta-galactosidase [Lycopersicon
  misc_feature (6)..(714): Homolog of NCBI NO: 20514290 NR Description: beta-galactosidase [Oryza sativa (japonica
  misc_feature (1)..(714): Homolog of NCBI NO: 25326166 NR Description: beta-galactosidase like protein [imported] -
  misc_feature (1)..(714): Homolog of NCBI NO: 18419821 NR Description: glycosyl hydrolase family 35 (beta-galactosidase)
  misc_feature (1)..(714): Homolog of NCBI NO: 3860321 NR Description: beta-galactosidase [Cicer arietinum]
  misc_feature (1)..(714): Homolog of NCBI NO: 7682680 NR Description: beta galactosidase [Vigna radiata]
  misc_feature (1)..(713): Homolog of NCBI NO: 15081596 NR Description: putative beta-galactosidase BG1 [Vitis vinifera]

SEQ ID NO: 42852 - protein, 672 aa, Arabidopsis thaliana; identical to SEQ ID NO: 36546
  peptide (1)..(672): Ceres Seq. ID no. 12377495
  misc_feature (1)..(672): Homolog of NCBI NO: 14970839 NR Description: beta-galactosidase [Fragaria x ananassa]
  misc_feature (1)..(671): Homolog of NCBI NO: 4138137 NR Description: ss-galactosidase [Lycopersicon esculentum]
  misc_feature (1)..(672): Homolog of NCBI NO: 7488063 NR Description: probable beta-galactosidase (EC 3.2.1.23)
  misc_feature (1)..(671): Homolog of NCBI NO: 7939625 NR Description: putative beta-galactosidase [Lycopersicon
  misc_feature (1)..(672): Homolog of NCBI NO: 20514290 NR Description: beta-galactosidase [Oryza sativa (japonica
  misc_feature (1)..(672): Homolog of NCBI NO: 25326166 NR Description: beta-galactosidase like protein [imported] -
  misc_feature (1)..(672): Homolog of NCBI NO: 18419821 NR Description: glycosyl hydrolase family 35 (beta-galactosidase)
  misc_feature (1)..(672): Homolog of NCBI NO: 3860321 NR Description: beta-galactosidase [Cicer arietinum]
  misc_feature (1)..(672): Homolog of NCBI NO: 7682680 NR Description: beta galactosidase [Vigna radiata]
  misc_feature (1)..(671): Homolog of NCBI NO: 15081596 NR Description: putative beta-galactosidase BG1 [Vitis vinifera]
  misc_feature (1)..(672): Homolog of NCBI NO: 14970839 NR Description: beta-galactosidase [Fragaria x ananassa]
  misc_feature (1)..(671): Homolog of NCBI NO: 4138137 NR Description: ss-galactosidase [Lycopersicon esculentum]
  misc_feature (1)..(672): Homolog of NCBI NO: 7488063 NR Description: probable beta-galactosidase (EC 3.2.1.23)
  misc_feature (1)..(671): Homolog of NCBI NO: 7939625 NR Description: putative beta-galactosidase [Lycopersicon
  misc_feature (1)..(672): Homolog of NCBI NO: 20514290 NR Description: beta-galactosidase [Oryza sativa (japonica
  misc_feature (1)..(672): Homolog of NCBI NO: 25326166 NR Description: beta-galactosidase like protein [imported] -
  misc_feature (1)..(672): Homolog of NCBI NO: 18419821 NR Description: glycosyl hydrolase family 35 (beta-galactosidase)
  misc_feature (1)..(672): Homolog of NCBI NO: 3860321 NR Description: beta-galactosidase [Cicer arietinum]
  misc_feature (1)..(672): Homolog of NCBI NO: 7682680 NR Description: beta galactosidase [Vigna radiata]
  misc_feature (1)..(671): Homolog of NCBI NO: 15081596 NR Description: putative beta-galactosidase BG1 [Vitis vinifera]

SEQ ID NO: 42853 - DNA, 1356 bp, Arabidopsis thaliana
  misc_feature (1)..(1356): Ceres Seq. ID no. 12395716
  misc_feature: MA Experiment ID: 108461 Result: Down-regulated in Transcription
  misc_feature: MA Experiment 108461 PARAMETER Experiment Name: At_Germinating_Seeds_cDNA_P Parameter: Age (day) Value: 1 vs. 0
  misc_feature: MA Experiment 108461 PARAMETER Experiment Name: At_Germinating_Seeds_cDNA_P Parameter: Tissue Value: Germinating Seeds
  misc_feature: MA Experiment ID: 108462 Result: Down-regulated in Transcription
  misc_feature: MA Experiment 108462 PARAMETER Experiment Name: At_Germinating_Seeds_cDNA_P Parameter: Age (day) Value: 2 vs. 0
  misc_feature: MA Experiment 108462 PARAMETER Experiment Name: At_Germinating_Seeds_cDNA_P Parameter: Tissue Value: Germinating Seeds
  misc_feature: MA Experiment ID: 108463 Result: Down-regulated in Transcription
  misc_feature: MA Experiment 108463 PARAMETER Experiment Name: At_Germinating_Seeds_cDNA_P Parameter: Age (day) Value: 3 vs. 0
  misc_feature: MA Experiment 108463 PARAMETER Experiment Name: At_Germinating_Seeds_cDNA_P Parameter: Tissue Value: Germinating Seeds
  misc_feature: MA Experiment ID: 108464 Result: Down-regulated in Transcription
  misc_feature: MA Experiment 108464 PARAMETER Experiment Name: At_Germinating_Seeds_cDNA_P Parameter: Age (day) Value: 4 vs. 0
  misc_feature: MA Experiment 108464 PARAMETER Experiment Name: At_Germinating_Seeds_cDNA_P Parameter: Tissue Value: Germinating Seeds
  misc_feature: MA Experiment ID: 108595 Result: Down-regulated in Transcription
  misc_feature: MA Experiment 108595 PARAMETER Experiment Name: At_Ler-pi_Ovule_cDNA_P Parameter: Plant Line Value: null
  misc_feature: MA Experiment ID: 20000179 Result: Down-regulated in Transcription
  misc_feature: MA Experiment 20000179 PARAMETER Experiment Name: At_Germinating_Seeds_P Parameter: Age (hr) Value: 6 vs. 0
  misc_feature: MA Experiment 20000179 PARAMETER Experiment Name: At_Germinating_Seeds_P Parameter: Tissue Value: Germinating Seeds
  misc_feature: MA Experiment ID: 20000180 Result: Down-regulated in Transcription
  misc_feature: MA Experiment 20000180 PARAMETER Experiment Name: At_Germinating_Seeds_P Parameter: Age (hr) Value: 24 vs. 0
  misc_feature: MA Experiment 20000180 PARAMETER Experiment Name: At_Germinating_Seeds_P Parameter: Tissue Value: Germinating Seeds
  misc_feature: MA Experiment ID: 20000184 Result: Down-regulated in Transcription
  misc_feature: MA Experiment 20000184 PARAMETER Experiment Name: At_Shoots__P Parameter: Age (day) Value: 7
  misc_feature: MA Experiment 20000184 PARAMETER Experiment Name: At_Shoots__P Parameter: Tissue Value: Shoots vs. Whole Plant
  misc_feature: MA Experiment ID: 20000224 Result: Up-regulated in Transcription
aaacccaaacatttttcgattttccccgactttctccgacgatgcgatggcgatagcgatggtgattccggtgacttatgctccgacgattgacacgatcatttgaggcagtctcctttgtccagattttcttcttcaacctctttctcttgcttacccaccaaattcatcatctttgaaactgcttcatccctttcgctttggtgattctgaagactccgctttatacccattttgatctggagaaggatatagatgaagtgctacagtcgcatactgtttattcaaatgtttcgaaaggagttcttgcaaaatcgaaagacttgatgaagtcgtttggatcagatgatcatacgaaaatatgcatcgatattttggagaaaggagagcttcaagttgctggaaaagaaagagaatcacagttctcaagccagtttcgggatatagcaacgattgttatgcagaaaactatcaaccctgaaacacaacgaccttataccatcagcatggtagagcgcctaatgcatgaaattcattttgctgttgatcctcatagtaattccaagaagcaggcacttgatgtcatccgtgagctgcaaaagcacttccctataaagcgttctccaatgagactgcgtcttactgttcctgttcaaaatttcccctcgcttctggagaagctaaaagaatgggatggtagtgttgtctccaaagacgaatctggaacacagatgtccactgtctgcgagatggaaccgggcctattccgagagtgtgattcccatgtgaggagtatccagggaagactagaaatactcgctgtatcagttcatgcagaaggtgacacaagcatggatcattacgatgagcatgatgatatggcattgcaaacccacaagccgttgttacctgctgagactgagactaaggatttgaccgatcccgtcgttgaacttagcaagaaactgcagaagcaagagataagtactacagataacataaagcaagaaggtggagaagaaaagaaggggaccaagtgcagcacttgcaacacgttcgttggagaggctaagcaatacagagagcactgtaagagtgattggcacaaacacaaccttaagcgtaagactcggaaactccctcctattagtgctgacgaatgcatgtctgagattgacatggacgactctagagcagatttgaaagactactctttctgaaactacaattttctccttttgtgcttttaattttgtcaatgtgttaaatctcgtagtcatatgtgagtatgaatacacaaaacttgtggaatgaaattttgcgcaaactttaagagtaaaaacttgtgtttaagag

SEQ ID NO: 42854 - protein, 297 aa, Arabidopsis thaliana; identical to SEQ ID NO: 34951
  peptide (1)..(297): Ceres Seq. ID no. 12395717
  misc_feature (1)..(171): Pfam Name: Uncharacterized protein family UPF0023 Pfam Description: Uncharacterized protein family UPF0023
  misc_feature (1)..(173): Homolog of NCBI NO: 39586134 NR Description: Hypothetical protein CBG15250 [Caenorhabditis
  misc_feature (1)..(177): Homolog of NCBI NO: 28828466 NR Description: similar to Homo sapiens (Human). Hypothetical
  misc_feature (1)..(177): Homolog of NCBI NO: 31225743 NR Description: ENSANGP00000009959 [Anopheles gambiae]
  misc_feature (1)..(177): Homolog of NCBI NO: 4929663 NR Description: CGI-97 protein [Homo sapiens]
  misc_feature (1)..(177): Homolog of NCBI NO: 28416940 NR Description: Shwachman-Bodian-Diamond syndrome protein [Homo
  misc_feature (1)..(177): Homolog of NCBI NO: 29476858 NR Description: Unknown (protein for MGC:56700) [Danio rerio]
  misc_feature (1)..(177): Homolog of NCBI NO: 27664348 NR Description: similar to RIKEN cDNA 4733401P19
  misc_feature (1)..(177): Homolog of NCBI NO: 23956138 NR Description: RIKEN cDNA 4733401P19 [Mus musculus]
  misc_feature (1)..(297): Homolog of NCBI NO: 21554225 NR Description: unknown [Arabidopsis thaliana]
  misc_feature (1)..(297): Homolog of NCBI NO: 18401084 NR Description: expressed protein

SEQ ID NO: 42855 - protein, 253 aa, Arabidopsis thaliana; identical to SEQ ID NO: 34952
  peptide (1)..(253): Ceres Seq. ID no. 12395718
  misc_feature (1)..(127): Pfam Name: Uncharacterized protein family UPF0023 Pfam Description: Uncharacterized protein family UPF0023
  misc_feature (1)..(129): Homolog of NCBI NO: 39586134 NR Description: Hypothetical protein CBG15250 [Caenorhabditis
  misc_feature (1)..(133): Homolog of NCBI NO: 28828466 NR Description: similar to Homo sapiens (Human). Hypothetical
  misc_feature (1)..(133): Homolog of NCBI NO: 31225743 NR Description: ENSANGP00000009959 [Anopheles gambiae]
  misc_feature (1)..(133): Homolog of NCBI NO: 4929663 NR Description: CGI-97 protein [Homo sapiens]
  misc_feature (1)..(133): Homolog of NCBI NO: 28416940 NR Description: Shwachman-Bodian-Diamond syndrome protein [Homo
  misc_feature (1)..(133): Homolog of NCBI NO: 29476858 NR Description: Unknown (protein for MGC:56700) [Danio rerio]
  misc_feature (1)..(133): Homolog of NCBI NO: 27664348 NR Description: similar to RIKEN cDNA 4733401P19
  misc_feature (1)..(133): Homolog of NCBI NO: 23956138 NR Description: RIKEN cDNA 4733401P19 [Mus musculus]
  misc_feature (1)..(253): Homolog of NCBI NO: 21554225 NR Description: unknown [Arabidopsis thaliana]
  misc_feature (1)..(253): Homolog of NCBI NO: 18401084 NR Description: expressed protein

SEQ ID NO: 42856 - protein, 237 aa, Arabidopsis thaliana
  peptide (1)..(237): Ceres Seq. ID no. 12395719
  misc_feature (1)..(111): Pfam Name: Uncharacterized protein family UPF0023 Pfam Description: Uncharacterized protein family UPF0023
  misc_feature (1)..(113): Homolog of NCBI NO: 39586134 NR Description: Hypothetical protein CBG15250 [Caenorhabditis
  misc_feature (1)..(117): Homolog of NCBI NO: 28828466 NR Description: similar to Homo sapiens (Human). Hypothetical
  misc_feature (1)..(117): Homolog of NCBI NO: 31225743 NR Description: ENSANGP00000009959 [Anopheles gambiae]
  misc_feature (1)..(117): Homolog of NCBI NO: 4929663 NR Description: CGI-97 protein [Homo sapiens]
  misc_feature (1)..(117): Homolog of NCBI NO: 28416940 NR Description: Shwachman-Bodian-Diamond syndrome protein [Homo
  misc_feature (1)..(117): Homolog of NCBI NO: 29476858 NR Description: Unknown (protein for MGC:56700) [Danio rerio]
  misc_feature (1)..(117): Homolog of NCBI NO: 27664348 NR Description: similar to RIKEN cDNA 4733401P19
  misc_feature (1)..(117): Homolog of NCBI NO: 23956138 NR Description: RIKEN cDNA 4733401P19 [Mus musculus]
  misc_feature (1)..(237): Homolog of NCBI NO: 21554225 NR Description: unknown [Arabidopsis thaliana]
  misc_feature (1)..(237): Homolog of NCBI NO: 18401084 NR Description: expressed protein
MVERLMHEIHFAVDPHSNSKKQALDVIRELQKHFPIKRSPMRLRLTVPVQNFPSLLEKLKEWDGSVVSKDESGTQMSTVCEMEPGLFRECDSHVRSIQGRLEILAVSVHAEGDTSMDHYDEHDDMALQTHKPLLPAETETKDLTDPVVELSKKLQKQEISTTDNIKQEGGEEKKGTKCSTCNTFVGEAKQYREHCKSDWHKHNLKRKTRKLPPISADECMSEIDMDDSRADLKDYSF

SEQ ID NO: 42857 - DNA, 1722 bp, Arabidopsis thaliana
  misc_feature (1)..(1722): Ceres Seq. ID no. 13495795
  misc_feature: MA Experiment ID: 108595 Result: Up-regulated in Transcription
  misc_feature: MA Experiment 108595 PARAMETER Experiment Name: At_Ler-pi_Ovule_cDNA_P Parameter: Plant Line Value: null
  misc_feature: MA Experiment ID: 20000111 Result: Up-regulated in Transcription
  misc_feature: MA Experiment 20000111 PARAMETER Experiment Name: At_42deg_Heat_cDNA_P Parameter: Temperature (deg C) Value: 42 vs. 22
  misc_feature: MA Experiment 20000111 PARAMETER Experiment Name: At_42deg_Heat_cDNA_P Parameter: Timepoint (hr) Value: 6
  misc_feature: MA Experiment 20000111 PARAMETER Experiment Name: At_42deg_Heat_cDNA_P Parameter: Tissue Value: Aerial
  misc_feature: MA Experiment ID: 20000437 Result: Up-regulated in Transcription
  misc_feature: MA Experiment 20000437 PARAMETER Experiment Name: At_Drought_P Parameter: Age (day) Value: 8
  misc_feature: MA Experiment 20000437 PARAMETER Experiment Name: At_Drought_P Parameter: Organism Value: A. thaliana
  misc_feature: MA Experiment 20000437 PARAMETER Experiment Name: At_Drought_P Parameter: Plant Line Value: WS
  misc_feature: MA Experiment 20000437 PARAMETER Experiment Name: At_Drought_P Parameter: Timepoint (hr) Value: 24
  misc_feature: MA Experiment 20000437 PARAMETER Experiment Name: At_Drought_P Parameter: Tissue Value: Whole Plant
  misc_feature: MA Experiment 20000437 PARAMETER Experiment Name: At_Drought_P Parameter: Treatment Value: Drought vs. No Drought
attcaacctctctacttcagtttctctgtccccatttttcatctgagagttaaaactgtaacctcaaaatctgagataaagtcaaaaaaaaaaccccagtttatgattctcattttctctttataatcgaaagcttcgatttttaacaaaacccagaatctgtgttcttgtttttttttttttttggtgagagttatcttttttttttttggaatattgggtgagaatctgagtaatgggatttacataaaatattctatgtaaatactaaaataatctggaaattattaaatttccaaactttgtgttccattttgtggactcaaatttgtttataaagatctcaaatcagagagattgagacgaccaagaacaagcagaagaagaagaagaattgagagaatgtggtggtggtcttcttcaactaaaggtcgttcgaatctggagaggtttcttttaggaatcactcctaagcctccttccttctctcttcatcaggaacagggaaaggaggagattgagtatttcaggcttggtgatctctgggattgttatgatgagatgagtgcgtatggctttggcacacaggttgatttaaacaatggcgaaaccgttatgcagtactacgtcccgtacctatccgctatccaaatccacactaacaaacccgccttgctttccaggaaccagaatgaggtggctgaatctgagagtagcgagggttggagcgatagtgagagtgaaaagttgttgtcaaggtcaatgagcaatgattcaagcaaaacatgggatgctgtctctgaagattcggttttcgatccggatggttcaccgttgctgaaagatagacttggtaaccttgactttaagtacattgaaagagatcctccgcacaagcggattcccttaaccgacaagataaacgtattggtggagaaatatccgggactcatgaccttaaggagtgtcgacatgtctcctgcaagttggatggctgttgcgtggtacccgatataccacatcccaacctgcaggaacgagaaagatttgacgacaggcttcctaacttatcatactctatcttcgtcttttcaagataatgtggtggaaggagatcaaagcaacaacaatgaagaaacagagttttgtgaagattccgtaataaacaagagaatgccattgcctccgtttggtgtaacaacttacaaaatgcaaggagatctttgggggaagacggggtttgaccaggaccggttgctttatcttcaaagcgctgcggattcatggctgaaacagctcaatgttgatcaccatgactataacttcttccttaactcgagcttctaaagatcaatcgggtcgttcgtatgtttatccttctccaaaccttaaacaaaaaaaaaagacctcataaccctttttctttgttgttttcaagctccttttgtttctctgtgttttttgttctttttgtttttgtctggctcgttgtgttgttttaggtagcaaccgccatcgcggagttttttctccttttgcaagccaatcatggaagtttctaagaagaaaacagagcttttttttctttttttttaacggtgttgagaaaacaagaaagttgttttcttttcttgggtgagagatcatgtaaattgaccttgaacagaggactctgttttgtacttttctgtctaaaatatataaaaaaatctgtctttcttg

SEQ ID NO: 42858 - protein, 314 aa, Arabidopsis thaliana
  peptide (1)..(314): Ceres Seq. ID no. 13495796
  misc_feature (12)..(309): Pfam Name: Protein of unknown function (DUF789) Pfam Description: Protein of unknown function (DUF789)
  misc_feature (4)..(310): Homolog of NCBI NO: 37535654 NR Description: unknown protein [Oryza sativa (japonica
  misc_feature (7)..(313): Homolog of NCBI NO: 9280648 NR Description: F21B7.22 [Arabidopsis thaliana]
  misc_feature (7)..(313): Homolog of NCBI NO: 18379117 NR Description: expressed protein [Arabidopsis thaliana]
  misc_feature (7)..(313): Homolog of NCBI NO: 18958013 NR Description: At1g03610/F21B7_13 [Arabidopsis thaliana]
  misc_feature (9)..(309): Homolog of NCBI NO: 25373431 NR Description: hypothetical protein AT4g03420 [imported] -
  misc_feature (9)..(309): Homolog of NCBI NO: 22328289 NR Description: expressed protein [Arabidopsis thaliana]
  misc_feature (1)..(313): Homolog of NCBI NO: 21593308 NR Description: unknown [Arabidopsis thaliana]
  misc_feature (1)..(313): Homolog of NCBI NO: 18394539 NR Description: expressed protein [Arabidopsis thaliana]
  misc_feature (1)..(314): Homolog of NCBI NO: 15219407 NR Description: expressed protein [Arabidopsis thaliana]
  misc_feature (1)..(314): Homolog of NCBI NO: 27754726 NR Description: unknown protein [Arabidopsis thaliana]
MWWWSSSTKGRSNLERFLLGITPKPPSFSLHQEQGKEEIEYFRLGDLWDCYDEMSAYGFGTQVDLNNGETVMQYYVPYLSAIQIHTNKPALLSRNQNEVAESESSEGWSDSESEKLLSRSMSNDSSKTWDAVSEDSVFDPDGSPLLKDRLGNLDFKYIERDPPHKRIPLTDKINVLVEKYPGLMTLRSVDMSPASWMAVAWYPIYHIPTCRNEKDLTTGFLTYHTLSSSFQDNVVEGDQSNNNEETEFCEDSVINKRMPLPPFGVTTYKMQGDLWGKTGFDQDRLLYLQSAADSWLKQLNVDHHDYNFFLNSSF

SEQ ID NO: 42859 - protein, 261 aa, Arabidopsis thaliana
  peptide (1)..(261): Ceres Seq. ID no. 13495797
  misc_feature (1)..(256): Pfam Name: Protein of unknown function (DUF789) Pfam Description: Protein of unknown function (DUF789)
  misc_feature (1)..(257): Homolog of NCBI NO: 37535654 NR Description: unknown protein [Oryza sativa (japonica
  misc_feature (1)..(260): Homolog of NCBI NO: 9280648 NR Description: F21B7.22 [Arabidopsis thaliana]
  misc_feature (1)..(260): Homolog of NCBI NO: 18379117 NR Description: expressed protein [Arabidopsis thaliana]
  misc_feature (1)..(260): Homolog of NCBI NO: 18958013 NR Description: At1g03610/F21B7_13 [Arabidopsis thaliana]
  misc_feature (1)..(256): Homolog of NCBI NO: 25373431 NR Description: hypothetical protein AT4g03420 [imported] -
  misc_feature (1)..(256): Homolog of NCBI NO: 22328289 NR Description: expressed protein [Arabidopsis thaliana]
  misc_feature (1)..(260): Homolog of NCBI NO: 21593308 NR Description: unknown [Arabidopsis thaliana]
  misc_feature (1)..(260): Homolog of NCBI NO: 18394539 NR Description: expressed protein [Arabidopsis thaliana]
  misc_feature (1)..(261): Homolog of NCBI NO: 15219407 NR Description: expressed protein [Arabidopsis thaliana]
  misc_feature (1)..(261): Homolog of NCBI NO: 27754726 NR Description: unknown protein [Arabidopsis thaliana]
MSAYGFGTQVDLNNGETVMQYYVPYLSAIQIHTNKPALLSRNQNEVAESESSEGWSDSESEKLLSRSMSNDSSKTWDAVSEDSVFDPDGSPLLKDRLGNLDFKYIERDPPHKRIPLTDKINVLVEKYPGLMTLRSVDMSPASWMAVAWYPIYHIPTCRNEKDLTTGFLTYHTLSSSFQDNVVEGDQSNNNEETEFCEDSVINKRMPLPPFGVTTYKMQGDLWGKTGFDQDRLLYLQSAADSWLKQLNVDHHDYNFFLNSSF

SEQ ID NO: 42860 - protein, 243 aa, Arabidopsis thaliana
  peptide (1)..(243): Ceres Seq. ID no. 13495798
  misc_feature (1)..(238): Pfam Name: Protein of unknown function (DUF789) Pfam Description: Protein of unknown function (DUF789)
  misc_feature (1)..(239): Homolog of NCBI NO: 37535654 NR Description: unknown protein [Oryza sativa (japonica
  misc_feature (1)..(242): Homolog of NCBI NO: 9280648 NR Description: F21B7.22 [Arabidopsis thaliana]
  misc_feature (1)..(242): Homolog of NCBI NO: 18379117 NR Description: expressed protein [Arabidopsis thaliana]
  misc_feature (1)..(242): Homolog of NCBI NO: 18958013 NR Description: At1g03610/F21B7_13 [Arabidopsis thaliana]
  misc_feature (1)..(238): Homolog of NCBI NO: 25373431 NR Description: hypothetical protein AT4g03420 [imported] -
  misc_feature (1)..(238): Homolog of NCBI NO: 22328289 NR Description: expressed protein [Arabidopsis thaliana]
  misc_feature (1)..(242): Homolog of NCBI NO: 21593308 NR Description: unknown [Arabidopsis thaliana]
  misc_feature (1)..(242): Homolog of NCBI NO: 18394539 NR Description: expressed protein [Arabidopsis thaliana]
  misc_feature (1)..(243): Homolog of NCBI NO: 15219407 NR Description: expressed protein [Arabidopsis thaliana]
  misc_feature (1)..(243): Homolog of NCBI NO: 27754726 NR Description: unknown protein [Arabidopsis thaliana]
MQYYVPYLSAIQIHTNKPALLSRNQNEVAESESSEGWSDSESEKLLSRSMSNDSSKTWDAVSEDSVFDPDGSPLLKDRLGNLDFKYIERDPPHKRIPLTDKINVLVEKYPGLMTLRSVDMSPASWMAVAWYPIYHIPTCRNEKDLTTGFLTYHTLSSSFQDNVVEGDQSNNNEETEFCEDSVINKRMPLPPFGVTTYKMQGDLWGKTGFDQDRLLYLQSAADSWLKQLNVDHHDYNFFLNSSF

SEQ ID NO: 42861 - DNA, 1431 bp, Arabidopsis thaliana
  misc_feature (1)..(1431): Ceres Seq. ID no. 13645903
  misc_feature: MA Experiment ID: 20000314 Result: Down-regulated in Transcription
  misc_feature: MA Experiment 20000314 PARAMETER Experiment Name: At_14day_Shoots-Roots_Sub_P Parameter: Age (day) Value: 14
  misc_feature: MA Experiment 20000314 PARAMETER Experiment Name: At_14day_Shoots-Roots_Sub_P Parameter: Organism Value: A. thaliana
  misc_feature: MA Experiment 20000314 PARAMETER Experiment Name: At_14day_Shoots-Roots_Sub_P Parameter: Plant Line Value: WS
  misc_feature: MA Experiment 20000314 PARAMETER Experiment Name: At_14day_Shoots-Roots_Sub_P Parameter: Tissue Value: Roots vs. Whole Plant
  misc_feature: MA Experiment ID: 20000315 Result: Down-regulated in Transcription
  misc_feature: MA Experiment 20000315 PARAMETER Experiment Name: At_14day_Shoots-Roots_Sub_P Parameter: Age (day) Value: 14
  misc_feature: MA Experiment 20000315 PARAMETER Experiment Name: At_14day_Shoots-Roots_Sub_P Parameter: Organism Value: A. thaliana
  misc_feature: MA Experiment 20000315 PARAMETER Experiment Name: At_14day_Shoots-Roots_Sub_P Parameter: Plant Line Value: WS
  misc_feature: MA Experiment 20000315 PARAMETER Experiment Name: At_14day_Shoots-Roots_Sub_P Parameter: Tissue Value: Shoots vs. Whole Plant
  misc_feature: MA Experiment ID: 20000328 Result: Down-regulated in Transcription
  misc_feature: MA Experiment 20000328 PARAMETER Experiment Name: At_42deg_Heat_Sub_P Parameter: Age (day) Value: 14
  misc_feature: MA Experiment 20000328 PARAMETER Experiment Name: At_42deg_Heat_Sub_P Parameter: Organism Value: A. thaliana
  misc_feature: MA Experiment 20000328 PARAMETER Experiment Name: At_42deg_Heat_Sub_P Parameter: Plant Line Value: WS
  misc_feature: MA Experiment 20000328 PARAMETER Experiment Name: At_42deg_Heat_Sub_P Parameter: Temperature (deg C) Value: 42 vs. 22
  misc_feature: MA Experiment 20000328 PARAMETER Experiment Name: At_42deg_Heat_Sub_P Parameter: Timepoint (hr) Value: 6
  misc_feature: MA Experiment 20000328 PARAMETER Experiment Name: At_42deg_Heat_Sub_P Parameter: Tissue Value: Aerial
  misc_feature: MA Experiment ID: 20000348 Result: Down-regulated in Transcription
  misc_feature: MA Experiment 20000348 PARAMETER Experiment Name: At_100uM_ABA_Sub_P Parameter: Age (day) Value: 14
  misc_feature: MA Experiment 20000348 PARAMETER Experiment Name: At_100uM_ABA_Sub_P Parameter: Organism Value: A. thaliana
  misc_feature: MA Experiment 20000348 PARAMETER Experiment Name: At_100uM_ABA_Sub_P Parameter: Plant Line Value: WS
  misc_feature: MA Experiment 20000348 PARAMETER Experiment Name: At_100uM_ABA_Sub_P Parameter: Timepoint (hr) Value: 1
  misc_feature: MA Experiment 20000348 PARAMETER Experiment Name: At_100uM_ABA_Sub_P Parameter: Tissue Value: Aerial
  misc_feature: MA Experiment 20000348 PARAMETER Experiment Name: At_100uM_ABA_Sub_P Parameter: Treatment Value: 100uM ABA vs. No Treatment
  misc_feature: MA Experiment ID: 20000355 Result: Down-regulated in Transcription
  misc_feature: MA Experiment 20000355 PARAMETER Experiment Name: At_Siliques_Sub_P Parameter: Age (day) Value: 21
  misc_feature: MA Experiment 20000355 PARAMETER Experiment Name: At_Siliques_Sub_P Parameter: Organism Value: A. thaliana
  misc_feature: MA Experiment 20000355 PARAMETER Experiment Name: At_Siliques_Sub_P Parameter: Plant Line Value: WS
  misc_feature: MA Experiment 20000355 PARAMETER Experiment Name: At_Siliques_Sub_P Parameter: Tissue Value: Less Than 5mm Siliques vs. Whole Plant
  misc_feature: MA Experiment ID: 20000440 Result: Down-regulated in Transcription
  misc_feature: MA Experiment 20000440 PARAMETER Experiment Name: At_Closed-Flower__Sub_P Parameter: Tissue Value: Closed Flower vs. Whole Plant
ataaagaaaggtctcttctgtatctaaaagacatatcaaacgaaagaaatcaataaacacaatattctttcttccaaattttctcatttctcatgggcatatctcaagtacactattgcaatggtgaccagaacttagaagcaaaccttctagatcatgaggaaactgaatcattttcagtacctcaaacgaagaactgtaagaggtggctccgtgtctccatatacgcaatctttgtcatcttctgccaaccacttgctacagttctgggtagactgtactatgaaaatggagggaaaagcacatatgtggtaacacttcttcaactcattggcttccctgtactgattctcttccgcttcttttctcgaatcaggcaacccaaatcaacagatacaaatttcagtcagtccccttccttcaccacccttgcatcggtttacttgtgcactggactgctagtgtctgcttatgcttatttgtctgcagttgggttgctttacttaccagtctctactttctccctcatcttggcctcacagttggccttcactgcctttttctcatatttccttaactcgcaaaagttcactcctttgatagtcaattctttgtttctccttacggtttcctctgccctcctcgtggtcaacactgattcagaaaacacaacaaatgtatctagagtacaatatgtgattgggttcatctgtaccattggtgcttccgctgggattggattggtactatctctgatacaactgctcttcaggaaagttttcacgaagcatacatcctcagcagtcctggacttggccaattaccagtctctagttgcaacttgtgtggtactcataggactgtttgcaagtggagagtggagaactctgccaagtgagatgagaaactacaaactggggaaagtgtcatatatcttgactttggcctcagcagctattttctggcaagtatacactgttggttgtgtgggattaatcttcgagtcttcttctgtgttctccaattccataactgctgtgggactgcctatagttccagttgtagcagtgatagttttccatgataagatggatgcatcaaagattttctccatcattttagctatctggggcttcctttcatttgtctatcagcactacctcgacgaaaagaagttgaagacttgccagacaaaacctgttgaggaagaaacacaaactttatgaaacaagttgtatcgaaggtctcagaaacaaacatacatagttgtacacagtcatgtaaataacctatataaagcttgtatgtgtaatatccgtaatggtccatgcaaatgggatatgtatgtcgctcatatttcaggtatttagaacttttattcaaaagagtattgtgtaatacgagcagagtgataaaagcagtcatttattt

SEQ ID NO: 42862 - protein, 377 aa, Arabidopsis thaliana
  peptide (1)..(377): Ceres Seq. ID no. 13645904
  misc_feature (187)..(369): Pfam Name: Domain of unknown function, DUF250 Pfam Description: Domain of unknown function, DUF250
  misc_feature (24)..(363): Homolog of NCBI NO: 38605752 NR Description: OSJNBb0016D16.5 [Oryza sativa (japonica
  misc_feature (23)..(375): Homolog of NCBI NO: 15236794 NR Description: purine permease family [Arabidopsis thaliana]
  misc_feature (62)..(363): Homolog of NCBI NO: 7487849 NR Description: hypothetical protein T9A21.60 - Arabidopsis
  misc_feature (53)..(372): Homolog of NCBI NO: 15236799 NR Description: purine permease family [Arabidopsis thaliana]
  misc_feature (16)..(363): Homolog of NCBI NO: 30684325 NR Description: purine permease family [Arabidopsis thaliana]
  misc_feature (126)..(370): Homolog of NCBI NO: 15236796 NR Description: purine permease family [Arabidopsis thaliana]
  misc_feature (1)..(232): Homolog of NCBI NO: 24417310 NR Description: unknown [Arabidopsis thaliana]
  misc_feature (14)..(370): Homolog of NCBI NO: 15236796 NR Description: purine permease family [Arabidopsis thaliana]
  misc_feature (12)..(377): Homolog of NCBI NO: 15236796 NR Description: purine permease family [Arabidopsis thaliana]
  misc_feature (1)..(377): Homolog of NCBI NO: 18491221 NR Description: unknown protein [Arabidopsis thaliana]
MGISQVHYCNGDQNLEANLLDHEETESFSVPQTKNCKRWLRVSIYAIFVIFCQPLATVLGRLYYENGGKSTYVVTLLQLIGFPVLILFRFFSRIRQPKSTDTNFSQSPSFTTLASVYLCTGLLVSAYAYLSAVGLLYLPVSTFSLILASQLAFTAFFSYFLNSQKFTPLIVNSLFLLTVSSALLVVNTDSENTTNVSRVQYVIGFICTIGASAGIGLVLSLIQLLFRKVFTKHTSSAVLDLANYQSLVATCVVLIGLFASGEWRTLPSEMRNYKLGKVSYILTLASAAIFWQVYTVGCVGLIFESSSVFSNSITAVGLPIVPVVAVIVFHDKMDASKIFSIILAIWGFLSFVYQHYLDEKKLKTCQTKPVEEETQTL

SEQ ID NO: 42863 - DNA, 1380 bp, Arabidopsis thaliana
  misc_feature (1)..(1380): Ceres Seq. ID no. 12482758
  misc_feature: MA Experiment ID: 108434 Result: Up-regulated in Transcription
  misc_feature: MA Experiment 108434 PARAMETER Experiment Name: At_Root_Tips_cDNA_P Parameter: Tissue Value: Root Tips
  misc_feature: MA Experiment ID: 20000265 Result: Up-regulated in Transcription
  misc_feature: MA Experiment 20000265 PARAMETER Experiment Name: At_Open_Flower_P Parameter: Age (day) Value: 21
  misc_feature: MA Experiment 20000265 PARAMETER Experiment Name: At_Open_Flower_P Parameter: Plant Line Value: WS
  misc_feature: MA Experiment 20000265 PARAMETER Experiment Name: At_Open_Flower_P Parameter: Tissue Value: Closed Flower vs. Whole Plant
  misc_feature: MA Experiment ID: 20000286 Result: Up-regulated in Transcription
  misc_feature: MA Experiment 20000286 PARAMETER Experiment Name: At_Open_Flower_P Parameter: Age (day) Value: 21
  misc_feature: MA Experiment 20000286 PARAMETER Experiment Name: At_Open_Flower_P Parameter: Plant Line Value: WS
  misc_feature: MA Experiment 20000286 PARAMETER Experiment Name: At_Open_Flower_P Parameter: Tissue Value: Half Open vs. Whole Plant
acaaatatatacacacatacgcaaaaaactcatgatgcatcattgctcaattacgaaacccactttctcaatttcgatctcgacccagaagcttcatcatcattccagtaaattcttgaatttgggtttcagaatccgatgcgaatccggggatgtttcgtcgccattgcggaccaaggcggtgtctttgtcgtcggagatggaggattcgtcgtccttgaagaagagtttgatggagttagaagggaagaagagtgagccttacccaggaggaatgccgaagatgggtccattcacagggagagatccgaatgtgaagaaacctgcttggttgagacagaaggcaccacaaggcgaaaggtttcaggaggtgaaagagtccctttctcgtctcaatctcaatactgtttgtgaagaagctcagtgtcctaatatcggcgagtgttggaatggaggtggtgatggtgtagcaactgcaaccatcatggttcttggtgatacttgtactcgtggctgtagattctgtgctgttaaaacaagtagaaatcctcctcctcctgacccaatggaaccagagaacactgccaaggccatagccagttggggtgtagactacatagttattaccagcgtagaccgtgacgatatacctgatggtggaagtggacattttgcgcagactgtcaaagctatgaagagacataagccggatataatgatagaatgcttaacttctgattttcgtggggatttggaggctgtcgacactcttgtgcactcgggattggatgtttttgctcacaatgtcgagactgtgaaaaggctccagcgacttgtgagggatcctagggctggatatgagcagagcatgtcagttttgaaacatgcaaagatcagcaaacctggaatgatcacaaagacatccataatgcttggtcttggagaaacagacgaagagttgaaggaagcaatggctgatctaagagctatagatgttgatattctaacacttggccagtatctacagccaactccattgcatctgactgtgaaagagtatgtcacacctgagaagtttgatttctggaaaacatacggagaatcaataggatttcgttatgttgcaagtggtccactggtaagatcttcatatagagcaggagagctttttgttaagacaatggtgaaagaaagctactctaaatccttgtcttaataacaacaatggctactataatgccaaaaatgattgctgagaccacaaagccttcttcctatcttttttgtttgtttcttttaatagacttcatttattttggtaattgatttggaaaccattgtggatatataaaagtttatatatactagttttgtgttatt

SEQ ID NO: 42864 - protein, 404 aa, Arabidopsis thaliana
  peptide (1)..(404): Ceres Seq. ID no. 12482759
  misc_feature (162)..(327): Pfam Name: Radical SAM superfamily Pfam Description: Radical SAM superfamily
  misc_feature (105)..(402): Homolog of NCBI NO: 26327671 NR Description: unnamed protein product [Mus musculus]
  misc_feature (105)..(403): Homolog of NCBI NO: 34978347 NR Description: Lipoic acid synthetase, mitochondrial precursor
  misc_feature (105)..(403): Homolog of NCBI NO: 37577166 NR Description: lipoic acid synthetase isoform 1 precursor;
  misc_feature (105)..(402): Homolog of NCBI NO: 13277380 NR Description: lipoic acid synthetase [Mus musculus]
  misc_feature (68)..(397): Homolog of NCBI NO: 33989742 NR Description: Unknown (protein for MGC:66080) [Danio rerio]
  misc_feature (81)..(401): Homolog of NCBI NO: 34909890 NR Description: putative lipoic acid synthase-like protein
  misc_feature (251)..(384): Homolog of NCBI NO: 10178283 NR Description: lipoic acid synthase-like protein [Arabidopsis
  misc_feature (67)..(257): Homolog of NCBI NO: 10178283 NR Description: lipoic acid synthase-like protein [Arabidopsis
  misc_feature (12)..(404): Homolog of NCBI NO: 21553591 NR Description: lipoic acid synthase-like protein [Arabidopsis
  misc_feature (11)..(404): Homolog of NCBI NO: 18415808 NR Description: lipoic acid synthase - like protein
QIYTHIRKKLMMHHCSITKPTFSISISTQKLHHHSSKFLNLGFRIRCESGDVSSPLRTKAVSLSSEMEDSSSLKKSLMELEGKKSEPYPGGMPKMGPFTGRDPNVKKPAWLRQKAPQGERFQEVKESLSRLNLNTVCEEAQCPNIGECWNGGGDGVATATIMVLGDTCTRGCRFCAVKTSRNPPPPDPMEPENTAKAIASWGVDYIVITSVDRDDIPDGGSGHFAQTVKAMKRHKPDIMIECLTSDFRGDLEAVDTLVHSGLDVFAHNVETVKRLQRLVRDPRAGYEQSMSVLKHAKISKPGMITKTSIMLGLGETDEELKEAMADLRAIDVDILTLGQYLQPTPLHLTVKEYVTPEKFDFWKTYGESIGFRYVASGPLVRSSYRAGELFVKTMVKESYSKSLS

SEQ ID NO: 42865 - protein, 394 aa, Arabidopsis thaliana
  peptide (1)..(394): Ceres Seq. ID no. 12482760
  misc_feature (152)..(317): Pfam Name: Radical SAM superfamily Pfam Description: Radical SAM superfamily
  misc_feature (95)..(392): Homolog of NCBI NO: 26327671 NR Description: unnamed protein product [Mus musculus]
  misc_feature (95)..(393): Homolog of NCBI NO: 34978347 NR Description: Lipoic acid synthetase, mitochondrial precursor
  misc_feature (95)..(393): Homolog of NCBI NO: 37577166 NR Description: lipoic acid synthetase isoform 1 precursor;
  misc_feature (95)..(392): Homolog of NCBI NO: 13277380 NR Description: lipoic acid synthetase [Mus musculus]
  misc_feature (58)..(387): Homolog of NCBI NO: 33989742 NR Description: Unknown (protein for MGC:66080) [Danio rerio]
  misc_feature (71)..(391): Homolog of NCBI NO: 34909890 NR Description: putative lipoic acid synthase-like protein
  misc_feature (241)..(374): Homolog of NCBI NO: 10178283 NR Description: lipoic acid synthase-like protein [Arabidopsis
  misc_feature (57)..(247): Homolog of NCBI NO: 10178283 NR Description: lipoic acid synthase-like protein [Arabidopsis
  misc_feature (2)..(394): Homolog of NCBI NO: 21553591 NR Description: lipoic acid synthase-like protein [Arabidopsis
  misc_feature (1)..(394): Homolog of NCBI NO: 18415808 NR Description: lipoic acid synthase - like protein
MMHHCSITKPTFSISISTQKLHHHSSKFLNLGFRIRCESGDVSSPLRTKAVSLSSEMEDSSSLKKSLMELEGKKSEPYPGGMPKMGPFTGRDPNVKKPAWLRQKAPQGERFQEVKESLSRLNLNTVCEEAQCPNIGECWNGGGDGVATATIMVLGDTCTRGCRFCAVKTSRNPPPPDPMEPENTAKAIASWGVDYIVITSVDRDDIPDGGSGHFAQTVKAMKRHKPDIMIECLTSDFRGDLEAVDTLVHSGLDVFAHNVETVKRLQRLVRDPRAGYEQSMSVLKHAKISKPGMITKTSIMLGLGETDEELKEAMADLRAIDVDILTLGQYLQPTPLHLTVKEYVTPEKFDFWKTYGESIGFRYVASGPLVRSSYRAGELFVKTMVKESYSKSLS

SEQ ID NO: 42866 - protein, 393 aa, Arabidopsis thaliana
  peptide (1)..(393): Ceres Seq. ID no. 12482761
  misc_feature (151)..(316): Pfam Name: Radical SAM superfamily Pfam Description: Radical SAM superfamily
  misc_feature (94)..(391): Homolog of NCBI NO: 26327671 NR Description: unnamed protein product [Mus musculus]
  misc_feature (94)..(392): Homolog of NCBI NO: 34978347 NR Description: Lipoic acid synthetase, mitochondrial precursor
  misc_feature (94)..(392): Homolog of NCBI NO: 37577166 NR Description: lipoic acid synthetase isoform 1 precursor;
  misc_feature (94)..(391): Homolog of NCBI NO: 13277380 NR Description: lipoic acid synthetase [Mus musculus]
  misc_feature (57)..(386): Homolog of NCBI NO: 33989742 NR Description: Unknown (protein for MGC:66080) [Danio rerio]
  misc_feature (70)..(390): Homolog of NCBI NO: 34909890 NR Description: putative lipoic acid synthase-like protein
  misc_feature (240)..(373): Homolog of NCBI NO: 10178283 NR Description: lipoic acid synthase-like protein [Arabidopsis
  misc_feature (56)..(246): Homolog of NCBI NO: 10178283 NR Description: lipoic acid synthase-like protein [Arabidopsis
  misc_feature (1)..(393): Homolog of NCBI NO: 21553591 NR Description: lipoic acid synthase-like protein [Arabidopsis
  misc_feature (1)..(393): Homolog of NCBI NO: 18415808 NR Description: lipoic acid synthase - like protein
MHHCSITKPTFSISISTQKLHHHSSKFLNLGFRIRCESGDVSSPLRTKAVSLSSEMEDSSSLKKSLMELEGKKSEPYPGGMPKMGPFTGRDPNVKKPAWLRQKAPQGERFQEVKESLSRLNLNTVCEEAQCPNIGECWNGGGDGVATATIMVLGDTCTRGCRFCAVKTSRNPPPPDPMEPENTAKAIASWGVDYIVITSVDRDDIPDGGSGHFAQTVKAMKRHKPDIMIECLTSDFRGDLEAVDTLVHSGLDVFAHNVETVKRLQRLVRDPRAGYEQSMSVLKHAKISKPGMITKTSIMLGLGETDEELKEAMADLRAIDVDILTLGQYLQPTPLHLTVKEYVTPEKFDFWKTYGESIGFRYVASGPLVRSSYRAGELFVKTMVKESYSKSLS

SEQ ID NO: 42867 - DNA, 1339 bp, Arabidopsis thaliana
  misc_feature (1)..(1339): Ceres Seq. ID no. 13488268
  misc_feature: MA Experiment ID: 108434 Result: Down-regulated in Transcription
  misc_feature: MA Experiment 108434 PARAMETER Experiment Name: At_Root_Tips_cDNA_P Parameter: Tissue Value: Root Tips
  misc_feature: MA Experiment ID: 108488 Result: Down-regulated in Transcription
  misc_feature: MA Experiment ID: 108561 Result: Up-regulated in Transcription
  misc_feature: MA Experiment 108561 PARAMETER Experiment Name: At_100uM_ABA_cDNA_P Parameter: Timepoint (hr) Value: 6
  misc_feature: MA Experiment 108561 PARAMETER Experiment Name: At_100uM_ABA_cDNA_P Parameter: Tissue Value: Aerial
  misc_feature: MA Experiment 108561 PARAMETER Experiment Name: At_100uM_ABA_cDNA_P Parameter: Treatment Value: 100uM ABA vs. No Treatment
  misc_feature: MA Experiment ID: 108569 Result: Up-regulated in Transcription
  misc_feature: MA Experiment 108569 PARAMETER Experiment Name: At_0.001%_MeJA__cDNA_P Parameter: Timepoint (hr) Value: 6
  misc_feature: MA Experiment 108569 PARAMETER Experiment Name: At_0.001%_MeJA__cDNA_P Parameter: Tissue Value: Aerial
  misc_feature: MA Experiment 108569 PARAMETER Experiment Name: At_0.001%_MeJA__cDNA_P Parameter: Treatment Value: 0.001% MeJA vs. No Treatment
  misc_feature: MA Experiment ID: 108576 Result: Up-regulated in Transcription
  misc_feature: MA Experiment 108576 PARAMETER Experiment Name: At_42deg_Heat_cDNA_P Parameter: Temperature (deg C) Value: 42 vs. 22
  misc_feature: MA Experiment 108576 PARAMETER Experiment Name: At_42deg_Heat_cDNA_P Parameter: Timepoint (hr) Value: 1
  misc_feature: MA Experiment 108576 PARAMETER Experiment Name: At_42deg_Heat_cDNA_P Parameter: Tissue Value: Aerial
  misc_feature: MA Experiment ID: 108585 Result: Up-regulated in Transcription
  misc_feature: MA Experiment 108585 PARAMETER Experiment Name: At_5mM_NaNP_cDNA_P Parameter: Timepoint (hr) Value: 6
  misc_feature: MA Experiment 108585 PARAMETER Experiment Name: At_5mM_NaNP_cDNA_P Parameter: Tissue Value: Aerial
  misc_feature: MA Experiment 108585 PARAMETER Experiment Name: At_5mM_NaNP_cDNA_P Parameter: Treatment Value: null
  misc_feature: MA Experiment ID: 108594 Result: Down-regulated in Transcription
  misc_feature: MA Experiment 108594 PARAMETER Experiment Name: At_Ler-rhl_Root_cDNA_P Parameter: Plant Line Value: null
  misc_feature: MA Experiment ID: 108609 Result: Up-regulated in Transcription
  misc_feature: MA Experiment 108609 PARAMETER Experiment Name: At_100uM_ABA_cDNA_P Parameter: Timepoint (hr) Value: 24
  misc_feature: MA Experiment 108609 PARAMETER Experiment Name: At_100uM_ABA_cDNA_P Parameter: Tissue Value: Aerial
  misc_feature: MA Experiment 108609 PARAMETER Experiment Name: At_100uM_ABA_cDNA_P Parameter: Treatment Value: 100uM ABA vs. No Treatment
  misc_feature: MA Experiment ID: 20000071 Result: Up-regulated in Transcription
  misc_feature: MA Experiment 20000071 PARAMETER Experiment Name: At_100uM_ABA_Mutants_cDNA_P Parameter: Plant Line Value: CS8104
  misc_feature: MA Experiment 20000071 PARAMETER Experiment Name: At_100uM_ABA_Mutants_cDNA_P Parameter: Timepoint (hr) Value: 6
  misc_feature: MA Experiment 20000071 PARAMETER Experiment Name: At_100uM_ABA_Mutants_cDNA_P Parameter: Tissue Value: Aerial
  misc_feature: MA Experiment 20000071 PARAMETER Experiment Name: At_100uM_ABA_Mutants_cDNA_P Parameter: Treatment Value: 100uM ABA vs. No Treatment
  misc_feature: MA Experiment ID: 20000086 Result: Up-regulated in Transcription
  misc_feature: MA Experiment 20000086 PARAMETER Experiment Name: At_100uM_ABA_Mutants_cDNA_P Parameter: Plant Line Value: CS22
  misc_feature: MA Experiment 20000086 PARAMETER Experiment Name: At_100uM_ABA_Mutants_cDNA_P Parameter: Timepoint (hr) Value: 6
  misc_feature: MA Experiment 20000086 PARAMETER Experiment Name: At_100uM_ABA_Mutants_cDNA_P Parameter: Tissue Value: Aerial
  misc_feature: MA Experiment 20000086 PARAMETER Experiment Name: At_100uM_ABA_Mutants_cDNA_P Parameter: Treatment Value: 100uM ABA vs. No Treatment
  misc_feature: MA Experiment ID: 20000087 Result: Up-regulated in Transcription
  misc_feature: MA Experiment 20000087 PARAMETER Experiment Name: At_100uM_ABA_Mutants_cDNA_P Parameter: Plant Line Value: WS
  misc_feature: MA Experiment 20000087 PARAMETER Experiment Name: At_100uM_ABA_Mutants_cDNA_P Parameter: Timepoint (hr) Value: 6
  misc_feature: MA Experiment 20000087 PARAMETER Experiment Name: At_100uM_ABA_Mutants_cDNA_P Parameter: Tissue Value: Aerial
  misc_feature: MA Experiment 20000087 PARAMETER Experiment Name: At_100uM_ABA_Mutants_cDNA_P Parameter: Treatment Value: 100uM ABA vs. No Treatment
  misc_feature: MA Experiment ID: 20000088 Result: Up-regulated in Transcription
  misc_feature: MA Experiment 20000088 PARAMETER Experiment Name: At_100uM_ABA_Mutants_cDNA_P Parameter: Plant Line Value: Landsberg
  misc_feature: MA Experiment 20000088 PARAMETER Experiment Name: At_100uM_ABA_Mutants_cDNA_P Parameter: Timepoint (hr) Value: 6
  misc_feature: MA Experiment 20000088 PARAMETER Experiment Name: At_100uM_ABA_Mutants_cDNA_P Parameter: Tissue Value: Aerial
  misc_feature: MA Experiment 20000088 PARAMETER Experiment Name: At_100uM_ABA_Mutants_cDNA_P Parameter: Treatment Value: 100uM ABA vs. No Treatment
  misc_feature: MA Experiment ID: 20000184 Result: Down-regulated in Transcription
  misc_feature: MA Experiment 20000184 PARAMETER Experiment Name: At_Shoots__P Parameter: Age (day) Value: 7
  misc_feature: MA Experiment 20000184 PARAMETER Experiment Name: At_Shoots__P Parameter: Tissue Value: Shoots vs. Whole Plant
  misc_feature: MA Experiment ID: 20000185 Result: Down-regulated in Transcription
  misc_feature: MA Experiment 20000185 PARAMETER Experiment Name: At_Roots__P Parameter: Age (day) Value: 7 vs. 21
  misc_feature: MA Experiment 20000185 PARAMETER Experiment Name: At_Roots__P Parameter: Organism Value: A. thaliana
  misc_feature: MA Experiment 20000185 PARAMETER Experiment Name: At_Roots__P Parameter: Tissue Value: Roots vs. Whole Plant
  misc_feature: MA Experiment ID: 20000234 Result: Down-regulated in Transcription
  misc_feature: MA Experiment 20000234 PARAMETER Experiment Name: At_Siliques_P Parameter: Age (day) Value: 21
  misc_feature: MA Experiment 20000234 PARAMETER Experiment Name: At_Siliques_P Parameter: Organism Value: A. thaliana
  misc_feature: MA Experiment 20000234 PARAMETER Experiment Name: At_Siliques_P Parameter: Plant Line Value: WS
  misc_feature: MA Experiment 20000234 PARAMETER Experiment Name: At_Siliques_P Parameter: Tissue Value: Less Than 5mm Siliques vs. Whole Plant
  misc_feature: MA Experiment ID: 20000235 Result: Down-regulated in Transcription
  misc_feature: MA Experiment 20000235 PARAMETER Experiment Name: At_Siliques_P Parameter: Age (day) Value: 21
  misc_feature: MA Experiment 20000235 PARAMETER Experiment Name: At_Siliques_P Parameter: Organism Value: A. thaliana
  misc_feature: MA Experiment 20000235 PARAMETER Experiment Name: At_Siliques_P Parameter: Plant Line Value: WS
  misc_feature: MA Experiment 20000235 PARAMETER Experiment Name: At_Siliques_P Parameter: Tissue Value: 5-10mm Siliques vs. Whole Plant
  misc_feature: MA Experiment ID: 20000265 Result: Down-regulated in Transcription
  misc_feature: MA Experiment 20000265 PARAMETER Experiment Name: At_Open_Flower_P Parameter: Age (day) Value: 21
  misc_feature: MA Experiment 20000265 PARAMETER Experiment Name: At_Open_Flower_P Parameter: Plant Line Value: WS
  misc_feature: MA Experiment 20000265 PARAMETER Experiment Name: At_Open_Flower_P Parameter: Tissue Value: Closed Flower vs. Whole Plant
  misc_feature: MA Experiment ID: 20000438 Result: Down-regulated in Transcription
  misc_feature: MA Experiment 20000438 PARAMETER Experiment Name: At_Shoots__P Parameter: Age (day) Value: 14
  misc_feature: MA Experiment 20000438 PARAMETER Experiment Name: At_Shoots__P Parameter: Tissue Value: Shoots vs. Whole Plant
  misc_feature: MA Experiment ID: 20000439 Result: Down-regulated in Transcription
  misc_feature: MA Experiment 20000439 PARAMETER Experiment Name: At_Roots__P Parameter: Age (day) Value: 14 vs. 21
  misc_feature: MA Experiment 20000439 PARAMETER Experiment Name: At_Roots__P Parameter: Organism Value: A. thaliana
  misc_feature: MA Experiment 20000439 PARAMETER Experiment Name: At_Roots__P Parameter: Tissue Value: Roots vs. Whole Plant
  misc_feature: MA Experiment ID: 20000445 Result: Up-regulated in Transcription
  misc_feature: MA Experiment 20000445 PARAMETER Experiment Name: At_100uM_NAA__P Parameter: Age (day) Value: 14
  misc_feature: MA Experiment 20000445 PARAMETER Experiment Name: At_100uM_NAA__P Parameter: Organism Value: A. thaliana
  misc_feature: MA Experiment 20000445 PARAMETER Experiment Name: At_100uM_NAA__P Parameter: Plant Line Value: WS
  misc_feature: MA Experiment 20000445 PARAMETER Experiment Name: At_100uM_NAA__P Parameter: Timepoint (hr) Value: 6
  misc_feature: MA Experiment 20000445 PARAMETER Experiment Name: At_100uM_NAA__P Parameter: Tissue Value: Aerial
  misc_feature: MA Experiment 20000445 PARAMETER Experiment Name: At_100uM_NAA__P Parameter: Treatment Value: 100uM NAA vs. No Treatment
  misc_feature: MA Experiment ID: 20000453 Result: Up-regulated in Transcription
  misc_feature: MA Experiment 20000453 PARAMETER Experiment Name: At_100uM_ABA_P Parameter: Age (day) Value: 15
  misc_feature: MA Experiment 20000453 PARAMETER Experiment Name: At_100uM_ABA_P Parameter: Organism Value: A. thaliana
  misc_feature: MA Experiment 20000453 PARAMETER Experiment Name: At_100uM_ABA_P Parameter: Plant Line Value: WS
  misc_feature: MA Experiment 20000453 PARAMETER Experiment Name: At_100uM_ABA_P Parameter: Timepoint (hr) Value: 24
  misc_feature: MA Experiment 20000453 PARAMETER Experiment Name: At_100uM_ABA_P Parameter: Tissue Value: Aerial
  misc_feature: MA Experiment 20000453 PARAMETER Experiment Name: At_100uM_ABA_P Parameter: Treatment Value: 100uM ABA vs. No Treatment
  misc_feature: MA Experiment ID: 20000456 Result: Up-regulated in Transcription
  misc_feature: MA Experiment 20000456 PARAMETER Experiment Name: At_100uM_BA_P Parameter: Age (day) Value: 14
  misc_feature: MA Experiment 20000456 PARAMETER Experiment Name: At_100uM_BA_P Parameter: Organism Value: A. thaliana
  misc_feature: MA Experiment 20000456 PARAMETER Experiment Name: At_100uM_BA_P Parameter: Plant Line Value: WS
  misc_feature: MA Experiment 20000456 PARAMETER Experiment Name: At_100uM_BA_P Parameter: Timepoint (hr) Value: 6
  misc_feature: MA Experiment 20000456 PARAMETER Experiment Name: At_100uM_BA_P Parameter: Tissue Value: Aerial
  misc_feature: MA Experiment 20000456 PARAMETER Experiment Name: At_100uM_BA_P Parameter: Treatment Value: 100uM BA vs. No Treatment
  misc_feature: MA Experiment ID: 20000527 Result: Down-regulated in Transcription
  misc_feature: MA Experiment 20000527 PARAMETER Experiment Name: At_10percent_PEG_P Parameter: Age (day) Value: 20
  misc_feature: MA Experiment 20000527 PARAMETER Experiment Name: At_10percent_PEG_P Parameter: Organism Value: A. thaliana
  misc_feature: MA Experiment 20000527 PARAMETER Experiment Name: At_10percent_PEG_P Parameter: Plant Line Value: WS
  misc_feature: MA Experiment 20000527 PARAMETER Experiment Name: At_10percent_PEG_P Parameter: Timepoint (day) Value: 20
  misc_feature: MA Experiment 20000527 PARAMETER Experiment Name: At_10percent_PEG_P Parameter: Tissue Value: Whole Plant
  misc_feature: MA Experiment 20000527 PARAMETER Experiment Name: At_10percent_PEG_P Parameter: Treatment Value: 10percent PEG vs. No Treatment
  misc_feature: MA Experiment ID: 20000709 Result: Up-regulated in Transcription
  misc_feature: MA Experiment 20000709 PARAMETER Experiment Name: At_15mM_NH4NO3_L-to-H_P Parameter: Age (hr) Value: 14
  misc_feature: MA Experiment 20000709 PARAMETER Experiment Name: At_15mM_NH4NO3_L-to-H_P Parameter: Organism Value: A. thaliana
  misc_feature: MA Experiment 20000709 PARAMETER Experiment Name: At_15mM_NH4NO3_L-to-H_P Parameter: Plant Line Value: WS
  misc_feature: MA Experiment 20000709 PARAMETER Experiment Name: At_15mM_NH4NO3_L-to-H_P Parameter: Timepoint (hr) Value: 4
  misc_feature: MA Experiment 20000709 PARAMETER Experiment Name: At_15mM_NH4NO3_L-to-H_P Parameter: Tissue Value: Aerial
  misc_feature: MA Experiment 20000709 PARAMETER Experiment Name: At_15mM_NH4NO3_L-to-H_P Parameter: Treatment Value: 15mM NH4NO3 vs. 30mM Mannitol
  misc_feature: MA Experiment ID: 20000794 Result: Down-regulated in Transcription
  misc_feature: MA Experiment 20000794 PARAMETER Experiment Name: At_Petals_P Parameter: Age (day) Value: 23-25 days
  misc_feature: MA Experiment 20000794 PARAMETER Experiment Name: At_Petals_P Parameter: Plant Line Value: WS
  misc_feature: MA Experiment 20000794 PARAMETER Experiment Name: At_Petals_P Parameter: Tissue Value: Petals vs. Whole plant
  misc_feature: MA Experiment ID: 20001557 Result: Up-regulated in Transcription
  misc_feature: MA Experiment 20001557 PARAMETER Experiment Name: At_Drought_Soil_Dry_P Parameter: Age (day) Value: 27
  misc_feature: MA Experiment 20001557 PARAMETER Experiment Name: At_Drought_Soil_Dry_P Parameter: Organism Value: A. thaliana
  misc_feature: MA Experiment 20001557 PARAMETER Experiment Name: At_Drought_Soil_Dry_P Parameter: Plant Line Value: WS
  misc_feature: MA Experiment 20001557 PARAMETER Experiment Name: At_Drought_Soil_Dry_P Parameter: Post Timepoint (hr) Value: 3
  misc_feature: MA Experiment 20001557 PARAMETER Experiment Name: At_Drought_Soil_Dry_P Parameter: Post-Treatment Value: Re-Water vs. No Drought
  misc_feature: MA Experiment 20001557 PARAMETER Experiment Name: At_Drought_Soil_Dry_P Parameter: Timepoint (day) Value: 13
  misc_feature: MA Experiment 20001557 PARAMETER Experiment Name: At_Drought_Soil_Dry_P Parameter: Treatment Value: Drought vs. No Drought
  misc_feature: MA Experiment ID: 20001757 Result: Down-regulated in Transcription
  misc_feature: MA Experiment 20001757 PARAMETER Experiment Name: At_50mM_NH4NO3_L-to-H_P Parameter: Timepoint (hr) Value: 6
  misc_feature: MA Experiment 20001757 PARAMETER Experiment Name: At_50mM_NH4NO3_L-to-H_P Parameter: Tissue Value: Leaf
  misc_feature: MA Experiment 20001757 PARAMETER Experiment Name: At_50mM_NH4NO3_L-to-H_P Parameter: Treatment Value: 50mM NH4NO3 vs 100mM Mannitol
  misc_feature: MA Experiment ID: 20001904 Result: Up-regulated in Transcription
  misc_feature: MA Experiment 20001904 PARAMETER Experiment Name: At_Drought_Reproduction_P Parameter: Age (day) Value: 37
  misc_feature: MA Experiment 20001904 PARAMETER Experiment Name: At_Drought_Reproduction_P Parameter: Organism Value: A. thaliana
  misc_feature: MA Experiment 20001904 PARAMETER Experiment Name: At_Drought_Reproduction_P Parameter: Plant Line Value: WS
  misc_feature: MA Experiment 20001904 PARAMETER Experiment Name: At_Drought_Reproduction_P Parameter: Timepoint (day) Value: 7
  misc_feature: MA Experiment 20001904 PARAMETER Experiment Name: At_Drought_Reproduction_P Parameter: Tissue Value: Rosettes
  misc_feature: MA Experiment 20001904 PARAMETER Experiment Name: At_Drought_Reproduction_P Parameter: Treatment Value: Drought vs. No Drought
  misc_feature: MA Experiment ID: 20001905 Result: Up-regulated in Transcription
  misc_feature: MA Experiment 20001905 PARAMETER Experiment Name: At_Drought_Reproduction_P Parameter: Age (day) Value: 40
  misc_feature: MA Experiment 20001905 PARAMETER Experiment Name: At_Drought_Reproduction_P Parameter: Organism Value: A. thaliana
  misc_feature: MA Experiment 20001905 PARAMETER Experiment Name: At_Drought_Reproduction_P Parameter: Plant Line Value: WS
  misc_feature: MA Experiment 20001905 PARAMETER Experiment Name: At_Drought_Reproduction_P Parameter: Timepoint (day) Value: 10
  misc_feature: MA Experiment 20001905 PARAMETER Experiment Name: At_Drought_Reproduction_P Parameter: Tissue Value: Rosettes
  misc_feature: MA Experiment 20001905 PARAMETER Experiment Name: At_Drought_Reproduction_P Parameter: Treatment Value: Drought vs. No Drought
acatatgaacataacccaatctgaagatcaatcataaccttaaaccatctctcataattttagtatttctattctcaccaccaaaactcgttgatacatcacaccccaactgttgttactcatgtcctacagatcgatttaccgcactcttcgaccggtactatcatcttcggtacaatcctccggtttaggaattggaggattcaggggacatctcattagccacttgcccaatgttcggctattgagctctgacacgtcatctccggtaagtgggaataaccagccagaaaatcctatccgaacggccgatggtaaagttatatccacttattggggtatacctcctactaagatcactaaaccggacggttcagcttggaagtggaattgttttcagccatgggattcatacaaaccggatgtgtccattgatgtaactaaacatcataaaccctccaatttcactgacaaattcgcatattggaccgttcaaactctgaaaataccggttcaactattttttcagaggaagcacatgtgccatgcgatgttgctagagacggtggctgcggtgccgggaatggtcggggggatgcttttgcacttgaaatctctccggaggttcgaacatagcgggggatggatcaaagctttgctcgaagaggctgagaacgagcgtatgcatctcatgactttcatcgaactttcacaacccaaatggtacgaacgagcgattgtgttcacggtccaaggcgttttcttcaacgcatatttcctggcttatgtaatttcacccaaacttgctcatcgtatcactggatacttagaagaagaggctgtaaattcttacactgaatttctcaaagacattgatgccggaaaattcgaaaattcgccagctccagccatcgcaatggattactggcggttccctaaagatgcaacgcttagggatgtggtttatgttatccgagctgaggaagctcccccccgtgatattaaccactatgcttcggatatacaattcaaaggacatgaactcaaggaagctccggctcctattggatatcattaaagattatgtgacaaagtcacaaagctgtgtatacatctatgaacatatgttgttgtggatctccatgatatttttattttatgttttcgatttatttaaaactgttattcgtttttattagctcaatatggatatttaaaccatattattttgttacgatttatgaacatagtactactcatgtgtgtgtaaaagatcatactgcctggacacgaagcggatatccggaaaaattataatatttgttttttgattcgtttc

SEQ ID NO: 42868 - protein, 318 aa, Arabidopsis thaliana
  peptide (1)..(318): Ceres Seq. ID no. 13488269
  misc_feature (34)..(316): Pfam Name: Alternative oxidase Pfam Description: Alternative oxidase
  misc_feature (66)..(318): Homolog of NCBI NO: 1872517 NR Description: alternative oxidase [Arabidopsis thaliana]
  misc_feature (66)..(318): Homolog of NCBI NO: 421824 NR Description: alternative respiratory pathway oxidase (EC
  misc_feature (2)..(318): Homolog of NCBI NO: 11278947 NR Description: alternative respiratory pathway oxidase (EC
  misc_feature (64)..(318): Homolog of NCBI NO: 3913066 NR Description: Alternative oxidase 2, mitochondrial precursor
  misc_feature (65)..(318): Homolog of NCBI NO: 29465622 NR Description: alternative oxidase 1a [Lycopersicon esculentum]
  misc_feature (33)..(318): Homolog of NCBI NO: 29465624 NR Description: alternative oxidase 1b [Lycopersicon esculentum]
  misc_feature (58)..(318): Homolog of NCBI NO: 6967043 NR Description: alternative oxidase [Populus tremula x Populus
  misc_feature (1)..(318): Homolog of NCBI NO: 21553592 NR Description: oxidase, putative [Arabidopsis thaliana]
  misc_feature (1)..(318): Homolog of NCBI NO: 18398395 NR Description: alternative oxidase, putative [Arabidopsis
  misc_feature (1)..(318): Homolog of NCBI NO: 18176467 NR Description: At1g32350/F5D14.4 [Arabidopsis thaliana]
MSYRSIYRTLRPVLSSSVQSSGLGIGGFRGHLISHLPNVRLLSSDTSSPVSGNNQPENPIRTADGKVISTYWGIPPTKITKPDGSAWKWNCFQPWDSYKPDVSIDVTKHHKPSNFTDKFAYWTVQTLKIPVQLFFQRKHMCHAMLLETVAAVPGMVGGMLLHLKSLRRFEHSGGWIKALLEEAENERMHLMTFIELSQPKWYERAIVFTVQGVFFNAYFLAYVISPKLAHRITGYLEEEAVNSYTEFLKDIDAGKFENSPAPAIAMDYWRFPKDATLRDVVYVIRAEEAPPRDINHYASDIQFKGHELKEAPAPIGYH

SEQ ID NO: 42869 - protein, 179 aa, Arabidopsis thaliana
  peptide (1)..(179): Ceres Seq. ID no. 13488270
  misc_feature (1)..(177): Pfam Name: Alternative oxidase Pfam Description: Alternative oxidase
  misc_feature (1)..(179): Homolog of NCBI NO: 1872517 NR Description: alternative oxidase [Arabidopsis thaliana]
  misc_feature (1)..(179): Homolog of NCBI NO: 421824 NR Description: alternative respiratory pathway oxidase (EC
  misc_feature (1)..(179): Homolog of NCBI NO: 11278947 NR Description: alternative respiratory pathway oxidase (EC
  misc_feature (1)..(179): Homolog of NCBI NO: 3913066 NR Description: Alternative oxidase 2, mitochondrial precursor
  misc_feature (1)..(179): Homolog of NCBI NO: 29465622 NR Description: alternative oxidase 1a [Lycopersicon esculentum]
  misc_feature (1)..(179): Homolog of NCBI NO: 29465624 NR Description: alternative oxidase 1b [Lycopersicon esculentum]
  misc_feature (1)..(179): Homolog of NCBI NO: 6967043 NR Description: alternative oxidase [Populus tremula x Populus
  misc_feature (1)..(179): Homolog of NCBI NO: 21553592 NR Description: oxidase, putative [Arabidopsis thaliana]
  misc_feature (1)..(179): Homolog of NCBI NO: 18398395 NR Description: alternative oxidase, putative [Arabidopsis
  misc_feature (1)..(179): Homolog of NCBI NO: 18176467 NR Description: At1g32350/F5D14.4 [Arabidopsis thaliana]
MCHAMLLETVAAVPGMVGGMLLHLKSLRRFEHSGGWIKALLEEAENERMHLMTFIELSQPKWYERAIVFTVQGVFFNAYFLAYVISPKLAHRITGYLEEEAVNSYTEFLKDIDAGKFENSPAPAIAMDYWRFPKDATLRDVVYVIRAEEAPPRDINHYASDIQFKGHELKEAPAPIGYH

SEQ ID NO: 42870 - protein, 175 aa, Arabidopsis thaliana
  peptide (1)..(175): Ceres Seq. ID no. 13488271
  misc_feature (1)..(173): Pfam Name: Alternative oxidase Pfam Description: Alternative oxidase
  misc_feature (1)..(175): Homolog of NCBI NO: 15228734 NR Description: alternative oxidase 1a, mitochondrial (AOX1A)
  misc_feature (1)..(175): Homolog of NCBI NO: 421824 NR Description: alternative respiratory pathway oxidase (EC
  misc_feature (1)..(175): Homolog of NCBI NO: 11278947 NR Description: alternative respiratory pathway oxidase (EC
  misc_feature (1)..(175): Homolog of NCBI NO: 3913066 NR Description: Alternative oxidase 2, mitochondrial precursor
  misc_feature (1)..(175): Homolog of NCBI NO: 29465622 NR Description: alternative oxidase 1a [Lycopersicon esculentum]
  misc_feature (1)..(175): Homolog of NCBI NO: 29465624 NR Description: alternative oxidase 1b [Lycopersicon esculentum]
  misc_feature (1)..(175): Homolog of NCBI NO: 6967043 NR Description: alternative oxidase [Populus tremula x Populus
  misc_feature (1)..(175): Homolog of NCBI NO: 21553592 NR Description: oxidase, putative [Arabidopsis thaliana]
  misc_feature (1)..(175): Homolog of NCBI NO: 18398395 NR Description: alternative oxidase, putative [Arabidopsis
  misc_feature (1)..(175): Homolog of NCBI NO: 18176467 NR Description: At1g32350/F5D14.4 [Arabidopsis thaliana]
MLLETVAAVPGMVGGMLLHLKSLRRFEHSGGWIKALLEEAENERMHLMTFIELSQPKWYERAIVFTVQGVFFNAYFLAYVISPKLAHRITGYLEEEAVNSYTEFLKDIDAGKFENSPAPAIAMDYWRFPKDATLRDVVYVIRAEEAPPRDINHYASDIQFKGHELKEAPAPIGYH

SEQ ID NO: 42871 - DNA, 1267 bp, Arabidopsis thaliana
  misc_feature (1)..(1267): Ceres Seq. ID no. 13592804
  misc_feature: MA Experiment ID: 20000314 Result: Up-regulated in Transcription
  misc_feature: MA Experiment 20000314 PARAMETER Experiment Name: At_14day_Shoots-Roots_Sub_P Parameter: Age (day) Value: 14
  misc_feature: MA Experiment 20000314 PARAMETER Experiment Name: At_14day_Shoots-Roots_Sub_P Parameter: Organism Value: A. thaliana
  misc_feature: MA Experiment 20000314 PARAMETER Experiment Name: At_14day_Shoots-Roots_Sub_P Parameter: Plant Line Value: WS
  misc_feature: MA Experiment 20000314 PARAMETER Experiment Name: At_14day_Shoots-Roots_Sub_P Parameter: Tissue Value: Roots vs. Whole Plant
  misc_feature: MA Experiment ID: 20000347 Result: Up-regulated in Transcription
  misc_feature: MA Experiment 20000347 PARAMETER Experiment Name: At_2mM_SA_Sub_P Parameter: Age (day) Value: 14
  misc_feature: MA Experiment 20000347 PARAMETER Experiment Name: At_2mM_SA_Sub_P Parameter: Organism Value: A. thaliana
  misc_feature: MA Experiment 20000347 PARAMETER Experiment Name: At_2mM_SA_Sub_P Parameter: Plant Line Value: WS
  misc_feature: MA Experiment 20000347 PARAMETER Experiment Name: At_2mM_SA_Sub_P Parameter: Timepoint (hr) Value: 6
  misc_feature: MA Experiment 20000347 PARAMETER Experiment Name: At_2mM_SA_Sub_P Parameter: Tissue Value: Aerial
  misc_feature: MA Experiment 20000347 PARAMETER Experiment Name: At_2mM_SA_Sub_P Parameter: Treatment Value: 2mM SA vs. No Treatment
  misc_feature: MA Experiment ID: 20000352 Result: Down-regulated in Transcription
  misc_feature: MA Experiment 20000352 PARAMETER Experiment Name: At_Drought_Sub_P Parameter: Age (day) Value: 7
  misc_feature: MA Experiment 20000352 PARAMETER Experiment Name: At_Drought_Sub_P Parameter: Organism Value: A. thaliana
  misc_feature: MA Experiment 20000352 PARAMETER Experiment Name: At_Drought_Sub_P Parameter: Plant Line Value: WS
  misc_feature: MA Experiment 20000352 PARAMETER Experiment Name: At_Drought_Sub_P Parameter: Timepoint (hr) Value: 6
  misc_feature: MA Experiment 20000352 PARAMETER Experiment Name: At_Drought_Sub_P Parameter: Tissue Value: Whole Plant
  misc_feature: MA Experiment 20000352 PARAMETER Experiment Name: At_Drought_Sub_P Parameter: Treatment Value: Drought vs. No Drought
  misc_feature: MA Experiment ID: 20000355 Result: Down-regulated in Transcription
  misc_feature: MA Experiment 20000355 PARAMETER Experiment Name: At_Siliques_Sub_P Parameter: Age (day) Value: 21
  misc_feature: MA Experiment 20000355 PARAMETER Experiment Name: At_Siliques_Sub_P Parameter: Organism Value: A. thaliana
  misc_feature: MA Experiment 20000355 PARAMETER Experiment Name: At_Siliques_Sub_P Parameter: Plant Line Value: WS
  misc_feature: MA Experiment 20000355 PARAMETER Experiment Name: At_Siliques_Sub_P Parameter: Tissue Value: Less Than 5mm Siliques vs. Whole Plant
  misc_feature: MA Experiment ID: 20000440 Result: Down-regulated in Transcription
  misc_feature: MA Experiment 20000440 PARAMETER Experiment Name: At_Closed-Flower__Sub_P Parameter: Tissue Value: Closed Flower vs. Whole Plant
agaacatcctaatcgaaaaatgcatctaaaacaaactctatctactaactcgaaacacacttgcgatctttatctaavacacaaaccaacaaaaagaaaaatgggcttggtcagatcatttgctttgttcttagtcttccttagttgtctcatcgcggtgtatggccaaggtacgaggatcgggttctactcgaccacgtgccctaatgccgagacgattgttcggaccactgtagcatctcactttagttcagatccaaaggttgcaccggggttactgagaatgcacaaccatgattgctttgtccaaggttgtgatggttcggtgctattatcgggacctaactctgaaagaaccgctggcgcaarcgttaaccttcatggttttgaagtcattgacgatgccaagaggcagctcgaggcagcatgtcctggtgttgtctcttgtgctgatatattggccttaagcggctcgtgahtccgttgctbgttyacaacacrgayaaagttggmackggagksssgaacaggacgtagagatggaagagtttccttggcatcgaacgttaacaatcttccttctccaagtgactctctagccattcaacaaaggaaattcgccgcttttcgcctcaacactcgcgatctcgtcactcttgttggaggaggacacacgatcggaacagctgcatgtgggtttatcacgaacaggatattcaactcgagcggaaacacagcagatccaacaatggaccmwacatttgtaccacaacttcaaagactttgtccccaaaacggcgacggatcagcacgtgttgatcttgacaccggaagtggaaacacttttgacacatcttatttcatcaatctcaaccgtaacagaggaattcttcaatccgaccacgttctttggactagtccggccacaagatccatagtgcaagagtttatggcacctagaggcaacttcaatgtccagttcgcaaggtcaatggttaaaatgagtaatattggtgtgaagacggggacaaatggagaaattcgtagggtttgctctgcggttaattaatcagtgattaagtttttatggctaaaaaaaagtgtttatggctaactcttgttcaagggcattttttttatagtttgatttaaatttaaacccaatagaatagaaaggatatgagagaaacccaaaagtgggttgctgataaatgtatttcatttctttcggtttgacttggtggaataaataaagttcaatttcgtc

SEQ ID NO: 42872 - protein, 158 aa, Arabidopsis thaliana
  peptide (1)..(158): Ceres Seq. ID no. 15221165
  misc_feature (74)..(158): Pfam Name: Peroxidase Pfam Description: Peroxidase
  misc_feature (42)..(158): Homolog of NCBI NO: 19698452 NR Description: bacterial-induced gaiacol peroxidase [Gossypium
  misc_feature (42)..(158): Homolog of NCBI NO: 17066703 NR Description: peroxidase [Capsicum annuum]
  misc_feature (37)..(158): Homolog of NCBI NO: 5381255 NR Description: peroxidase [Nicotiana tabacum]
  misc_feature (40)..(158): Homolog of NCBI NO: 7433065 NR Description: peroxidase (EC 1.11.1.7) precursor,
  misc_feature (38)..(158): Homolog of NCBI NO: 129808 NR Description: Cationic peroxidase 2 precursor (PNPC2)
  misc_feature (40)..(158): Homolog of NCBI NO: 18558997 NR Description: bacterial-induced peroxidase [Gossypium hirsutum]
  misc_feature (34)..(158): Homolog of NCBI NO: 21592403 NR Description: peroxidase [Arabidopsis thaliana]
  misc_feature (34)..(158): Homolog of NCBI NO: 15237615 NR Description: peroxidase, putative [Arabidopsis thaliana]
  misc_feature (96)..(158): Homolog of NCBI NO: 1890313 NR Description: peroxidase ATP24a [Arabidopsis thaliana]
  misc_feature (34)..(158): Homolog of NCBI NO: 15241812 NR Description: peroxidase, putative [Arabidopsis thaliana]
  misc_feature (26)..(26): Xaa is any aa, unknown or other
  misc_feature (123)..(123): Xaa is any aa, unknown or other
EHPNRKMHLKQTLSTNSKHTCDLYLXHKPTKRKMGLVRSFALFLVFLSCLIAVYGQGTRIGFYSTTCPNAETIVRTTVASHFSSDPKVAPGLLRMHNHDCFVQGCDGSVLLSGPNSERTAGAXVNLHGFEVIDDAKRQLEAACPGVVSCADILALSGS

SEQ ID NO: 42873 - protein, 152 aa, Arabidopsis thaliana
  peptide (1)..(152): Ceres Seq. ID no. 15221166
  misc_feature (68)..(152): Pfam Name: Peroxidase Pfam Description: Peroxidase
  misc_feature (36)..(152): Homolog of NCBI NO: 19698452 NR Description: bacterial-induced gaiacol peroxidase [Gossypium
  misc_feature (36)..(152): Homolog of NCBI NO: 17066703 NR Description: peroxidase [Capsicum annuum]
  misc_feature (31)..(152): Homolog of NCBI NO: 5381255 NR Description: peroxidase [Nicotiana tabacum]
  misc_feature (34)..(152): Homolog of NCBI NO: 7433065 NR Description: peroxidase (EC 1.11.1.7) precursor,
  misc_feature (32)..(152): Homolog of NCBI NO: 129808 NR Description: Cationic peroxidase 2 precursor (PNPC2)
  misc_feature (34)..(152): Homolog of NCBI NO: 18558997 NR Description: bacterial-induced peroxidase [Gossypium hirsutum]
  misc_feature (28)..(152): Homolog of NCBI NO: 21592403 NR Description: peroxidase [Arabidopsis thaliana]
  misc_feature (28)..(152): Homolog of NCBI NO: 15237615 NR Description: peroxidase, putative [Arabidopsis thaliana]
  misc_feature (90)..(152): Homolog of NCBI NO: 1890313 NR Description: peroxidase ATP24a [Arabidopsis thaliana]
  misc_feature (28)..(152): Homolog of NCBI NO: 15241812 NR Description: peroxidase, putative [Arabidopsis thaliana]
  misc_feature (20)..(20): Xaa is any aa, unknown or other
  misc_feature (117)..(117): Xaa is any aa, unknown or other
MHLKQTLSTNSKHTCDLYLXHKPTKRKMGLVRSFALFLVFLSCLIAVYGQGTRIGFYSTTCPNAETIVRTTVASHFSSDPKVAPGLLRMHNHDCFVQGCDGSVLLSGPNSERTAGAXVNLHGFEVIDDAKRQLEAACPGVVSCADILALSGS

SEQ ID NO: 42874 - protein, 125 aa, Arabidopsis thaliana
  peptide (1)..(125): Ceres Seq. ID no. 15221167
  misc_feature (41)..(125): Pfam Name: Peroxidase Pfam Description: Peroxidase
  misc_feature (9)..(125): Homolog of NCBI NO: 19698452 NR Description: bacterial-induced gaiacol peroxidase [Gossypium
  misc_feature (9)..(125): Homolog of NCBI NO: 17066703 NR Description: peroxidase [Capsicum annuum]
  misc_feature (4)..(125): Homolog of NCBI NO: 5381255 NR Description: peroxidase [Nicotiana tabacum]
  misc_feature (7)..(125): Homolog of NCBI NO: 7433065 NR Description: peroxidase (EC 1.11.1.7) precursor,
  misc_feature (5)..(125): Homolog of NCBI NO: 129808 NR Description: Cationic peroxidase 2 precursor (PNPC2)
  misc_feature (7)..(125): Homolog of NCBI NO: 18558997 NR Description: bacterial-induced peroxidase [Gossypium hirsutum]
  misc_feature (1)..(125): Homolog of NCBI NO: 21592403 NR Description: peroxidase [Arabidopsis thaliana]
  misc_feature (1)..(125): Homolog of NCBI NO: 15237615 NR Description: peroxidase, putative [Arabidopsis thaliana]
  misc_feature (63)..(125): Homolog of NCBI NO: 1890313 NR Description: peroxidase ATP24a [Arabidopsis thaliana]
  misc_feature (1)..(125): Homolog of NCBI NO: 15241812 NR Description: peroxidase, putative [Arabidopsis thaliana]
  misc_feature (90)..(90): Xaa is any aa, unknown or other
MGLVRSFALFLVFLSCLIAVYGQGTRIGFYSTTCPNAETIVRTTVASHFSSDPKVAPGLLRMHNHDCFVQGCDGSVLLSGPNSERTAGAXVNLHGFEVIDDAKRQLEAACPGVVSCADILALSGS

SEQ ID NO: 42875 - DNA, 1397 bp, Arabidopsis thaliana; identical to SEQ ID NO: 39289
  misc_feature (1)..(1397): Ceres Seq. ID no. 13489548
  misc_feature: MA Experiment ID: 108462 Result: Up-regulated in Transcription
  misc_feature: MA Experiment 108462 PARAMETER Experiment Name: At_Germinating_Seeds_cDNA_P Parameter: Age (day) Value: 2 vs. 0
  misc_feature: MA Experiment 108462 PARAMETER Experiment Name: At_Germinating_Seeds_cDNA_P Parameter: Tissue Value: Germinating Seeds
  misc_feature: MA Experiment ID: 108464 Result: Up-regulated in Transcription
  misc_feature: MA Experiment 108464 PARAMETER Experiment Name: At_Germinating_Seeds_cDNA_P Parameter: Age (day) Value: 4 vs. 0
  misc_feature: MA Experiment 108464 PARAMETER Experiment Name: At_Germinating_Seeds_cDNA_P Parameter: Tissue Value: Germinating Seeds
  misc_feature: MA Experiment ID: 108573 Result: Up-regulated in Transcription
  misc_feature: MA Experiment 108573 PARAMETER Experiment Name: At_Drought_cDNA_P Parameter: Timepoint (hr) Value: 6
  misc_feature: MA Experiment 108573 PARAMETER Experiment Name: At_Drought_cDNA_P Parameter: Tissue Value: Aerial
  misc_feature: MA Experiment 108573 PARAMETER Experiment Name: At_Drought_cDNA_P Parameter: Treatment Value: Drought vs. No Drought
  misc_feature: MA Experiment ID: 108585 Result: Up-regulated in Transcription
  misc_feature: MA Experiment 108585 PARAMETER Experiment Name: At_5mM_NaNP_cDNA_P Parameter: Timepoint (hr) Value: 6
  misc_feature: MA Experiment 108585 PARAMETER Experiment Name: At_5mM_NaNP_cDNA_P Parameter: Tissue Value: Aerial
  misc_feature: MA Experiment 108585 PARAMETER Experiment Name: At_5mM_NaNP_cDNA_P Parameter: Treatment Value: null
  misc_feature: MA Experiment ID: 20000180 Result: Up-regulated in Transcription
  misc_feature: MA Experiment 20000180 PARAMETER Experiment Name: At_Germinating_Seeds_P Parameter: Age (hr) Value: 24 vs. 0
  misc_feature: MA Experiment 20000180 PARAMETER Experiment Name: At_Germinating_Seeds_P Parameter: Tissue Value: Germinating Seeds
  misc_feature: MA Experiment ID: 20000224 Result: Down-regulated in Transcription

SEQ ID NO: 42876 - protein, 289 aa, Arabidopsis thaliana; identical to SEQ ID NO: 39290
  peptide (1)..(289): Ceres Seq. ID no. 13489549
  misc_feature (53)..(158): Homolog of NCBI NO: 15236643 NR Description: protein disulfide isomerase -related [Arabidopsis
  misc_feature (54)..(288): Homolog of NCBI NO: 18399435 NR Description: expressed protein [Arabidopsis thaliana]
  misc_feature (49)..(286): Homolog of NCBI NO: 29367467 NR Description: disulfide isomerase-like protein
  misc_feature (6)..(286): Homolog of NCBI NO: 30103009 NR Description: unknown protein [Oryza sativa (japonica
  misc_feature (157)..(289): Homolog of NCBI NO: 6006856 NR Description: unknown protein [Arabidopsis thaliana]
  misc_feature (1)..(156): Homolog of NCBI NO: 6006856 NR Description: unknown protein [Arabidopsis thaliana]
  misc_feature (1)..(289): Homolog of NCBI NO: 18396691 NR Description: expressed protein [Arabidopsis thaliana]
  misc_feature (1)..(289): Homolog of NCBI NO: 9758894 NR Description: contains similarity to protein disulfide
  misc_feature (1)..(289): Homolog of NCBI NO: 21536613 NR Description: contains similarity to protein disulfide
  misc_feature (1)..(289): Homolog of NCBI NO: 18418521 NR Description: expressed protein [Arabidopsis thaliana]
  misc_feature (53)..(158): Homolog of NCBI NO: 15236643 NR Description: protein disulfide isomerase -related [Arabidopsis
  misc_feature (54)..(288): Homolog of NCBI NO: 18399435 NR Description: expressed protein [Arabidopsis thaliana]
  misc_feature (49)..(286): Homolog of NCBI NO: 29367467 NR Description: disulfide isomerase-like protein
  misc_feature (6)..(286): Homolog of NCBI NO: 30103009 NR Description: unknown protein [Oryza sativa (japonica
  misc_feature (157)..(289): Homolog of NCBI NO: 6006856 NR Description: unknown protein [Arabidopsis thaliana]
  misc_feature (1)..(156): Homolog of NCBI NO: 6006856 NR Description: unknown protein [Arabidopsis thaliana]
  misc_feature (1)..(289): Homolog of NCBI NO: 18396691 NR Description: expressed protein [Arabidopsis thaliana]
  misc_feature (1)..(289): Homolog of NCBI NO: 9758894 NR Description: contains similarity to protein disulfide
  misc_feature (1)..(289): Homolog of NCBI NO: 21536613 NR Description: contains similarity to protein disulfide
  misc_feature (1)..(289): Homolog of NCBI NO: 18418521 NR Description: expressed protein [Arabidopsis thaliana]

SEQ ID NO: 42877 - protein, 226 aa, Arabidopsis thaliana; identical to SEQ ID NO: 39291
  peptide (1)..(226): Ceres Seq. ID no. 13489550
  misc_feature (1)..(95): Homolog of NCBI NO: 15236643 NR Description: protein disulfide isomerase -related [Arabidopsis
  misc_feature (1)..(225): Homolog of NCBI NO: 18399435 NR Description: expressed protein [Arabidopsis thaliana]
  misc_feature (1)..(223): Homolog of NCBI NO: 29367467 NR Description: disulfide isomerase-like protein
  misc_feature (1)..(223): Homolog of NCBI NO: 30103009 NR Description: unknown protein [Oryza sativa (japonica
  misc_feature (94)..(226): Homolog of NCBI NO: 6006856 NR Description: unknown protein [Arabidopsis thaliana]
  misc_feature (1)..(93): Homolog of NCBI NO: 6006856 NR Description: unknown protein [Arabidopsis thaliana]
  misc_feature (1)..(226): Homolog of NCBI NO: 18396691 NR Description: expressed protein [Arabidopsis thaliana]
  misc_feature (1)..(226): Homolog of NCBI NO: 9758894 NR Description: contains similarity to protein disulfide
  misc_feature (1)..(226): Homolog of NCBI NO: 21536613 NR Description: contains similarity to protein disulfide
  misc_feature (1)..(226): Homolog of NCBI NO: 18418521 NR Description: expressed protein [Arabidopsis thaliana]
  misc_feature (1)..(95): Homolog of NCBI NO: 15236643 NR Description: protein disulfide isomerase -related [Arabidopsis
  misc_feature (1)..(225): Homolog of NCBI NO: 18399435 NR Description: expressed protein [Arabidopsis thaliana]
  misc_feature (1)..(223): Homolog of NCBI NO: 29367467 NR Description: disulfide isomerase-like protein
  misc_feature (1)..(223): Homolog of NCBI NO: 30103009 NR Description: unknown protein [Oryza sativa (japonica
  misc_feature (94)..(226): Homolog of NCBI NO: 6006856 NR Description: unknown protein [Arabidopsis thaliana]
  misc_feature (1)..(93): Homolog of NCBI NO: 6006856 NR Description: unknown protein [Arabidopsis thaliana]
  misc_feature (1)..(226): Homolog of NCBI NO: 18396691 NR Description: expressed protein [Arabidopsis thaliana]
  misc_feature (1)..(226): Homolog of NCBI NO: 9758894 NR Description: contains similarity to protein disulfide
  misc_feature (1)..(226): Homolog of NCBI NO: 21536613 NR Description: contains similarity to protein disulfide
  misc_feature (1)..(226): Homolog of NCBI NO: 18418521 NR Description: expressed protein [Arabidopsis thaliana]

SEQ ID NO: 42878 - protein, 192 aa, Arabidopsis thaliana; identical to SEQ ID NO: 39292
  peptide (1)..(192): Ceres Seq. ID no. 13489551
  misc_feature (1)..(61): Homolog of NCBI NO: 15236643 NR Description: protein disulfide isomerase -related [Arabidopsis
  misc_feature (1)..(191): Homolog of NCBI NO: 18399435 NR Description: expressed protein [Arabidopsis thaliana]
  misc_feature (1)..(189): Homolog of NCBI NO: 29367467 NR Description: disulfide isomerase-like protein
  misc_feature (1)..(189): Homolog of NCBI NO: 30103009 NR Description: unknown protein [Oryza sativa (japonica
  misc_feature (60)..(192): Homolog of NCBI NO: 6006856 NR Description: unknown protein [Arabidopsis thaliana]
  misc_feature (1)..(59): Homolog of NCBI NO: 6006856 NR Description: unknown protein [Arabidopsis thaliana]
  misc_feature (1)..(192): Homolog of NCBI NO: 18396691 NR Description: expressed protein [Arabidopsis thaliana]
  misc_feature (1)..(192): Homolog of NCBI NO: 9758894 NR Description: contains similarity to protein disulfide
  misc_feature (1)..(192): Homolog of NCBI NO: 21536613 NR Description: contains similarity to protein disulfide
  misc_feature (1)..(192): Homolog of NCBI NO: 18418521 NR Description: expressed protein [Arabidopsis thaliana]
  misc_feature (1)..(61): Homolog of NCBI NO: 15236643 NR Description: protein disulfide isomerase -related [Arabidopsis
  misc_feature (1)..(191): Homolog of NCBI NO: 18399435 NR Description: expressed protein [Arabidopsis thaliana]
  misc_feature (1)..(189): Homolog of NCBI NO: 29367467 NR Description: disulfide isomerase-like protein
  misc_feature (1)..(189): Homolog of NCBI NO: 30103009 NR Description: unknown protein [Oryza sativa (japonica
  misc_feature (60)..(192): Homolog of NCBI NO: 6006856 NR Description: unknown protein [Arabidopsis thaliana]
  misc_feature (1)..(59): Homolog of NCBI NO: 6006856 NR Description: unknown protein [Arabidopsis thaliana]
  misc_feature (1)..(192): Homolog of NCBI NO: 18396691 NR Description: expressed protein [Arabidopsis thaliana]
  misc_feature (1)..(192): Homolog of NCBI NO: 9758894 NR Description: contains similarity to protein disulfide
  misc_feature (1)..(192): Homolog of NCBI NO: 21536613 NR Description: contains similarity to protein disulfide
  misc_feature (1)..(192): Homolog of NCBI NO: 18418521 NR Description: expressed protein [Arabidopsis thaliana]

SEQ ID NO: 42879 - DNA, 1175 bp, Arabidopsis thaliana
  misc_feature (1)..(1175): Ceres Seq. ID no. 12336495
  misc_feature: MA Experiment ID: 108434 Result: Down-regulated in Transcription
  misc_feature: MA Experiment 108434 PARAMETER Experiment Name: At_Root_Tips_cDNA_P Parameter: Tissue Value: Root Tips
  misc_feature: MA Experiment ID: 108595 Result: Up-regulated in Transcription
  misc_feature: MA Experiment 108595 PARAMETER Experiment Name: At_Ler-pi_Ovule_cDNA_P Parameter: Plant Line Value: null
  misc_feature: MA Experiment ID: 20000235 Result: Up-regulated in Transcription
  misc_feature: MA Experiment 20000235 PARAMETER Experiment Name: At_Siliques_P Parameter: Age (day) Value: 21
  misc_feature: MA Experiment 20000235 PARAMETER Experiment Name: At_Siliques_P Parameter: Organism Value: A. thaliana
  misc_feature: MA Experiment 20000235 PARAMETER Experiment Name: At_Siliques_P Parameter: Plant Line Value: WS
  misc_feature: MA Experiment 20000235 PARAMETER Experiment Name: At_Siliques_P Parameter: Tissue Value: 5-10mm Siliques vs. Whole Plant
gtgacatttgtcaatgtctgtggtttataacatgtttctcaatgtcaggatcacacacaccacttctcatgtataaatacacataaaagcaattggatttggtaagagggaatctcaaaagtgtgtgtctgtgagagaggagagagagaatatgggcaaaggaagagcaccatgttgtgacaaaaccaaagtgaagagaggaccatggagccatgatgaagacttgaaactcatctctttcattcacaagaatggtcatgagaattggagatctctcccaaagcaagctggattgttgaggtgtggcaagagttgtcgtctgcgatggattaattacctcagacctgatgtgaaacgtggcaatttcagtgcagaggaagaagacaccatcatcaaacttcaccagagctttggtaacaagtggtcgaagattgcttctaagctgcctggaagaacagacaatgagatcaagaatgtgtggcatacacatctcaagaaaagattgagctcggaaactaaccttaatgccgatgaagcgggttcaaaaggttctttgaatgaagaagagaactctcaagagtcatctccaaatgcttcaatgtcttttgctggttccaacatttcaagcaaagacgatgatgcacagataagtcaaatgtttgagcacattctaacttatagcgagtttacggggatgttacaagaggtagacaaaccagagctgctggagatgccttttgatttagatcctgacatttggagtttcatagatggttcagactcattccaacaaccagagaacagagctcttcaagagtctgaagaagatgaagttgataaatggtttaagcacctggaaagcgaactcgggttagaagaaaacgataaccaacaacaacaacagcataaacagggaacagaagatgaacattcatcatcactcttggagagttacgagctcctcatacattaatgaagccataaagcaagtcattttcaccttgaaaatggaattattagctaacttattggcattattagtatataagcaagatcagataggcgcatgtagtagcaacaacgaagaaacgtcgaattgtagacaaaatgtagatattacagagttgaaagattgtattttgcaaatgattgctttgtagtgaaatcaagttatc

SEQ ID NO: 42880 - protein, 273 aa, Arabidopsis thaliana
  peptide (1)..(273): Ceres Seq. ID no. 12336496
  misc_feature (16)..(63): Pfam Name: Myb-like DNA-binding domain Pfam Description: Myb-like DNA-binding domain
  misc_feature (4)..(243): Homolog of NCBI NO: 15224628 NR Description: myb family transcription factor; protein id:
  misc_feature (1)..(263): Homolog of NCBI NO: 15223463 NR Description: myb family transcription factor; protein id:
  misc_feature (1)..(213): Homolog of NCBI NO: 15230600 NR Description: myb family transcription factor; protein id:
  misc_feature (119)..(273): Homolog of NCBI NO: 7438354 NR Description: myb-related protein YUP8H12R.21 - Arabidopsis
  misc_feature (1)..(48): Homolog of NCBI NO: 7438354 NR Description: myb-related protein YUP8H12R.21 - Arabidopsis
  misc_feature (44)..(214): Homolog of NCBI NO: 7438354 NR Description: myb-related protein YUP8H12R.21 - Arabidopsis
  misc_feature (1)..(214): Homolog of NCBI NO: 15219313 NR Description: myb family transcription factor; protein id:
  misc_feature (73)..(273): Homolog of NCBI NO: 11358546 NR Description: myb-related transcription factor MYB58
  misc_feature (1)..(273): Homolog of NCBI NO: 21553594 NR Description: putative myb-related transcription factor
  misc_feature (1)..(273): Homolog of NCBI NO: 15219259 NR Description: myb family transcription factor
MGKGRAPCCDKTKVKRGPWSHDEDLKLISFIHKNGHENWRSLPKQAGLLRCGKSCRLRWINYLRPDVKRGNFSAEEEDTIIKLHQSFGNKWSKIASKLPGRTDNEIKNVWHTHLKKRLSSETNLNADEAGSKGSLNEEENSQESSPNASMSFAGSNISSKDDDAQISQMFEHILTYSEFTGMLQEVDKPELLEMPFDLDPDIWSFIDGSDSFQQPENRALQESEEDEVDKWFKHLESELGLEENDNQQQQQHKQGTEDEHSSSLLESYELLIH

SEQ ID NO: 42881 - DNA, 1586 bp, Arabidopsis thaliana
  misc_feature (1)..(1586): Ceres Seq. ID no. 12604692
  misc_feature: MA Experiment ID: 20000171 Result: Down-regulated in Transcription
  misc_feature: MA Experiment 20000171 PARAMETER Experiment Name: At_42deg_Heat_P Parameter: Age (day) Value: 14
  misc_feature: MA Experiment 20000171 PARAMETER Experiment Name: At_42deg_Heat_P Parameter: Organism Value: A. thaliana
  misc_feature: MA Experiment 20000171 PARAMETER Experiment Name: At_42deg_Heat_P Parameter: Plant Line Value: WS
  misc_feature: MA Experiment 20000171 PARAMETER Experiment Name: At_42deg_Heat_P Parameter: Temperature (deg C) Value: 42 vs. 22
  misc_feature: MA Experiment 20000171 PARAMETER Experiment Name: At_42deg_Heat_P Parameter: Timepoint (hr) Value: 1
  misc_feature: MA Experiment 20000171 PARAMETER Experiment Name: At_42deg_Heat_P Parameter: Tissue Value: Aerial
  misc_feature: MA Experiment ID: 20000173 Result: Down-regulated in Transcription
  misc_feature: MA Experiment 20000173 PARAMETER Experiment Name: At_42deg_Heat_P Parameter: Age (day) Value: 14
  misc_feature: MA Experiment 20000173 PARAMETER Experiment Name: At_42deg_Heat_P Parameter: Organism Value: A. thaliana
  misc_feature: MA Experiment 20000173 PARAMETER Experiment Name: At_42deg_Heat_P Parameter: Plant Line Value: WS
  misc_feature: MA Experiment 20000173 PARAMETER Experiment Name: At_42deg_Heat_P Parameter: Temperature (deg C) Value: 42 vs. 22
  misc_feature: MA Experiment 20000173 PARAMETER Experiment Name: At_42deg_Heat_P Parameter: Timepoint (hr) Value: 6
  misc_feature: MA Experiment 20000173 PARAMETER Experiment Name: At_42deg_Heat_P Parameter: Tissue Value: Aerial
  misc_feature: MA Experiment ID: 20000182 Result: Up-regulated in Transcription
  misc_feature: MA Experiment 20000182 PARAMETER Experiment Name: At_2mM_SA_P Parameter: Age (day) Value: 14
  misc_feature: MA Experiment 20000182 PARAMETER Experiment Name: At_2mM_SA_P Parameter: Organism Value: A. thaliana
  misc_feature: MA Experiment 20000182 PARAMETER Experiment Name: At_2mM_SA_P Parameter: Plant Line Value: WS
  misc_feature: MA Experiment 20000182 PARAMETER Experiment Name: At_2mM_SA_P Parameter: Timepoint (hr) Value: 6
  misc_feature: MA Experiment 20000182 PARAMETER Experiment Name: At_2mM_SA_P Parameter: Tissue Value: Aerial
  misc_feature: MA Experiment 20000182 PARAMETER Experiment Name: At_2mM_SA_P Parameter: Treatment Value: 2mM SA vs. No Treatment
  misc_feature: MA Experiment ID: 20000184 Result: Down-regulated in Transcription
  misc_feature: MA Experiment 20000184 PARAMETER Experiment Name: At_Shoots__P Parameter: Age (day) Value: 7
  misc_feature: MA Experiment 20000184 PARAMETER Experiment Name: At_Shoots__P Parameter: Tissue Value: Shoots vs. Whole Plant
  misc_feature: MA Experiment ID: 20000211 Result: Up-regulated in Transcription
  misc_feature: MA Experiment 20000211 PARAMETER Experiment Name: At_0.001percent_MeJA__P Parameter: Age (day) Value: 14
  misc_feature: MA Experiment 20000211 PARAMETER Experiment Name: At_0.001percent_MeJA__P Parameter: Organism Value: A. thaliana
  misc_feature: MA Experiment 20000211 PARAMETER Experiment Name: At_0.001percent_MeJA__P Parameter: Plant Line Value: WS
  misc_feature: MA Experiment 20000211 PARAMETER Experiment Name: At_0.001percent_MeJA__P Parameter: Timepoint (hr) Value: 1
  misc_feature: MA Experiment 20000211 PARAMETER Experiment Name: At_0.001percent_MeJA__P Parameter: Tissue Value: Aerial
  misc_feature: MA Experiment 20000211 PARAMETER Experiment Name: At_0.001percent_MeJA__P Parameter: Treatment Value: 0.001percent MeJA vs. No Treatment
  misc_feature: MA Experiment ID: 20000234 Result: Down-regulated in Transcription
  misc_feature: MA Experiment 20000234 PARAMETER Experiment Name: At_Siliques_P Parameter: Age (day) Value: 21
  misc_feature: MA Experiment 20000234 PARAMETER Experiment Name: At_Siliques_P Parameter: Organism Value: A. thaliana
  misc_feature: MA Experiment 20000234 PARAMETER Experiment Name: At_Siliques_P Parameter: Plant Line Value: WS
  misc_feature: MA Experiment 20000234 PARAMETER Experiment Name: At_Siliques_P Parameter: Tissue Value: Less Than 5mm Siliques vs. Whole Plant
  misc_feature: MA Experiment ID: 20000265 Result: Down-regulated in Transcription
  misc_feature: MA Experiment 20000265 PARAMETER Experiment Name: At_Open_Flower_P Parameter: Age (day) Value: 21
  misc_feature: MA Experiment 20000265 PARAMETER Experiment Name: At_Open_Flower_P Parameter: Plant Line Value: WS
  misc_feature: MA Experiment 20000265 PARAMETER Experiment Name: At_Open_Flower_P Parameter: Tissue Value: Closed Flower vs. Whole Plant
  misc_feature: MA Experiment ID: 20000438 Result: Down-regulated in Transcription
  misc_feature: MA Experiment 20000438 PARAMETER Experiment Name: At_Shoots__P Parameter: Age (day) Value: 14
  misc_feature: MA Experiment 20000438 PARAMETER Experiment Name: At_Shoots__P Parameter: Tissue Value: Shoots vs. Whole Plant
  misc_feature: MA Experiment ID: 20000439 Result: Down-regulated in Transcription
  misc_feature: MA Experiment 20000439 PARAMETER Experiment Name: At_Roots__P Parameter: Age (day) Value: 14 vs. 21
  misc_feature: MA Experiment 20000439 PARAMETER Experiment Name: At_Roots__P Parameter: Organism Value: A. thaliana
  misc_feature: MA Experiment 20000439 PARAMETER Experiment Name: At_Roots__P Parameter: Tissue Value: Roots vs. Whole Plant
  misc_feature: MA Experiment ID: 20000527 Result: Down-regulated in Transcription
  misc_feature: MA Experiment 20000527 PARAMETER Experiment Name: At_10percent_PEG_P Parameter: Age (day) Value: 20
  misc_feature: MA Experiment 20000527 PARAMETER Experiment Name: At_10percent_PEG_P Parameter: Organism Value: A. thaliana
  misc_feature: MA Experiment 20000527 PARAMETER Experiment Name: At_10percent_PEG_P Parameter: Plant Line Value: WS
  misc_feature: MA Experiment 20000527 PARAMETER Experiment Name: At_10percent_PEG_P Parameter: Timepoint (day) Value: 20
  misc_feature: MA Experiment 20000527 PARAMETER Experiment Name: At_10percent_PEG_P Parameter: Tissue Value: Whole Plant
  misc_feature: MA Experiment 20000527 PARAMETER Experiment Name: At_10percent_PEG_P Parameter: Treatment Value: 10percent PEG vs. No Treatment
  misc_feature: MA Experiment ID: 20000573 Result: Down-regulated in Transcription
  misc_feature: MA Experiment 20000573 PARAMETER Experiment Name: At_100uM_ABA_Mutants__P Parameter: Organism Value: A. thaliana
  misc_feature: MA Experiment 20000573 PARAMETER Experiment Name: At_100uM_ABA_Mutants__P Parameter: Plant Line Value: CS22 vs. Ler wt
  misc_feature: MA Experiment 20000573 PARAMETER Experiment Name: At_100uM_ABA_Mutants__P Parameter: Timepoint (hr) Value: N/A
  misc_feature: MA Experiment 20000573 PARAMETER Experiment Name: At_100uM_ABA_Mutants__P Parameter: Tissue Value: Whole Plant
  misc_feature: MA Experiment 20000573 PARAMETER Experiment Name: At_100uM_ABA_Mutants__P Parameter: Treatment Value: None
  misc_feature: MA Experiment ID: 20000574 Result: Down-regulated in Transcription
  misc_feature: MA Experiment 20000574 PARAMETER Experiment Name: At_100uM_ABA_Mutants__P Parameter: Organism Value: A. thaliana
  misc_feature: MA Experiment 20000574 PARAMETER Experiment Name: At_100uM_ABA_Mutants__P Parameter: Plant Line Value: CS23 vs. Ler wt
  misc_feature: MA Experiment 20000574 PARAMETER Experiment Name: At_100uM_ABA_Mutants__P Parameter: Timepoint (hr) Value: N/A
  misc_feature: MA Experiment 20000574 PARAMETER Experiment Name: At_100uM_ABA_Mutants__P Parameter: Tissue Value: Whole Plant
  misc_feature: MA Experiment 20000574 PARAMETER Experiment Name: At_100uM_ABA_Mutants__P Parameter: Treatment Value: None
  misc_feature: MA Experiment ID: 20001458 Result: Down-regulated in Transcription
  misc_feature: MA Experiment 20001458 PARAMETER Experiment Name: At_50mM_NH4NO3_L-to-H_P Parameter: Age (day) Value: Undefined
  misc_feature: MA Experiment 20001458 PARAMETER Experiment Name: At_50mM_NH4NO3_L-to-H_P Parameter: Organism Value: Undefined
  misc_feature: MA Experiment 20001458 PARAMETER Experiment Name: At_50mM_NH4NO3_L-to-H_P Parameter: Plant Line Value: Undefined
  misc_feature: MA Experiment 20001458 PARAMETER Experiment Name: At_50mM_NH4NO3_L-to-H_P Parameter: Timepoint (hr) Value: 2
  misc_feature: MA Experiment 20001458 PARAMETER Experiment Name: At_50mM_NH4NO3_L-to-H_P Parameter: Tissue Value: Siliques
  misc_feature: MA Experiment 20001458 PARAMETER Experiment Name: At_50mM_NH4NO3_L-to-H_P Parameter: Treatment Value: 50mM NH4NO3 vs. 100mM Manitol
  misc_feature: MA Experiment ID: 20001757 Result: Down-regulated in Transcription
  misc_feature: MA Experiment 20001757 PARAMETER Experiment Name: At_50mM_NH4NO3_L-to-H_P Parameter: Timepoint (hr) Value: 6
  misc_feature: MA Experiment 20001757 PARAMETER Experiment Name: At_50mM_NH4NO3_L-to-H_P Parameter: Tissue Value: Leaf
  misc_feature: MA Experiment 20001757 PARAMETER Experiment Name: At_50mM_NH4NO3_L-to-H_P Parameter: Treatment Value: 50mM NH4NO3 vs 100mM Mannitol
  misc_feature: MA Experiment ID: 20001906 Result: Up-regulated in Transcription
  misc_feature: MA Experiment 20001906 PARAMETER Experiment Name: At_Drought_Reproduction_P Parameter: Age (day) Value: 35
  misc_feature: MA Experiment 20001906 PARAMETER Experiment Name: At_Drought_Reproduction_P Parameter: Organism Value: A. thaliana
  misc_feature: MA Experiment 20001906 PARAMETER Experiment Name: At_Drought_Reproduction_P Parameter: Plant Line Value: WS
  misc_feature: MA Experiment 20001906 PARAMETER Experiment Name: At_Drought_Reproduction_P Parameter: Timepoint (day) Value: 5
  misc_feature: MA Experiment 20001906 PARAMETER Experiment Name: At_Drought_Reproduction_P Parameter: Tissue Value: Siliques
  misc_feature: MA Experiment 20001906 PARAMETER Experiment Name: At_Drought_Reproduction_P Parameter: Treatment Value: Drought vs. No Drought
  misc_feature: MA Experiment ID: 20001910 Result: Up-regulated in Transcription
  misc_feature: MA Experiment 20001910 PARAMETER Experiment Name: At_Drought_Reproduction_P Parameter: Age (day) Value: 37
  misc_feature: MA Experiment 20001910 PARAMETER Experiment Name: At_Drought_Reproduction_P Parameter: Organism Value: A. thaliana
  misc_feature: MA Experiment 20001910 PARAMETER Experiment Name: At_Drought_Reproduction_P Parameter: Plant Line Value: WS
  misc_feature: MA Experiment 20001910 PARAMETER Experiment Name: At_Drought_Reproduction_P Parameter: Timepoint (day) Value: 7
  misc_feature: MA Experiment 20001910 PARAMETER Experiment Name: At_Drought_Reproduction_P Parameter: Tissue Value: Flowers
  misc_feature: MA Experiment 20001910 PARAMETER Experiment Name: At_Drought_Reproduction_P Parameter: Treatment Value: Drought vs. No Drought
aagaagcaaacagtcaaatggaagaaaccaacattagagttgttctctactccattttctctctcatcttcttgataatctctttcaagttcttaaaaccaaagaaacagaatcttccaccgtctccgccgggatggttgccaataataggccatctccgccttctgaagccacccatccaccgcaccctccgctccttctccgagaccctcgaccacaacgatggtggcggcgtgatgtccctccgacttggatcccgtctagtctacgtggtgtcgtcacataaggttgcggcagaggagtgctttggcaagaacgacgtcgttctagctaaccggccacaggtgatcatcggaaaacatgttggttataacaatacaaacatgatcgctgcaccttacggtgatcactggcgtaacctccgtcgcctctgcactatcgagatcttttcaacacaccgccttaactgctttctttatgtccgtaccgacgaagtacgtcgccttataagccgcctctctcgtctcgcaggaaccaaaaaaactgttgtggaattgaaaccaatgcttatggacttgacattcaacaacataatgagaatgatgaccggaaaacgatactacggtgaagaaacaaccgatgaggaagaagcaaagcgtgtccgtaagttggtagcagatgttggggctaacacgagttcaggcaacgccgttgactacgtccccatcctcagactgttttcaagttatgaaaatagggttaaaaagttaggagaggagacagataagtttttacaaggtctcattgacgataaacgtgggcaacaagaaaccggtactacaatgatcgatcatttgcttgtcctccaaaaatctgatattgagtattacactgatcaaatcatcaaaggcatcatactgataatggtaatagcagggactaacacatcagcagtcactctagaatgggcactttccaatttgcttaaccatcctgacgtaatatctaaagcgagagacgaaatcgataaccgggttggtttagaccggcttatcgaagaagcagatcttagcgagctaccatatctaaagaacattgtccttgagacccttaggctacacccagctacaccattgctagtcccacacatggcatcagaagattgcaagataggatcctacgatatgccacgtggtacaacgttgttggtgaatgcatgggccatacatagggatccaaacacgtgggatgatccggatagctttaaaccagagcggtttgagaaagaagaggaagcacaaaagcttctggcgtttggattaggtagaagagcgtgtcctggatcgggtctggcccaacgaatcgtgggactagctctcgggtcattgatacaatgctttgaatgggagagagttgggaatgtggaagtggatatgaaggaaggagttgggaatactgtacccaaagcgattcctttgaaagctatttgcaaagctcgtccatttctacataagattatttcctaaaattgttgaaactacgaataaaagatgtgtgacatgttaatgcaaatcaatgattctctc

SEQ ID NO: 42882 - protein, 507 aa, Arabidopsis thaliana
  peptide (1)..(507): Ceres Seq. ID no. 12604693
  misc_feature (18)..(499): Homolog of NCBI NO: 33521521 NR Description: CYP81E8 [Medicago truncatula]
  misc_feature (18)..(506): Homolog of NCBI NO: 15235517 NR Description: cytochrome p450 family; protein id: At4g37320.1
  misc_feature (6)..(507): Homolog of NCBI NO: 15228472 NR Description: cytochrome p450 family
  misc_feature (12)..(506): Homolog of NCBI NO: 15235533 NR Description: cytochrome p450 family; protein id: At4g37330.1
  misc_feature (15)..(506): Homolog of NCBI NO: 15235535 NR Description: cytochrome p450 family; protein id: At4g37360.1
  misc_feature (18)..(507): Homolog of NCBI NO: 15235534 NR Description: cytochrome P450 monooxygenase, putative; protein
  misc_feature (6)..(507): Homolog of NCBI NO: 21554381 NR Description: cytochrome P450-like protein [Arabidopsis
  misc_feature (18)..(507): Homolog of NCBI NO: 15235536 NR Description: cytochrome p450 family
  misc_feature (8)..(507): Homolog of NCBI NO: 25282604 NR Description: cytochrome P450 monooxygenase
  misc_feature (6)..(507): Homolog of NCBI NO: 30692923 NR Description: cytochrome P450 91A1 [Arabidopsis thaliana]
EANSQMEETNIRVVLYSIFSLIFLIISFKFLKPKKQNLPPSPPGWLPIIGHLRLLKPPIHRTLRSFSETLDHNDGGGVMSLRLGSRLVYVVSSHKVAAEECFGKNDVVLANRPQVIIGKHVGYNNTNMIAAPYGDHWRNLRRLCTIEIFSTHRLNCFLYVRTDEVRRLISRLSRLAGTKKTVVELKPMLMDLTFNNIMRMMTGKRYYGEETTDEEEAKRVRKLVADVGANTSSGNAVDYVPILRLFSSYENRVKKLGEETDKFLQGLIDDKRGQQETGTTMIDHLLVLQKSDIEYYTDQIIKGIILIMVIAGTNTSAVTLEWALSNLLNHPDVISKARDEIDNRVGLDRLIEEADLSELPYLKNIVLETLRLHPATPLLVPHMASEDCKIGSYDMPRGTTLLVNAWAIHRDPNTWDDPDSFKPERFEKEEEAQKLLAFGLGRRACPGSGLAQRIVGLALGSLIQCFEWERVGNVEVDMKEGVGNTVPKAIPLKAICKARPFLHKIIS

SEQ ID NO: 42883 - protein, 502 aa, Arabidopsis thaliana
  peptide (1)..(502): Ceres Seq. ID no. 12604694
  misc_feature (13)..(494): Homolog of NCBI NO: 33521521 NR Description: CYP81E8 [Medicago truncatula]
  misc_feature (13)..(501): Homolog of NCBI NO: 15235517 NR Description: cytochrome p450 family; protein id: At4g37320.1
  misc_feature (1)..(502): Homolog of NCBI NO: 15228472 NR Description: cytochrome p450 family
  misc_feature (7)..(501): Homolog of NCBI NO: 15235533 NR Description: cytochrome p450 family; protein id: At4g37330.1
  misc_feature (10)..(501): Homolog of NCBI NO: 15235535 NR Description: cytochrome p450 family; protein id: At4g37360.1
  misc_feature (13)..(502): Homolog of NCBI NO: 15235534 NR Description: cytochrome P450 monooxygenase, putative; protein
  misc_feature (1)..(502): Homolog of NCBI NO: 21554381 NR Description: cytochrome P450-like protein [Arabidopsis
  misc_feature (13)..(502): Homolog of NCBI NO: 15235536 NR Description: cytochrome p450 family
  misc_feature (3)..(502): Homolog of NCBI NO: 25282604 NR Description: cytochrome P450 monooxygenase
  misc_feature (1)..(502): Homolog of NCBI NO: 30692923 NR Description: cytochrome P450 91A1 [Arabidopsis thaliana]
MEETNIRVVLYSIFSLIFLIISFKFLKPKKQNLPPSPPGWLPIIGHLRLLKPPIHRTLRSFSETLDHNDGGGVMSLRLGSRLVYVVSSHKVAAEECFGKNDVVLANRPQVIIGKHVGYNNTNMIAAPYGDHWRNLRRLCTIEIFSTHRLNCFLYVRTDEVRRLISRLSRLAGTKKTVVELKPMLMDLTFNNIMRMMTGKRYYGEETTDEEEAKRVRKLVADVGANTSSGNAVDYVPILRLFSSYENRVKKLGEETDKFLQGLIDDKRGQQETGTTMIDHLLVLQKSDIEYYTDQIIKGIILIMVIAGTNTSAVTLEWALSNLLNHPDVISKARDEIDNRVGLDRLIEEADLSELPYLKNIVLETLRLHPATPLLVPHMASEDCKIGSYDMPRGTTLLVNAWAIHRDPNTWDDPDSFKPERFEKEEEAQKLLAFGLGRRACPGSGLAQRIVGLALGSLIQCFEWERVGNVEVDMKEGVGNTVPKAIPLKAICKARPFLHKIIS

SEQ ID NO: 42884 - protein, 429 aa, Arabidopsis thaliana
  peptide (1)..(429): Ceres Seq. ID no. 12604695
  misc_feature (1)..(421): Homolog of NCBI NO: 33521521 NR Description: CYP81E8 [Medicago truncatula]
  misc_feature (1)..(428): Homolog of NCBI NO: 15235517 NR Description: cytochrome p450 family; protein id: At4g37320.1
  misc_feature (1)..(429): Homolog of NCBI NO: 15228472 NR Description: cytochrome p450 family
  misc_feature (1)..(428): Homolog of NCBI NO: 15235533 NR Description: cytochrome p450 family; protein id: At4g37330.1
  misc_feature (1)..(428): Homolog of NCBI NO: 15235535 NR Description: cytochrome p450 family; protein id: At4g37360.1
  misc_feature (1)..(429): Homolog of NCBI NO: 15235534 NR Description: cytochrome P450 monooxygenase, putative; protein
  misc_feature (1)..(429): Homolog of NCBI NO: 21554381 NR Description: cytochrome P450-like protein [Arabidopsis
  misc_feature (1)..(429): Homolog of NCBI NO: 15235536 NR Description: cytochrome p450 family
  misc_feature (1)..(429): Homolog of NCBI NO: 25282604 NR Description: cytochrome P450 monooxygenase
  misc_feature (1)..(429): Homolog of NCBI NO: 30692923 NR Description: cytochrome P450 91A1 [Arabidopsis thaliana]
MSLRLGSRLVYVVSSHKVAAEECFGKNDVVLANRPQVIIGKHVGYNNTNMIAAPYGDHWRNLRRLCTIEIFSTHRLNCFLYVRTDEVRRLISRLSRLAGTKKTVVELKPMLMDLTFNNIMRMMTGKRYYGEETTDEEEAKRVRKLVADVGANTSSGNAVDYVPILRLFSSYENRVKKLGEETDKFLQGLIDDKRGQQETGTTMIDHLLVLQKSDIEYYTDQIIKGIILIMVIAGTNTSAVTLEWALSNLLNHPDVISKARDEIDNRVGLDRLIEEADLSELPYLKNIVLETLRLHPATPLLVPHMASEDCKIGSYDMPRGTTLLVNAWAIHRDPNTWDDPDSFKPERFEKEEEAQKLLAFGLGRRACPGSGLAQRIVGLALGSLIQCFEWERVGNVEVDMKEGVGNTVPKAIPLKAICKARPFLHKIIS

SEQ ID NO: 42885 - DNA, 1447 bp, Arabidopsis thaliana
  misc_feature (1)..(1447): Ceres Seq. ID no. 13489579
  misc_feature: MA Experiment ID: 20000182 Result: Up-regulated in Transcription
  misc_feature: MA Experiment 20000182 PARAMETER Experiment Name: At_2mM_SA_P Parameter: Age (day) Value: 14
  misc_feature: MA Experiment 20000182 PARAMETER Experiment Name: At_2mM_SA_P Parameter: Organism Value: A. thaliana
  misc_feature: MA Experiment 20000182 PARAMETER Experiment Name: At_2mM_SA_P Parameter: Plant Line Value: WS
  misc_feature: MA Experiment 20000182 PARAMETER Experiment Name: At_2mM_SA_P Parameter: Timepoint (hr) Value: 6
  misc_feature: MA Experiment 20000182 PARAMETER Experiment Name: At_2mM_SA_P Parameter: Tissue Value: Aerial
  misc_feature: MA Experiment 20000182 PARAMETER Experiment Name: At_2mM_SA_P Parameter: Treatment Value: 2mM SA vs. No Treatment
  misc_feature: MA Experiment ID: 20000184 Result: Down-regulated in Transcription
  misc_feature: MA Experiment 20000184 PARAMETER Experiment Name: At_Shoots__P Parameter: Age (day) Value: 7
  misc_feature: MA Experiment 20000184 PARAMETER Experiment Name: At_Shoots__P Parameter: Tissue Value: Shoots vs. Whole Plant
  misc_feature: MA Experiment ID: 20001451 Result: Up-regulated in Transcription
  misc_feature: MA Experiment 20001451 PARAMETER Experiment Name: At_Far-red-induction_P Parameter: Age (day) Value: 7
  misc_feature: MA Experiment 20001451 PARAMETER Experiment Name: At_Far-red-induction_P Parameter: Light Value: Far-red vs. White
  misc_feature: MA Experiment 20001451 PARAMETER Experiment Name: At_Far-red-induction_P Parameter: Organism Value: A. thaliana
  misc_feature: MA Experiment 20001451 PARAMETER Experiment Name: At_Far-red-induction_P Parameter: Plant Line Value: Columbia
  misc_feature: MA Experiment 20001451 PARAMETER Experiment Name: At_Far-red-induction_P Parameter: Timepoint (hr) Value: 24
  misc_feature: MA Experiment 20001451 PARAMETER Experiment Name: At_Far-red-induction_P Parameter: Tissue Value: Whole Plant
cttaaaagaaaaaaaaaatcccaaacacagcaaaaaaaaaaaaaaaagcctagaggaatagaatcggtctctttctctataatctctctctctctctgacttgtttgtgttctctcaaatcctctgataagaatcaatggccaaggaattagcagagaaagctaaagaagcttttctagatgatgacttcgatgttgctgttgacttatactccaaagccattgacttggatcccaattgcgccgccttcttcgccgatcgtgctcaggccaacatcaaaatcgataacttcactgaagctgttgtagatgcgaacaaagccattgagttggagccaacgttggcaaaagcctatctcagaaagggcactgcttgtatgaagctagaagaatatagtactgctaaagcagccctggaaaagggagcttctgttgcaccgaatgaaccaaagtttaagaagatgatagatgaatgcgatcttcgtattgcagaagaagagaaagatttggttcagccgatgccaccgagtttgccttcaagctctacaacaccactagcaacggaagctgatgctcctcctgttccaattcctgcagcacctgccaaaccgatgttcaggcacgagttctaccagaaaccagaagaagcggtggtgacaattttcgccaaaaaagtacctaaggagaacgtaactgtcgagtttggtgagcagattctgagtgttgtcattgatgttgctggagaggaagcttatcatctccagccgagattgttcgggaagataataccagagaagtgcagatttgaagtattgtcgaccaaagttgagatccgtcttgcgaaagcagagataatcacctgggcctcccttgaatatggtaaagggcaaagtgttttgcccaaacccaatgtctcatcagcgctgtcgcagagaccagtgtacccatcttctaagccagcaaaagactgggacaagttggaagctgaagtgaagaaacaggagaaggatgagaagcttgatggagatgcagctatgaacaaatttttcagcgacatatactcgagtgcagatgaagacatgaggcgggcaatgaacaaatcatttgcagagtcgaatgggacggtactgtcgacaaactggaaagaagttgggactaagaaagtggagagcactccaccagatggcatggagctcaagaagtgggagtattgatcttcttaaaatccccttttctggtttttgttaaaaaaaagtctgacaaatcttttgaacttttaaggtgtttttcttttttggtttctgctcgaatttgtctctctccattcttgcgttgtggtctcaaagaacgttctgatactttgattttgtattagaaaactaaaactcgcaagtctgttgttttggaactttgttcttttatcgagaggcttatctaaatatttcttg

SEQ ID NO: 42886 - protein, 358 aa, Arabidopsis thaliana; identical to SEQ ID NO: 25341
  peptide (1)..(358): Ceres Seq. ID no. 13489580
  misc_feature (158)..(245): Pfam Name: CS domain Pfam Description: CS domain
  misc_feature (78)..(357): Homolog of NCBI NO: 30524966 NR Description: SGT1-like protein [Arabidopsis thaliana]
  misc_feature (2)..(358): Homolog of NCBI NO: 6581058 NR Description: Sgt1 [Oryza sativa]
  misc_feature (2)..(358): Homolog of NCBI NO: 34912836 NR Description: Sgt1 [Oryza sativa (japonica cultivar-group)]
  misc_feature (2)..(358): Homolog of NCBI NO: 17017306 NR Description: SGT1 [Hordeum vulgare]
  misc_feature (1)..(357): Homolog of NCBI NO: 29468339 NR Description: SGT1 [Nicotiana benthamiana]
  misc_feature (1)..(357): Homolog of NCBI NO: 15236528 NR Description: phosphatase - related [Arabidopsis thaliana]
  misc_feature (1)..(357): Homolog of NCBI NO: 17017308 NR Description: SGT1a [Arabidopsis thaliana]
  misc_feature (1)..(358): Homolog of NCBI NO: 40974917 NR Description: SGT1-like protein [Brassica oleracea]
  misc_feature (1)..(358): Homolog of NCBI NO: 40974915 NR Description: SGT1-like protein [Brassica oleracea]
  misc_feature (1)..(358): Homolog of NCBI NO: 15237122 NR Description: phosphatase - related [Arabidopsis thaliana]

SEQ ID NO: 42887 - protein, 278 aa, Arabidopsis thaliana; identical to SEQ ID NO: 25342
  peptide (1)..(278): Ceres Seq. ID no. 13489581
  misc_feature (78)..(165): Pfam Name: CS domain Pfam Description: CS domain
  misc_feature (1)..(277): Homolog of NCBI NO: 30524966 NR Description: SGT1-like protein [Arabidopsis thaliana]
  misc_feature (1)..(278): Homolog of NCBI NO: 6581058 NR Description: Sgt1 [Oryza sativa]
  misc_feature (1)..(278): Homolog of NCBI NO: 34912836 NR Description: Sgt1 [Oryza sativa (japonica cultivar-group)]
  misc_feature (1)..(278): Homolog of NCBI NO: 17017306 NR Description: SGT1 [Hordeum vulgare]
  misc_feature (1)..(277): Homolog of NCBI NO: 29468339 NR Description: SGT1 [Nicotiana benthamiana]
  misc_feature (1)..(277): Homolog of NCBI NO: 15236528 NR Description: phosphatase - related [Arabidopsis thaliana]
  misc_feature (1)..(277): Homolog of NCBI NO: 17017308 NR Description: SGT1a [Arabidopsis thaliana]
  misc_feature (1)..(278): Homolog of NCBI NO: 40974917 NR Description: SGT1-like protein [Brassica oleracea]
  misc_feature (1)..(278): Homolog of NCBI NO: 40974915 NR Description: SGT1-like protein [Brassica oleracea]
  misc_feature (1)..(278): Homolog of NCBI NO: 15237122 NR Description: phosphatase - related [Arabidopsis thaliana]

SEQ ID NO: 42888 - protein, 250 aa, Arabidopsis thaliana; identical to SEQ ID NO: 25343
  peptide (1)..(250): Ceres Seq. ID no. 13489582
  misc_feature (50)..(137): Pfam Name: CS domain Pfam Description: CS domain
  misc_feature (1)..(249): Homolog of NCBI NO: 30524966 NR Description: SGT1-like protein [Arabidopsis thaliana]
  misc_feature (1)..(250): Homolog of NCBI NO: 6581058 NR Description: Sgt1 [Oryza sativa]
  misc_feature (1)..(250): Homolog of NCBI NO: 34912836 NR Description: Sgt1 [Oryza sativa (japonica cultivar-group)]
  misc_feature (1)..(250): Homolog of NCBI NO: 17017306 NR Description: SGT1 [Hordeum vulgare]
  misc_feature (1)..(249): Homolog of NCBI NO: 29468339 NR Description: SGT1 [Nicotiana benthamiana]
  misc_feature (1)..(249): Homolog of NCBI NO: 15236528 NR Description: phosphatase - related [Arabidopsis thaliana]
  misc_feature (1)..(249): Homolog of NCBI NO: 17017308 NR Description: SGT1a [Arabidopsis thaliana]
  misc_feature (1)..(250): Homolog of NCBI NO: 40974917 NR Description: SGT1-like protein [Brassica oleracea]
  misc_feature (1)..(250): Homolog of NCBI NO: 40974915 NR Description: SGT1-like protein [Brassica oleracea]
  misc_feature (1)..(250): Homolog of NCBI NO: 15237122 NR Description: phosphatase - related [Arabidopsis thaliana]

SEQ ID NO: 42889 - DNA, 779 bp, Arabidopsis thaliana; identical to SEQ ID NO: 23744
  misc_feature (1)..(779): Ceres Seq. ID no. 13497399
  misc_feature: MA Experiment ID: 108434 Result: Up-regulated in Transcription
  misc_feature: MA Experiment 108434 PARAMETER Experiment Name: At_Root_Tips_cDNA_P Parameter: Tissue Value: Root Tips
  misc_feature: MA Experiment ID: 108461 Result: Down-regulated in Transcription
  misc_feature: MA Experiment 108461 PARAMETER Experiment Name: At_Germinating_Seeds_cDNA_P Parameter: Age (day) Value: 1 vs. 0
  misc_feature: MA Experiment 108461 PARAMETER Experiment Name: At_Germinating_Seeds_cDNA_P Parameter: Tissue Value: Germinating Seeds
  misc_feature: MA Experiment ID: 108462 Result: Down-regulated in Transcription
  misc_feature: MA Experiment 108462 PARAMETER Experiment Name: At_Germinating_Seeds_cDNA_P Parameter: Age (day) Value: 2 vs. 0
  misc_feature: MA Experiment 108462 PARAMETER Experiment Name: At_Germinating_Seeds_cDNA_P Parameter: Tissue Value: Germinating Seeds
  misc_feature: MA Experiment ID: 108463 Result: Down-regulated in Transcription
  misc_feature: MA Experiment 108463 PARAMETER Experiment Name: At_Germinating_Seeds_cDNA_P Parameter: Age (day) Value: 3 vs. 0
  misc_feature: MA Experiment 108463 PARAMETER Experiment Name: At_Germinating_Seeds_cDNA_P Parameter: Tissue Value: Germinating Seeds
  misc_feature: MA Experiment ID: 108488 Result: Up-regulated in Transcription
  misc_feature: MA Experiment ID: 108573 Result: Down-regulated in Transcription
  misc_feature: MA Experiment 108573 PARAMETER Experiment Name: At_Drought_cDNA_P Parameter: Timepoint (hr) Value: 6
  misc_feature: MA Experiment 108573 PARAMETER Experiment Name: At_Drought_cDNA_P Parameter: Tissue Value: Aerial
  misc_feature: MA Experiment 108573 PARAMETER Experiment Name: At_Drought_cDNA_P Parameter: Treatment Value: Drought vs. No Drought
  misc_feature: MA Experiment ID: 20000224 Result: Up-regulated in Transcription
  misc_feature: MA Experiment ID: 20000227 Result: Up-regulated in Transcription
  misc_feature: MA Experiment 20000227 PARAMETER Experiment Name: At_Root-Tips-vs-Tops_P Parameter: Tissue Value: Root Tips vs. Root Tops
  misc_feature: MA Experiment ID: 20000794 Result: Down-regulated in Transcription
  misc_feature: MA Experiment 20000794 PARAMETER Experiment Name: At_Petals_P Parameter: Age (day) Value: 23-25 days
  misc_feature: MA Experiment 20000794 PARAMETER Experiment Name: At_Petals_P Parameter: Plant Line Value: WS
  misc_feature: MA Experiment 20000794 PARAMETER Experiment Name: At_Petals_P Parameter: Tissue Value: Petals vs. Whole plant
  misc_feature: MA Experiment ID: 20001560 Result: Up-regulated in Transcription
  misc_feature: MA Experiment 20001560 PARAMETER Experiment Name: At_Drought_Soil_Dry_P Parameter: Age (day) Value: 28
  misc_feature: MA Experiment 20001560 PARAMETER Experiment Name: At_Drought_Soil_Dry_P Parameter: Organism Value: A. thaliana
  misc_feature: MA Experiment 20001560 PARAMETER Experiment Name: At_Drought_Soil_Dry_P Parameter: Plant Line Value: WS
  misc_feature: MA Experiment 20001560 PARAMETER Experiment Name: At_Drought_Soil_Dry_P Parameter: Post Timepoint (hr) Value: None
  misc_feature: MA Experiment 20001560 PARAMETER Experiment Name: At_Drought_Soil_Dry_P Parameter: Post-Treatment Value: None
  misc_feature: MA Experiment 20001560 PARAMETER Experiment Name: At_Drought_Soil_Dry_P Parameter: Timepoint (day) Value: 14
  misc_feature: MA Experiment 20001560 PARAMETER Experiment Name: At_Drought_Soil_Dry_P Parameter: Treatment Value: Drought vs. No Drought
  misc_feature: MA Experiment ID: 20001757 Result: Up-regulated in Transcription
  misc_feature: MA Experiment 20001757 PARAMETER Experiment Name: At_50mM_NH4NO3_L-to-H_P Parameter: Timepoint (hr) Value: 6
  misc_feature: MA Experiment 20001757 PARAMETER Experiment Name: At_50mM_NH4NO3_L-to-H_P Parameter: Tissue Value: Leaf
  misc_feature: MA Experiment 20001757 PARAMETER Experiment Name: At_50mM_NH4NO3_L-to-H_P Parameter: Treatment Value: 50mM NH4NO3 vs 100mM Mannitol

SEQ ID NO: 42890 - protein, 209 aa, Arabidopsis thaliana; identical to SEQ ID NO: 23745
  peptide (1)..(209): Ceres Seq. ID no. 13497400
  misc_feature (11)..(209): Homolog of NCBI NO: 18402657 NR Description: expressed protein [Arabidopsis thaliana]
  misc_feature (11)..(209): Homolog of NCBI NO: 18402657 NR Description: expressed protein [Arabidopsis thaliana]

SEQ ID NO: 42891 - protein, 199 aa, Arabidopsis thaliana; identical to SEQ ID NO: 23746
  peptide (1)..(199): Ceres Seq. ID no. 13497401
  misc_feature (1)..(199): Homolog of NCBI NO: 18402657 NR Description: expressed protein [Arabidopsis thaliana]
  misc_feature (1)..(199): Homolog of NCBI NO: 18402657 NR Description: expressed protein [Arabidopsis thaliana]

SEQ ID NO: 42892 - protein, 160 aa, Arabidopsis thaliana; identical to SEQ ID NO: 23747
  peptide (1)..(160): Ceres Seq. ID no. 13497402
  misc_feature (1)..(160): Homolog of NCBI NO: 18402657 NR Description: expressed protein [Arabidopsis thaliana]
  misc_feature (1)..(160): Homolog of NCBI NO: 18402657 NR Description: expressed protein [Arabidopsis thaliana]

SEQ ID NO: 42893 - DNA, 1259 bp, Arabidopsis thaliana
  misc_feature (1)..(1259): Ceres Seq. ID no. 12562527
  misc_feature: MA Experiment ID: 108461 Result: Up-regulated in Transcription
  misc_feature: MA Experiment 108461 PARAMETER Experiment Name: At_Germinating_Seeds_cDNA_P Parameter: Age (day) Value: 1 vs. 0
  misc_feature: MA Experiment 108461 PARAMETER Experiment Name: At_Germinating_Seeds_cDNA_P Parameter: Tissue Value: Germinating Seeds
  misc_feature: MA Experiment ID: 108569 Result: Up-regulated in Transcription
  misc_feature: MA Experiment 108569 PARAMETER Experiment Name: At_0.001%_MeJA__cDNA_P Parameter: Timepoint (hr) Value: 6
  misc_feature: MA Experiment 108569 PARAMETER Experiment Name: At_0.001%_MeJA__cDNA_P Parameter: Tissue Value: Aerial
  misc_feature: MA Experiment 108569 PARAMETER Experiment Name: At_0.001%_MeJA__cDNA_P Parameter: Treatment Value: 0.001% MeJA vs. No Treatment
  misc_feature: MA Experiment ID: 108595 Result: Up-regulated in Transcription
  misc_feature: MA Experiment 108595 PARAMETER Experiment Name: At_Ler-pi_Ovule_cDNA_P Parameter: Plant Line Value: null
  misc_feature: MA Experiment ID: 20000211 Result: Up-regulated in Transcription
  misc_feature: MA Experiment 20000211 PARAMETER Experiment Name: At_0.001percent_MeJA__P Parameter: Age (day) Value: 14
  misc_feature: MA Experiment 20000211 PARAMETER Experiment Name: At_0.001percent_MeJA__P Parameter: Organism Value: A. thaliana
  misc_feature: MA Experiment 20000211 PARAMETER Experiment Name: At_0.001percent_MeJA__P Parameter: Plant Line Value: WS
  misc_feature: MA Experiment 20000211 PARAMETER Experiment Name: At_0.001percent_MeJA__P Parameter: Timepoint (hr) Value: 1
  misc_feature: MA Experiment 20000211 PARAMETER Experiment Name: At_0.001percent_MeJA__P Parameter: Tissue Value: Aerial
  misc_feature: MA Experiment 20000211 PARAMETER Experiment Name: At_0.001percent_MeJA__P Parameter: Treatment Value: 0.001percent MeJA vs. No Treatment
  misc_feature: MA Experiment ID: 20000224 Result: Up-regulated in Transcription
  misc_feature: MA Experiment ID: 20000227 Result: Up-regulated in Transcription
  misc_feature: MA Experiment 20000227 PARAMETER Experiment Name: At_Root-Tips-vs-Tops_P Parameter: Tissue Value: Root Tips vs. Root Tops
  misc_feature: MA Experiment ID: 20000527 Result: Down-regulated in Transcription
  misc_feature: MA Experiment 20000527 PARAMETER Experiment Name: At_10percent_PEG_P Parameter: Age (day) Value: 20
  misc_feature: MA Experiment 20000527 PARAMETER Experiment Name: At_10percent_PEG_P Parameter: Organism Value: A. thaliana
  misc_feature: MA Experiment 20000527 PARAMETER Experiment Name: At_10percent_PEG_P Parameter: Plant Line Value: WS
  misc_feature: MA Experiment 20000527 PARAMETER Experiment Name: At_10percent_PEG_P Parameter: Timepoint (day) Value: 20
  misc_feature: MA Experiment 20000527 PARAMETER Experiment Name: At_10percent_PEG_P Parameter: Tissue Value: Whole Plant
  misc_feature: MA Experiment 20000527 PARAMETER Experiment Name: At_10percent_PEG_P Parameter: Treatment Value: 10percent PEG vs. No Treatment
aaacaacacacacacaaatggctcctcgtgtgatcttcttacttctctcgcttgtttttctctagctcgcaaacacatcacactctttgagaaagtttcaatcatttctacaccctatttataaagacacggccaaaaatatatacaccatccctttgtccatcggctcaacttccagcgaaaaattcgtccttgacctcaacggagccgcaccgttattgcaaaactgtccaaccgccgccaaatccaccacctaccacccaatcagatgtggctccacaagatgcaaatacgcaaaccccaacttcccctgtcccaacaatgtcattgccaagaagaggaccgtgtgtctctcctccgacaattcccgcctattccgagacaccgtccccttgttatacacatttaatggagtttacactagggacagtgaaatgagttcttcattgactttgacttgcactgacggtgctcctgccttaaaacaaagaaccatcggtctcgctaacacccacttgtcgattccctcgcagctcatctccatgtaccagcttcctcataagatagctctttgtttgccttccaccgaacgaagtcagtctcataatggtgacctttggatcggtaaaggggaatattattatctgccttacgataaagatgtctctaagatctttgcctccacgcctctgatcggtaatggcaagtccggcgagtacttaatcgatgtgaagtccatccaaatcggtgcaaagaccgttcctataccctatggagccacaaagatcagcactttggctccttacaccgtattccaaacttccctttacaaggctctgctcacagctttcaccgaaaacatcaagatagctaaagctcccgcggtgaagcctttcggtgcgtgcttctactccaatggaggacgtggagttcccgtgatcgacctggtgctgagcggaggggctaagtggaggatctacgggtctaattccttggtgaaggtgaataaaaatgtggtttgtttagggtttgtggacggaggtgtgaagccgaagtaccctatagtgatcggaggatttcagatggaggataatttggtggagttcgatcttgaagcttccaaattttctttctcctcttctcttttgcttcacaacacttcttgctcagtgcaaaggttgtctcctttctaatgcacgtgatcgattattcatgttatcaagacatatcatcagtttcctttttaataaattaatgtc

SEQ ID NO: 42894 - protein, 252 aa, Arabidopsis thaliana
  peptide (1)..(252): Ceres Seq. ID no. 12562528
  misc_feature (114)..(236): Pfam Name: Eukaryotic aspartyl protease Pfam Description: Eukaryotic aspartyl protease
  misc_feature (114)..(245): Homolog of NCBI NO: 15218740 NR Description: unknown protein
  misc_feature (102)..(245): Homolog of NCBI NO: 21537233 NR Description: EDGP precursor [Arabidopsis thaliana]
  misc_feature (97)..(245): Homolog of NCBI NO: 18379072 NR Description: expressed protein
  misc_feature (1)..(244): Homolog of NCBI NO: 34907230 NR Description: putative dermal glycoprotein precursor
  misc_feature (94)..(245): Homolog of NCBI NO: 10334495 NR Description: putative extracellular dermal glycoprotein [Cicer
  misc_feature (114)..(245): Homolog of NCBI NO: 32482806 NR Description: putative xyloglucanase inhibitor [Solanum
  misc_feature (1)..(111): Homolog of NCBI NO: 32482806 NR Description: putative xyloglucanase inhibitor [Solanum
  misc_feature (114)..(244): Homolog of NCBI NO: 27372527 NR Description: xyloglucan-specific fungal endoglucanase
  misc_feature (1)..(111): Homolog of NCBI NO: 27372527 NR Description: xyloglucan-specific fungal endoglucanase
  misc_feature (1)..(252): Homolog of NCBI NO: 15239644 NR Description: dermal glycoprotein precursor -like protein
MSSSLTLTCTDGAPALKQRTIGLANTHLSIPSQLISMYQLPHKIALCLPSTERSQSHNGDLWIGKGEYYYLPYDKDVSKIFASTPLIGNGKSGEYLIDVKSIQIGAKTVPIPYGATKISTLAPYTVFQTSLYKALLTAFTENIKIAKAPAVKPFGACFYSNGGRGVPVIDLVLSGGAKWRIYGSNSLVKVNKNVVCLGFVDGGVKPKYPIVIGGFQMEDNLVEFDLEASKFSFSSSLLLHNTSCSVQRLSPF

SEQ ID NO: 42895 - protein, 216 aa, Arabidopsis thaliana
  peptide (1)..(216): Ceres Seq. ID no. 12562529
  misc_feature (78)..(200): Pfam Name: Eukaryotic aspartyl protease Pfam Description: Eukaryotic aspartyl protease
  misc_feature (78)..(209): Homolog of NCBI NO: 15218740 NR Description: unknown protein
  misc_feature (66)..(209): Homolog of NCBI NO: 21537233 NR Description: EDGP precursor [Arabidopsis thaliana]
  misc_feature (61)..(209): Homolog of NCBI NO: 18379072 NR Description: expressed protein
  misc_feature (1)..(208): Homolog of NCBI NO: 34907230 NR Description: putative dermal glycoprotein precursor
  misc_feature (58)..(209): Homolog of NCBI NO: 10334495 NR Description: putative extracellular dermal glycoprotein [Cicer
  misc_feature (78)..(209): Homolog of NCBI NO: 32482806 NR Description: putative xyloglucanase inhibitor [Solanum
  misc_feature (1)..(75): Homolog of NCBI NO: 32482806 NR Description: putative xyloglucanase inhibitor [Solanum
  misc_feature (78)..(208): Homolog of NCBI NO: 27372527 NR Description: xyloglucan-specific fungal endoglucanase
  misc_feature (1)..(75): Homolog of NCBI NO: 27372527 NR Description: xyloglucan-specific fungal endoglucanase
  misc_feature (1)..(216): Homolog of NCBI NO: 15239644 NR Description: dermal glycoprotein precursor -like protein
MYQLPHKIALCLPSTERSQSHNGDLWIGKGEYYYLPYDKDVSKIFASTPLIGNGKSGEYLIDVKSIQIGAKTVPIPYGATKISTLAPYTVFQTSLYKALLTAFTENIKIAKAPAVKPFGACFYSNGGRGVPVIDLVLSGGAKWRIYGSNSLVKVNKNVVCLGFVDGGVKPKYPIVIGGFQMEDNLVEFDLEASKFSFSSSLLLHNTSCSVQRLSPF

SEQ ID NO: 42896 - DNA, 1318 bp, Arabidopsis thaliana
  misc_feature (1)..(1318): Ceres Seq. ID no. 12357572
  misc_feature: MA Experiment ID: 108462 Result: Down-regulated in Transcription
  misc_feature: MA Experiment 108462 PARAMETER Experiment Name: At_Germinating_Seeds_cDNA_P Parameter: Age (day) Value: 2 vs. 0
  misc_feature: MA Experiment 108462 PARAMETER Experiment Name: At_Germinating_Seeds_cDNA_P Parameter: Tissue Value: Germinating Seeds
  misc_feature: MA Experiment ID: 108463 Result: Down-regulated in Transcription
  misc_feature: MA Experiment 108463 PARAMETER Experiment Name: At_Germinating_Seeds_cDNA_P Parameter: Age (day) Value: 3 vs. 0
  misc_feature: MA Experiment 108463 PARAMETER Experiment Name: At_Germinating_Seeds_cDNA_P Parameter: Tissue Value: Germinating Seeds
  misc_feature: MA Experiment ID: 108464 Result: Down-regulated in Transcription
  misc_feature: MA Experiment 108464 PARAMETER Experiment Name: At_Germinating_Seeds_cDNA_P Parameter: Age (day) Value: 4 vs. 0
  misc_feature: MA Experiment 108464 PARAMETER Experiment Name: At_Germinating_Seeds_cDNA_P Parameter: Tissue Value: Germinating Seeds
  misc_feature: MA Experiment ID: 108595 Result: Down-regulated in Transcription
  misc_feature: MA Experiment 108595 PARAMETER Experiment Name: At_Ler-pi_Ovule_cDNA_P Parameter: Plant Line Value: null
  misc_feature: MA Experiment ID: 20000184 Result: Down-regulated in Transcription
  misc_feature: MA Experiment 20000184 PARAMETER Experiment Name: At_Shoots__P Parameter: Age (day) Value: 7
  misc_feature: MA Experiment 20000184 PARAMETER Experiment Name: At_Shoots__P Parameter: Tissue Value: Shoots vs. Whole Plant
agtgggcctaatggcccatatgtaacacgaagatttctgacagtacgacttctaaagtactttgctttccttgttgaattccgaccaaagtcgataaagagttatgacgatggacgatggtaactccgtctacgtcggcggcctcccttacgacatcaccgaggaggctgtccgtcgcgtcttctccatttacggctccgtcctcaccgttaagattgtcaatgaccggagtgtaagagggaaatgctatggctttgttacattttcgaaccgtcgatcggctgatgatgctatcgaagatatggatggaaaaagtattggtgggcgtgcagtgcgtgtgaatgatgtgacaacaagaggtggaagaatgaatccaggtccggggcggttacaaccacacggtggttgggatagaagtcctgataggagaagtgatggtaattatgagagggatcggtatagtgataggtctcgagaacgggataggtctcaggataggagaaaagatcatcgctacatagagaaggaaagagcttatgagcattcacatgattttgagaggaggaatgatcatgatatggtagatagaaatggttataaggaaagagttttcgatggtgatgaaggagattggcgtggggataggtcttatgtggataatggtaggggaataaatgggaccagtgctcacgaaggaaggagccaagaaacaaagagagaagatagtaccattcttgatggtggacgtggcagagatcacttctctaattcaagtggagatcatcaggtgaaagaagatctggaagcgctgattaagatgcgtgaggcgcttcgagatgaggtgatggtgatggaagagagactggaagtaaaagaagtagtgtgctcagagctacagaagaaatctaagagattagaagatttgttgatcaatgaaaagaaactggtttcacaacgccgaaaagaattggcaaagctacataaatcatattcaagggttagagagtgcacggacaacctgaaagactgtgaacaagaactccagttgcttgttaattcagcagctagagaaggcgtggcaggtgctgatgaaggattgggacacgggtatccgtaacacggtcacccgcatgtatgatctgttttgtctaaagtgtagctttgatatgtcttctctttgtgactttccgagtttttttctagtcgagctacactaatttggtacatatttacttgttttggcaagtatgtattcatttcattcgggatgtattattatcatacgaacatgaactaaataattatgttttcaacttgc

SEQ ID NO: 42897 - protein, 337 aa, Arabidopsis thaliana
  peptide (1)..(337): Ceres Seq. ID no. 12357573
  misc_feature (9)..(79): Pfam Name: RNA recognition motif. (a.k.a. RRM, RBD, or RNP domain) Pfam Description: RNA recognition motif. (a.k.a. RRM, RBD, or RNP
  misc_feature (1)..(150): Homolog of NCBI NO: 30585341 NR Description: Homo sapiens cold inducible RNA binding protein
  misc_feature (1)..(150): Homolog of NCBI NO: 4502847 NR Description: cold inducible RNA binding protein
  misc_feature (9)..(168): Homolog of NCBI NO: 25144919 NR Description: pre-mRNA splicing SR Protein RSP-6 (20.5 kD)
  misc_feature (10)..(114): Homolog of NCBI NO: 6911144 NR Description: putative glycine-rich RNA binding protein 3
  misc_feature (4)..(228): Homolog of NCBI NO: 34856077 NR Description: similar to U1 small nuclear ribonucleoprotein 70
  misc_feature (10)..(116): Homolog of NCBI NO: 2267567 NR Description: glycine-rich RNA binding protein 1 [Pelargonium x
  misc_feature (10)..(114): Homolog of NCBI NO: 18076086 NR Description: glycine-rich RNA-binding protein [Ricinus
  misc_feature (3)..(145): Homolog of NCBI NO: 28856196 NR Description: Similar to cold inducible RNA binding protein
  misc_feature (1)..(337): Homolog of NCBI NO: 21553602 NR Description: glycine-rich RNA-binding protein-like
  misc_feature (1)..(337): Homolog of NCBI NO: 18420085 NR Description: glycine-rich RNA-binding protein - like
MTMDDGNSVYVGGLPYDITEEAVRRVFSIYGSVLTVKIVNDRSVRGKCYGFVTFSNRRSADDAIEDMDGKSIGGRAVRVNDVTTRGGRMNPGPGRLQPHGGWDRSPDRRSDGNYERDRYSDRSRERDRSQDRRKDHRYIEKERAYEHSHDFERRNDHDMVDRNGYKERVFDGDEGDWRGDRSYVDNGRGINGTSAHEGRSQETKREDSTILDGGRGRDHFSNSSGDHQVKEDLEALIKMREALRDEVMVMEERLEVKEVVCSELQKKSKRLEDLLINEKKLVSQRRKELAKLHKSYSRVRECTDNLKDCEQELQLLVNSAAREGVAGADEGLGHGYP

SEQ ID NO: 42898 - protein, 335 aa, Arabidopsis thaliana
  peptide (1)..(335): Ceres Seq. ID no. 12357574
  misc_feature (7)..(77): Pfam Name: RNA recognition motif. (a.k.a. RRM, RBD, or RNP domain) Pfam Description: RNA recognition motif. (a.k.a. RRM, RBD, or RNP
  misc_feature (1)..(148): Homolog of NCBI NO: 30585341 NR Description: Homo sapiens cold inducible RNA binding protein
  misc_feature (1)..(148): Homolog of NCBI NO: 4502847 NR Description: cold inducible RNA binding protein
  misc_feature (7)..(166): Homolog of NCBI NO: 25144919 NR Description: pre-mRNA splicing SR Protein RSP-6 (20.5 kD)
  misc_feature (8)..(112): Homolog of NCBI NO: 6911144 NR Description: putative glycine-rich RNA binding protein 3
  misc_feature (2)..(226): Homolog of NCBI NO: 34856077 NR Description: similar to U1 small nuclear ribonucleoprotein 70
  misc_feature (8)..(114): Homolog of NCBI NO: 2267567 NR Description: glycine-rich RNA binding protein 1 [Pelargonium x
  misc_feature (8)..(112): Homolog of NCBI NO: 18076086 NR Description: glycine-rich RNA-binding protein [Ricinus
  misc_feature (1)..(143): Homolog of NCBI NO: 28856196 NR Description: Similar to cold inducible RNA binding protein
  misc_feature (1)..(335): Homolog of NCBI NO: 21553602 NR Description: glycine-rich RNA-binding protein-like
  misc_feature (1)..(335): Homolog of NCBI NO: 18420085 NR Description: glycine-rich RNA-binding protein - like
MDDGNSVYVGGLPYDITEEAVRRVFSIYGSVLTVKIVNDRSVRGKCYGFVTFSNRRSADDAIEDMDGKSIGGRAVRVNDVTTRGGRMNPGPGRLQPHGGWDRSPDRRSDGNYERDRYSDRSRERDRSQDRRKDHRYIEKERAYEHSHDFERRNDHDMVDRNGYKERVFDGDEGDWRGDRSYVDNGRGINGTSAHEGRSQETKREDSTILDGGRGRDHFSNSSGDHQVKEDLEALIKMREALRDEVMVMEERLEVKEVVCSELQKKSKRLEDLLINEKKLVSQRRKELAKLHKSYSRVRECTDNLKDCEQELQLLVNSAAREGVAGADEGLGHGYP

SEQ ID NO: 42899 - protein, 271 aa, Arabidopsis thaliana
  peptide (1)..(271): Ceres Seq. ID no. 12357575
  misc_feature (1)..(84): Homolog of NCBI NO: 30585341 NR Description: Homo sapiens cold inducible RNA binding protein
  misc_feature (1)..(84): Homolog of NCBI NO: 4502847 NR Description: cold inducible RNA binding protein
  misc_feature (1)..(102): Homolog of NCBI NO: 25144919 NR Description: pre-mRNA splicing SR Protein RSP-6 (20.5 kD)
  misc_feature (1)..(48): Homolog of NCBI NO: 6911144 NR Description: putative glycine-rich RNA binding protein 3
  misc_feature (1)..(162): Homolog of NCBI NO: 34856077 NR Description: similar to U1 small nuclear ribonucleoprotein 70
  misc_feature (1)..(50): Homolog of NCBI NO: 2267567 NR Description: glycine-rich RNA binding protein 1 [Pelargonium x
  misc_feature (1)..(48): Homolog of NCBI NO: 18076086 NR Description: glycine-rich RNA-binding protein [Ricinus
  misc_feature (1)..(79): Homolog of NCBI NO: 28856196 NR Description: Similar to cold inducible RNA binding protein
  misc_feature (1)..(271): Homolog of NCBI NO: 21553602 NR Description: glycine-rich RNA-binding protein-like
  misc_feature (1)..(271): Homolog of NCBI NO: 18420085 NR Description: glycine-rich RNA-binding protein - like
MDGKSIGGRAVRVNDVTTRGGRMNPGPGRLQPHGGWDRSPDRRSDGNYERDRYSDRSRERDRSQDRRKDHRYIEKERAYEHSHDFERRNDHDMVDRNGYKERVFDGDEGDWRGDRSYVDNGRGINGTSAHEGRSQETKREDSTILDGGRGRDHFSNSSGDHQVKEDLEALIKMREALRDEVMVMEERLEVKEVVCSELQKKSKRLEDLLINEKKLVSQRRKELAKLHKSYSRVRECTDNLKDCEQELQLLVNSAAREGVAGADEGLGHGYP

SEQ ID NO: 42900 - DNA, 1708 bp, Arabidopsis thaliana; identical to SEQ ID NO: 29984
  misc_feature (1)..(1708): Ceres Seq. ID no. 12603224
  misc_feature: MA Experiment ID: 108488 Result: Down-regulated in Transcription
  misc_feature: MA Experiment ID: 108501 Result: Down-regulated in Transcription
  misc_feature: MA Experiment 108501 PARAMETER Experiment Name: At_ap2_floral_buds_cDNA_P Parameter: Plant Line Value: ap2 (Ler.)
  misc_feature: MA Experiment 108501 PARAMETER Experiment Name: At_ap2_floral_buds_cDNA_P Parameter: Tissue Value: Closed Flower
  misc_feature: MA Experiment ID: 108594 Result: Down-regulated in Transcription
  misc_feature: MA Experiment 108594 PARAMETER Experiment Name: At_Ler-rhl_Root_cDNA_P Parameter: Plant Line Value: null
  misc_feature: MA Experiment ID: 20000111 Result: Down-regulated in Transcription
  misc_feature: MA Experiment 20000111 PARAMETER Experiment Name: At_42deg_Heat_cDNA_P Parameter: Temperature (deg C) Value: 42 vs. 22
  misc_feature: MA Experiment 20000111 PARAMETER Experiment Name: At_42deg_Heat_cDNA_P Parameter: Timepoint (hr) Value: 6
  misc_feature: MA Experiment 20000111 PARAMETER Experiment Name: At_42deg_Heat_cDNA_P Parameter: Tissue Value: Aerial
  misc_feature: MA Experiment ID: 20000113 Result: Down-regulated in Transcription
  misc_feature: MA Experiment 20000113 PARAMETER Experiment Name: At_42deg_Heat_cDNA_P Parameter: Temperature (deg C) Value: 42 vs. 22
  misc_feature: MA Experiment 20000113 PARAMETER Experiment Name: At_42deg_Heat_cDNA_P Parameter: Timepoint (hr) Value: 8
  misc_feature: MA Experiment 20000113 PARAMETER Experiment Name: At_42deg_Heat_cDNA_P Parameter: Tissue Value: Aerial
  misc_feature: MA Experiment ID: 20000173 Result: Down-regulated in Transcription
  misc_feature: MA Experiment 20000173 PARAMETER Experiment Name: At_42deg_Heat_P Parameter: Age (day) Value: 14
  misc_feature: MA Experiment 20000173 PARAMETER Experiment Name: At_42deg_Heat_P Parameter: Organism Value: A. thaliana
  misc_feature: MA Experiment 20000173 PARAMETER Experiment Name: At_42deg_Heat_P Parameter: Plant Line Value: WS
  misc_feature: MA Experiment 20000173 PARAMETER Experiment Name: At_42deg_Heat_P Parameter: Temperature (deg C) Value: 42 vs. 22
  misc_feature: MA Experiment 20000173 PARAMETER Experiment Name: At_42deg_Heat_P Parameter: Timepoint (hr) Value: 6
  misc_feature: MA Experiment 20000173 PARAMETER Experiment Name: At_42deg_Heat_P Parameter: Tissue Value: Aerial
  misc_feature: MA Experiment ID: 20000224 Result: Up-regulated in Transcription
  misc_feature: MA Experiment ID: 20000227 Result: Down-regulated in Transcription
  misc_feature: MA Experiment 20000227 PARAMETER Experiment Name: At_Root-Tips-vs-Tops_P Parameter: Tissue Value: Root Tips vs. Root Tops
  misc_feature: MA Experiment ID: 20000234 Result: Down-regulated in Transcription
  misc_feature: MA Experiment 20000234 PARAMETER Experiment Name: At_Siliques_P Parameter: Age (day) Value: 21
  misc_feature: MA Experiment 20000234 PARAMETER Experiment Name: At_Siliques_P Parameter: Organism Value: A. thaliana
  misc_feature: MA Experiment 20000234 PARAMETER Experiment Name: At_Siliques_P Parameter: Plant Line Value: WS
  misc_feature: MA Experiment 20000234 PARAMETER Experiment Name: At_Siliques_P Parameter: Tissue Value: Less Than 5mm Siliques vs. Whole Plant
  misc_feature: MA Experiment ID: 20000264 Result: Down-regulated in Transcription
  misc_feature: MA Experiment 20000264 PARAMETER Experiment Name: At_Open_Flower_P Parameter: Age (day) Value: 21
  misc_feature: MA Experiment 20000264 PARAMETER Experiment Name: At_Open_Flower_P Parameter: Plant Line Value: WS
  misc_feature: MA Experiment 20000264 PARAMETER Experiment Name: At_Open_Flower_P Parameter: Tissue Value: Open Flower vs. Whole Plant
  misc_feature: MA Experiment ID: 20000265 Result: Down-regulated in Transcription
  misc_feature: MA Experiment 20000265 PARAMETER Experiment Name: At_Open_Flower_P Parameter: Age (day) Value: 21
  misc_feature: MA Experiment 20000265 PARAMETER Experiment Name: At_Open_Flower_P Parameter: Plant Line Value: WS
  misc_feature: MA Experiment 20000265 PARAMETER Experiment Name: At_Open_Flower_P Parameter: Tissue Value: Closed Flower vs. Whole Plant
  misc_feature: MA Experiment ID: 20000286 Result: Down-regulated in Transcription
  misc_feature: MA Experiment 20000286 PARAMETER Experiment Name: At_Open_Flower_P Parameter: Age (day) Value: 21
  misc_feature: MA Experiment 20000286 PARAMETER Experiment Name: At_Open_Flower_P Parameter: Plant Line Value: WS
  misc_feature: MA Experiment 20000286 PARAMETER Experiment Name: At_Open_Flower_P Parameter: Tissue Value: Half Open vs. Whole Plant
  misc_feature: MA Experiment ID: 20000495 Result: Down-regulated in Transcription
  misc_feature: MA Experiment 20000495 PARAMETER Experiment Name: At_Guard_Cells_P Parameter: Harvest Date Value: 8/2/2002
  misc_feature: MA Experiment 20000495 PARAMETER Experiment Name: At_Guard_Cells_P Parameter: Organism Value: A. thaliana
  misc_feature: MA Experiment 20000495 PARAMETER Experiment Name: At_Guard_Cells_P Parameter: Tissue Value: Guard Cells vs. Leaves
  misc_feature: MA Experiment ID: 20001451 Result: Down-regulated in Transcription
  misc_feature: MA Experiment 20001451 PARAMETER Experiment Name: At_Far-red-induction_P Parameter: Age (day) Value: 7
  misc_feature: MA Experiment 20001451 PARAMETER Experiment Name: At_Far-red-induction_P Parameter: Light Value: Far-red vs. White
  misc_feature: MA Experiment 20001451 PARAMETER Experiment Name: At_Far-red-induction_P Parameter: Organism Value: A. thaliana
  misc_feature: MA Experiment 20001451 PARAMETER Experiment Name: At_Far-red-induction_P Parameter: Plant Line Value: Columbia
  misc_feature: MA Experiment 20001451 PARAMETER Experiment Name: At_Far-red-induction_P Parameter: Timepoint (hr) Value: 24
  misc_feature: MA Experiment 20001451 PARAMETER Experiment Name: At_Far-red-induction_P Parameter: Tissue Value: Whole Plant

SEQ ID NO: 42901 - protein, 501 aa, Arabidopsis thaliana; identical to SEQ ID NO: 29985
  peptide (1)..(501): Ceres Seq. ID no. 12603225
  misc_feature (17)..(501): Homolog of NCBI NO: 14276718 NR Description: T-cytoplasm male sterility restorer factor 2 [Zea
  misc_feature (17)..(501): Homolog of NCBI NO: 7431451 NR Description: rf2 nuclear restorer protein - maize
  misc_feature (16)..(501): Homolog of NCBI NO: 20530131 NR Description: mitochondrial aldehyde dehydrogenase [Sorghum
  misc_feature (16)..(501): Homolog of NCBI NO: 15228319 NR Description: aldehyde dehydrogenase (NAD+)-like protein
  misc_feature (35)..(500): Homolog of NCBI NO: 19850245 NR Description: cytosolic aldehyde dehydrogenase RF2D [Zea mays]
  misc_feature (3)..(500): Homolog of NCBI NO: 19850247 NR Description: cytosolic aldehyde dehydrogenase RF2D [Zea mays]
  misc_feature (3)..(501): Homolog of NCBI NO: 19850243 NR Description: cytosolic aldehyde dehydrogenase RF2C [Zea mays]
  misc_feature (3)..(501): Homolog of NCBI NO: 19850241 NR Description: cytosolic aldehyde dehydrogenase RF2C [Zea mays]
  misc_feature (4)..(501): Homolog of NCBI NO: 34912248 NR Description: cytosolic aldehyde dehydrogenase
  misc_feature (1)..(501): Homolog of NCBI NO: 18404212 NR Description: Expressed protein
  misc_feature (17)..(501): Homolog of NCBI NO: 14276718 NR Description: T-cytoplasm male sterility restorer factor 2 [Zea
  misc_feature (17)..(501): Homolog of NCBI NO: 7431451 NR Description: rf2 nuclear restorer protein - maize
  misc_feature (16)..(501): Homolog of NCBI NO: 20530131 NR Description: mitochondrial aldehyde dehydrogenase [Sorghum
  misc_feature (16)..(501): Homolog of NCBI NO: 15228319 NR Description: aldehyde dehydrogenase (NAD+)-like protein
  misc_feature (35)..(500): Homolog of NCBI NO: 19850245 NR Description: cytosolic aldehyde dehydrogenase RF2D [Zea mays]
  misc_feature (3)..(500): Homolog of NCBI NO: 19850247 NR Description: cytosolic aldehyde dehydrogenase RF2D [Zea mays]
  misc_feature (3)..(501): Homolog of NCBI NO: 19850243 NR Description: cytosolic aldehyde dehydrogenase RF2C [Zea mays]
  misc_feature (3)..(501): Homolog of NCBI NO: 19850241 NR Description: cytosolic aldehyde dehydrogenase RF2C [Zea mays]
  misc_feature (4)..(501): Homolog of NCBI NO: 34912248 NR Description: cytosolic aldehyde dehydrogenase
  misc_feature (1)..(501): Homolog of NCBI NO: 18404212 NR Description: Expressed protein

SEQ ID NO: 42902 - protein, 424 aa, Arabidopsis thaliana; identical to SEQ ID NO: 29986
  peptide (1)..(424): Ceres Seq. ID no. 12603226
  misc_feature (1)..(424): Homolog of NCBI NO: 14276718 NR Description: T-cytoplasm male sterility restorer factor 2 [Zea
  misc_feature (1)..(424): Homolog of NCBI NO: 7431451 NR Description: rf2 nuclear restorer protein - maize
  misc_feature (1)..(424): Homolog of NCBI NO: 20530131 NR Description: mitochondrial aldehyde dehydrogenase [Sorghum
  misc_feature (1)..(424): Homolog of NCBI NO: 15228319 NR Description: aldehyde dehydrogenase (NAD+)-like protein
  misc_feature (1)..(423): Homolog of NCBI NO: 19850245 NR Description: cytosolic aldehyde dehydrogenase RF2D [Zea mays]
  misc_feature (1)..(423): Homolog of NCBI NO: 19850247 NR Description: cytosolic aldehyde dehydrogenase RF2D [Zea mays]
  misc_feature (1)..(424): Homolog of NCBI NO: 19850243 NR Description: cytosolic aldehyde dehydrogenase RF2C [Zea mays]
  misc_feature (1)..(424): Homolog of NCBI NO: 19850241 NR Description: cytosolic aldehyde dehydrogenase RF2C [Zea mays]
  misc_feature (1)..(424): Homolog of NCBI NO: 34912248 NR Description: cytosolic aldehyde dehydrogenase
  misc_feature (1)..(424): Homolog of NCBI NO: 18404212 NR Description: Expressed protein
  misc_feature (1)..(424): Homolog of NCBI NO: 14276718 NR Description: T-cytoplasm male sterility restorer factor 2 [Zea
  misc_feature (1)..(424): Homolog of NCBI NO: 7431451 NR Description: rf2 nuclear restorer protein - maize
  misc_feature (1)..(424): Homolog of NCBI NO: 20530131 NR Description: mitochondrial aldehyde dehydrogenase [Sorghum
  misc_feature (1)..(424): Homolog of NCBI NO: 15228319 NR Description: aldehyde dehydrogenase (NAD+)-like protein
  misc_feature (1)..(423): Homolog of NCBI NO: 19850245 NR Description: cytosolic aldehyde dehydrogenase RF2D [Zea mays]
  misc_feature (1)..(423): Homolog of NCBI NO: 19850247 NR Description: cytosolic aldehyde dehydrogenase RF2D [Zea mays]
  misc_feature (1)..(424): Homolog of NCBI NO: 19850243 NR Description: cytosolic aldehyde dehydrogenase RF2C [Zea mays]
  misc_feature (1)..(424): Homolog of NCBI NO: 19850241 NR Description: cytosolic aldehyde dehydrogenase RF2C [Zea mays]
  misc_feature (1)..(424): Homolog of NCBI NO: 34912248 NR Description: cytosolic aldehyde dehydrogenase
  misc_feature (1)..(424): Homolog of NCBI NO: 18404212 NR Description: Expressed protein

SEQ ID NO: 42903 - protein, 357 aa, Arabidopsis thaliana; identical to SEQ ID NO: 29987
  peptide (1)..(357): Ceres Seq. ID no. 12603227
  misc_feature (1)..(357): Homolog of NCBI NO: 14276718 NR Description: T-cytoplasm male sterility restorer factor 2 [Zea
  misc_feature (1)..(357): Homolog of NCBI NO: 7431451 NR Description: rf2 nuclear restorer protein - maize
  misc_feature (1)..(357): Homolog of NCBI NO: 20530131 NR Description: mitochondrial aldehyde dehydrogenase [Sorghum
  misc_feature (1)..(357): Homolog of NCBI NO: 15228319 NR Description: aldehyde dehydrogenase (NAD+)-like protein
  misc_feature (1)..(356): Homolog of NCBI NO: 19850245 NR Description: cytosolic aldehyde dehydrogenase RF2D [Zea mays]
  misc_feature (1)..(356): Homolog of NCBI NO: 19850247 NR Description: cytosolic aldehyde dehydrogenase RF2D [Zea mays]
  misc_feature (1)..(357): Homolog of NCBI NO: 19850243 NR Description: cytosolic aldehyde dehydrogenase RF2C [Zea mays]
  misc_feature (1)..(357): Homolog of NCBI NO: 19850241 NR Description: cytosolic aldehyde dehydrogenase RF2C [Zea mays]
  misc_feature (1)..(357): Homolog of NCBI NO: 34912248 NR Description: cytosolic aldehyde dehydrogenase
  misc_feature (1)..(357): Homolog of NCBI NO: 18404212 NR Description: Expressed protein
  misc_feature (1)..(357): Homolog of NCBI NO: 14276718 NR Description: T-cytoplasm male sterility restorer factor 2 [Zea
  misc_feature (1)..(357): Homolog of NCBI NO: 7431451 NR Description: rf2 nuclear restorer protein - maize
  misc_feature (1)..(357): Homolog of NCBI NO: 20530131 NR Description: mitochondrial aldehyde dehydrogenase [Sorghum
  misc_feature (1)..(357): Homolog of NCBI NO: 15228319 NR Description: aldehyde dehydrogenase (NAD+)-like protein
  misc_feature (1)..(356): Homolog of NCBI NO: 19850245 NR Description: cytosolic aldehyde dehydrogenase RF2D [Zea mays]
  misc_feature (1)..(356): Homolog of NCBI NO: 19850247 NR Description: cytosolic aldehyde dehydrogenase RF2D [Zea mays]
  misc_feature (1)..(357): Homolog of NCBI NO: 19850243 NR Description: cytosolic aldehyde dehydrogenase RF2C [Zea mays]
  misc_feature (1)..(357): Homolog of NCBI NO: 19850241 NR Description: cytosolic aldehyde dehydrogenase RF2C [Zea mays]
  misc_feature (1)..(357): Homolog of NCBI NO: 34912248 NR Description: cytosolic aldehyde dehydrogenase
  misc_feature (1)..(357): Homolog of NCBI NO: 18404212 NR Description: Expressed protein

SEQ ID NO: 42904 - DNA, 1675 bp, Arabidopsis thaliana
  misc_feature (1)..(1675): Ceres Seq. ID no. 12336497
  misc_feature: MA Experiment ID: 108434 Result: Down-regulated in Transcription
  misc_feature: MA Experiment 108434 PARAMETER Experiment Name: At_Root_Tips_cDNA_P Parameter: Tissue Value: Root Tips
  misc_feature: MA Experiment ID: 108462 Result: Down-regulated in Transcription
  misc_feature: MA Experiment 108462 PARAMETER Experiment Name: At_Germinating_Seeds_cDNA_P Parameter: Age (day) Value: 2 vs. 0
  misc_feature: MA Experiment 108462 PARAMETER Experiment Name: At_Germinating_Seeds_cDNA_P Parameter: Tissue Value: Germinating Seeds
  misc_feature: MA Experiment ID: 108464 Result: Down-regulated in Transcription
  misc_feature: MA Experiment 108464 PARAMETER Experiment Name: At_Germinating_Seeds_cDNA_P Parameter: Age (day) Value: 4 vs. 0
  misc_feature: MA Experiment 108464 PARAMETER Experiment Name: At_Germinating_Seeds_cDNA_P Parameter: Tissue Value: Germinating Seeds
  misc_feature: MA Experiment ID: 108573 Result: Up-regulated in Transcription
  misc_feature: MA Experiment 108573 PARAMETER Experiment Name: At_Drought_cDNA_P Parameter: Timepoint (hr) Value: 6
  misc_feature: MA Experiment 108573 PARAMETER Experiment Name: At_Drought_cDNA_P Parameter: Tissue Value: Aerial
  misc_feature: MA Experiment 108573 PARAMETER Experiment Name: At_Drought_cDNA_P Parameter: Treatment Value: Drought vs. No Drought
  misc_feature: MA Experiment ID: 20000070 Result: Up-regulated in Transcription
  misc_feature: MA Experiment 20000070 PARAMETER Experiment Name: At_100uM_ABA_Mutants_cDNA_P Parameter: Plant Line Value: CS24
  misc_feature: MA Experiment 20000070 PARAMETER Experiment Name: At_100uM_ABA_Mutants_cDNA_P Parameter: Timepoint (hr) Value: 6
  misc_feature: MA Experiment 20000070 PARAMETER Experiment Name: At_100uM_ABA_Mutants_cDNA_P Parameter: Tissue Value: Aerial
  misc_feature: MA Experiment 20000070 PARAMETER Experiment Name: At_100uM_ABA_Mutants_cDNA_P Parameter: Treatment Value: 100uM ABA vs. No Treatment
  misc_feature: MA Experiment ID: 20000071 Result: Up-regulated in Transcription
  misc_feature: MA Experiment 20000071 PARAMETER Experiment Name: At_100uM_ABA_Mutants_cDNA_P Parameter: Plant Line Value: CS8104
  misc_feature: MA Experiment 20000071 PARAMETER Experiment Name: At_100uM_ABA_Mutants_cDNA_P Parameter: Timepoint (hr) Value: 6
  misc_feature: MA Experiment 20000071 PARAMETER Experiment Name: At_100uM_ABA_Mutants_cDNA_P Parameter: Tissue Value: Aerial
  misc_feature: MA Experiment 20000071 PARAMETER Experiment Name: At_100uM_ABA_Mutants_cDNA_P Parameter: Treatment Value: 100uM ABA vs. No Treatment
  misc_feature: MA Experiment ID: 20000072 Result: Up-regulated in Transcription
  misc_feature: MA Experiment 20000072 PARAMETER Experiment Name: At_100uM_ABA_Mutants_cDNA_P Parameter: Plant Line Value: CS8105
  misc_feature: MA Experiment 20000072 PARAMETER Experiment Name: At_100uM_ABA_Mutants_cDNA_P Parameter: Timepoint (hr) Value: 6
  misc_feature: MA Experiment 20000072 PARAMETER Experiment Name: At_100uM_ABA_Mutants_cDNA_P Parameter: Tissue Value: Aerial
  misc_feature: MA Experiment 20000072 PARAMETER Experiment Name: At_100uM_ABA_Mutants_cDNA_P Parameter: Treatment Value: 100uM ABA vs. No Treatment
  misc_feature: MA Experiment ID: 20000086 Result: Up-regulated in Transcription
  misc_feature: MA Experiment 20000086 PARAMETER Experiment Name: At_100uM_ABA_Mutants_cDNA_P Parameter: Plant Line Value: CS22
  misc_feature: MA Experiment 20000086 PARAMETER Experiment Name: At_100uM_ABA_Mutants_cDNA_P Parameter: Timepoint (hr) Value: 6
  misc_feature: MA Experiment 20000086 PARAMETER Experiment Name: At_100uM_ABA_Mutants_cDNA_P Parameter: Tissue Value: Aerial
  misc_feature: MA Experiment 20000086 PARAMETER Experiment Name: At_100uM_ABA_Mutants_cDNA_P Parameter: Treatment Value: 100uM ABA vs. No Treatment
  misc_feature: MA Experiment ID: 20000087 Result: Up-regulated in Transcription
  misc_feature: MA Experiment 20000087 PARAMETER Experiment Name: At_100uM_ABA_Mutants_cDNA_P Parameter: Plant Line Value: WS
  misc_feature: MA Experiment 20000087 PARAMETER Experiment Name: At_100uM_ABA_Mutants_cDNA_P Parameter: Timepoint (hr) Value: 6
  misc_feature: MA Experiment 20000087 PARAMETER Experiment Name: At_100uM_ABA_Mutants_cDNA_P Parameter: Tissue Value: Aerial
  misc_feature: MA Experiment 20000087 PARAMETER Experiment Name: At_100uM_ABA_Mutants_cDNA_P Parameter: Treatment Value: 100uM ABA vs. No Treatment
  misc_feature: MA Experiment ID: 20000088 Result: Up-regulated in Transcription
  misc_feature: MA Experiment 20000088 PARAMETER Experiment Name: At_100uM_ABA_Mutants_cDNA_P Parameter: Plant Line Value: Landsberg
  misc_feature: MA Experiment 20000088 PARAMETER Experiment Name: At_100uM_ABA_Mutants_cDNA_P Parameter: Timepoint (hr) Value: 6
  misc_feature: MA Experiment 20000088 PARAMETER Experiment Name: At_100uM_ABA_Mutants_cDNA_P Parameter: Tissue Value: Aerial
  misc_feature: MA Experiment 20000088 PARAMETER Experiment Name: At_100uM_ABA_Mutants_cDNA_P Parameter: Treatment Value: 100uM ABA vs. No Treatment
  misc_feature: MA Experiment ID: 20000117 Result: Up-regulated in Transcription
  misc_feature: MA Experiment 20000117 PARAMETER Experiment Name: At_100uM_ABA_Mutants_cDNA_P Parameter: Plant Line Value: Columbia
  misc_feature: MA Experiment 20000117 PARAMETER Experiment Name: At_100uM_ABA_Mutants_cDNA_P Parameter: Timepoint (hr) Value: 6
  misc_feature: MA Experiment 20000117 PARAMETER Experiment Name: At_100uM_ABA_Mutants_cDNA_P Parameter: Tissue Value: Aerial
  misc_feature: MA Experiment 20000117 PARAMETER Experiment Name: At_100uM_ABA_Mutants_cDNA_P Parameter: Treatment Value: 100uM ABA vs. No Treatment
  misc_feature: MA Experiment ID: 20000180 Result: Down-regulated in Transcription
  misc_feature: MA Experiment 20000180 PARAMETER Experiment Name: At_Germinating_Seeds_P Parameter: Age (hr) Value: 24 vs. 0
  misc_feature: MA Experiment 20000180 PARAMETER Experiment Name: At_Germinating_Seeds_P Parameter: Tissue Value: Germinating Seeds
  misc_feature: MA Experiment ID: 20000185 Result: Down-regulated in Transcription
  misc_feature: MA Experiment 20000185 PARAMETER Experiment Name: At_Roots__P Parameter: Age (day) Value: 7 vs. 21
  misc_feature: MA Experiment 20000185 PARAMETER Experiment Name: At_Roots__P Parameter: Organism Value: A. thaliana
  misc_feature: MA Experiment 20000185 PARAMETER Experiment Name: At_Roots__P Parameter: Tissue Value: Roots vs. Whole Plant
  misc_feature: MA Experiment ID: 20000264 Result: Up-regulated in Transcription
  misc_feature: MA Experiment 20000264 PARAMETER Experiment Name: At_Open_Flower_P Parameter: Age (day) Value: 21
  misc_feature: MA Experiment 20000264 PARAMETER Experiment Name: At_Open_Flower_P Parameter: Plant Line Value: WS
  misc_feature: MA Experiment 20000264 PARAMETER Experiment Name: At_Open_Flower_P Parameter: Tissue Value: Open Flower vs. Whole Plant
  misc_feature: MA Experiment ID: 20000438 Result: Down-regulated in Transcription
  misc_feature: MA Experiment 20000438 PARAMETER Experiment Name: At_Shoots__P Parameter: Age (day) Value: 14
  misc_feature: MA Experiment 20000438 PARAMETER Experiment Name: At_Shoots__P Parameter: Tissue Value: Shoots vs. Whole Plant
  misc_feature: MA Experiment ID: 20000439 Result: Down-regulated in Transcription
  misc_feature: MA Experiment 20000439 PARAMETER Experiment Name: At_Roots__P Parameter: Age (day) Value: 14 vs. 21
  misc_feature: MA Experiment 20000439 PARAMETER Experiment Name: At_Roots__P Parameter: Organism Value: A. thaliana
  misc_feature: MA Experiment 20000439 PARAMETER Experiment Name: At_Roots__P Parameter: Tissue Value: Roots vs. Whole Plant
  misc_feature: MA Experiment ID: 20000451 Result: Down-regulated in Transcription
  misc_feature: MA Experiment 20000451 PARAMETER Experiment Name: At_CS6879_Shoots-Roots_P Parameter: Age (day) Value: 14
  misc_feature: MA Experiment 20000451 PARAMETER Experiment Name: At_CS6879_Shoots-Roots_P Parameter: Organism Value: A. thaliana
  misc_feature: MA Experiment 20000451 PARAMETER Experiment Name: At_CS6879_Shoots-Roots_P Parameter: Plant Line Value: CS6879 vs. WS
  misc_feature: MA Experiment 20000451 PARAMETER Experiment Name: At_CS6879_Shoots-Roots_P Parameter: Tissue Value: Roots
  misc_feature: MA Experiment ID: 20000709 Result: Up-regulated in Transcription
  misc_feature: MA Experiment 20000709 PARAMETER Experiment Name: At_15mM_NH4NO3_L-to-H_P Parameter: Age (hr) Value: 14
  misc_feature: MA Experiment 20000709 PARAMETER Experiment Name: At_15mM_NH4NO3_L-to-H_P Parameter: Organism Value: A. thaliana
  misc_feature: MA Experiment 20000709 PARAMETER Experiment Name: At_15mM_NH4NO3_L-to-H_P Parameter: Plant Line Value: WS
  misc_feature: MA Experiment 20000709 PARAMETER Experiment Name: At_15mM_NH4NO3_L-to-H_P Parameter: Timepoint (hr) Value: 4
  misc_feature: MA Experiment 20000709 PARAMETER Experiment Name: At_15mM_NH4NO3_L-to-H_P Parameter: Tissue Value: Aerial
  misc_feature: MA Experiment 20000709 PARAMETER Experiment Name: At_15mM_NH4NO3_L-to-H_P Parameter: Treatment Value: 15mM NH4NO3 vs. 30mM Mannitol
  misc_feature: MA Experiment ID: 20000794 Result: Up-regulated in Transcription
  misc_feature: MA Experiment 20000794 PARAMETER Experiment Name: At_Petals_P Parameter: Age (day) Value: 23-25 days
  misc_feature: MA Experiment 20000794 PARAMETER Experiment Name: At_Petals_P Parameter: Plant Line Value: WS
  misc_feature: MA Experiment 20000794 PARAMETER Experiment Name: At_Petals_P Parameter: Tissue Value: Petals vs. Whole plant
  misc_feature: MA Experiment ID: 20001247 Result: Down-regulated in Transcription
  misc_feature: MA Experiment 20001247 PARAMETER Experiment Name: At_Far-red-induction_P Parameter: Age (day) Value: 7
  misc_feature: MA Experiment 20001247 PARAMETER Experiment Name: At_Far-red-induction_P Parameter: Light Value: Far-red vs. White
  misc_feature: MA Experiment 20001247 PARAMETER Experiment Name: At_Far-red-induction_P Parameter: Organism Value: A. thaliana
  misc_feature: MA Experiment 20001247 PARAMETER Experiment Name: At_Far-red-induction_P Parameter: Plant Line Value: Columbia
  misc_feature: MA Experiment 20001247 PARAMETER Experiment Name: At_Far-red-induction_P Parameter: Timepoint (hr) Value: 1
  misc_feature: MA Experiment 20001247 PARAMETER Experiment Name: At_Far-red-induction_P Parameter: Tissue Value: Whole Plant
  misc_feature: MA Experiment ID: 20001248 Result: Up-regulated in Transcription
  misc_feature: MA Experiment 20001248 PARAMETER Experiment Name: At_Far-red-induction_P Parameter: Age (day) Value: 7
  misc_feature: MA Experiment 20001248 PARAMETER Experiment Name: At_Far-red-induction_P Parameter: Light Value: Far-red vs. White
  misc_feature: MA Experiment 20001248 PARAMETER Experiment Name: At_Far-red-induction_P Parameter: Organism Value: A. thaliana
  misc_feature: MA Experiment 20001248 PARAMETER Experiment Name: At_Far-red-induction_P Parameter: Plant Line Value: Columbia
  misc_feature: MA Experiment 20001248 PARAMETER Experiment Name: At_Far-red-induction_P Parameter: Timepoint (hr) Value: 4
  misc_feature: MA Experiment 20001248 PARAMETER Experiment Name: At_Far-red-induction_P Parameter: Tissue Value: Whole Plant
  misc_feature: MA Experiment ID: 20001557 Result: Up-regulated in Transcription
  misc_feature: MA Experiment 20001557 PARAMETER Experiment Name: At_Drought_Soil_Dry_P Parameter: Age (day) Value: 27
  misc_feature: MA Experiment 20001557 PARAMETER Experiment Name: At_Drought_Soil_Dry_P Parameter: Organism Value: A. thaliana
  misc_feature: MA Experiment 20001557 PARAMETER Experiment Name: At_Drought_Soil_Dry_P Parameter: Plant Line Value: WS
  misc_feature: MA Experiment 20001557 PARAMETER Experiment Name: At_Drought_Soil_Dry_P Parameter: Post Timepoint (hr) Value: 3
  misc_feature: MA Experiment 20001557 PARAMETER Experiment Name: At_Drought_Soil_Dry_P Parameter: Post-Treatment Value: Re-Water vs. No Drought
  misc_feature: MA Experiment 20001557 PARAMETER Experiment Name: At_Drought_Soil_Dry_P Parameter: Timepoint (day) Value: 13
  misc_feature: MA Experiment 20001557 PARAMETER Experiment Name: At_Drought_Soil_Dry_P Parameter: Treatment Value: Drought vs. No Drought
  misc_feature: MA Experiment ID: 20001910 Result: Up-regulated in Transcription
  misc_feature: MA Experiment 20001910 PARAMETER Experiment Name: At_Drought_Reproduction_P Parameter: Age (day) Value: 37
  misc_feature: MA Experiment 20001910 PARAMETER Experiment Name: At_Drought_Reproduction_P Parameter: Organism Value: A. thaliana
  misc_feature: MA Experiment 20001910 PARAMETER Experiment Name: At_Drought_Reproduction_P Parameter: Plant Line Value: WS
  misc_feature: MA Experiment 20001910 PARAMETER Experiment Name: At_Drought_Reproduction_P Parameter: Timepoint (day) Value: 7
  misc_feature: MA Experiment 20001910 PARAMETER Experiment Name: At_Drought_Reproduction_P Parameter: Tissue Value: Flowers
  misc_feature: MA Experiment 20001910 PARAMETER Experiment Name: At_Drought_Reproduction_P Parameter: Treatment Value: Drought vs. No Drought
aacatcaccacaaaagtccaagctttctctctcctcaacctcgtccccttgcttcttctcctcctgctctgtctcgtttcttctcttctacttcggagatgtctgcttctgattccacttcttctcttcccattactcttgactccatcaatcccaaggttctgaaatgtgagtatgctgttcgaggagaaattgtcaacattgctcagaagttacaagaagacttgaagactaataaggatgcttatccctttgatgagataatctattgcaacattgggaatcctcaatctcttggtcagctgcctataaagttcttccgtgaggttctcgcattgtgtgaccacgcaagtcttttggatgagtctgaaacccatggtttgttcagtaccgattcaattgaccgagcatggaggattttggaccatattcccggaagagcaactggggcttacagtcatagccagggtatcaagggtttacgtgatgtaattgcagctggaatcgaagcacgtgatggtttccctgctgatccaaatgatattttcttgactgatggtgcaagtccagcggttcacatgatgatgcaacttctcttgagctcagagaaagatggtattctttgcccgattcctcagtatccattgtactcggcttcaattgcccttcatggtggatctttggttccgtactatcttgatgaagcaacaggatggggactggaaatatctgaccttaagaagcaactagaggaagctaggtccaagggcatctctgtaagggccttggttgtcataaaccccggtaacccaactgggcaggttcttgcggaagaaaaccagcgtgacattgttaatttctgcaagcaagagggtttggttcttttagctgatgaagtctaccaagaaaaatgtttacgtccctgacaaaaagttccattctttcaagaaagtggctcggtctttgggctatggaaaaaagatatctcgttagtctcgttccaatcagtctccaaaggatattatggagaatgtggaaaaagaggaggttacatggaggttactggattcacttctgatgtaagagaacagatatacaaaatggcttctgtgaatctttgttctaacatctctggtcaaattcttgctagccttgtcatgagcccacccaagaaagagatggaattctctcatccatggctaaacgtgcaaagactttggaagacgctctcaacagtttagaaggtgttacatgtaacagagccgaaggagcaatgtatctcttcccgcgaattaaccttcctcaaaaggctatcgaagctgctgaggctgaaaaaactgcaccagatgcgttctactgcaaacgccttctcaatgctactggtgtagttgtagtccctggttctggctttggacaggttcctggaacatggcactttagatgcacaatacttccacaagaagacaagattccagcgatagtgaatcgtctgacagagttccacaagagcttcatggacgagttccgcaactaaaaggacctgaccatgaagatgaacttaaagacccttttgaagaaaagtgtgatcagtttgagttattaaaaaaaagaaaacttgtgttttgaatttgatcaggcaattgtgatcagctaatttaattttagaatattttgc

SEQ ID NO: 42905 - protein, 307 aa, Arabidopsis thaliana
  peptide (1)..(307): Ceres Seq. ID no. 12336498
  misc_feature (172)..(307): Pfam Name: Aminotransferase class I and II Pfam Description: Aminotransferase class I and II
  misc_feature (44)..(307): Homolog of NCBI NO: 37533928 NR Description: putative alanine aminotransferase
  misc_feature (44)..(307): Homolog of NCBI NO: 1703227 NR Description: ALANINE AMINOTRANSFERASE 2 (GPT)
  misc_feature (44)..(307): Homolog of NCBI NO: 4730884 NR Description: alanine aminotransferase [Oryza sativa]
  misc_feature (44)..(307): Homolog of NCBI NO: 461498 NR Description: ALANINE AMINOTRANSFERASE 2 (GPT)
  misc_feature (33)..(307): Homolog of NCBI NO: 34906732 NR Description: alanine aminotransferase [Oryza sativa (japonica
  misc_feature (53)..(307): Homolog of NCBI NO: 25287212 NR Description: hypothetical protein T13M22.3 [imported] -
  misc_feature (1)..(307): Homolog of NCBI NO: 21954071 NR Description: putative alanine aminotransferase [Arabidopsis
  misc_feature (1)..(307): Homolog of NCBI NO: 9082270 NR Description: alanine aminotransferase [Arabidopsis thaliana]
  misc_feature (1)..(307): Homolog of NCBI NO: 21954069 NR Description: putative alanine aminotransferase [Arabidopsis
  misc_feature (1)..(307): Homolog of NCBI NO: 30698866 NR Description: alanine aminotransferase, putative [Arabidopsis
HHHKSPSFLSPQPRPLASSPPALSRFFSSTSEMSASDSTSSLPITLDSINPKVLKCEYAVRGEIVNIAQKLQEDLKTNKDAYPFDEIIYCNIGNPQSLGQLPIKFFREVLALCDHASLLDESETHGLFSTDSIDRAWRILDHIPGRATGAYSHSQGIKGLRDVIAAGIEARDGFPADPNDIFLTDGASPAVHMMMQLLLSSEKDGILCPIPQYPLYSASIALHGGSLVPYYLDEATGWGLEISDLKKQLEEARSKGISVRALVVINPGNPTGQVLAEENQRDIVNFCKQEGLVLLADEVYQEKCLRP

SEQ ID NO: 42906 - protein, 275 aa, Arabidopsis thaliana
  peptide (1)..(275): Ceres Seq. ID no. 12336499
  misc_feature (140)..(275): Pfam Name: Aminotransferase class I and II Pfam Description: Aminotransferase class I and II
  misc_feature (12)..(275): Homolog of NCBI NO: 37533928 NR Description: putative alanine aminotransferase
  misc_feature (12)..(275): Homolog of NCBI NO: 1703227 NR Description: ALANINE AMINOTRANSFERASE 2 (GPT)
  misc_feature (12)..(275): Homolog of NCBI NO: 4730884 NR Description: alanine aminotransferase [Oryza sativa]
  misc_feature (12)..(275): Homolog of NCBI NO: 461498 NR Description: ALANINE AMINOTRANSFERASE 2 (GPT)
  misc_feature (1)..(275): Homolog of NCBI NO: 34906732 NR Description: alanine aminotransferase [Oryza sativa (japonica
  misc_feature (21)..(275): Homolog of NCBI NO: 25287212 NR Description: hypothetical protein T13M22.3 [imported] -
  misc_feature (1)..(275): Homolog of NCBI NO: 21954071 NR Description: putative alanine aminotransferase [Arabidopsis
  misc_feature (1)..(275): Homolog of NCBI NO: 9082270 NR Description: alanine aminotransferase [Arabidopsis thaliana]
  misc_feature (1)..(275): Homolog of NCBI NO: 21954069 NR Description: putative alanine aminotransferase [Arabidopsis
  misc_feature (1)..(275): Homolog of NCBI NO: 30698866 NR Description: alanine aminotransferase, putative [Arabidopsis
MSASDSTSSLPITLDSINPKVLKCEYAVRGEIVNIAQKLQEDLKTNKDAYPFDEIIYCNIGNPQSLGQLPIKFFREVLALCDHASLLDESETHGLFSTDSIDRAWRILDHIPGRATGAYSHSQGIKGLRDVIAAGIEARDGFPADPNDIFLTDGASPAVHMMMQLLLSSEKDGILCPIPQYPLYSASIALHGGSLVPYYLDEATGWGLEISDLKKQLEEARSKGISVRALVVINPGNPTGQVLAEENQRDIVNFCKQEGLVLLADEVYQEKCLRP

SEQ ID NO: 42907 - DNA, 1146 bp, Arabidopsis thaliana; identical to SEQ ID NO: 25459
  misc_feature (1)..(1146): Ceres Seq. ID no. 12336445
  misc_feature: MA Experiment ID: 20000185 Result: Down-regulated in Transcription
  misc_feature: MA Experiment 20000185 PARAMETER Experiment Name: At_Roots__P Parameter: Age (day) Value: 7 vs. 21
  misc_feature: MA Experiment 20000185 PARAMETER Experiment Name: At_Roots__P Parameter: Organism Value: A. thaliana
  misc_feature: MA Experiment 20000185 PARAMETER Experiment Name: At_Roots__P Parameter: Tissue Value: Roots vs. Whole Plant
  misc_feature: MA Experiment ID: 20000227 Result: Down-regulated in Transcription
  misc_feature: MA Experiment 20000227 PARAMETER Experiment Name: At_Root-Tips-vs-Tops_P Parameter: Tissue Value: Root Tips vs. Root Tops
  misc_feature: MA Experiment ID: 20000264 Result: Down-regulated in Transcription
  misc_feature: MA Experiment 20000264 PARAMETER Experiment Name: At_Open_Flower_P Parameter: Age (day) Value: 21
  misc_feature: MA Experiment 20000264 PARAMETER Experiment Name: At_Open_Flower_P Parameter: Plant Line Value: WS
  misc_feature: MA Experiment 20000264 PARAMETER Experiment Name: At_Open_Flower_P Parameter: Tissue Value: Open Flower vs. Whole Plant
  misc_feature: MA Experiment ID: 20000269 Result: Down-regulated in Transcription
  misc_feature: MA Experiment 20000269 PARAMETER Experiment Name: At_1mM_KNO3_L-vs-H_Roots_P Parameter: Age (day) Value: 7,10,12
  misc_feature: MA Experiment 20000269 PARAMETER Experiment Name: At_1mM_KNO3_L-vs-H_Roots_P Parameter: Organism Value: A. thaliana
  misc_feature: MA Experiment 20000269 PARAMETER Experiment Name: At_1mM_KNO3_L-vs-H_Roots_P Parameter: Plant Line Value: WS
  misc_feature: MA Experiment 20000269 PARAMETER Experiment Name: At_1mM_KNO3_L-vs-H_Roots_P Parameter: Timepoint (day) Value: 7,10,12
  misc_feature: MA Experiment 20000269 PARAMETER Experiment Name: At_1mM_KNO3_L-vs-H_Roots_P Parameter: Tissue Value: Roots
  misc_feature: MA Experiment 20000269 PARAMETER Experiment Name: At_1mM_KNO3_L-vs-H_Roots_P Parameter: Treatment Value: 1mM KNO3 vs. 50mM KNO3
  misc_feature: MA Experiment ID: 20000439 Result: Down-regulated in Transcription
  misc_feature: MA Experiment 20000439 PARAMETER Experiment Name: At_Roots__P Parameter: Age (day) Value: 14 vs. 21
  misc_feature: MA Experiment 20000439 PARAMETER Experiment Name: At_Roots__P Parameter: Organism Value: A. thaliana
  misc_feature: MA Experiment 20000439 PARAMETER Experiment Name: At_Roots__P Parameter: Tissue Value: Roots vs. Whole Plant
  misc_feature: MA Experiment ID: 20000794 Result: Down-regulated in Transcription
  misc_feature: MA Experiment 20000794 PARAMETER Experiment Name: At_Petals_P Parameter: Age (day) Value: 23-25 days
  misc_feature: MA Experiment 20000794 PARAMETER Experiment Name: At_Petals_P Parameter: Plant Line Value: WS
  misc_feature: MA Experiment 20000794 PARAMETER Experiment Name: At_Petals_P Parameter: Tissue Value: Petals vs. Whole plant
  misc_feature: MA Experiment ID: 20001904 Result: Down-regulated in Transcription
  misc_feature: MA Experiment 20001904 PARAMETER Experiment Name: At_Drought_Reproduction_P Parameter: Age (day) Value: 37
  misc_feature: MA Experiment 20001904 PARAMETER Experiment Name: At_Drought_Reproduction_P Parameter: Organism Value: A. thaliana
  misc_feature: MA Experiment 20001904 PARAMETER Experiment Name: At_Drought_Reproduction_P Parameter: Plant Line Value: WS
  misc_feature: MA Experiment 20001904 PARAMETER Experiment Name: At_Drought_Reproduction_P Parameter: Timepoint (day) Value: 7
  misc_feature: MA Experiment 20001904 PARAMETER Experiment Name: At_Drought_Reproduction_P Parameter: Tissue Value: Rosettes
  misc_feature: MA Experiment 20001904 PARAMETER Experiment Name: At_Drought_Reproduction_P Parameter: Treatment Value: Drought vs. No Drought
  misc_feature: MA Experiment ID: 20001905 Result: Down-regulated in Transcription
  misc_feature: MA Experiment 20001905 PARAMETER Experiment Name: At_Drought_Reproduction_P Parameter: Age (day) Value: 40
  misc_feature: MA Experiment 20001905 PARAMETER Experiment Name: At_Drought_Reproduction_P Parameter: Organism Value: A. thaliana
  misc_feature: MA Experiment 20001905 PARAMETER Experiment Name: At_Drought_Reproduction_P Parameter: Plant Line Value: WS
  misc_feature: MA Experiment 20001905 PARAMETER Experiment Name: At_Drought_Reproduction_P Parameter: Timepoint (day) Value: 10
  misc_feature: MA Experiment 20001905 PARAMETER Experiment Name: At_Drought_Reproduction_P Parameter: Tissue Value: Rosettes
  misc_feature: MA Experiment 20001905 PARAMETER Experiment Name: At_Drought_Reproduction_P Parameter: Treatment Value: Drought vs. No Drought
  misc_feature: Phenotype: WHOLE PLANT Color-Yellow-Green Viable 1
  misc_feature: Phenotype: WHOLE PLANT Color-Yellow-Green Viable 1
  misc_feature: Phenotype: WHOLE PLANT Size-Small
  misc_feature: Phenotype: WHOLE PLANT Color-Yellow-Green Viable 1
  misc_feature: Phenotype: WHOLE PLANT Color-Yellow-Green Viable 1
  misc_feature: Phenotype: WHOLE PLANT Size-Small
  misc_feature: Phenotype: WHOLE PLANT Color-Yellow-Green Viable 1
  misc_feature: Phenotype: WHOLE PLANT Color-Yellow-Green Viable 1
  misc_feature: Phenotype: WHOLE PLANT Size-Small
  misc_feature: Phenotype: WHOLE PLANT Color-Yellow-Green Viable 1
  misc_feature: Phenotype: WHOLE PLANT Color-Yellow-Green Viable 1
  misc_feature: Phenotype: WHOLE PLANT Size-Small
  misc_feature: Phenotype: WHOLE PLANT Color-Yellow-Green Viable 1
  misc_feature: Phenotype: WHOLE PLANT Color-Yellow-Green Viable 1
  misc_feature: Phenotype: WHOLE PLANT Size-Small
  misc_feature: Phenotype: WHOLE PLANT Color-Yellow-Green Viable 1
  misc_feature: Phenotype: WHOLE PLANT Color-Yellow-Green Viable 1
  misc_feature: Phenotype: WHOLE PLANT Size-Small
  misc_feature: Phenotype: WHOLE PLANT Color-Yellow-Green Viable 1
  misc_feature: Phenotype: WHOLE PLANT Color-Yellow-Green Viable 1
  misc_feature: Phenotype: WHOLE PLANT Size-Small
  misc_feature: Phenotype: WHOLE PLANT Color-Yellow-Green Viable 1
  misc_feature: Phenotype: WHOLE PLANT Color-Yellow-Green Viable 1
  misc_feature: Phenotype: WHOLE PLANT Color-Yellow-Green Viable 1
  misc_feature: Phenotype: WHOLE PLANT Color-Yellow-Green Viable 1
  misc_feature: Phenotype: WHOLE PLANT Color-Yellow-Green Viable 1

SEQ ID NO: 42908 - protein, 115 aa, Arabidopsis thaliana; identical to SEQ ID NO: 25460
  peptide (1)..(115): Ceres Seq. ID no. 12336446
  misc_feature (51)..(102): Homolog of NCBI NO: 7485188 NR Description: hypothetical protein - Arabidopsis thaliana
  misc_feature (51)..(102): Homolog of NCBI NO: 21555799 NR Description: Lil3 protein [Arabidopsis thaliana]
  misc_feature (51)..(102): Homolog of NCBI NO: 18414927 NR Description: Lil3 protein
  misc_feature (51)..(104): Homolog of NCBI NO: 8978078 NR Description: Lil3 protein [Arabidopsis thaliana]
  misc_feature (47)..(104): Homolog of NCBI NO: 30695110 NR Description: Lil3 protein [Arabidopsis thaliana]
  misc_feature (51)..(102): Homolog of NCBI NO: 7485188 NR Description: hypothetical protein - Arabidopsis thaliana
  misc_feature (51)..(102): Homolog of NCBI NO: 21555799 NR Description: Lil3 protein [Arabidopsis thaliana]
  misc_feature (51)..(102): Homolog of NCBI NO: 18414927 NR Description: Lil3 protein
  misc_feature (51)..(104): Homolog of NCBI NO: 8978078 NR Description: Lil3 protein [Arabidopsis thaliana]
  misc_feature (47)..(104): Homolog of NCBI NO: 30695110 NR Description: Lil3 protein [Arabidopsis thaliana]
  misc_feature (51)..(102): Homolog of NCBI NO: 7485188 NR Description: hypothetical protein - Arabidopsis thaliana
  misc_feature (51)..(102): Homolog of NCBI NO: 21555799 NR Description: Lil3 protein [Arabidopsis thaliana]
  misc_feature (51)..(102): Homolog of NCBI NO: 18414927 NR Description: Lil3 protein
  misc_feature (51)..(104): Homolog of NCBI NO: 8978078 NR Description: Lil3 protein [Arabidopsis thaliana]
  misc_feature (47)..(104): Homolog of NCBI NO: 30695110 NR Description: Lil3 protein [Arabidopsis thaliana]
  misc_feature (51)..(102): Homolog of NCBI NO: 7485188 NR Description: hypothetical protein - Arabidopsis thaliana
  misc_feature (51)..(102): Homolog of NCBI NO: 21555799 NR Description: Lil3 protein [Arabidopsis thaliana]
  misc_feature (51)..(102): Homolog of NCBI NO: 18414927 NR Description: Lil3 protein
  misc_feature (51)..(104): Homolog of NCBI NO: 8978078 NR Description: Lil3 protein [Arabidopsis thaliana]
  misc_feature (47)..(104): Homolog of NCBI NO: 30695110 NR Description: Lil3 protein [Arabidopsis thaliana]

SEQ ID NO: 42909 - protein, 97 aa, Arabidopsis thaliana; identical to SEQ ID NO: 25461
  peptide (1)..(97): Ceres Seq. ID no. 12336447
  misc_feature (1)..(97): Homolog of NCBI NO: 18414927 NR Description: Lil3 protein
  misc_feature (1)..(97): Homolog of NCBI NO: 7485188 NR Description: hypothetical protein - Arabidopsis thaliana
  misc_feature (1)..(97): Homolog of NCBI NO: 21555799 NR Description: Lil3 protein [Arabidopsis thaliana]
  misc_feature (1)..(97): Homolog of NCBI NO: 30695110 NR Description: Lil3 protein [Arabidopsis thaliana]
  misc_feature (1)..(97): Homolog of NCBI NO: 8978078 NR Description: Lil3 protein [Arabidopsis thaliana]
  misc_feature (1)..(97): Homolog of NCBI NO: 18414927 NR Description: Lil3 protein
  misc_feature (1)..(97): Homolog of NCBI NO: 7485188 NR Description: hypothetical protein - Arabidopsis thaliana
  misc_feature (1)..(97): Homolog of NCBI NO: 21555799 NR Description: Lil3 protein [Arabidopsis thaliana]
  misc_feature (1)..(97): Homolog of NCBI NO: 30695110 NR Description: Lil3 protein [Arabidopsis thaliana]
  misc_feature (1)..(97): Homolog of NCBI NO: 8978078 NR Description: Lil3 protein [Arabidopsis thaliana]
  misc_feature (1)..(97): Homolog of NCBI NO: 18414927 NR Description: Lil3 protein
  misc_feature (1)..(97): Homolog of NCBI NO: 7485188 NR Description: hypothetical protein - Arabidopsis thaliana
  misc_feature (1)..(97): Homolog of NCBI NO: 21555799 NR Description: Lil3 protein [Arabidopsis thaliana]
  misc_feature (1)..(97): Homolog of NCBI NO: 30695110 NR Description: Lil3 protein [Arabidopsis thaliana]
  misc_feature (1)..(97): Homolog of NCBI NO: 8978078 NR Description: Lil3 protein [Arabidopsis thaliana]
  misc_feature (1)..(97): Homolog of NCBI NO: 18414927 NR Description: Lil3 protein
  misc_feature (1)..(97): Homolog of NCBI NO: 7485188 NR Description: hypothetical protein - Arabidopsis thaliana
  misc_feature (1)..(97): Homolog of NCBI NO: 21555799 NR Description: Lil3 protein [Arabidopsis thaliana]
  misc_feature (1)..(97): Homolog of NCBI NO: 30695110 NR Description: Lil3 protein [Arabidopsis thaliana]
  misc_feature (1)..(97): Homolog of NCBI NO: 8978078 NR Description: Lil3 protein [Arabidopsis thaliana]

SEQ ID NO: 42910 - protein, 80 aa, Arabidopsis thaliana; identical to SEQ ID NO: 25462
  peptide (1)..(80): Ceres Seq. ID no. 12336448
  misc_feature (1)..(80): Homolog of NCBI NO: 18414927 NR Description: Lil3 protein
  misc_feature (1)..(80): Homolog of NCBI NO: 7485188 NR Description: hypothetical protein - Arabidopsis thaliana
  misc_feature (1)..(80): Homolog of NCBI NO: 21555799 NR Description: Lil3 protein [Arabidopsis thaliana]
  misc_feature (1)..(80): Homolog of NCBI NO: 30695110 NR Description: Lil3 protein [Arabidopsis thaliana]
  misc_feature (1)..(80): Homolog of NCBI NO: 8978078 NR Description: Lil3 protein [Arabidopsis thaliana]
  misc_feature (1)..(80): Homolog of NCBI NO: 18414927 NR Description: Lil3 protein
  misc_feature (1)..(80): Homolog of NCBI NO: 7485188 NR Description: hypothetical protein - Arabidopsis thaliana
  misc_feature (1)..(80): Homolog of NCBI NO: 21555799 NR Description: Lil3 protein [Arabidopsis thaliana]
  misc_feature (1)..(80): Homolog of NCBI NO: 30695110 NR Description: Lil3 protein [Arabidopsis thaliana]
  misc_feature (1)..(80): Homolog of NCBI NO: 8978078 NR Description: Lil3 protein [Arabidopsis thaliana]
  misc_feature (1)..(80): Homolog of NCBI NO: 18414927 NR Description: Lil3 protein
  misc_feature (1)..(80): Homolog of NCBI NO: 7485188 NR Description: hypothetical protein - Arabidopsis thaliana
  misc_feature (1)..(80): Homolog of NCBI NO: 21555799 NR Description: Lil3 protein [Arabidopsis thaliana]
  misc_feature (1)..(80): Homolog of NCBI NO: 30695110 NR Description: Lil3 protein [Arabidopsis thaliana]
  misc_feature (1)..(80): Homolog of NCBI NO: 8978078 NR Description: Lil3 protein [Arabidopsis thaliana]
  misc_feature (1)..(80): Homolog of NCBI NO: 18414927 NR Description: Lil3 protein
  misc_feature (1)..(80): Homolog of NCBI NO: 7485188 NR Description: hypothetical protein - Arabidopsis thaliana
  misc_feature (1)..(80): Homolog of NCBI NO: 21555799 NR Description: Lil3 protein [Arabidopsis thaliana]
  misc_feature (1)..(80): Homolog of NCBI NO: 30695110 NR Description: Lil3 protein [Arabidopsis thaliana]
  misc_feature (1)..(80): Homolog of NCBI NO: 8978078 NR Description: Lil3 protein [Arabidopsis thaliana]

SEQ ID NO: 42911 - protein, 69 aa, Arabidopsis thaliana; identical to SEQ ID NO: 25463
  peptide (1)..(69): Ceres Seq. ID no. 12336449
  misc_feature (5)..(56): Homolog of NCBI NO: 7485188 NR Description: hypothetical protein - Arabidopsis thaliana
  misc_feature (5)..(56): Homolog of NCBI NO: 21555799 NR Description: Lil3 protein [Arabidopsis thaliana]
  misc_feature (5)..(56): Homolog of NCBI NO: 18414927 NR Description: Lil3 protein
  misc_feature (5)..(58): Homolog of NCBI NO: 8978078 NR Description: Lil3 protein [Arabidopsis thaliana]
  misc_feature (1)..(58): Homolog of NCBI NO: 30695110 NR Description: Lil3 protein [Arabidopsis thaliana]
  misc_feature (5)..(56): Homolog of NCBI NO: 7485188 NR Description: hypothetical protein - Arabidopsis thaliana
  misc_feature (5)..(56): Homolog of NCBI NO: 21555799 NR Description: Lil3 protein [Arabidopsis thaliana]
  misc_feature (5)..(56): Homolog of NCBI NO: 18414927 NR Description: Lil3 protein
  misc_feature (5)..(58): Homolog of NCBI NO: 8978078 NR Description: Lil3 protein [Arabidopsis thaliana]
  misc_feature (1)..(58): Homolog of NCBI NO: 30695110 NR Description: Lil3 protein [Arabidopsis thaliana]
  misc_feature (5)..(56): Homolog of NCBI NO: 7485188 NR Description: hypothetical protein - Arabidopsis thaliana
  misc_feature (5)..(56): Homolog of NCBI NO: 21555799 NR Description: Lil3 protein [Arabidopsis thaliana]
  misc_feature (5)..(56): Homolog of NCBI NO: 18414927 NR Description: Lil3 protein
  misc_feature (5)..(58): Homolog of NCBI NO: 8978078 NR Description: Lil3 protein [Arabidopsis thaliana]
  misc_feature (1)..(58): Homolog of NCBI NO: 30695110 NR Description: Lil3 protein [Arabidopsis thaliana]
  misc_feature (5)..(56): Homolog of NCBI NO: 7485188 NR Description: hypothetical protein - Arabidopsis thaliana
  misc_feature (5)..(56): Homolog of NCBI NO: 21555799 NR Description: Lil3 protein [Arabidopsis thaliana]
  misc_feature (5)..(56): Homolog of NCBI NO: 18414927 NR Description: Lil3 protein
  misc_feature (5)..(58): Homolog of NCBI NO: 8978078 NR Description: Lil3 protein [Arabidopsis thaliana]
  misc_feature (1)..(58): Homolog of NCBI NO: 30695110 NR Description: Lil3 protein [Arabidopsis thaliana]

SEQ ID NO: 42912 - DNA, 960 bp, Arabidopsis thaliana
  misc_feature (1)..(960): Ceres Seq. ID no. 12603058
  misc_feature: MA Experiment ID: 20000264 Result: Up-regulated in Transcription
  misc_feature: MA Experiment 20000264 PARAMETER Experiment Name: At_Open_Flower_P Parameter: Age (day) Value: 21
  misc_feature: MA Experiment 20000264 PARAMETER Experiment Name: At_Open_Flower_P Parameter: Plant Line Value: WS
  misc_feature: MA Experiment 20000264 PARAMETER Experiment Name: At_Open_Flower_P Parameter: Tissue Value: Open Flower vs. Whole Plant
  misc_feature: MA Experiment ID: 20000286 Result: Up-regulated in Transcription
  misc_feature: MA Experiment 20000286 PARAMETER Experiment Name: At_Open_Flower_P Parameter: Age (day) Value: 21
  misc_feature: MA Experiment 20000286 PARAMETER Experiment Name: At_Open_Flower_P Parameter: Plant Line Value: WS
  misc_feature: MA Experiment 20000286 PARAMETER Experiment Name: At_Open_Flower_P Parameter: Tissue Value: Half Open vs. Whole Plant
  misc_feature: MA Experiment ID: 20000794 Result: Up-regulated in Transcription
  misc_feature: MA Experiment 20000794 PARAMETER Experiment Name: At_Petals_P Parameter: Age (day) Value: 23-25 days
  misc_feature: MA Experiment 20000794 PARAMETER Experiment Name: At_Petals_P Parameter: Plant Line Value: WS
  misc_feature: MA Experiment 20000794 PARAMETER Experiment Name: At_Petals_P Parameter: Tissue Value: Petals vs. Whole plant
  misc_feature: MA Experiment ID: 20001757 Result: Down-regulated in Transcription
  misc_feature: MA Experiment 20001757 PARAMETER Experiment Name: At_50mM_NH4NO3_L-to-H_P Parameter: Timepoint (hr) Value: 6
  misc_feature: MA Experiment 20001757 PARAMETER Experiment Name: At_50mM_NH4NO3_L-to-H_P Parameter: Tissue Value: Leaf
  misc_feature: MA Experiment 20001757 PARAMETER Experiment Name: At_50mM_NH4NO3_L-to-H_P Parameter: Treatment Value: 50mM NH4NO3 vs 100mM Mannitol
  misc_feature: MA Experiment ID: 20001910 Result: Up-regulated in Transcription
  misc_feature: MA Experiment 20001910 PARAMETER Experiment Name: At_Drought_Reproduction_P Parameter: Age (day) Value: 37
  misc_feature: MA Experiment 20001910 PARAMETER Experiment Name: At_Drought_Reproduction_P Parameter: Organism Value: A. thaliana
  misc_feature: MA Experiment 20001910 PARAMETER Experiment Name: At_Drought_Reproduction_P Parameter: Plant Line Value: WS
  misc_feature: MA Experiment 20001910 PARAMETER Experiment Name: At_Drought_Reproduction_P Parameter: Timepoint (day) Value: 7
  misc_feature: MA Experiment 20001910 PARAMETER Experiment Name: At_Drought_Reproduction_P Parameter: Tissue Value: Flowers
  misc_feature: MA Experiment 20001910 PARAMETER Experiment Name: At_Drought_Reproduction_P Parameter: Treatment Value: Drought vs. No Drought
gctttcgagggtggggagagagtagaagagaaatatcaaatttcccttcaaaagcctctcctctcttcgttcaagtttttttccttggatgtgcatgtttcttgtggaacaaggcagttctgtttttaagtaaaattcatggcgacggattcgttcatcaagttaaatccaatttcctttaaccgtgcccgcttcgacctccgagattttgctggcataagtcctaaaagcatctcttctctgtgttgcattagcccaagattgatatcttgcaaccatttcagcccgagaacattgatatccggcgagaatggtaacatattgttttccaagaaaaagatccccgcgtttgtccgatgtcagacaagtcttgggatcggaaggaaccaaaaatggtgggagaaggaattgaaaccgaacatgaagtcggttacatcaccgcaagatcttgtcgtctctttacgtaacgctggagataaacttgtcgttgttgatttcttctcgcctagttgtggtggctgcaaagctcttcatcccaagatatgtaaaattgcagagaagaatccggaagtagagtttctacaagtgaattatgaagaacatagaagtttatgtcaaagtcttaacattcatgttcttcccttcttccgcttctatcgtggttcctctggccgcgtttgcagcttcagttgtactaatgccacgataaggaaattcaaggaagcgttggagaagcatgggagggagcaatgtagcattggagaaacaaaggggcttgaggagaaagaacttgtcgccatggctgcaaataaagacttgtcattcgattataaacccacatcgtgtggaaatatccaagagcaaaaaaagaaagaaatatttctcccgaaatctccaacttttaataaacaaaaagaagtagaacattctctactactagttagtcctgctcctgcatga

SEQ ID NO: 42913 - protein, 273 aa, Arabidopsis thaliana
  peptide (1)..(273): Ceres Seq. ID no. 12603059
  misc_feature (95)..(202): Pfam Name: Thioredoxin Pfam Description: Thioredoxin
  misc_feature (44)..(224): Homolog of NCBI NO: 18417441 NR Description: Thioredoxin - like protein
  misc_feature (42)..(200): Homolog of NCBI NO: 15236134 NR Description: putative thioredoxin
  misc_feature (27)..(200): Homolog of NCBI NO: 21553512 NR Description: putative thioredoxin [Arabidopsis thaliana]
  misc_feature (18)..(200): Homolog of NCBI NO: 4973258 NR Description: thioredoxin-like 2 [Arabidopsis thaliana]
  misc_feature (85)..(231): Homolog of NCBI NO: 19071639 NR Description: putative thioredoxin [Oryza sativa (japonica
  misc_feature (63)..(230): Homolog of NCBI NO: 15240254 NR Description: thioredoxin-like 3
  misc_feature (75)..(253): Homolog of NCBI NO: 34394520 NR Description: putative thioredoxin [Oryza sativa (japonica
  misc_feature (69)..(233): Homolog of NCBI NO: 308906 NR Description: thioredoxin
  misc_feature (24)..(233): Homolog of NCBI NO: 15223262 NR Description: putative thioredoxin
  misc_feature (1)..(273): Homolog of NCBI NO: 15225825 NR Description: putative thioredoxin; protein id: At2g33270.1
MATDSFIKLNPISFNRARFDLRDFAGISPKSISSLCCISPRLISCNHFSPRTLISGENGNILFSKKKIPAFVRCQTSLGIGRNQKWWEKELKPNMKSVTSPQDLVVSLRNAGDKLVVVDFFSPSCGGCKALHPKICKIAEKNPEVEFLQVNYEEHRSLCQSLNIHVLPFFRFYRGSSGRVCSFSCTNATIRKFKEALEKHGREQCSIGETKGLEEKELVAMAANKDLSFDYKPTSCGNIQEQKKKEIFLPKSPTFNKQKEVEHSLLLVSPAPA

SEQ ID NO: 42914 - protein, 179 aa, Arabidopsis thaliana
  peptide (1)..(179): Ceres Seq. ID no. 12603060
  misc_feature (1)..(108): Pfam Name: Thioredoxin Pfam Description: Thioredoxin
  misc_feature (1)..(130): Homolog of NCBI NO: 18417441 NR Description: Thioredoxin - like protein
  misc_feature (1)..(106): Homolog of NCBI NO: 15236134 NR Description: putative thioredoxin
  misc_feature (1)..(106): Homolog of NCBI NO: 21553512 NR Description: putative thioredoxin [Arabidopsis thaliana]
  misc_feature (1)..(106): Homolog of NCBI NO: 4973258 NR Description: thioredoxin-like 2 [Arabidopsis thaliana]
  misc_feature (1)..(137): Homolog of NCBI NO: 19071639 NR Description: putative thioredoxin [Oryza sativa (japonica
  misc_feature (1)..(136): Homolog of NCBI NO: 15240254 NR Description: thioredoxin-like 3
  misc_feature (1)..(159): Homolog of NCBI NO: 34394520 NR Description: putative thioredoxin [Oryza sativa (japonica
  misc_feature (1)..(139): Homolog of NCBI NO: 308906 NR Description: thioredoxin
  misc_feature (1)..(139): Homolog of NCBI NO: 15223262 NR Description: putative thioredoxin
  misc_feature (1)..(179): Homolog of NCBI NO: 15225825 NR Description: putative thioredoxin; protein id: At2g33270.1
MKSVTSPQDLVVSLRNAGDKLVVVDFFSPSCGGCKALHPKICKIAEKNPEVEFLQVNYEEHRSLCQSLNIHVLPFFRFYRGSSGRVCSFSCTNATIRKFKEALEKHGREQCSIGETKGLEEKELVAMAANKDLSFDYKPTSCGNIQEQKKKEIFLPKSPTFNKQKEVEHSLLLVSPAPA

SEQ ID NO: 42915 - DNA, 1525 bp, Arabidopsis thaliana
  misc_feature (1)..(1525): Ceres Seq. ID no. 12601754
  misc_feature: MA Experiment ID: 108434 Result: Up-regulated in Transcription
  misc_feature: MA Experiment 108434 PARAMETER Experiment Name: At_Root_Tips_cDNA_P Parameter: Tissue Value: Root Tips
  misc_feature: MA Experiment ID: 108461 Result: Up-regulated in Transcription
  misc_feature: MA Experiment 108461 PARAMETER Experiment Name: At_Germinating_Seeds_cDNA_P Parameter: Age (day) Value: 1 vs. 0
  misc_feature: MA Experiment 108461 PARAMETER Experiment Name: At_Germinating_Seeds_cDNA_P Parameter: Tissue Value: Germinating Seeds
  misc_feature: MA Experiment ID: 108462 Result: Up-regulated in Transcription
  misc_feature: MA Experiment 108462 PARAMETER Experiment Name: At_Germinating_Seeds_cDNA_P Parameter: Age (day) Value: 2 vs. 0
  misc_feature: MA Experiment 108462 PARAMETER Experiment Name: At_Germinating_Seeds_cDNA_P Parameter: Tissue Value: Germinating Seeds
  misc_feature: MA Experiment ID: 108463 Result: Up-regulated in Transcription
  misc_feature: MA Experiment 108463 PARAMETER Experiment Name: At_Germinating_Seeds_cDNA_P Parameter: Age (day) Value: 3 vs. 0
  misc_feature: MA Experiment 108463 PARAMETER Experiment Name: At_Germinating_Seeds_cDNA_P Parameter: Tissue Value: Germinating Seeds
  misc_feature: MA Experiment ID: 108464 Result: Up-regulated in Transcription
  misc_feature: MA Experiment 108464 PARAMETER Experiment Name: At_Germinating_Seeds_cDNA_P Parameter: Age (day) Value: 4 vs. 0
  misc_feature: MA Experiment 108464 PARAMETER Experiment Name: At_Germinating_Seeds_cDNA_P Parameter: Tissue Value: Germinating Seeds
  misc_feature: MA Experiment ID: 108595 Result: Down-regulated in Transcription
  misc_feature: MA Experiment 108595 PARAMETER Experiment Name: At_Ler-pi_Ovule_cDNA_P Parameter: Plant Line Value: null
  misc_feature: MA Experiment ID: 20000224 Result: Down-regulated in Transcription
  misc_feature: MA Experiment ID: 20000315 Result: Down-regulated in Transcription
  misc_feature: MA Experiment 20000315 PARAMETER Experiment Name: At_14day_Shoots-Roots_Sub_P Parameter: Age (day) Value: 14
  misc_feature: MA Experiment 20000315 PARAMETER Experiment Name: At_14day_Shoots-Roots_Sub_P Parameter: Organism Value: A. thaliana
  misc_feature: MA Experiment 20000315 PARAMETER Experiment Name: At_14day_Shoots-Roots_Sub_P Parameter: Plant Line Value: WS
  misc_feature: MA Experiment 20000315 PARAMETER Experiment Name: At_14day_Shoots-Roots_Sub_P Parameter: Tissue Value: Shoots vs. Whole Plant
attctctctcaacggtaaagatccgccattttcaccgatctctgtttcttctcgtttggatctttggaaattttagagtttgttcgttctctctcgtatctcattttggaattgaatcgttagtggatttgatcgggaaatgagtgttttcgcgttcgattagtgtttatcagtctctggatctgtgattttgattttgttttctccagttttcgttttgaaatggcgaggaagaagatcagagagtatgactcaaagaggttggtgaaggaacatttcaaaaggctttctggcaaagagcttcctatcagatccgttcagattaatgaaacaactgatctaaatgagctagttgaaaaggaaccttggctctcgtctgagaagctggtggtgaaacctgacatgttgtttggaaagcgtggcaagagtggtttggttgccttgaaattagattttgctgatgttgccacttttgttaaagaacgtttgggaaaagaggtagagatgagtggatgcaaaggacccataacaacattcatagttgaaccatttgttccacacaatgaggagtattatctcaatgttgtctcggatcggcttggttgcagcataagcttttctgagtgtggaggaattgagatcgaggagaactgggacaaggtcaagacaatatttttaccaacaggtgcttccctgacacctgaaatatgtgcacctcttgtcgcaactcttcccttagagatcaaagctgaaattgaagaatttatcaaagtcattttcaccctattccaagatcttgatttcactttcttggagatgaatcctttcactctagttgatggaagtccttatcctctggatatgaggggtgagcttgatgatactgctgccttcaaaaactttaaaaaatggggcgacattgaatttcctctgccatttggaagagtaatgagtcctacagaaagctttatccacggactggatgagaagacaagtgcgtctttgaagtttaccgttctgaaccccaagggacggatttggacaatggtagctggtggaggagcaagtgtcatctatgcggatacggttggagatctcgggtatgcatctgaacttggcaactatgctgaatacagtggagcacccaaagaagatgaggttttgcagtacgccagagtcgttattgattgtgctacagcaaacccggatggaaaaagcagagcccttgtcatcggaggcggaattgccaacttcactgacgttgctgctactttcaatggcataatccgcgctcttaaagaaaaggaagcaaagctgaaagcagcaaggatgcatatatttgtgaggagaggaggaccaaactaccaaaagggacttgctaaaatgcgagcccttggagatgatatcggtgtccccatcgaggtctatggcccagaagcaaccatgacaggtatctgcaaggaggcaatccagtacatcacagcagcagcataagcttctctcagtaccttctatgaccaaaact

SEQ ID NO: 42916 - protein, 423 aa, Arabidopsis thaliana; identical to SEQ ID NO: 23456
  peptide (1)..(423): Ceres Seq. ID no. 12601755
  misc_feature (42)..(199): Pfam Name: ATP-grasp domain Pfam Description: ATP-grasp domain
  misc_feature (42)..(199): Pfam Name: ATP-grasp domain Pfam Description: ATP-grasp domain
  misc_feature (1)..(416): Homolog of NCBI NO: 28372804 NR Description: LD21334p [Drosophila melanogaster]
  misc_feature (1)..(416): Homolog of NCBI NO: 24653988 NR Description: ATP citrate lyase CG8322-PA
  misc_feature (1)..(416): Homolog of NCBI NO: 9229902 NR Description: ATP citrate-lyase [Ciona intestinalis]
  misc_feature (1)..(416): Homolog of NCBI NO: 31235932 NR Description: ENSANGP00000012364 [Anopheles gambiae]
  misc_feature (1)..(419): Homolog of NCBI NO: 15217510 NR Description: unknown protein; protein id: At1g09430.1
  misc_feature (1)..(416): Homolog of NCBI NO: 28372804 NR Description: LD21334p [Drosophila melanogaster]
  misc_feature (1)..(416): Homolog of NCBI NO: 9229902 NR Description: ATP citrate-lyase [Ciona intestinalis]
  misc_feature (1)..(419): Homolog of NCBI NO: 15217510 NR Description: unknown protein; protein id: At1g09430.1
  misc_feature (1)..(423): Homolog of NCBI NO: 15220186 NR Description: ATP citrate-lyase, putative
  misc_feature (1)..(423): Homolog of NCBI NO: 21593129 NR Description: ATP citrate-lyase, putative [Arabidopsis thaliana]
  misc_feature (1)..(423): Homolog of NCBI NO: 15219818 NR Description: ATP citrate-lyase, putative
  misc_feature (1)..(423): Homolog of NCBI NO: 19698853 NR Description: similar to ATP-citrate-lyase [Arabidopsis
  misc_feature (1)..(423): Homolog of NCBI NO: 15919089 NR Description: ATP citrate lyase b-subunit [Lupinus albus]
  misc_feature (1)..(416): Homolog of NCBI NO: 31235932 NR Description: ENSANGP00000012364 [Anopheles gambiae]
  misc_feature (1)..(416): Homolog of NCBI NO: 24653988 NR Description: ATP citrate lyase CG8322-PA
  misc_feature (1)..(423): Homolog of NCBI NO: 15919089 NR Description: ATP citrate lyase b-subunit [Lupinus albus]
  misc_feature (1)..(423): Homolog of NCBI NO: 19698853 NR Description: similar to ATP-citrate-lyase [Arabidopsis
  misc_feature (1)..(423): Homolog of NCBI NO: 15219818 NR Description: ATP citrate-lyase, putative
  misc_feature (1)..(423): Homolog of NCBI NO: 21593129 NR Description: ATP citrate-lyase, putative [Arabidopsis thaliana]
  misc_feature (1)..(423): Homolog of NCBI NO: 15220186 NR Description: ATP citrate-lyase, putative

SEQ ID NO: 42917 - protein, 363 aa, Arabidopsis thaliana; identical to SEQ ID NO: 23457
  peptide (1)..(363): Ceres Seq. ID no. 12601756
  misc_feature (1)..(139): Pfam Name: ATP-grasp domain Pfam Description: ATP-grasp domain
  misc_feature (1)..(139): Pfam Name: ATP-grasp domain Pfam Description: ATP-grasp domain
  misc_feature (1)..(356): Homolog of NCBI NO: 28372804 NR Description: LD21334p [Drosophila melanogaster]
  misc_feature (1)..(356): Homolog of NCBI NO: 24653988 NR Description: ATP citrate lyase CG8322-PA
  misc_feature (1)..(356): Homolog of NCBI NO: 9229902 NR Description: ATP citrate-lyase [Ciona intestinalis]
  misc_feature (1)..(356): Homolog of NCBI NO: 31235932 NR Description: ENSANGP00000012364 [Anopheles gambiae]
  misc_feature (1)..(359): Homolog of NCBI NO: 15217510 NR Description: unknown protein; protein id: At1g09430.1
  misc_feature (1)..(356): Homolog of NCBI NO: 28372804 NR Description: LD21334p [Drosophila melanogaster]
  misc_feature (1)..(356): Homolog of NCBI NO: 9229902 NR Description: ATP citrate-lyase [Ciona intestinalis]
  misc_feature (1)..(359): Homolog of NCBI NO: 15217510 NR Description: unknown protein; protein id: At1g09430.1
  misc_feature (1)..(363): Homolog of NCBI NO: 15220186 NR Description: ATP citrate-lyase, putative
  misc_feature (1)..(363): Homolog of NCBI NO: 21593129 NR Description: ATP citrate-lyase, putative [Arabidopsis thaliana]
  misc_feature (1)..(363): Homolog of NCBI NO: 15219818 NR Description: ATP citrate-lyase, putative
  misc_feature (1)..(363): Homolog of NCBI NO: 19698853 NR Description: similar to ATP-citrate-lyase [Arabidopsis
  misc_feature (1)..(363): Homolog of NCBI NO: 15919089 NR Description: ATP citrate lyase b-subunit [Lupinus albus]
  misc_feature (1)..(356): Homolog of NCBI NO: 31235932 NR Description: ENSANGP00000012364 [Anopheles gambiae]
  misc_feature (1)..(356): Homolog of NCBI NO: 24653988 NR Description: ATP citrate lyase CG8322-PA
  misc_feature (1)..(363): Homolog of NCBI NO: 15919089 NR Description: ATP citrate lyase b-subunit [Lupinus albus]
  misc_feature (1)..(363): Homolog of NCBI NO: 19698853 NR Description: similar to ATP-citrate-lyase [Arabidopsis
  misc_feature (1)..(363): Homolog of NCBI NO: 15219818 NR Description: ATP citrate-lyase, putative
  misc_feature (1)..(363): Homolog of NCBI NO: 21593129 NR Description: ATP citrate-lyase, putative [Arabidopsis thaliana]
  misc_feature (1)..(363): Homolog of NCBI NO: 15220186 NR Description: ATP citrate-lyase, putative

SEQ ID NO: 42918 - protein, 329 aa, Arabidopsis thaliana; identical to SEQ ID NO: 23458
  peptide (1)..(329): Ceres Seq. ID no. 12601757
  misc_feature (1)..(105): Pfam Name: ATP-grasp domain Pfam Description: ATP-grasp domain
  misc_feature (1)..(105): Pfam Name: ATP-grasp domain Pfam Description: ATP-grasp domain
  misc_feature (1)..(322): Homolog of NCBI NO: 28372804 NR Description: LD21334p [Drosophila melanogaster]
  misc_feature (1)..(322): Homolog of NCBI NO: 24653988 NR Description: ATP citrate lyase CG8322-PA
  misc_feature (1)..(322): Homolog of NCBI NO: 9229902 NR Description: ATP citrate-lyase [Ciona intestinalis]
  misc_feature (1)..(322): Homolog of NCBI NO: 31235932 NR Description: ENSANGP00000012364 [Anopheles gambiae]
  misc_feature (1)..(325): Homolog of NCBI NO: 15217510 NR Description: unknown protein; protein id: At1g09430.1
  misc_feature (1)..(322): Homolog of NCBI NO: 28372804 NR Description: LD21334p [Drosophila melanogaster]
  misc_feature (1)..(322): Homolog of NCBI NO: 9229902 NR Description: ATP citrate-lyase [Ciona intestinalis]
  misc_feature (1)..(325): Homolog of NCBI NO: 15217510 NR Description: unknown protein; protein id: At1g09430.1
  misc_feature (1)..(329): Homolog of NCBI NO: 15220186 NR Description: ATP citrate-lyase, putative
  misc_feature (1)..(329): Homolog of NCBI NO: 21593129 NR Description: ATP citrate-lyase, putative [Arabidopsis thaliana]
  misc_feature (1)..(329): Homolog of NCBI NO: 15219818 NR Description: ATP citrate-lyase, putative
  misc_feature (1)..(329): Homolog of NCBI NO: 19698853 NR Description: similar to ATP-citrate-lyase [Arabidopsis
  misc_feature (1)..(329): Homolog of NCBI NO: 15919089 NR Description: ATP citrate lyase b-subunit [Lupinus albus]
  misc_feature (1)..(322): Homolog of NCBI NO: 31235932 NR Description: ENSANGP00000012364 [Anopheles gambiae]
  misc_feature (1)..(322): Homolog of NCBI NO: 24653988 NR Description: ATP citrate lyase CG8322-PA
  misc_feature (1)..(329): Homolog of NCBI NO: 15919089 NR Description: ATP citrate lyase b-subunit [Lupinus albus]
  misc_feature (1)..(329): Homolog of NCBI NO: 19698853 NR Description: similar to ATP-citrate-lyase [Arabidopsis
  misc_feature (1)..(329): Homolog of NCBI NO: 15219818 NR Description: ATP citrate-lyase, putative
  misc_feature (1)..(329): Homolog of NCBI NO: 21593129 NR Description: ATP citrate-lyase, putative [Arabidopsis thaliana]
  misc_feature (1)..(329): Homolog of NCBI NO: 15220186 NR Description: ATP citrate-lyase, putative

SEQ ID NO: 42919 - DNA, 661 bp, Arabidopsis thaliana
  misc_feature (1)..(661): Ceres Seq. ID no. 12422313
  misc_feature: MA Experiment ID: 108434 Result: Down-regulated in Transcription
  misc_feature: MA Experiment 108434 PARAMETER Experiment Name: At_Root_Tips_cDNA_P Parameter: Tissue Value: Root Tips
  misc_feature: MA Experiment ID: 108435 Result: Up-regulated in Transcription
  misc_feature: MA Experiment 108435 PARAMETER Experiment Name: At_stm_Mutants_cDNA_P Parameter: Plant Line Value: wt Landsburg vs stm
  misc_feature: MA Experiment 108435 PARAMETER Experiment Name: At_stm_Mutants_cDNA_P Parameter: Tissue Value: Shoot Apical Meristem Region
  misc_feature: MA Experiment ID: 108462 Result: Down-regulated in Transcription
  misc_feature: MA Experiment 108462 PARAMETER Experiment Name: At_Germinating_Seeds_cDNA_P Parameter: Age (day) Value: 2 vs. 0
  misc_feature: MA Experiment 108462 PARAMETER Experiment Name: At_Germinating_Seeds_cDNA_P Parameter: Tissue Value: Germinating Seeds
  misc_feature: MA Experiment ID: 108595 Result: Up-regulated in Transcription
  misc_feature: MA Experiment 108595 PARAMETER Experiment Name: At_Ler-pi_Ovule_cDNA_P Parameter: Plant Line Value: null
  misc_feature: MA Experiment ID: 108609 Result: Up-regulated in Transcription
  misc_feature: MA Experiment 108609 PARAMETER Experiment Name: At_100uM_ABA_cDNA_P Parameter: Timepoint (hr) Value: 24
  misc_feature: MA Experiment 108609 PARAMETER Experiment Name: At_100uM_ABA_cDNA_P Parameter: Tissue Value: Aerial
  misc_feature: MA Experiment 108609 PARAMETER Experiment Name: At_100uM_ABA_cDNA_P Parameter: Treatment Value: 100uM ABA vs. No Treatment
  misc_feature: MA Experiment ID: 20000090 Result: Up-regulated in Transcription
  misc_feature: MA Experiment ID: 20000112 Result: Up-regulated in Transcription
  misc_feature: MA Experiment 20000112 PARAMETER Experiment Name: At_42deg_Heat_cDNA_P Parameter: Temperature (deg C) Value: 42 vs. 22
  misc_feature: MA Experiment 20000112 PARAMETER Experiment Name: At_42deg_Heat_cDNA_P Parameter: Timepoint (hr) Value: 2
  misc_feature: MA Experiment 20000112 PARAMETER Experiment Name: At_42deg_Heat_cDNA_P Parameter: Tissue Value: Aerial
  misc_feature: MA Experiment ID: 20000144 Result: Up-regulated in Transcription
  misc_feature: MA Experiment 20000144 PARAMETER Experiment Name: At_42deg_Heat_cDNA_P Parameter: Temperature (deg C) Value: 42 vs. 22
  misc_feature: MA Experiment 20000144 PARAMETER Experiment Name: At_42deg_Heat_cDNA_P Parameter: Timepoint (hr) Value: 1
  misc_feature: MA Experiment 20000144 PARAMETER Experiment Name: At_42deg_Heat_cDNA_P Parameter: Tissue Value: Aerial
  misc_feature: MA Experiment ID: 20000171 Result: Up-regulated in Transcription
  misc_feature: MA Experiment 20000171 PARAMETER Experiment Name: At_42deg_Heat_P Parameter: Age (day) Value: 14
  misc_feature: MA Experiment 20000171 PARAMETER Experiment Name: At_42deg_Heat_P Parameter: Organism Value: A. thaliana
  misc_feature: MA Experiment 20000171 PARAMETER Experiment Name: At_42deg_Heat_P Parameter: Plant Line Value: WS
  misc_feature: MA Experiment 20000171 PARAMETER Experiment Name: At_42deg_Heat_P Parameter: Temperature (deg C) Value: 42 vs. 22
  misc_feature: MA Experiment 20000171 PARAMETER Experiment Name: At_42deg_Heat_P Parameter: Timepoint (hr) Value: 1
  misc_feature: MA Experiment 20000171 PARAMETER Experiment Name: At_42deg_Heat_P Parameter: Tissue Value: Aerial
  misc_feature: MA Experiment ID: 20000184 Result: Up-regulated in Transcription
  misc_feature: MA Experiment 20000184 PARAMETER Experiment Name: At_Shoots__P Parameter: Age (day) Value: 7
  misc_feature: MA Experiment 20000184 PARAMETER Experiment Name: At_Shoots__P Parameter: Tissue Value: Shoots vs. Whole Plant
  misc_feature: MA Experiment ID: 20000185 Result: Up-regulated in Transcription
  misc_feature: MA Experiment 20000185 PARAMETER Experiment Name: At_Roots__P Parameter: Age (day) Value: 7 vs. 21
  misc_feature: MA Experiment 20000185 PARAMETER Experiment Name: At_Roots__P Parameter: Organism Value: A. thaliana
  misc_feature: MA Experiment 20000185 PARAMETER Experiment Name: At_Roots__P Parameter: Tissue Value: Roots vs. Whole Plant
  misc_feature: MA Experiment ID: 20000234 Result: Down-regulated in Transcription
  misc_feature: MA Experiment 20000234 PARAMETER Experiment Name: At_Siliques_P Parameter: Age (day) Value: 21
  misc_feature: MA Experiment 20000234 PARAMETER Experiment Name: At_Siliques_P Parameter: Organism Value: A. thaliana
  misc_feature: MA Experiment 20000234 PARAMETER Experiment Name: At_Siliques_P Parameter: Plant Line Value: WS
  misc_feature: MA Experiment 20000234 PARAMETER Experiment Name: At_Siliques_P Parameter: Tissue Value: Less Than 5mm Siliques vs. Whole Plant
  misc_feature: MA Experiment ID: 20000235 Result: Down-regulated in Transcription
  misc_feature: MA Experiment 20000235 PARAMETER Experiment Name: At_Siliques_P Parameter: Age (day) Value: 21
  misc_feature: MA Experiment 20000235 PARAMETER Experiment Name: At_Siliques_P Parameter: Organism Value: A. thaliana
  misc_feature: MA Experiment 20000235 PARAMETER Experiment Name: At_Siliques_P Parameter: Plant Line Value: WS
  misc_feature: MA Experiment 20000235 PARAMETER Experiment Name: At_Siliques_P Parameter: Tissue Value: 5-10mm Siliques vs. Whole Plant
  misc_feature: MA Experiment ID: 20000269 Result: Down-regulated in Transcription
  misc_feature: MA Experiment 20000269 PARAMETER Experiment Name: At_1mM_KNO3_L-vs-H_Roots_P Parameter: Age (day) Value: 7,10,12
  misc_feature: MA Experiment 20000269 PARAMETER Experiment Name: At_1mM_KNO3_L-vs-H_Roots_P Parameter: Organism Value: A. thaliana
  misc_feature: MA Experiment 20000269 PARAMETER Experiment Name: At_1mM_KNO3_L-vs-H_Roots_P Parameter: Plant Line Value: WS
  misc_feature: MA Experiment 20000269 PARAMETER Experiment Name: At_1mM_KNO3_L-vs-H_Roots_P Parameter: Timepoint (day) Value: 7,10,12
  misc_feature: MA Experiment 20000269 PARAMETER Experiment Name: At_1mM_KNO3_L-vs-H_Roots_P Parameter: Tissue Value: Roots
  misc_feature: MA Experiment 20000269 PARAMETER Experiment Name: At_1mM_KNO3_L-vs-H_Roots_P Parameter: Treatment Value: 1mM KNO3 vs. 50mM KNO3
  misc_feature: MA Experiment ID: 20000438 Result: Up-regulated in Transcription
  misc_feature: MA Experiment 20000438 PARAMETER Experiment Name: At_Shoots__P Parameter: Age (day) Value: 14
  misc_feature: MA Experiment 20000438 PARAMETER Experiment Name: At_Shoots__P Parameter: Tissue Value: Shoots vs. Whole Plant
  misc_feature: MA Experiment ID: 20000439 Result: Up-regulated in Transcription
  misc_feature: MA Experiment 20000439 PARAMETER Experiment Name: At_Roots__P Parameter: Age (day) Value: 14 vs. 21
  misc_feature: MA Experiment 20000439 PARAMETER Experiment Name: At_Roots__P Parameter: Organism Value: A. thaliana
  misc_feature: MA Experiment 20000439 PARAMETER Experiment Name: At_Roots__P Parameter: Tissue Value: Roots vs. Whole Plant
  misc_feature: MA Experiment ID: 20000451 Result: Down-regulated in Transcription
  misc_feature: MA Experiment 20000451 PARAMETER Experiment Name: At_CS6879_Shoots-Roots_P Parameter: Age (day) Value: 14
  misc_feature: MA Experiment 20000451 PARAMETER Experiment Name: At_CS6879_Shoots-Roots_P Parameter: Organism Value: A. thaliana
  misc_feature: MA Experiment 20000451 PARAMETER Experiment Name: At_CS6879_Shoots-Roots_P Parameter: Plant Line Value: CS6879 vs. WS
  misc_feature: MA Experiment 20000451 PARAMETER Experiment Name: At_CS6879_Shoots-Roots_P Parameter: Tissue Value: Roots
  misc_feature: MA Experiment ID: 20000452 Result: Down-regulated in Transcription
  misc_feature: MA Experiment 20000452 PARAMETER Experiment Name: At_CS6879_Shoots-Roots_P Parameter: Age (day) Value: 14
  misc_feature: MA Experiment 20000452 PARAMETER Experiment Name: At_CS6879_Shoots-Roots_P Parameter: Organism Value: A. thaliana
  misc_feature: MA Experiment 20000452 PARAMETER Experiment Name: At_CS6879_Shoots-Roots_P Parameter: Plant Line Value: CS6879 vs. WS
  misc_feature: MA Experiment 20000452 PARAMETER Experiment Name: At_CS6879_Shoots-Roots_P Parameter: Tissue Value: Shoots
  misc_feature: MA Experiment ID: 20000453 Result: Up-regulated in Transcription
  misc_feature: MA Experiment 20000453 PARAMETER Experiment Name: At_100uM_ABA_P Parameter: Age (day) Value: 15
  misc_feature: MA Experiment 20000453 PARAMETER Experiment Name: At_100uM_ABA_P Parameter: Organism Value: A. thaliana
  misc_feature: MA Experiment 20000453 PARAMETER Experiment Name: At_100uM_ABA_P Parameter: Plant Line Value: WS
  misc_feature: MA Experiment 20000453 PARAMETER Experiment Name: At_100uM_ABA_P Parameter: Timepoint (hr) Value: 24
  misc_feature: MA Experiment 20000453 PARAMETER Experiment Name: At_100uM_ABA_P Parameter: Tissue Value: Aerial
  misc_feature: MA Experiment 20000453 PARAMETER Experiment Name: At_100uM_ABA_P Parameter: Treatment Value: 100uM ABA vs. No Treatment
  misc_feature: MA Experiment ID: 20000455 Result: Up-regulated in Transcription
  misc_feature: MA Experiment 20000455 PARAMETER Experiment Name: At_100uM_ABA_P Parameter: Age (day) Value: 16
  misc_feature: MA Experiment 20000455 PARAMETER Experiment Name: At_100uM_ABA_P Parameter: Organism Value: A. thaliana
  misc_feature: MA Experiment 20000455 PARAMETER Experiment Name: At_100uM_ABA_P Parameter: Plant Line Value: WS
  misc_feature: MA Experiment 20000455 PARAMETER Experiment Name: At_100uM_ABA_P Parameter: Timepoint (hr) Value: 48
  misc_feature: MA Experiment 20000455 PARAMETER Experiment Name: At_100uM_ABA_P Parameter: Tissue Value: Aerial
  misc_feature: MA Experiment 20000455 PARAMETER Experiment Name: At_100uM_ABA_P Parameter: Treatment Value: 100uM ABA vs. No Treatment
  misc_feature: MA Experiment ID: 20000495 Result: Up-regulated in Transcription
  misc_feature: MA Experiment 20000495 PARAMETER Experiment Name: At_Guard_Cells_P Parameter: Harvest Date Value: 8/2/2002
  misc_feature: MA Experiment 20000495 PARAMETER Experiment Name: At_Guard_Cells_P Parameter: Organism Value: A. thaliana
  misc_feature: MA Experiment 20000495 PARAMETER Experiment Name: At_Guard_Cells_P Parameter: Tissue Value: Guard Cells vs. Leaves
  misc_feature: MA Experiment ID: 20000709 Result: Up-regulated in Transcription
  misc_feature: MA Experiment 20000709 PARAMETER Experiment Name: At_15mM_NH4NO3_L-to-H_P Parameter: Age (hr) Value: 14
  misc_feature: MA Experiment 20000709 PARAMETER Experiment Name: At_15mM_NH4NO3_L-to-H_P Parameter: Organism Value: A. thaliana
  misc_feature: MA Experiment 20000709 PARAMETER Experiment Name: At_15mM_NH4NO3_L-to-H_P Parameter: Plant Line Value: WS
  misc_feature: MA Experiment 20000709 PARAMETER Experiment Name: At_15mM_NH4NO3_L-to-H_P Parameter: Timepoint (hr) Value: 4
  misc_feature: MA Experiment 20000709 PARAMETER Experiment Name: At_15mM_NH4NO3_L-to-H_P Parameter: Tissue Value: Aerial
  misc_feature: MA Experiment 20000709 PARAMETER Experiment Name: At_15mM_NH4NO3_L-to-H_P Parameter: Treatment Value: 15mM NH4NO3 vs. 30mM Mannitol
  misc_feature: MA Experiment ID: 20001554 Result: Up-regulated in Transcription
  misc_feature: MA Experiment 20001554 PARAMETER Experiment Name: At_Drought_Soil_Dry_P Parameter: Age (day) Value: 21
  misc_feature: MA Experiment 20001554 PARAMETER Experiment Name: At_Drought_Soil_Dry_P Parameter: Organism Value: A. thaliana
  misc_feature: MA Experiment 20001554 PARAMETER Experiment Name: At_Drought_Soil_Dry_P Parameter: Plant Line Value: WS
  misc_feature: MA Experiment 20001554 PARAMETER Experiment Name: At_Drought_Soil_Dry_P Parameter: Post Timepoint (hr) Value: None
  misc_feature: MA Experiment 20001554 PARAMETER Experiment Name: At_Drought_Soil_Dry_P Parameter: Post-Treatment Value: None
  misc_feature: MA Experiment 20001554 PARAMETER Experiment Name: At_Drought_Soil_Dry_P Parameter: Timepoint (day) Value: 7
  misc_feature: MA Experiment 20001554 PARAMETER Experiment Name: At_Drought_Soil_Dry_P Parameter: Treatment Value: Drought vs. No Drought
  misc_feature: MA Experiment ID: 20001555 Result: Up-regulated in Transcription
  misc_feature: MA Experiment 20001555 PARAMETER Experiment Name: At_Drought_Soil_Dry_P Parameter: Age (day) Value: 24
  misc_feature: MA Experiment 20001555 PARAMETER Experiment Name: At_Drought_Soil_Dry_P Parameter: Organism Value: A. thaliana
  misc_feature: MA Experiment 20001555 PARAMETER Experiment Name: At_Drought_Soil_Dry_P Parameter: Plant Line Value: WS
  misc_feature: MA Experiment 20001555 PARAMETER Experiment Name: At_Drought_Soil_Dry_P Parameter: Post Timepoint (hr) Value: None
  misc_feature: MA Experiment 20001555 PARAMETER Experiment Name: At_Drought_Soil_Dry_P Parameter: Post-Treatment Value: None
  misc_feature: MA Experiment 20001555 PARAMETER Experiment Name: At_Drought_Soil_Dry_P Parameter: Timepoint (day) Value: 10
  misc_feature: MA Experiment 20001555 PARAMETER Experiment Name: At_Drought_Soil_Dry_P Parameter: Treatment Value: Drought vs. No Drought
  misc_feature: MA Experiment ID: 20001558 Result: Down-regulated in Transcription
  misc_feature: MA Experiment 20001558 PARAMETER Experiment Name: At_Drought_Soil_Dry_P Parameter: Age (day) Value: 27
  misc_feature: MA Experiment 20001558 PARAMETER Experiment Name: At_Drought_Soil_Dry_P Parameter: Organism Value: A. thaliana
  misc_feature: MA Experiment 20001558 PARAMETER Experiment Name: At_Drought_Soil_Dry_P Parameter: Plant Line Value: WS
  misc_feature: MA Experiment 20001558 PARAMETER Experiment Name: At_Drought_Soil_Dry_P Parameter: Post Timepoint (hr) Value: 6
  misc_feature: MA Experiment 20001558 PARAMETER Experiment Name: At_Drought_Soil_Dry_P Parameter: Post-Treatment Value: Re-Water vs. No Drought
  misc_feature: MA Experiment 20001558 PARAMETER Experiment Name: At_Drought_Soil_Dry_P Parameter: Timepoint (day) Value: 13
  misc_feature: MA Experiment 20001558 PARAMETER Experiment Name: At_Drought_Soil_Dry_P Parameter: Treatment Value: Drought vs. No Drought
atcacttacttaacatactaagagagttattagaacttgcaaaaaatggcttccaaggctttgattctgttaggtctcttctcagttcttctcgtcgtctccgaagtgtctgccgcaaggaantcgggcatggtgaagccagagagtgaggaaactgtgcaacctgaaggttatggcggtggccacggacatggaggacacaacggaggagggggccacggacttgacggatacggaggaggtggaggacactatggaggaggtggaggacactacggaggaggtggaggacactacggaggaggtggaggacactacggaggaggtggtggaggacacggaggtggaggacactacggaggtggtggaggaggatacggaggtggaggaggacaccacggaggaggaggccacgggctaaacgaacctgttcagactaagccgggtgtttaaaactatataatatcttcactaccatgcatgattgcatatatatatatacgcttatgtattatctatatgcctataaataaaccatggtgagtttgtaacgcagtgccttcagaaatgttcggaataaatttccataatattagtataatgtctctctgtttgaattataaactgcgctgtttgcataataaaatctcttgtagctagg

SEQ ID NO: 42920 - protein, 135 aa, Arabidopsis thaliana
  peptide (1)..(135): Ceres Seq. ID no. 12422314
  misc_feature (44)..(134): Pfam Name: Herpesvirus latent membrane protein 1 (LMP1) Pfam Description: Herpesvirus latent membrane protein 1 (LMP1)
  misc_feature (4)..(124): Homolog of NCBI NO: 7488799 NR Description: dormancy-associated protein 2 - garden pea
  misc_feature (1)..(124): Homolog of NCBI NO: 81625 NR Description: glycine-rich protein 3 precursor - Arabidopsis
  misc_feature (1)..(124): Homolog of NCBI NO: 259447 NR Description: glycine-rich protein; atGRP [Arabidopsis thaliana]
  misc_feature (1)..(134): Homolog of NCBI NO: 15224548 NR Description: putative glycine-rich protein
  misc_feature (1)..(135): Homolog of NCBI NO: 9957568 NR Description: antimicrobial peptide shep-GRP [Capsella
  misc_feature (1)..(135): Homolog of NCBI NO: 15224547 NR Description: putative glycine-rich protein; protein id:
  misc_feature (42)..(135): Homolog of NCBI NO: 30678191 NR Description: glycine-rich protein [Arabidopsis thaliana]
  misc_feature (1)..(124): Homolog of NCBI NO: 30678191 NR Description: glycine-rich protein [Arabidopsis thaliana]
  misc_feature (1)..(135): Homolog of NCBI NO: 21536606 NR Description: putative glycine-rich protein [Arabidopsis
  misc_feature (1)..(135): Homolog of NCBI NO: 15224540 NR Description: putative glycine-rich protein
  misc_feature (26)..(26): Xaa is any aa, unknown or other
MASKALILLGLFSVLLVVSEVSAARXSGMVKPESEETVQPEGYGGGHGHGGHNGGGGHGLDGYGGGGGHYGGGGGHYGGGGGHYGGGGGHYGGGGGGHGGGGHYGGGGGGYGGGGGHHGGGGHGLNEPVQTKPGV

SEQ ID NO: 42921 - protein, 107 aa, Arabidopsis thaliana
  peptide (1)..(107): Ceres Seq. ID no. 12422315
  misc_feature (16)..(106): Pfam Name: Herpesvirus latent membrane protein 1 (LMP1) Pfam Description: Herpesvirus latent membrane protein 1 (LMP1)
  misc_feature (1)..(96): Homolog of NCBI NO: 7488799 NR Description: dormancy-associated protein 2 - garden pea
  misc_feature (1)..(96): Homolog of NCBI NO: 81625 NR Description: glycine-rich protein 3 precursor - Arabidopsis
  misc_feature (1)..(96): Homolog of NCBI NO: 259447 NR Description: glycine-rich protein; atGRP [Arabidopsis thaliana]
  misc_feature (1)..(106): Homolog of NCBI NO: 15224548 NR Description: putative glycine-rich protein
  misc_feature (1)..(107): Homolog of NCBI NO: 9957568 NR Description: antimicrobial peptide shep-GRP [Capsella
  misc_feature (1)..(107): Homolog of NCBI NO: 15224547 NR Description: putative glycine-rich protein; protein id:
  misc_feature (14)..(107): Homolog of NCBI NO: 30678191 NR Description: glycine-rich protein [Arabidopsis thaliana]
  misc_feature (1)..(96): Homolog of NCBI NO: 30678191 NR Description: glycine-rich protein [Arabidopsis thaliana]
  misc_feature (1)..(107): Homolog of NCBI NO: 21536606 NR Description: putative glycine-rich protein [Arabidopsis
  misc_feature (1)..(107): Homolog of NCBI NO: 15224540 NR Description: putative glycine-rich protein
MVKPESEETVQPEGYGGGHGHGGHNGGGGHGLDGYGGGGGHYGGGGGHYGGGGGHYGGGGGHYGGGGGGHGGGGHYGGGGGGYGGGGGHHGGGGHGLNEPVQTKPGV

SEQ ID NO: 42922 - protein, 82 aa, Arabidopsis thaliana
  peptide (1)..(82): Ceres Seq. ID no. 12422316
  misc_feature (7)..(80): Pfam Name: Prothymosin/parathymosin family Pfam Description: Prothymosin/parathymosin family
MAVATDMEDTTEEGATDLTDTEEVEDTMEEVEDTTEEVEDTTEEVEDTTEEVVEDTEVEDTTEVVEEDTEVEEDTTEEEATG

SEQ ID NO: 42923 - DNA, 1804 bp, Arabidopsis thaliana
  misc_feature (1)..(1804): Ceres Seq. ID no. 13494156
  misc_feature: MA Experiment ID: 108434 Result: Up-regulated in Transcription
  misc_feature: MA Experiment 108434 PARAMETER Experiment Name: At_Root_Tips_cDNA_P Parameter: Tissue Value: Root Tips
  misc_feature: MA Experiment ID: 108461 Result: Down-regulated in Transcription
  misc_feature: MA Experiment 108461 PARAMETER Experiment Name: At_Germinating_Seeds_cDNA_P Parameter: Age (day) Value: 1 vs. 0
  misc_feature: MA Experiment 108461 PARAMETER Experiment Name: At_Germinating_Seeds_cDNA_P Parameter: Tissue Value: Germinating Seeds
  misc_feature: MA Experiment ID: 108462 Result: Down-regulated in Transcription
  misc_feature: MA Experiment 108462 PARAMETER Experiment Name: At_Germinating_Seeds_cDNA_P Parameter: Age (day) Value: 2 vs. 0
  misc_feature: MA Experiment 108462 PARAMETER Experiment Name: At_Germinating_Seeds_cDNA_P Parameter: Tissue Value: Germinating Seeds
  misc_feature: MA Experiment ID: 108463 Result: Down-regulated in Transcription
  misc_feature: MA Experiment 108463 PARAMETER Experiment Name: At_Germinating_Seeds_cDNA_P Parameter: Age (day) Value: 3 vs. 0
  misc_feature: MA Experiment 108463 PARAMETER Experiment Name: At_Germinating_Seeds_cDNA_P Parameter: Tissue Value: Germinating Seeds
  misc_feature: MA Experiment ID: 108464 Result: Down-regulated in Transcription
  misc_feature: MA Experiment 108464 PARAMETER Experiment Name: At_Germinating_Seeds_cDNA_P Parameter: Age (day) Value: 4 vs. 0
  misc_feature: MA Experiment 108464 PARAMETER Experiment Name: At_Germinating_Seeds_cDNA_P Parameter: Tissue Value: Germinating Seeds
  misc_feature: MA Experiment ID: 108501 Result: Up-regulated in Transcription
  misc_feature: MA Experiment 108501 PARAMETER Experiment Name: At_ap2_floral_buds_cDNA_P Parameter: Plant Line Value: ap2 (Ler.)
  misc_feature: MA Experiment 108501 PARAMETER Experiment Name: At_ap2_floral_buds_cDNA_P Parameter: Tissue Value: Closed Flower
  misc_feature: MA Experiment ID: 108595 Result: Down-regulated in Transcription
  misc_feature: MA Experiment 108595 PARAMETER Experiment Name: At_Ler-pi_Ovule_cDNA_P Parameter: Plant Line Value: null
  misc_feature: MA Experiment ID: 20000180 Result: Down-regulated in Transcription
  misc_feature: MA Experiment 20000180 PARAMETER Experiment Name: At_Germinating_Seeds_P Parameter: Age (hr) Value: 24 vs. 0
  misc_feature: MA Experiment 20000180 PARAMETER Experiment Name: At_Germinating_Seeds_P Parameter: Tissue Value: Germinating Seeds
  misc_feature: MA Experiment ID: 20000227 Result: Up-regulated in Transcription
  misc_feature: MA Experiment 20000227 PARAMETER Experiment Name: At_Root-Tips-vs-Tops_P Parameter: Tissue Value: Root Tips vs. Root Tops
  misc_feature: MA Experiment ID: 20001557 Result: Up-regulated in Transcription
  misc_feature: MA Experiment 20001557 PARAMETER Experiment Name: At_Drought_Soil_Dry_P Parameter: Age (day) Value: 27
  misc_feature: MA Experiment 20001557 PARAMETER Experiment Name: At_Drought_Soil_Dry_P Parameter: Organism Value: A. thaliana
  misc_feature: MA Experiment 20001557 PARAMETER Experiment Name: At_Drought_Soil_Dry_P Parameter: Plant Line Value: WS
  misc_feature: MA Experiment 20001557 PARAMETER Experiment Name: At_Drought_Soil_Dry_P Parameter: Post Timepoint (hr) Value: 3
  misc_feature: MA Experiment 20001557 PARAMETER Experiment Name: At_Drought_Soil_Dry_P Parameter: Post-Treatment Value: Re-Water vs. No Drought
  misc_feature: MA Experiment 20001557 PARAMETER Experiment Name: At_Drought_Soil_Dry_P Parameter: Timepoint (day) Value: 13
  misc_feature: MA Experiment 20001557 PARAMETER Experiment Name: At_Drought_Soil_Dry_P Parameter: Treatment Value: Drought vs. No Drought
  misc_feature: MA Experiment ID: 20001558 Result: Up-regulated in Transcription
  misc_feature: MA Experiment 20001558 PARAMETER Experiment Name: At_Drought_Soil_Dry_P Parameter: Age (day) Value: 27
  misc_feature: MA Experiment 20001558 PARAMETER Experiment Name: At_Drought_Soil_Dry_P Parameter: Organism Value: A. thaliana
  misc_feature: MA Experiment 20001558 PARAMETER Experiment Name: At_Drought_Soil_Dry_P Parameter: Plant Line Value: WS
  misc_feature: MA Experiment 20001558 PARAMETER Experiment Name: At_Drought_Soil_Dry_P Parameter: Post Timepoint (hr) Value: 6
  misc_feature: MA Experiment 20001558 PARAMETER Experiment Name: At_Drought_Soil_Dry_P Parameter: Post-Treatment Value: Re-Water vs. No Drought
  misc_feature: MA Experiment 20001558 PARAMETER Experiment Name: At_Drought_Soil_Dry_P Parameter: Timepoint (day) Value: 13
  misc_feature: MA Experiment 20001558 PARAMETER Experiment Name: At_Drought_Soil_Dry_P Parameter: Treatment Value: Drought vs. No Drought
agtcacaaaaacctctgcaagaaccctaaagctaaaacctttttgcgatcaatcgaaagaaaacaaaaaatggggaaagttccgtcgtcgtttcgtagtatgccggcgaacttattggtcagaaaaacaacaccatctcctccagcgccgccgcgagattttcgcaacagaaccgccgtgggaggagattcagccaaacttccccagaatactcaagcccctcgcgagccctccttgaggaatccattcaagtcaccaaatctctcagacgctaaaagcctcttcaattcaatcgccgccacttcacgaatcccactcgatctcaagttccacaactctgttcttcaatcatacggttcaatcgccgtcgtcaacgatacggtgaaactctttcagcatattttgaaatcgcagcctaatttcaggccgggacgttcaacgttccttatcttgctttcacatgcttgtagagctcctgattcgtcgatttcgaatgttcatagagttcttaatctcatggttaataatggtttagagcctgatcaagtaactaccgatatcgcggtgaggtctctttgcgaaacgggtcgggttgatgaagctaaggatttgatgaaggagctcactgagaaacactctcctccggatacatatacttataactttctactgaagcatttgtgcaaatgcaaagatcttcatgttgtttatgagtttgttgatgagatgagagatgatttcgatgttaagccggatcttgttagcttcactatcttgattgataatgtttgtaactctaagaacttgagggaggcaatgtatctagttagtaagttaggtaatgctgggtttaagccggattgtttcctctataacacgattatgaaaggtttttgcacactgagtaaagggagtgaggcggttggtgtgtataagaaaatgaaggaagaaggtgttgagccagatcagattacctacaatactttgatatttggactgtcgaaagctggtagagttgaggaagctaggatgtatttgaaaactatggttgatgcggggtatgagccggatactgctacttacacatcactgatgaatggaatgtgtagaaaaggtgagtctttaggtgcgttgagtttgttagaagaaatggaagcaagagggtgtgctccaaatgattgtacttataatactttgcttcatggattgtgtaaagcaaggttgatggataaagggatggagttatatgaaatgatgaaatcaagtggtgtaaagcttgagagtaatggttatgctacacttgtgaggtctctggttaaaagtggcaaggtcgcagaggcttatgaagtgtttgattatgcagttgatagcaagagtttgtcagatgcttctgcgtactctacacttgaaactaccttgaaatggttgaaaaaagctaaagaacaaggcttggttccataaatggtatcctctagctgagctttaccgactttcttctttatgcaagtccatatttcatttttgaagtagtgttactccaaaagcaatgaatttgtttcgaaatatgctgttcgattcttaagggaccagcagtgatttataatagtaactttgttggtaatattattgtcacttgagatttctaaaggtttccttaacactcgagttattgattgggtgaaagttgttgctgtgtttctatatgaacagtcatattctattattctgtttgtatcagcttcttgccttcagtgtcatgtactctgttcttatgagctattgtgaataccataattggttattg

SEQ ID NO: 42924 - protein, 486 aa, Arabidopsis thaliana
  peptide (1)..(486): Ceres Seq. ID no. 13494157
  misc_feature (218)..(252): Pfam Name: PPR repeat Pfam Description: PPR repeat
  misc_feature (138)..(466): Homolog of NCBI NO: 34896698 NR Description: putative pentatricopeptide repeat protein
  misc_feature (86)..(469): Homolog of NCBI NO: 25518293 NR Description: hypothetical protein F13K23.2 - Arabidopsis
  misc_feature (104)..(450): Homolog of NCBI NO: 38567720 NR Description: B1358B12.18 [Oryza sativa (japonica
  misc_feature (55)..(483): Homolog of NCBI NO: 15218325 NR Description: pentatricopeptide (PPR) repeat-containing protein
  misc_feature (141)..(469): Homolog of NCBI NO: 9502388 NR Description: T12C24.15 [Arabidopsis thaliana]
  misc_feature (141)..(469): Homolog of NCBI NO: 18391414 NR Description: pentatricopeptide (PPR) repeat-containing protein
  misc_feature (84)..(466): Homolog of NCBI NO: 15231863 NR Description: pentatricopeptide (PPR) repeat-containing protein
  misc_feature (24)..(486): Homolog of NCBI NO: 7485272 NR Description: hypothetical protein A_TM017A05.11 - Arabidopsis
  misc_feature (24)..(486): Homolog of NCBI NO: 21553611 NR Description: unknown [Arabidopsis thaliana]
  misc_feature (24)..(486): Homolog of NCBI NO: 18398498 NR Description: pentatricopeptide (PPR) repeat-containing protein
SHKNLCKNPKAKTFLRSIERKQKMGKVPSSFRSMPANLLVRKTTPSPPAPPRDFRNRTAVGGDSAKLPQNTQAPREPSLRNPFKSPNLSDAKSLFNSIAATSRIPLDLKFHNSVLQSYGSIAVVNDTVKLFQHILKSQPNFRPGRSTFLILLSHACRAPDSSISNVHRVLNLMVNNGLEPDQVTTDIAVRSLCETGRVDEAKDLMKELTEKHSPPDTYTYNFLLKHLCKCKDLHVVYEFVDEMRDDFDVKPDLVSFTILIDNVCNSKNLREAMYLVSKLGNAGFKPDCFLYNTIMKGFCTLSKGSEAVGVYKKMKEEGVEPDQITYNTLIFGLSKAGRVEEARMYLKTMVDAGYEPDTATYTSLMNGMCRKGESLGALSLLEEMEARGCAPNDCTYNTLLHGLCKARLMDKGMELYEMMKSSGVKLESNGYATLVRSLVKSGKVAEAYEVFDYAVDSKSLSDASAYSTLETTLKWLKKAKEQGLVP

SEQ ID NO: 42925 - protein, 463 aa, Arabidopsis thaliana
  peptide (1)..(463): Ceres Seq. ID no. 13494158
  misc_feature (195)..(229): Pfam Name: PPR repeat Pfam Description: PPR repeat
  misc_feature (115)..(443): Homolog of NCBI NO: 34896698 NR Description: putative pentatricopeptide repeat protein
  misc_feature (63)..(446): Homolog of NCBI NO: 25518293 NR Description: hypothetical protein F13K23.2 - Arabidopsis
  misc_feature (81)..(427): Homolog of NCBI NO: 38567720 NR Description: B1358B12.18 [Oryza sativa (japonica
  misc_feature (32)..(460): Homolog of NCBI NO: 15218325 NR Description: pentatricopeptide (PPR) repeat-containing protein
  misc_feature (118)..(446): Homolog of NCBI NO: 9502388 NR Description: T12C24.15 [Arabidopsis thaliana]
  misc_feature (118)..(446): Homolog of NCBI NO: 18391414 NR Description: pentatricopeptide (PPR) repeat-containing protein
  misc_feature (61)..(443): Homolog of NCBI NO: 15231863 NR Description: pentatricopeptide (PPR) repeat-containing protein
  misc_feature (1)..(463): Homolog of NCBI NO: 7485272 NR Description: hypothetical protein A_TM017A05.11 - Arabidopsis
  misc_feature (1)..(463): Homolog of NCBI NO: 21553611 NR Description: unknown [Arabidopsis thaliana]
  misc_feature (1)..(463): Homolog of NCBI NO: 18398498 NR Description: pentatricopeptide (PPR) repeat-containing protein
MGKVPSSFRSMPANLLVRKTTPSPPAPPRDFRNRTAVGGDSAKLPQNTQAPREPSLRNPFKSPNLSDAKSLFNSIAATSRIPLDLKFHNSVLQSYGSIAVVNDTVKLFQHILKSQPNFRPGRSTFLILLSHACRAPDSSISNVHRVLNLMVNNGLEPDQVTTDIAVRSLCETGRVDEAKDLMKELTEKHSPPDTYTYNFLLKHLCKCKDLHVVYEFVDEMRDDFDVKPDLVSFTILIDNVCNSKNLREAMYLVSKLGNAGFKPDCFLYNTIMKGFCTLSKGSEAVGVYKKMKEEGVEPDQITYNTLIFGLSKAGRVEEARMYLKTMVDAGYEPDTATYTSLMNGMCRKGESLGALSLLEEMEARGCAPNDCTYNTLLHGLCKARLMDKGMELYEMMKSSGVKLESNGYATLVRSLVKSGKVAEAYEVFDYAVDSKSLSDASAYSTLETTLKWLKKAKEQGLVP

SEQ ID NO: 42926 - protein, 453 aa, Arabidopsis thaliana
  peptide (1)..(453): Ceres Seq. ID no. 13494159
  misc_feature (185)..(219): Pfam Name: PPR repeat Pfam Description: PPR repeat
  misc_feature (105)..(433): Homolog of NCBI NO: 34896698 NR Description: putative pentatricopeptide repeat protein
  misc_feature (53)..(436): Homolog of NCBI NO: 25518293 NR Description: hypothetical protein F13K23.2 - Arabidopsis
  misc_feature (71)..(417): Homolog of NCBI NO: 38567720 NR Description: B1358B12.18 [Oryza sativa (japonica
  misc_feature (22)..(450): Homolog of NCBI NO: 15218325 NR Description: pentatricopeptide (PPR) repeat-containing protein
  misc_feature (108)..(436): Homolog of NCBI NO: 9502388 NR Description: T12C24.15 [Arabidopsis thaliana]
  misc_feature (108)..(436): Homolog of NCBI NO: 18391414 NR Description: pentatricopeptide (PPR) repeat-containing protein
  misc_feature (51)..(433): Homolog of NCBI NO: 15231863 NR Description: pentatricopeptide (PPR) repeat-containing protein
  misc_feature (1)..(453): Homolog of NCBI NO: 7485272 NR Description: hypothetical protein A_TM017A05.11 - Arabidopsis
  misc_feature (1)..(453): Homolog of NCBI NO: 21553611 NR Description: unknown [Arabidopsis thaliana]
  misc_feature (1)..(453): Homolog of NCBI NO: 18398498 NR Description: pentatricopeptide (PPR) repeat-containing protein
MPANLLVRKTTPSPPAPPRDFRNRTAVGGDSAKLPQNTQAPREPSLRNPFKSPNLSDAKSLFNSIAATSRIPLDLKFHNSVLQSYGSIAVVNDTVKLFQHILKSQPNFRPGRSTFLILLSHACRAPDSSISNVHRVLNLMVNNGLEPDQVTTDIAVRSLCETGRVDEAKDLMKELTEKHSPPDTYTYNFLLKHLCKCKDLHVVYEFVDEMRDDFDVKPDLVSFTILIDNVCNSKNLREAMYLVSKLGNAGFKPDCFLYNTIMKGFCTLSKGSEAVGVYKKMKEEGVEPDQITYNTLIFGLSKAGRVEEARMYLKTMVDAGYEPDTATYTSLMNGMCRKGESLGALSLLEEMEARGCAPNDCTYNTLLHGLCKARLMDKGMELYEMMKSSGVKLESNGYATLVRSLVKSGKVAEAYEVFDYAVDSKSLSDASAYSTLETTLKWLKKAKEQGLVP

SEQ ID NO: 42927 - DNA, 1252 bp, Arabidopsis thaliana
  misc_feature (1)..(1252): Ceres Seq. ID no. 12604923
  misc_feature: MA Experiment ID: 108434 Result: Up-regulated in Transcription
  misc_feature: MA Experiment 108434 PARAMETER Experiment Name: At_Root_Tips_cDNA_P Parameter: Tissue Value: Root Tips
  misc_feature: MA Experiment ID: 108595 Result: Down-regulated in Transcription
  misc_feature: MA Experiment 108595 PARAMETER Experiment Name: At_Ler-pi_Ovule_cDNA_P Parameter: Plant Line Value: null
  misc_feature: MA Experiment ID: 20000185 Result: Up-regulated in Transcription
  misc_feature: MA Experiment 20000185 PARAMETER Experiment Name: At_Roots__P Parameter: Age (day) Value: 7 vs. 21
  misc_feature: MA Experiment 20000185 PARAMETER Experiment Name: At_Roots__P Parameter: Organism Value: A. thaliana
  misc_feature: MA Experiment 20000185 PARAMETER Experiment Name: At_Roots__P Parameter: Tissue Value: Roots vs. Whole Plant
  misc_feature: MA Experiment ID: 20001451 Result: Down-regulated in Transcription
  misc_feature: MA Experiment 20001451 PARAMETER Experiment Name: At_Far-red-induction_P Parameter: Age (day) Value: 7
  misc_feature: MA Experiment 20001451 PARAMETER Experiment Name: At_Far-red-induction_P Parameter: Light Value: Far-red vs. White
  misc_feature: MA Experiment 20001451 PARAMETER Experiment Name: At_Far-red-induction_P Parameter: Organism Value: A. thaliana
  misc_feature: MA Experiment 20001451 PARAMETER Experiment Name: At_Far-red-induction_P Parameter: Plant Line Value: Columbia
  misc_feature: MA Experiment 20001451 PARAMETER Experiment Name: At_Far-red-induction_P Parameter: Timepoint (hr) Value: 24
  misc_feature: MA Experiment 20001451 PARAMETER Experiment Name: At_Far-red-induction_P Parameter: Tissue Value: Whole Plant
tctctctctataatccgatctgagaaatttcgccggagctaggttttgttgtttaccgatcaatcctttaatcaatggcaatggctgttttccgtcgcgaagggaggcgtctcctcccttcaatcgccgctcgcccaatcgctgctatccgatctcctctctcttctgaccaggaggaaggacttcttggagttcgatctatctcaactcaagtggtgcgtaaccgcatgaagagtgttaagaacatccaaaagatcacaaaggcaatgaagatggttgctgcttccaagcttagagcagttcaaggccgagctgagaactcccgtggactttggcagccatttactgcacttctaggagataatcccagcattgatgtaaagaagagtgtggtggtcactctctcttctgacaagggtctctgtggtggaatcaactccactgtcgttaaagtgagcagggctctgtacaaattgaatgctggtcctgaaaaggaagttcagtttgttattgtcggagagaaagcaaaggctataatgtttcgtgactcaaagaacgacattgtcctctctgtaacagagctgaataagaacccactcaattatgctcaggtgtcagttctagctgatgacatcctgaagaacgttgaatttgatgctttgcgcattgtctacaacaagttccattcagttgtcgcatttctgccaactgtgtccactgttttgtcacctgagattattgagaaggagtctgaaattggaggaaaacttggcgagcttgactcatatgagattgaaggtggggaaacaaagggagaaatattgcagaatctggccgagttccaattctcttgtgtgatgttcaatgcggttctggagaatgcatgtagtgagatgggagcaagaatgtctgccatggacagctcaagcagaaacgcaggagaaatgctcgaccgtctcaccctcacatacaacaggactcgtcaagcttctattacaacagagcttattgagattatctctggagcttctgctcttgaagctgctaaataagcccatccgtgttagttctcttttcttcgctttgatatttacccccaccttgaaggagaagagtgtgttaaaattttactgaatcagtttcctttgctggcttcttgttgagacctaccaatgtttgctcaacgatttttaataaacatacctgtaatttccagcaggatttcgaataattgcattaacattttgttctg

SEQ ID NO: 42928 - protein, 325 aa, Arabidopsis thaliana; identical to SEQ ID NO: 36222
  peptide (1)..(325): Ceres Seq. ID no. 12604924
  misc_feature (43)..(321): Pfam Name: ATP synthase Pfam Description: ATP synthase
  misc_feature (40)..(322): Homolog of NCBI NO: 543875 NR Description: ATP synthase gamma chain, mitochondrial precursor
  misc_feature (40)..(321): Homolog of NCBI NO: 38512238 NR Description: Mitochondrial ATP synthase gamma-subunit [Danio
  misc_feature (44)..(325): Homolog of NCBI NO: 11466530 NR Description: ATP synthase F1 subunit alpha [Reclinomonas
  misc_feature (160)..(322): Homolog of NCBI NO: 7436157 NR Description: probable H+-transporting two-sector ATPase (EC
  misc_feature (46)..(179): Homolog of NCBI NO: 37532654 NR Description: putative ATP SYNTHASE GAMMA CHAIN, MITOCHONDRIAL
  misc_feature (180)..(322): Homolog of NCBI NO: 37532654 NR Description: putative ATP SYNTHASE GAMMA CHAIN, MITOCHONDRIAL
  misc_feature (1)..(322): Homolog of NCBI NO: 543867 NR Description: ATP synthase gamma chain, mitochondrial precursor
  misc_feature (3)..(325): Homolog of NCBI NO: 7436158 NR Description: probable H+-transporting two-sector ATPase (EC
  misc_feature (1)..(325): Homolog of NCBI NO: 22530902 NR Description: mitochondrial F1-ATPase, gamma subunit
  misc_feature (1)..(325): Homolog of NCBI NO: 15227257 NR Description: mitochondrial F1-ATPase, gamma subunit

SEQ ID NO: 42929 - protein, 323 aa, Arabidopsis thaliana; identical to SEQ ID NO: 36223
  peptide (1)..(323): Ceres Seq. ID no. 12604925
  misc_feature (41)..(319): Pfam Name: ATP synthase Pfam Description: ATP synthase
  misc_feature (38)..(320): Homolog of NCBI NO: 543875 NR Description: ATP synthase gamma chain, mitochondrial precursor
  misc_feature (38)..(319): Homolog of NCBI NO: 38512238 NR Description: Mitochondrial ATP synthase gamma-subunit [Danio
  misc_feature (42)..(323): Homolog of NCBI NO: 11466530 NR Description: ATP synthase F1 subunit alpha [Reclinomonas
  misc_feature (158)..(320): Homolog of NCBI NO: 7436157 NR Description: probable H+-transporting two-sector ATPase (EC
  misc_feature (44)..(177): Homolog of NCBI NO: 37532654 NR Description: putative ATP SYNTHASE GAMMA CHAIN, MITOCHONDRIAL
  misc_feature (178)..(320): Homolog of NCBI NO: 37532654 NR Description: putative ATP SYNTHASE GAMMA CHAIN, MITOCHONDRIAL
  misc_feature (1)..(320): Homolog of NCBI NO: 543867 NR Description: ATP synthase gamma chain, mitochondrial precursor
  misc_feature (1)..(323): Homolog of NCBI NO: 7436158 NR Description: probable H+-transporting two-sector ATPase (EC
  misc_feature (1)..(323): Homolog of NCBI NO: 22530902 NR Description: mitochondrial F1-ATPase, gamma subunit
  misc_feature (1)..(323): Homolog of NCBI NO: 15227257 NR Description: mitochondrial F1-ATPase, gamma subunit

SEQ ID NO: 42930 - protein, 274 aa, Arabidopsis thaliana; identical to SEQ ID NO: 36224
  peptide (1)..(274): Ceres Seq. ID no. 12604926
  misc_feature (1)..(270): Pfam Name: ATP synthase Pfam Description: ATP synthase
  misc_feature (1)..(271): Homolog of NCBI NO: 543875 NR Description: ATP synthase gamma chain, mitochondrial precursor
  misc_feature (1)..(270): Homolog of NCBI NO: 38512238 NR Description: Mitochondrial ATP synthase gamma-subunit [Danio
  misc_feature (1)..(274): Homolog of NCBI NO: 11466530 NR Description: ATP synthase F1 subunit alpha [Reclinomonas
  misc_feature (109)..(271): Homolog of NCBI NO: 7436157 NR Description: probable H+-transporting two-sector ATPase (EC
  misc_feature (1)..(128): Homolog of NCBI NO: 37532654 NR Description: putative ATP SYNTHASE GAMMA CHAIN, MITOCHONDRIAL
  misc_feature (129)..(271): Homolog of NCBI NO: 37532654 NR Description: putative ATP SYNTHASE GAMMA CHAIN, MITOCHONDRIAL
  misc_feature (1)..(271): Homolog of NCBI NO: 543867 NR Description: ATP synthase gamma chain, mitochondrial precursor
  misc_feature (1)..(274): Homolog of NCBI NO: 7436158 NR Description: probable H+-transporting two-sector ATPase (EC
  misc_feature (1)..(274): Homolog of NCBI NO: 22530902 NR Description: mitochondrial F1-ATPase, gamma subunit
  misc_feature (1)..(274): Homolog of NCBI NO: 15227257 NR Description: mitochondrial F1-ATPase, gamma subunit

SEQ ID NO: 42931 - DNA, 1134 bp, Arabidopsis thaliana
  misc_feature (1)..(1134): Ceres Seq. ID no. 12370937
  misc_feature: MA Experiment ID: 20000112 Result: Down-regulated in Transcription
  misc_feature: MA Experiment 20000112 PARAMETER Experiment Name: At_42deg_Heat_cDNA_P Parameter: Temperature (deg C) Value: 42 vs. 22
  misc_feature: MA Experiment 20000112 PARAMETER Experiment Name: At_42deg_Heat_cDNA_P Parameter: Timepoint (hr) Value: 2
  misc_feature: MA Experiment 20000112 PARAMETER Experiment Name: At_42deg_Heat_cDNA_P Parameter: Tissue Value: Aerial
gaactatctctttttgctttacaaagataggtgtgccaataataaaggagtgaatattataagttcaaaatgtagcacggattgtgatgctgaggtttcttcttcagggaataactcagacgaagacagcttatctattgttgaaaataaacagttgtttgggagagatagaaaagaacaagagactaaagtttgtttgtcccctccagaaacgcctacttacgcctttgctaaacagcggcatgcttttgcgggtgcgttggccggcataagcgtcagtctttgtcttcatccacttgataccgttaagacaatgattcagtcatgccgcttggaggagaagtctctatgcaatactgggagatcaattatatcagaaagagggttttctggactttatcgggggattgctagtaacattgcctcgtcagctcctatatctgccctctatacgttcacttatgaaaccgttaaaggaactctgcttcctcttgttcctaaggaatattgctccattacccactgtgtagctggtggttctgcaagcattgcaacttcttttatcttcacgccaagtgagcgcataaaacaacagatgcaagtcagttcacattatcgcaattgctggaccgcattggttggaatcatccaaaagggtggtctgctttctttatatgctggatggactgcagtgctatgtagaaatatcccgcactcaatcattaagttctatgtctatgaaaacatgaagcagatgttattaccatccccaggccctcgtggtgaaatggctcaacccacaacattacaaacactcacctgtggaggactagcgggatctgctgctgctttcttcacaaccccatttgatgtagtaaaaacaagattacaaactcagattcccggatctaggaaccaacatcctagtgtctatcaaactcttcaatcaatacgcaggcaagaaggtctgagaggactatacagaggcttgatccccagactagtgatgtacatgtcgcaaggagccatattctttacttcgtatgaattttacaagagtgtactctctctagaagcggcgcagcccaattcatcagctctctctggaacaaaacaaaagatggagatagccct

SEQ ID NO: 42932 - protein, 377 aa, Arabidopsis thaliana
  peptide (1)..(377): Ceres Seq. ID no. 12370938
  misc_feature (84)..(365): Homolog of NCBI NO: 3378495 NR Description: Mitochondrial carrier protein [Ribes nigrum]
  misc_feature (84)..(353): Homolog of NCBI NO: 15227718 NR Description: mitochondrial carrier protein family
  misc_feature (64)..(366): Homolog of NCBI NO: 18399114 NR Description: allinase, putative; protein id: At1g34065.1
  misc_feature (64)..(349): Homolog of NCBI NO: 34905862 NR Description: P0458E05.7 [Oryza sativa (japonica
  misc_feature (84)..(349): Homolog of NCBI NO: 31208625 NR Description: ENSANGP00000011068 [Anopheles gambiae]
  misc_feature (84)..(353): Homolog of NCBI NO: 15222270 NR Description: mitochondrial carrier protein family; protein id:
  misc_feature (84)..(356): Homolog of NCBI NO: 34394981 NR Description: mitochondrial aspartate-glutamate carrier
  misc_feature (31)..(373): Homolog of NCBI NO: 18420458 NR Description: mitochondrial carrier protein family
  misc_feature (329)..(376): Homolog of NCBI NO: 15233381 NR Description: mitochondrial carrier protein family; protein id:
  misc_feature (1)..(242): Homolog of NCBI NO: 15233381 NR Description: mitochondrial carrier protein family; protein id:
NYLFLLYKDRCANNKGVNIISSKCSTDCDAEVSSSGNNSDEDSLSIVENKQLFGRDRKEQETKVCLSPPETPTYAFAKQRHAFAGALAGISVSLCLHPLDTVKTMIQSCRLEEKSLCNTGRSIISERGFSGLYRGIASNIASSAPISALYTFTYETVKGTLLPLVPKEYCSITHCVAGGSASIATSFIFTPSERIKQQMQVSSHYRNCWTALVGIIQKGGLLSLYAGWTAVLCRNIPHSIIKFYVYENMKQMLLPSPGPRGEMAQPTTLQTLTCGGLAGSAAAFFTTPFDVVKTRLQTQIPGSRNQHPSVYQTLQSIRRQEGLRGLYRGLIPRLVMYMSQGAIFFTSYEFYKSVLSLEAAQPNSSALSGTKQKMEIA

SEQ ID NO: 42933 - protein, 273 aa, Arabidopsis thaliana
  peptide (1)..(273): Ceres Seq. ID no. 12370939
  misc_feature (1)..(261): Homolog of NCBI NO: 3378495 NR Description: Mitochondrial carrier protein [Ribes nigrum]
  misc_feature (1)..(249): Homolog of NCBI NO: 15227718 NR Description: mitochondrial carrier protein family
  misc_feature (1)..(262): Homolog of NCBI NO: 18399114 NR Description: allinase, putative; protein id: At1g34065.1
  misc_feature (1)..(245): Homolog of NCBI NO: 34905862 NR Description: P0458E05.7 [Oryza sativa (japonica
  misc_feature (1)..(245): Homolog of NCBI NO: 31208625 NR Description: ENSANGP00000011068 [Anopheles gambiae]
  misc_feature (1)..(249): Homolog of NCBI NO: 15222270 NR Description: mitochondrial carrier protein family; protein id:
  misc_feature (1)..(252): Homolog of NCBI NO: 34394981 NR Description: mitochondrial aspartate-glutamate carrier
  misc_feature (1)..(269): Homolog of NCBI NO: 18420458 NR Description: mitochondrial carrier protein family
  misc_feature (225)..(272): Homolog of NCBI NO: 15233381 NR Description: mitochondrial carrier protein family; protein id:
  misc_feature (1)..(138): Homolog of NCBI NO: 15233381 NR Description: mitochondrial carrier protein family; protein id:
MIQSCRLEEKSLCNTGRSIISERGFSGLYRGIASNIASSAPISALYTFTYETVKGTLLPLVPKEYCSITHCVAGGSASIATSFIFTPSERIKQQMQVSSHYRNCWTALVGIIQKGGLLSLYAGWTAVLCRNIPHSIIKFYVYENMKQMLLPSPGPRGEMAQPTTLQTLTCGGLAGSAAAFFTTPFDVVKTRLQTQIPGSRNQHPSVYQTLQSIRRQEGLRGLYRGLIPRLVMYMSQGAIFFTSYEFYKSVLSLEAAQPNSSALSGTKQKMEIA

SEQ ID NO: 42934 - DNA, 1516 bp, Arabidopsis thaliana
  misc_feature (1)..(1516): Ceres Seq. ID no. 13489432
  misc_feature: MA Experiment ID: 108435 Result: Down-regulated in Transcription
  misc_feature: MA Experiment 108435 PARAMETER Experiment Name: At_stm_Mutants_cDNA_P Parameter: Plant Line Value: wt Landsburg vs stm
  misc_feature: MA Experiment 108435 PARAMETER Experiment Name: At_stm_Mutants_cDNA_P Parameter: Tissue Value: Shoot Apical Meristem Region
  misc_feature: MA Experiment ID: 108463 Result: Down-regulated in Transcription
  misc_feature: MA Experiment 108463 PARAMETER Experiment Name: At_Germinating_Seeds_cDNA_P Parameter: Age (day) Value: 3 vs. 0
  misc_feature: MA Experiment 108463 PARAMETER Experiment Name: At_Germinating_Seeds_cDNA_P Parameter: Tissue Value: Germinating Seeds
  misc_feature: MA Experiment ID: 108464 Result: Down-regulated in Transcription
  misc_feature: MA Experiment 108464 PARAMETER Experiment Name: At_Germinating_Seeds_cDNA_P Parameter: Age (day) Value: 4 vs. 0
  misc_feature: MA Experiment 108464 PARAMETER Experiment Name: At_Germinating_Seeds_cDNA_P Parameter: Tissue Value: Germinating Seeds
  misc_feature: MA Experiment ID: 108577 Result: Down-regulated in Transcription
  misc_feature: MA Experiment 108577 PARAMETER Experiment Name: At_42deg_Heat_cDNA_P Parameter: Temperature (deg C) Value: 42 vs. 22
  misc_feature: MA Experiment 108577 PARAMETER Experiment Name: At_42deg_Heat_cDNA_P Parameter: Timepoint (hr) Value: 6
  misc_feature: MA Experiment 108577 PARAMETER Experiment Name: At_42deg_Heat_cDNA_P Parameter: Tissue Value: Aerial
  misc_feature: MA Experiment ID: 108579 Result: Up-regulated in Transcription
  misc_feature: MA Experiment 108579 PARAMETER Experiment Name: At_4deg_Cold_cDNA_P Parameter: Temperature (deg C) Value: 4 vs. 22
  misc_feature: MA Experiment 108579 PARAMETER Experiment Name: At_4deg_Cold_cDNA_P Parameter: Timepoint (hr) Value: 6
  misc_feature: MA Experiment 108579 PARAMETER Experiment Name: At_4deg_Cold_cDNA_P Parameter: Tissue Value: Aerial
  misc_feature: MA Experiment ID: 108585 Result: Down-regulated in Transcription
  misc_feature: MA Experiment 108585 PARAMETER Experiment Name: At_5mM_NaNP_cDNA_P Parameter: Timepoint (hr) Value: 6
  misc_feature: MA Experiment 108585 PARAMETER Experiment Name: At_5mM_NaNP_cDNA_P Parameter: Tissue Value: Aerial
  misc_feature: MA Experiment 108585 PARAMETER Experiment Name: At_5mM_NaNP_cDNA_P Parameter: Treatment Value: null
  misc_feature: MA Experiment ID: 108595 Result: Down-regulated in Transcription
  misc_feature: MA Experiment 108595 PARAMETER Experiment Name: At_Ler-pi_Ovule_cDNA_P Parameter: Plant Line Value: null
  misc_feature: MA Experiment ID: 108605 Result: Down-regulated in Transcription
  misc_feature: MA Experiment 108605 PARAMETER Experiment Name: At_100uM_ABA_cDNA_P Parameter: Timepoint (hr) Value: 6
  misc_feature: MA Experiment 108605 PARAMETER Experiment Name: At_100uM_ABA_cDNA_P Parameter: Tissue Value: Aerial
  misc_feature: MA Experiment 108605 PARAMETER Experiment Name: At_100uM_ABA_cDNA_P Parameter: Treatment Value: 100uM ABA vs. No Treatment
  misc_feature: MA Experiment ID: 108607 Result: Down-regulated in Transcription
  misc_feature: MA Experiment 108607 PARAMETER Experiment Name: At_100uM_ABA_cDNA_P Parameter: Timepoint (hr) Value: 4
  misc_feature: MA Experiment 108607 PARAMETER Experiment Name: At_100uM_ABA_cDNA_P Parameter: Tissue Value: Aerial
  misc_feature: MA Experiment 108607 PARAMETER Experiment Name: At_100uM_ABA_cDNA_P Parameter: Treatment Value: 100uM ABA vs. No Treatment
  misc_feature: MA Experiment ID: 108668 Result: Down-regulated in Transcription
  misc_feature: MA Experiment 108668 PARAMETER Experiment Name: At_2mM_SA_cDNA_P Parameter: Plant Line Value: WS
  misc_feature: MA Experiment 108668 PARAMETER Experiment Name: At_2mM_SA_cDNA_P Parameter: Timepoint (hr) Value: 6
  misc_feature: MA Experiment 108668 PARAMETER Experiment Name: At_2mM_SA_cDNA_P Parameter: Treatment Value: 2mM SA vs. No Treatment
  misc_feature: MA Experiment ID: 20000089 Result: Up-regulated in Transcription
  misc_feature: MA Experiment ID: 20000090 Result: Up-regulated in Transcription
  misc_feature: MA Experiment ID: 20000111 Result: Down-regulated in Transcription
  misc_feature: MA Experiment 20000111 PARAMETER Experiment Name: At_42deg_Heat_cDNA_P Parameter: Temperature (deg C) Value: 42 vs. 22
  misc_feature: MA Experiment 20000111 PARAMETER Experiment Name: At_42deg_Heat_cDNA_P Parameter: Timepoint (hr) Value: 6
  misc_feature: MA Experiment 20000111 PARAMETER Experiment Name: At_42deg_Heat_cDNA_P Parameter: Tissue Value: Aerial
  misc_feature: MA Experiment ID: 20000113 Result: Down-regulated in Transcription
  misc_feature: MA Experiment 20000113 PARAMETER Experiment Name: At_42deg_Heat_cDNA_P Parameter: Temperature (deg C) Value: 42 vs. 22
  misc_feature: MA Experiment 20000113 PARAMETER Experiment Name: At_42deg_Heat_cDNA_P Parameter: Timepoint (hr) Value: 8
  misc_feature: MA Experiment 20000113 PARAMETER Experiment Name: At_42deg_Heat_cDNA_P Parameter: Tissue Value: Aerial
  misc_feature: MA Experiment ID: 20000173 Result: Down-regulated in Transcription
  misc_feature: MA Experiment 20000173 PARAMETER Experiment Name: At_42deg_Heat_P Parameter: Age (day) Value: 14
  misc_feature: MA Experiment 20000173 PARAMETER Experiment Name: At_42deg_Heat_P Parameter: Organism Value: A. thaliana
  misc_feature: MA Experiment 20000173 PARAMETER Experiment Name: At_42deg_Heat_P Parameter: Plant Line Value: WS
  misc_feature: MA Experiment 20000173 PARAMETER Experiment Name: At_42deg_Heat_P Parameter: Temperature (deg C) Value: 42 vs. 22
  misc_feature: MA Experiment 20000173 PARAMETER Experiment Name: At_42deg_Heat_P Parameter: Timepoint (hr) Value: 6
  misc_feature: MA Experiment 20000173 PARAMETER Experiment Name: At_42deg_Heat_P Parameter: Tissue Value: Aerial
  misc_feature: MA Experiment ID: 20000182 Result: Down-regulated in Transcription
  misc_feature: MA Experiment 20000182 PARAMETER Experiment Name: At_2mM_SA_P Parameter: Age (day) Value: 14
  misc_feature: MA Experiment 20000182 PARAMETER Experiment Name: At_2mM_SA_P Parameter: Organism Value: A. thaliana
  misc_feature: MA Experiment 20000182 PARAMETER Experiment Name: At_2mM_SA_P Parameter: Plant Line Value: WS
  misc_feature: MA Experiment 20000182 PARAMETER Experiment Name: At_2mM_SA_P Parameter: Timepoint (hr) Value: 6
  misc_feature: MA Experiment 20000182 PARAMETER Experiment Name: At_2mM_SA_P Parameter: Tissue Value: Aerial
  misc_feature: MA Experiment 20000182 PARAMETER Experiment Name: At_2mM_SA_P Parameter: Treatment Value: 2mM SA vs. No Treatment
  misc_feature: MA Experiment ID: 20000185 Result: Down-regulated in Transcription
  misc_feature: MA Experiment 20000185 PARAMETER Experiment Name: At_Roots__P Parameter: Age (day) Value: 7 vs. 21
  misc_feature: MA Experiment 20000185 PARAMETER Experiment Name: At_Roots__P Parameter: Organism Value: A. thaliana
  misc_feature: MA Experiment 20000185 PARAMETER Experiment Name: At_Roots__P Parameter: Tissue Value: Roots vs. Whole Plant
  misc_feature: MA Experiment ID: 20000213 Result: Up-regulated in Transcription
  misc_feature: MA Experiment 20000213 PARAMETER Experiment Name: At_4deg_Cold_P Parameter: Timepoint (hr) Value: 2
  misc_feature: MA Experiment ID: 20000437 Result: Down-regulated in Transcription
  misc_feature: MA Experiment 20000437 PARAMETER Experiment Name: At_Drought_P Parameter: Age (day) Value: 8
  misc_feature: MA Experiment 20000437 PARAMETER Experiment Name: At_Drought_P Parameter: Organism Value: A. thaliana
  misc_feature: MA Experiment 20000437 PARAMETER Experiment Name: At_Drought_P Parameter: Plant Line Value: WS
  misc_feature: MA Experiment 20000437 PARAMETER Experiment Name: At_Drought_P Parameter: Timepoint (hr) Value: 24
  misc_feature: MA Experiment 20000437 PARAMETER Experiment Name: At_Drought_P Parameter: Tissue Value: Whole Plant
  misc_feature: MA Experiment 20000437 PARAMETER Experiment Name: At_Drought_P Parameter: Treatment Value: Drought vs. No Drought
  misc_feature: MA Experiment ID: 20000439 Result: Down-regulated in Transcription
  misc_feature: MA Experiment 20000439 PARAMETER Experiment Name: At_Roots__P Parameter: Age (day) Value: 14 vs. 21
  misc_feature: MA Experiment 20000439 PARAMETER Experiment Name: At_Roots__P Parameter: Organism Value: A. thaliana
  misc_feature: MA Experiment 20000439 PARAMETER Experiment Name: At_Roots__P Parameter: Tissue Value: Roots vs. Whole Plant
  misc_feature: MA Experiment ID: 20000441 Result: Down-regulated in Transcription
  misc_feature: MA Experiment 20000441 PARAMETER Experiment Name: At_1uM_BR-BRZ__P Parameter: Tissue Value: Shoot Apices
  misc_feature: MA Experiment 20000441 PARAMETER Experiment Name: At_1uM_BR-BRZ__P Parameter: Treatment Value: 1uM BR vs. No Treatment
  misc_feature: MA Experiment ID: 20000443 Result: Down-regulated in Transcription
  misc_feature: MA Experiment 20000443 PARAMETER Experiment Name: At_1uM_BR-BRZ__P Parameter: Tissue Value: Shoot Apices
  misc_feature: MA Experiment 20000443 PARAMETER Experiment Name: At_1uM_BR-BRZ__P Parameter: Treatment Value: 1uM BRZ vs. No Treatment
  misc_feature: MA Experiment ID: 20000495 Result: Down-regulated in Transcription
  misc_feature: MA Experiment 20000495 PARAMETER Experiment Name: At_Guard_Cells_P Parameter: Harvest Date Value: 8/2/2002
  misc_feature: MA Experiment 20000495 PARAMETER Experiment Name: At_Guard_Cells_P Parameter: Organism Value: A. thaliana
  misc_feature: MA Experiment 20000495 PARAMETER Experiment Name: At_Guard_Cells_P Parameter: Tissue Value: Guard Cells vs. Leaves
  misc_feature: MA Experiment ID: 20000527 Result: Up-regulated in Transcription
  misc_feature: MA Experiment 20000527 PARAMETER Experiment Name: At_10percent_PEG_P Parameter: Age (day) Value: 20
  misc_feature: MA Experiment 20000527 PARAMETER Experiment Name: At_10percent_PEG_P Parameter: Organism Value: A. thaliana
  misc_feature: MA Experiment 20000527 PARAMETER Experiment Name: At_10percent_PEG_P Parameter: Plant Line Value: WS
  misc_feature: MA Experiment 20000527 PARAMETER Experiment Name: At_10percent_PEG_P Parameter: Timepoint (day) Value: 20
  misc_feature: MA Experiment 20000527 PARAMETER Experiment Name: At_10percent_PEG_P Parameter: Tissue Value: Whole Plant
  misc_feature: MA Experiment 20000527 PARAMETER Experiment Name: At_10percent_PEG_P Parameter: Treatment Value: 10percent PEG vs. No Treatment
  misc_feature: MA Experiment ID: 20000794 Result: Down-regulated in Transcription
  misc_feature: MA Experiment 20000794 PARAMETER Experiment Name: At_Petals_P Parameter: Age (day) Value: 23-25 days
  misc_feature: MA Experiment 20000794 PARAMETER Experiment Name: At_Petals_P Parameter: Plant Line Value: WS
  misc_feature: MA Experiment 20000794 PARAMETER Experiment Name: At_Petals_P Parameter: Tissue Value: Petals vs. Whole plant
  misc_feature: MA Experiment ID: 20001247 Result: Down-regulated in Transcription
  misc_feature: MA Experiment 20001247 PARAMETER Experiment Name: At_Far-red-induction_P Parameter: Age (day) Value: 7
  misc_feature: MA Experiment 20001247 PARAMETER Experiment Name: At_Far-red-induction_P Parameter: Light Value: Far-red vs. White
  misc_feature: MA Experiment 20001247 PARAMETER Experiment Name: At_Far-red-induction_P Parameter: Organism Value: A. thaliana
  misc_feature: MA Experiment 20001247 PARAMETER Experiment Name: At_Far-red-induction_P Parameter: Plant Line Value: Columbia
  misc_feature: MA Experiment 20001247 PARAMETER Experiment Name: At_Far-red-induction_P Parameter: Timepoint (hr) Value: 1
  misc_feature: MA Experiment 20001247 PARAMETER Experiment Name: At_Far-red-induction_P Parameter: Tissue Value: Whole Plant
  misc_feature: MA Experiment ID: 20001458 Result: Up-regulated in Transcription
  misc_feature: MA Experiment 20001458 PARAMETER Experiment Name: At_50mM_NH4NO3_L-to-H_P Parameter: Age (day) Value: Undefined
  misc_feature: MA Experiment 20001458 PARAMETER Experiment Name: At_50mM_NH4NO3_L-to-H_P Parameter: Organism Value: Undefined
  misc_feature: MA Experiment 20001458 PARAMETER Experiment Name: At_50mM_NH4NO3_L-to-H_P Parameter: Plant Line Value: Undefined
  misc_feature: MA Experiment 20001458 PARAMETER Experiment Name: At_50mM_NH4NO3_L-to-H_P Parameter: Timepoint (hr) Value: 2
  misc_feature: MA Experiment 20001458 PARAMETER Experiment Name: At_50mM_NH4NO3_L-to-H_P Parameter: Tissue Value: Siliques
  misc_feature: MA Experiment 20001458 PARAMETER Experiment Name: At_50mM_NH4NO3_L-to-H_P Parameter: Treatment Value: 50mM NH4NO3 vs. 100mM Manitol
  misc_feature: MA Experiment ID: 20001905 Result: Down-regulated in Transcription
  misc_feature: MA Experiment 20001905 PARAMETER Experiment Name: At_Drought_Reproduction_P Parameter: Age (day) Value: 40
  misc_feature: MA Experiment 20001905 PARAMETER Experiment Name: At_Drought_Reproduction_P Parameter: Organism Value: A. thaliana
  misc_feature: MA Experiment 20001905 PARAMETER Experiment Name: At_Drought_Reproduction_P Parameter: Plant Line Value: WS
  misc_feature: MA Experiment 20001905 PARAMETER Experiment Name: At_Drought_Reproduction_P Parameter: Timepoint (day) Value: 10
  misc_feature: MA Experiment 20001905 PARAMETER Experiment Name: At_Drought_Reproduction_P Parameter: Tissue Value: Rosettes
  misc_feature: MA Experiment 20001905 PARAMETER Experiment Name: At_Drought_Reproduction_P Parameter: Treatment Value: Drought vs. No Drought
acacactctgcaacacctctcactcaaatttcattcaccatgttctctctcaaatccttaatctcctcacctttcacacaatccaccactcatggattattcaccaacccgattacccgacccgttaatccattaccacgtaccgtttccttcaccgttaccgcttccatgatacccaaaagatcctcagctaacatgattcccaaaaaccctccggcgaggcaacagctctaccaaccgttccgaccaccgtcatctcccattccaacccaattccgttcactcgactccgccggtaaaatcgaaatcctcgccggtcgaatggctctctggttcgaatacgcacctcttatctcttctctttacaccgatggtttcactcctccaaccatcgaagaactcaccggaatctcaagcatcgaacagaaccgtttaatcgtcggtgcgcaagttcgtgactcaattcttcaatctatccatgaaccggagctcatttctgcgttcgacaccggtggtgcagagcttctatacgaaattcgtctccttagcaccacgcagcgtgttgcagccgccacattcatcattgatcgtaatattgattcgaaaggagcacaggatttggcacgagccatcaaggattatcctaaccgtcgtggagacgttggatggttggattttgattacaacttaccaggagattgtctttcattcttgtattacaggcagagcagagagaataagaatccatcggatcagagaacctcgatgcttctacaagcattgggggttgcagaatcagaaaaggctaagaacaggttgaacacagagctatacggggacaaggaagcagagaaggagaaggagaagaagaagaaggaagaggaagtcaaagctattcggattccagtggtgaggcttaagtttggagaagtagcagaagcgacctcggtggtagttttaccggtttgtaaagcagaggaaggggaaaagaagattcttgaagctccaatggagatcatagccggaggggattttaaggtggttgaggcggagaaaggatggaagagatgggtagtgcttccgtcgtggaacccagtggcagccattgggaaaggcggtgtggcggtttctttcagggatgatagaaaagtgctgccttgggatggaaaggaggagcctttactggtagtggccgatagggtgaggaatgttgtggaggctgatgacgggtattatctcgtggtggctgagaacggacttaagctagagaaaggatcagatttgaaggcgagagaggtgaaggagagtttagggatggttgttttggtggtgaggccgccaagagaagatgatgatgattggcagacaagtcatcagaactgggactgaattaatagaatcaatactcatatgctgtaactgattacggagtcatcatggtcatgtaaaaattttggataaaggtggtaactttttgttctaagatacaatcagaaacagagcaatatttttctcc

SEQ ID NO: 42935 - protein, 462 aa, Arabidopsis thaliana
  peptide (1)..(462): Ceres Seq. ID no. 13489433
  misc_feature (83)..(385): Homolog of NCBI NO: 16331838 NR Description: unknown protein [Synechocystis sp. PCC 6803]
  misc_feature (101)..(273): Homolog of NCBI NO: 22299309 NR Description: ORF_ID:tlr1766~hypothetical protein
  misc_feature (89)..(285): Homolog of NCBI NO: 37521728 NR Description: hypothetical protein glr2159 [Gloeobacter
  misc_feature (83)..(273): Homolog of NCBI NO: 17232742 NR Description: hypothetical protein [Nostoc sp. PCC 7120]
  misc_feature (83)..(369): Homolog of NCBI NO: 23042669 NR Description: hypothetical protein [Trichodesmium erythraeum
  misc_feature (83)..(369): Homolog of NCBI NO: 23127437 NR Description: hypothetical protein [Nostoc punctiforme]
  misc_feature (25)..(462): Homolog of NCBI NO: 37534826 NR Description: unknown protein [Oryza sativa (japonica
  misc_feature (14)..(462): Homolog of NCBI NO: 15241839 NR Description: expressed protein [Arabidopsis thaliana]
  misc_feature (14)..(462): Homolog of NCBI NO: 18396920 NR Description: expressed protein [Arabidopsis thaliana]
THSATPLTQISFTMFSLKSLISSPFTQSTTHGLFTNPITRPVNPLPRTVSFTVTASMIPKRSSANMIPKNPPARQQLYQPFRPPSSPIPTQFRSLDSAGKIEILAGRMALWFEYAPLISSLYTDGFTPPTIEELTGISSIEQNRLIVGAQVRDSILQSIHEPELISAFDTGGAELLYEIRLLSTTQRVAAATFIIDRNIDSKGAQDLARAIKDYPNRRGDVGWLDFDYNLPGDCLSFLYYRQSRENKNPSDQRTSMLLQALGVAESEKAKNRLNTELYGDKEAEKEKEKKKKEEEVKAIRIPVVRLKFGEVAEATSVVVLPVCKAEEGEKKILEAPMEIIAGGDFKVVEAEKGWKRWVVLPSWNPVAAIGKGGVAVSFRDDRKVLPWDGKEEPLLVVADRVRNVVEADDGYYLVVAENGLKLEKGSDLKAREVKESLGMVVLVVRPPREDDDDWQTSHQNWD

SEQ ID NO: 42936 - protein, 449 aa, Arabidopsis thaliana
  peptide (1)..(449): Ceres Seq. ID no. 13489434
  misc_feature (70)..(372): Homolog of NCBI NO: 16331838 NR Description: unknown protein [Synechocystis sp. PCC 6803]
  misc_feature (88)..(260): Homolog of NCBI NO: 22299309 NR Description: ORF_ID:tlr1766~hypothetical protein
  misc_feature (76)..(272): Homolog of NCBI NO: 37521728 NR Description: hypothetical protein glr2159 [Gloeobacter
  misc_feature (70)..(260): Homolog of NCBI NO: 17232742 NR Description: hypothetical protein [Nostoc sp. PCC 7120]
  misc_feature (70)..(356): Homolog of NCBI NO: 23042669 NR Description: hypothetical protein [Trichodesmium erythraeum
  misc_feature (70)..(356): Homolog of NCBI NO: 23127437 NR Description: hypothetical protein [Nostoc punctiforme]
  misc_feature (12)..(449): Homolog of NCBI NO: 37534826 NR Description: unknown protein [Oryza sativa (japonica
  misc_feature (1)..(449): Homolog of NCBI NO: 15241839 NR Description: expressed protein [Arabidopsis thaliana]
  misc_feature (1)..(449): Homolog of NCBI NO: 18396920 NR Description: expressed protein [Arabidopsis thaliana]
MFSLKSLISSPFTQSTTHGLFTNPITRPVNPLPRTVSFTVTASMIPKRSSANMIPKNPPARQQLYQPFRPPSSPIPTQFRSLDSAGKIEILAGRMALWFEYAPLISSLYTDGFTPPTIEELTGISSIEQNRLIVGAQVRDSILQSIHEPELISAFDTGGAELLYEIRLLSTTQRVAAATFIIDRNIDSKGAQDLARAIKDYPNRRGDVGWLDFDYNLPGDCLSFLYYRQSRENKNPSDQRTSMLLQALGVAESEKAKNRLNTELYGDKEAEKEKEKKKKEEEVKAIRIPVVRLKFGEVAEATSVVVLPVCKAEEGEKKILEAPMEIIAGGDFKVVEAEKGWKRWVVLPSWNPVAAIGKGGVAVSFRDDRKVLPWDGKEEPLLVVADRVRNVVEADDGYYLVVAENGLKLEKGSDLKAREVKESLGMVVLVVRPPREDDDDWQTSHQNWD

SEQ ID NO: 42937 - protein, 406 aa, Arabidopsis thaliana
  peptide (1)..(406): Ceres Seq. ID no. 13489435
  misc_feature (27)..(329): Homolog of NCBI NO: 16331838 NR Description: unknown protein [Synechocystis sp. PCC 6803]
  misc_feature (45)..(217): Homolog of NCBI NO: 22299309 NR Description: ORF_ID:tlr1766~hypothetical protein
  misc_feature (33)..(229): Homolog of NCBI NO: 37521728 NR Description: hypothetical protein glr2159 [Gloeobacter
  misc_feature (27)..(217): Homolog of NCBI NO: 17232742 NR Description: hypothetical protein [Nostoc sp. PCC 7120]
  misc_feature (27)..(313): Homolog of NCBI NO: 23042669 NR Description: hypothetical protein [Trichodesmium erythraeum
  misc_feature (27)..(313): Homolog of NCBI NO: 23127437 NR Description: hypothetical protein [Nostoc punctiforme]
  misc_feature (1)..(406): Homolog of NCBI NO: 37534826 NR Description: unknown protein [Oryza sativa (japonica
  misc_feature (1)..(406): Homolog of NCBI NO: 15241839 NR Description: expressed protein [Arabidopsis thaliana]
  misc_feature (1)..(406): Homolog of NCBI NO: 18396920 NR Description: expressed protein [Arabidopsis thaliana]
MIPKRSSANMIPKNPPARQQLYQPFRPPSSPIPTQFRSLDSAGKIEILAGRMALWFEYAPLISSLYTDGFTPPTIEELTGISSIEQNRLIVGAQVRDSILQSIHEPELISAFDTGGAELLYEIRLLSTTQRVAAATFIIDRNIDSKGAQDLARAIKDYPNRRGDVGWLDFDYNLPGDCLSFLYYRQSRENKNPSDQRTSMLLQALGVAESEKAKNRLNTELYGDKEAEKEKEKKKKEEEVKAIRIPVVRLKFGEVAEATSVVVLPVCKAEEGEKKILEAPMEIIAGGDFKVVEAEKGWKRWVVLPSWNPVAAIGKGGVAVSFRDDRKVLPWDGKEEPLLVVADRVRNVVEADDGYYLVVAENGLKLEKGSDLKAREVKESLGMVVLVVRPPREDDDDWQTSHQNWD

SEQ ID NO: 42938 - DNA, 1638 bp, Arabidopsis thaliana
  misc_feature (1)..(1638): Ceres Seq. ID no. 12326934
  misc_feature: MA Experiment ID: 108434 Result: Down-regulated in Transcription
  misc_feature: MA Experiment 108434 PARAMETER Experiment Name: At_Root_Tips_cDNA_P Parameter: Tissue Value: Root Tips
  misc_feature: MA Experiment ID: 108474 Result: Down-regulated in Transcription
  misc_feature: MA Experiment 108474 PARAMETER Experiment Name: At_Drought_Flowers_cDNA_P Parameter: Timepoint (hr) Value: null
  misc_feature: MA Experiment 108474 PARAMETER Experiment Name: At_Drought_Flowers_cDNA_P Parameter: Treatment Value: Drought vs. No Drought
  misc_feature: MA Experiment ID: 108501 Result: Up-regulated in Transcription
  misc_feature: MA Experiment 108501 PARAMETER Experiment Name: At_ap2_floral_buds_cDNA_P Parameter: Plant Line Value: ap2 (Ler.)
  misc_feature: MA Experiment 108501 PARAMETER Experiment Name: At_ap2_floral_buds_cDNA_P Parameter: Tissue Value: Closed Flower
  misc_feature: MA Experiment ID: 108572 Result: Down-regulated in Transcription
  misc_feature: MA Experiment 108572 PARAMETER Experiment Name: At_Drought_cDNA_P Parameter: Timepoint (hr) Value: 1
  misc_feature: MA Experiment 108572 PARAMETER Experiment Name: At_Drought_cDNA_P Parameter: Tissue Value: Aerial
  misc_feature: MA Experiment 108572 PARAMETER Experiment Name: At_Drought_cDNA_P Parameter: Treatment Value: Drought vs. No Drought
  misc_feature: MA Experiment ID: 108573 Result: Down-regulated in Transcription
  misc_feature: MA Experiment 108573 PARAMETER Experiment Name: At_Drought_cDNA_P Parameter: Timepoint (hr) Value: 6
  misc_feature: MA Experiment 108573 PARAMETER Experiment Name: At_Drought_cDNA_P Parameter: Tissue Value: Aerial
  misc_feature: MA Experiment 108573 PARAMETER Experiment Name: At_Drought_cDNA_P Parameter: Treatment Value: Drought vs. No Drought
  misc_feature: MA Experiment ID: 108577 Result: Down-regulated in Transcription
  misc_feature: MA Experiment 108577 PARAMETER Experiment Name: At_42deg_Heat_cDNA_P Parameter: Temperature (deg C) Value: 42 vs. 22
  misc_feature: MA Experiment 108577 PARAMETER Experiment Name: At_42deg_Heat_cDNA_P Parameter: Timepoint (hr) Value: 6
  misc_feature: MA Experiment 108577 PARAMETER Experiment Name: At_42deg_Heat_cDNA_P Parameter: Tissue Value: Aerial
  misc_feature: MA Experiment ID: 108579 Result: Up-regulated in Transcription
  misc_feature: MA Experiment 108579 PARAMETER Experiment Name: At_4deg_Cold_cDNA_P Parameter: Temperature (deg C) Value: 4 vs. 22
  misc_feature: MA Experiment 108579 PARAMETER Experiment Name: At_4deg_Cold_cDNA_P Parameter: Timepoint (hr) Value: 6
  misc_feature: MA Experiment 108579 PARAMETER Experiment Name: At_4deg_Cold_cDNA_P Parameter: Tissue Value: Aerial
  misc_feature: MA Experiment ID: 108595 Result: Up-regulated in Transcription
  misc_feature: MA Experiment 108595 PARAMETER Experiment Name: At_Ler-pi_Ovule_cDNA_P Parameter: Plant Line Value: null
  misc_feature: MA Experiment ID: 20000173 Result: Down-regulated in Transcription
  misc_feature: MA Experiment 20000173 PARAMETER Experiment Name: At_42deg_Heat_P Parameter: Age (day) Value: 14
  misc_feature: MA Experiment 20000173 PARAMETER Experiment Name: At_42deg_Heat_P Parameter: Organism Value: A. thaliana
  misc_feature: MA Experiment 20000173 PARAMETER Experiment Name: At_42deg_Heat_P Parameter: Plant Line Value: WS
  misc_feature: MA Experiment 20000173 PARAMETER Experiment Name: At_42deg_Heat_P Parameter: Temperature (deg C) Value: 42 vs. 22
  misc_feature: MA Experiment 20000173 PARAMETER Experiment Name: At_42deg_Heat_P Parameter: Timepoint (hr) Value: 6
  misc_feature: MA Experiment 20000173 PARAMETER Experiment Name: At_42deg_Heat_P Parameter: Tissue Value: Aerial
  misc_feature: MA Experiment ID: 20000185 Result: Up-regulated in Transcription
  misc_feature: MA Experiment 20000185 PARAMETER Experiment Name: At_Roots__P Parameter: Age (day) Value: 7 vs. 21
  misc_feature: MA Experiment 20000185 PARAMETER Experiment Name: At_Roots__P Parameter: Organism Value: A. thaliana
  misc_feature: MA Experiment 20000185 PARAMETER Experiment Name: At_Roots__P Parameter: Tissue Value: Roots vs. Whole Plant
  misc_feature: MA Experiment ID: 20000213 Result: Up-regulated in Transcription
  misc_feature: MA Experiment 20000213 PARAMETER Experiment Name: At_4deg_Cold_P Parameter: Timepoint (hr) Value: 2
  misc_feature: MA Experiment ID: 20000227 Result: Down-regulated in Transcription
  misc_feature: MA Experiment 20000227 PARAMETER Experiment Name: At_Root-Tips-vs-Tops_P Parameter: Tissue Value: Root Tips vs. Root Tops
  misc_feature: MA Experiment ID: 20000234 Result: Up-regulated in Transcription
  misc_feature: MA Experiment 20000234 PARAMETER Experiment Name: At_Siliques_P Parameter: Age (day) Value: 21
  misc_feature: MA Experiment 20000234 PARAMETER Experiment Name: At_Siliques_P Parameter: Organism Value: A. thaliana
  misc_feature: MA Experiment 20000234 PARAMETER Experiment Name: At_Siliques_P Parameter: Plant Line Value: WS
  misc_feature: MA Experiment 20000234 PARAMETER Experiment Name: At_Siliques_P Parameter: Tissue Value: Less Than 5mm Siliques vs. Whole Plant
  misc_feature: MA Experiment ID: 20000264 Result: Up-regulated in Transcription
  misc_feature: MA Experiment 20000264 PARAMETER Experiment Name: At_Open_Flower_P Parameter: Age (day) Value: 21
  misc_feature: MA Experiment 20000264 PARAMETER Experiment Name: At_Open_Flower_P Parameter: Plant Line Value: WS
  misc_feature: MA Experiment 20000264 PARAMETER Experiment Name: At_Open_Flower_P Parameter: Tissue Value: Open Flower vs. Whole Plant
  misc_feature: MA Experiment ID: 20000265 Result: Up-regulated in Transcription
  misc_feature: MA Experiment 20000265 PARAMETER Experiment Name: At_Open_Flower_P Parameter: Age (day) Value: 21
  misc_feature: MA Experiment 20000265 PARAMETER Experiment Name: At_Open_Flower_P Parameter: Plant Line Value: WS
  misc_feature: MA Experiment 20000265 PARAMETER Experiment Name: At_Open_Flower_P Parameter: Tissue Value: Closed Flower vs. Whole Plant
  misc_feature: MA Experiment ID: 20000267 Result: Up-regulated in Transcription
  misc_feature: MA Experiment 20000267 PARAMETER Experiment Name: At_Drought_P Parameter: Age (day) Value: 7
  misc_feature: MA Experiment 20000267 PARAMETER Experiment Name: At_Drought_P Parameter: Organism Value: A. thaliana
  misc_feature: MA Experiment 20000267 PARAMETER Experiment Name: At_Drought_P Parameter: Plant Line Value: WS
  misc_feature: MA Experiment 20000267 PARAMETER Experiment Name: At_Drought_P Parameter: Timepoint (hr) Value: 6
  misc_feature: MA Experiment 20000267 PARAMETER Experiment Name: At_Drought_P Parameter: Tissue Value: Whole Plant
  misc_feature: MA Experiment 20000267 PARAMETER Experiment Name: At_Drought_P Parameter: Treatment Value: Drought vs. No Drought
  misc_feature: MA Experiment ID: 20000268 Result: Up-regulated in Transcription
  misc_feature: MA Experiment 20000268 PARAMETER Experiment Name: At_100mM_NaCl__P Parameter: Age (day) Value: 14
  misc_feature: MA Experiment 20000268 PARAMETER Experiment Name: At_100mM_NaCl__P Parameter: Organism Value: A. thaliana
  misc_feature: MA Experiment 20000268 PARAMETER Experiment Name: At_100mM_NaCl__P Parameter: Plant Line Value: WS
  misc_feature: MA Experiment 20000268 PARAMETER Experiment Name: At_100mM_NaCl__P Parameter: Timepoint (hr) Value: 6
  misc_feature: MA Experiment 20000268 PARAMETER Experiment Name: At_100mM_NaCl__P Parameter: Tissue Value: Whole Plant
  misc_feature: MA Experiment 20000268 PARAMETER Experiment Name: At_100mM_NaCl__P Parameter: Treatment Value: 100mM NaCl vs. No Treatment
  misc_feature: MA Experiment ID: 20000286 Result: Up-regulated in Transcription
  misc_feature: MA Experiment 20000286 PARAMETER Experiment Name: At_Open_Flower_P Parameter: Age (day) Value: 21
  misc_feature: MA Experiment 20000286 PARAMETER Experiment Name: At_Open_Flower_P Parameter: Plant Line Value: WS
  misc_feature: MA Experiment 20000286 PARAMETER Experiment Name: At_Open_Flower_P Parameter: Tissue Value: Half Open vs. Whole Plant
  misc_feature: MA Experiment ID: 20000436 Result: Up-regulated in Transcription
  misc_feature: MA Experiment 20000436 PARAMETER Experiment Name: At_Drought_P Parameter: Age (day) Value: 7
  misc_feature: MA Experiment 20000436 PARAMETER Experiment Name: At_Drought_P Parameter: Organism Value: A. thaliana
  misc_feature: MA Experiment 20000436 PARAMETER Experiment Name: At_Drought_P Parameter: Plant Line Value: WS
  misc_feature: MA Experiment 20000436 PARAMETER Experiment Name: At_Drought_P Parameter: Timepoint (hr) Value: 12
  misc_feature: MA Experiment 20000436 PARAMETER Experiment Name: At_Drought_P Parameter: Tissue Value: Whole Plant
  misc_feature: MA Experiment 20000436 PARAMETER Experiment Name: At_Drought_P Parameter: Treatment Value: Drought vs. No Drought
  misc_feature: MA Experiment ID: 20000437 Result: Up-regulated in Transcription
  misc_feature: MA Experiment 20000437 PARAMETER Experiment Name: At_Drought_P Parameter: Age (day) Value: 8
  misc_feature: MA Experiment 20000437 PARAMETER Experiment Name: At_Drought_P Parameter: Organism Value: A. thaliana
  misc_feature: MA Experiment 20000437 PARAMETER Experiment Name: At_Drought_P Parameter: Plant Line Value: WS
  misc_feature: MA Experiment 20000437 PARAMETER Experiment Name: At_Drought_P Parameter: Timepoint (hr) Value: 24
  misc_feature: MA Experiment 20000437 PARAMETER Experiment Name: At_Drought_P Parameter: Tissue Value: Whole Plant
  misc_feature: MA Experiment 20000437 PARAMETER Experiment Name: At_Drought_P Parameter: Treatment Value: Drought vs. No Drought
  misc_feature: MA Experiment ID: 20000439 Result: Up-regulated in Transcription
  misc_feature: MA Experiment 20000439 PARAMETER Experiment Name: At_Roots__P Parameter: Age (day) Value: 14 vs. 21
  misc_feature: MA Experiment 20000439 PARAMETER Experiment Name: At_Roots__P Parameter: Organism Value: A. thaliana
  misc_feature: MA Experiment 20000439 PARAMETER Experiment Name: At_Roots__P Parameter: Tissue Value: Roots vs. Whole Plant
  misc_feature: MA Experiment ID: 20000456 Result: Up-regulated in Transcription
  misc_feature: MA Experiment 20000456 PARAMETER Experiment Name: At_100uM_BA_P Parameter: Age (day) Value: 14
  misc_feature: MA Experiment 20000456 PARAMETER Experiment Name: At_100uM_BA_P Parameter: Organism Value: A. thaliana
  misc_feature: MA Experiment 20000456 PARAMETER Experiment Name: At_100uM_BA_P Parameter: Plant Line Value: WS
  misc_feature: MA Experiment 20000456 PARAMETER Experiment Name: At_100uM_BA_P Parameter: Timepoint (hr) Value: 6
  misc_feature: MA Experiment 20000456 PARAMETER Experiment Name: At_100uM_BA_P Parameter: Tissue Value: Aerial
  misc_feature: MA Experiment 20000456 PARAMETER Experiment Name: At_100uM_BA_P Parameter: Treatment Value: 100uM BA vs. No Treatment
  misc_feature: MA Experiment ID: 20000573 Result: Down-regulated in Transcription
  misc_feature: MA Experiment 20000573 PARAMETER Experiment Name: At_100uM_ABA_Mutants__P Parameter: Organism Value: A. thaliana
  misc_feature: MA Experiment 20000573 PARAMETER Experiment Name: At_100uM_ABA_Mutants__P Parameter: Plant Line Value: CS22 vs. Ler wt
  misc_feature: MA Experiment 20000573 PARAMETER Experiment Name: At_100uM_ABA_Mutants__P Parameter: Timepoint (hr) Value: N/A
  misc_feature: MA Experiment 20000573 PARAMETER Experiment Name: At_100uM_ABA_Mutants__P Parameter: Tissue Value: Whole Plant
  misc_feature: MA Experiment 20000573 PARAMETER Experiment Name: At_100uM_ABA_Mutants__P Parameter: Treatment Value: None
  misc_feature: MA Experiment ID: 20000709 Result: Down-regulated in Transcription
  misc_feature: MA Experiment 20000709 PARAMETER Experiment Name: At_15mM_NH4NO3_L-to-H_P Parameter: Age (hr) Value: 14
  misc_feature: MA Experiment 20000709 PARAMETER Experiment Name: At_15mM_NH4NO3_L-to-H_P Parameter: Organism Value: A. thaliana
  misc_feature: MA Experiment 20000709 PARAMETER Experiment Name: At_15mM_NH4NO3_L-to-H_P Parameter: Plant Line Value: WS
  misc_feature: MA Experiment 20000709 PARAMETER Experiment Name: At_15mM_NH4NO3_L-to-H_P Parameter: Timepoint (hr) Value: 4
  misc_feature: MA Experiment 20000709 PARAMETER Experiment Name: At_15mM_NH4NO3_L-to-H_P Parameter: Tissue Value: Aerial
  misc_feature: MA Experiment 20000709 PARAMETER Experiment Name: At_15mM_NH4NO3_L-to-H_P Parameter: Treatment Value: 15mM NH4NO3 vs. 30mM Mannitol
  misc_feature: MA Experiment ID: 20000794 Result: Up-regulated in Transcription
  misc_feature: MA Experiment 20000794 PARAMETER Experiment Name: At_Petals_P Parameter: Age (day) Value: 23-25 days
  misc_feature: MA Experiment 20000794 PARAMETER Experiment Name: At_Petals_P Parameter: Plant Line Value: WS
  misc_feature: MA Experiment 20000794 PARAMETER Experiment Name: At_Petals_P Parameter: Tissue Value: Petals vs. Whole plant
  misc_feature: MA Experiment ID: 20001247 Result: Down-regulated in Transcription
  misc_feature: MA Experiment 20001247 PARAMETER Experiment Name: At_Far-red-induction_P Parameter: Age (day) Value: 7
  misc_feature: MA Experiment 20001247 PARAMETER Experiment Name: At_Far-red-induction_P Parameter: Light Value: Far-red vs. White
  misc_feature: MA Experiment 20001247 PARAMETER Experiment Name: At_Far-red-induction_P Parameter: Organism Value: A. thaliana
  misc_feature: MA Experiment 20001247 PARAMETER Experiment Name: At_Far-red-induction_P Parameter: Plant Line Value: Columbia
  misc_feature: MA Experiment 20001247 PARAMETER Experiment Name: At_Far-red-induction_P Parameter: Timepoint (hr) Value: 1
  misc_feature: MA Experiment 20001247 PARAMETER Experiment Name: At_Far-red-induction_P Parameter: Tissue Value: Whole Plant
  misc_feature: MA Experiment ID: 20001248 Result: Down-regulated in Transcription
  misc_feature: MA Experiment 20001248 PARAMETER Experiment Name: At_Far-red-induction_P Parameter: Age (day) Value: 7
  misc_feature: MA Experiment 20001248 PARAMETER Experiment Name: At_Far-red-induction_P Parameter: Light Value: Far-red vs. White
  misc_feature: MA Experiment 20001248 PARAMETER Experiment Name: At_Far-red-induction_P Parameter: Organism Value: A. thaliana
  misc_feature: MA Experiment 20001248 PARAMETER Experiment Name: At_Far-red-induction_P Parameter: Plant Line Value: Columbia
  misc_feature: MA Experiment 20001248 PARAMETER Experiment Name: At_Far-red-induction_P Parameter: Timepoint (hr) Value: 4
  misc_feature: MA Experiment 20001248 PARAMETER Experiment Name: At_Far-red-induction_P Parameter: Tissue Value: Whole Plant
  misc_feature: MA Experiment ID: 20001504 Result: Up-regulated in Transcription
  misc_feature: MA Experiment 20001504 PARAMETER Experiment Name: At_Far-red-enriched_P Parameter: Age (day) Value: 10
  misc_feature: MA Experiment 20001504 PARAMETER Experiment Name: At_Far-red-enriched_P Parameter: Light Value: Far-red enriched vs. White
  misc_feature: MA Experiment 20001504 PARAMETER Experiment Name: At_Far-red-enriched_P Parameter: Organism Value: A. thaliana
  misc_feature: MA Experiment 20001504 PARAMETER Experiment Name: At_Far-red-enriched_P Parameter: Plant Line Value: Columbia
  misc_feature: MA Experiment 20001504 PARAMETER Experiment Name: At_Far-red-enriched_P Parameter: Timepoint (day) Value: 6
  misc_feature: MA Experiment 20001504 PARAMETER Experiment Name: At_Far-red-enriched_P Parameter: Tissue Value: Whole Plant
  misc_feature: MA Experiment ID: 20001557 Result: Up-regulated in Transcription
  misc_feature: MA Experiment 20001557 PARAMETER Experiment Name: At_Drought_Soil_Dry_P Parameter: Age (day) Value: 27
  misc_feature: MA Experiment 20001557 PARAMETER Experiment Name: At_Drought_Soil_Dry_P Parameter: Organism Value: A. thaliana
  misc_feature: MA Experiment 20001557 PARAMETER Experiment Name: At_Drought_Soil_Dry_P Parameter: Plant Line Value: WS
  misc_feature: MA Experiment 20001557 PARAMETER Experiment Name: At_Drought_Soil_Dry_P Parameter: Post Timepoint (hr) Value: 3
  misc_feature: MA Experiment 20001557 PARAMETER Experiment Name: At_Drought_Soil_Dry_P Parameter: Post-Treatment Value: Re-Water vs. No Drought
  misc_feature: MA Experiment 20001557 PARAMETER Experiment Name: At_Drought_Soil_Dry_P Parameter: Timepoint (day) Value: 13
  misc_feature: MA Experiment 20001557 PARAMETER Experiment Name: At_Drought_Soil_Dry_P Parameter: Treatment Value: Drought vs. No Drought
  misc_feature: MA Experiment ID: 20001771 Result: Up-regulated in Transcription
  misc_feature: MA Experiment 20001771 PARAMETER Experiment Name: At_Far-red-enriched-adult_P Parameter: Age (day) Value: 28
  misc_feature: MA Experiment 20001771 PARAMETER Experiment Name: At_Far-red-enriched-adult_P Parameter: Light Value: Far-red enriched vs. White
  misc_feature: MA Experiment 20001771 PARAMETER Experiment Name: At_Far-red-enriched-adult_P Parameter: Organism Value: A. thaliana
  misc_feature: MA Experiment 20001771 PARAMETER Experiment Name: At_Far-red-enriched-adult_P Parameter: Plant Line Value: Columbia
  misc_feature: MA Experiment 20001771 PARAMETER Experiment Name: At_Far-red-enriched-adult_P Parameter: Timepoint (hr) Value: 16
  misc_feature: MA Experiment 20001771 PARAMETER Experiment Name: At_Far-red-enriched-adult_P Parameter: Tissue Value: Aerial
aaactaagaaacacccaagaaaacaaacaaactttttaaaaaatgtccgtttcaacacatcaccaccacgtggtcctcttcccttacatgtcaaaaggccacatcatccctctcctccaattcggtcgtctcctcctccgtcaccaccgcaaagaaccaaccatcaccgtcaccgttttcaccactcccaagaaccaacctttcatctcagacttcctctcggacacgccggagatcaaagtcatctctctccctttcccggaaaacatcaccggaatccctcccggcgtcgagaacaccgaaaggctcccatccatgtcacttttcgtccccttcacacgcgccacgaagcttctccaacctttcttcgaagaaacactcaagactcttccaaaagtttcgttcatggtctctgatggattcctctggtggacatcggagtctgcagctaagttcaacattccaagatttgtctcctacggcatgaactcttactccgccgctgtctccatctctgttttcaaacacgaactctttaccgaaccggaaagtaaatctgataccgaaccggtcactgtaccagactttccatggatcaagatcaagaagtgtgatttcgaccatggcactaccgagccggaagaatcaggtgcagccctcgaactatctatggaccaaatcaagtcgaccaccacaagccatgggtttttagtcaatagcttctacgagctcgagtcagcatttgttgattacaacaacaactctggtgataaaccaaagtcgtggtgtgttgggccactgtgtttgacagatcctcctaaacaggggagtgctaaaccggcttggattcattggttggatcagaagcgagaggaagggcgtccggttttgtacgtggcgtttggaacgcaggcagagatatcgaacaagcagcttatggaactagctttcggcttggaagattcaaaggtgaactttctgtgggtcacaagaaaagatgtggaggagattattggagaaggattcaacgatagaataagagagagtgggatgatagtgagagattgagtggaccaatgggagatattgtcacatgaaagtgtcaaaggatttttgagccattgtgggtggaactcagcacaagagagcatatgtgtcggggtcccattgttggcttggccgatgatggccgagcaaccgctcaatgcgaagatggttgtggaggagataaaggtgggagtaagagttgaaacggaagatgggagtgtaaaaggttttgtgacaagagaagaactaagtggaaagattaaagaactgatggaaggagaaacggggaaaaccgcaagaaagaatgtaaaagaatattcgaaaatggcgaaagcggctttggtcgaagggactggttcgtcatggaagaatttagatatgattcttaaggagttatgtaagagtagagattcaaacggtgctagtgagtagagtgattaagaattgaataactgaaccagtctatacgtttactaattaaaacaagtattttcaatatacgtcttgtgtaagtcttggtttagttgaaaagatgttatcgattacaataactgactctctcatttgataatactgactatgattaatatt

SEQ ID NO: 42939 - protein, 341 aa, Arabidopsis thaliana
  peptide (1)..(341): Ceres Seq. ID no. 12326935
  misc_feature (9)..(341): Homolog of NCBI NO: 30725312 NR Description: At2g15490 [Arabidopsis thaliana]
  misc_feature (9)..(341): Homolog of NCBI NO: 15228034 NR Description: putative glucosyl transferase
  misc_feature (9)..(341): Homolog of NCBI NO: 21742764 NR Description: OSJNBa0023J03.6 [Oryza sativa (japonica
  misc_feature (105)..(341): Homolog of NCBI NO: 26449653 NR Description: putative glucosyl transferase [Arabidopsis
  misc_feature (105)..(341): Homolog of NCBI NO: 30681693 NR Description: glycosyltransferase family [Arabidopsis thaliana]
  misc_feature (9)..(341): Homolog of NCBI NO: 4914344 NR Description: F14N23.30 [Arabidopsis thaliana]
  misc_feature (1)..(310): Homolog of NCBI NO: 30679790 NR Description: glycosyltransferase family [Arabidopsis thaliana]
  misc_feature (1)..(341): Homolog of NCBI NO: 15241515 NR Description: glucosyltransferase -like protein; protein id:
  misc_feature (1)..(341): Homolog of NCBI NO: 30679796 NR Description: glycosyltransferase family [Arabidopsis thaliana]
  misc_feature (1)..(341): Homolog of NCBI NO: 21553613 NR Description: putative glucosyltransferase [Arabidopsis
MSVSTHHHHVVLFPYMSKGHIIPLLQFGRLLLRHHRKEPTITVTVFTTPKNQPFISDFLSDTPEIKVISLPFPENITGIPPGVENTERLPSMSLFVPFTRATKLLQPFFEETLKTLPKVSFMVSDGFLWWTSESAAKFNIPRFVSYGMNSYSAAVSISVFKHELFTEPESKSDTEPVTVPDFPWIKIKKCDFDHGTTEPEESGAALELSMDQIKSTTTSHGFLVNSFYELESAFVDYNNNSGDKPKSWCVGPLCLTDPPKQGSAKPAWIHWLDQKREEGRPVLYVAFGTQAEISNKQLMELAFGLEDSKVNFLWVTRKDVEEIIGEGFNDRIRESGMIVRD

SEQ ID NO: 42940 - protein, 326 aa, Arabidopsis thaliana
  peptide (1)..(326): Ceres Seq. ID no. 12326936
  misc_feature (1)..(326): Homolog of NCBI NO: 30725312 NR Description: At2g15490 [Arabidopsis thaliana]
  misc_feature (1)..(326): Homolog of NCBI NO: 15228034 NR Description: putative glucosyl transferase
  misc_feature (1)..(326): Homolog of NCBI NO: 21742764 NR Description: OSJNBa0023J03.6 [Oryza sativa (japonica
  misc_feature (90)..(326): Homolog of NCBI NO: 26449653 NR Description: putative glucosyl transferase [Arabidopsis
  misc_feature (90)..(326): Homolog of NCBI NO: 30681693 NR Description: glycosyltransferase family [Arabidopsis thaliana]
  misc_feature (1)..(326): Homolog of NCBI NO: 4914344 NR Description: F14N23.30 [Arabidopsis thaliana]
  misc_feature (1)..(295): Homolog of NCBI NO: 30679790 NR Description: glycosyltransferase family [Arabidopsis thaliana]
  misc_feature (1)..(326): Homolog of NCBI NO: 15241515 NR Description: glucosyltransferase -like protein; protein id:
  misc_feature (1)..(326): Homolog of NCBI NO: 30679796 NR Description: glycosyltransferase family [Arabidopsis thaliana]
  misc_feature (1)..(326): Homolog of NCBI NO: 21553613 NR Description: putative glucosyltransferase [Arabidopsis
MSKGHIIPLLQFGRLLLRHHRKEPTITVTVFTTPKNQPFISDFLSDTPEIKVISLPFPENITGIPPGVENTERLPSMSLFVPFTRATKLLQPFFEETLKTLPKVSFMVSDGFLWWTSESAAKFNIPRFVSYGMNSYSAAVSISVFKHELFTEPESKSDTEPVTVPDFPWIKIKKCDFDHGTTEPEESGAALELSMDQIKSTTTSHGFLVNSFYELESAFVDYNNNSGDKPKSWCVGPLCLTDPPKQGSAKPAWIHWLDQKREEGRPVLYVAFGTQAEISNKQLMELAFGLEDSKVNFLWVTRKDVEEIIGEGFNDRIRESGMIVRD

SEQ ID NO: 42941 - protein, 250 aa, Arabidopsis thaliana
  peptide (1)..(250): Ceres Seq. ID no. 12326937
  misc_feature (1)..(250): Homolog of NCBI NO: 30725312 NR Description: At2g15490 [Arabidopsis thaliana]
  misc_feature (1)..(250): Homolog of NCBI NO: 15228034 NR Description: putative glucosyl transferase
  misc_feature (1)..(250): Homolog of NCBI NO: 21742764 NR Description: OSJNBa0023J03.6 [Oryza sativa (japonica
  misc_feature (14)..(250): Homolog of NCBI NO: 26449653 NR Description: putative glucosyl transferase [Arabidopsis
  misc_feature (14)..(250): Homolog of NCBI NO: 30681693 NR Description: glycosyltransferase family [Arabidopsis thaliana]
  misc_feature (1)..(250): Homolog of NCBI NO: 4914344 NR Description: F14N23.30 [Arabidopsis thaliana]
  misc_feature (1)..(219): Homolog of NCBI NO: 30679790 NR Description: glycosyltransferase family [Arabidopsis thaliana]
  misc_feature (1)..(250): Homolog of NCBI NO: 15241515 NR Description: glucosyltransferase -like protein; protein id:
  misc_feature (1)..(250): Homolog of NCBI NO: 30679796 NR Description: glycosyltransferase family [Arabidopsis thaliana]
  misc_feature (1)..(250): Homolog of NCBI NO: 21553613 NR Description: putative glucosyltransferase [Arabidopsis
MSLFVPFTRATKLLQPFFEETLKTLPKVSFMVSDGFLWWTSESAAKFNIPRFVSYGMNSYSAAVSISVFKHELFTEPESKSDTEPVTVPDFPWIKIKKCDFDHGTTEPEESGAALELSMDQIKSTTTSHGFLVNSFYELESAFVDYNNNSGDKPKSWCVGPLCLTDPPKQGSAKPAWIHWLDQKREEGRPVLYVAFGTQAEISNKQLMELAFGLEDSKVNFLWVTRKDVEEIIGEGFNDRIRESGMIVRD

SEQ ID NO: 42942 - DNA, 1671 bp, Arabidopsis thaliana
  misc_feature (1)..(1671): Ceres Seq. ID no. 12489603
  misc_feature: MA Experiment ID: 108434 Result: Up-regulated in Transcription
  misc_feature: MA Experiment 108434 PARAMETER Experiment Name: At_Root_Tips_cDNA_P Parameter: Tissue Value: Root Tips
  misc_feature: MA Experiment ID: 108595 Result: Down-regulated in Transcription
  misc_feature: MA Experiment 108595 PARAMETER Experiment Name: At_Ler-pi_Ovule_cDNA_P Parameter: Plant Line Value: null
  misc_feature: MA Experiment ID: 20000111 Result: Down-regulated in Transcription
  misc_feature: MA Experiment 20000111 PARAMETER Experiment Name: At_42deg_Heat_cDNA_P Parameter: Temperature (deg C) Value: 42 vs. 22
  misc_feature: MA Experiment 20000111 PARAMETER Experiment Name: At_42deg_Heat_cDNA_P Parameter: Timepoint (hr) Value: 6
  misc_feature: MA Experiment 20000111 PARAMETER Experiment Name: At_42deg_Heat_cDNA_P Parameter: Tissue Value: Aerial
  misc_feature: MA Experiment ID: 20000113 Result: Down-regulated in Transcription
  misc_feature: MA Experiment 20000113 PARAMETER Experiment Name: At_42deg_Heat_cDNA_P Parameter: Temperature (deg C) Value: 42 vs. 22
  misc_feature: MA Experiment 20000113 PARAMETER Experiment Name: At_42deg_Heat_cDNA_P Parameter: Timepoint (hr) Value: 8
  misc_feature: MA Experiment 20000113 PARAMETER Experiment Name: At_42deg_Heat_cDNA_P Parameter: Tissue Value: Aerial
  misc_feature: MA Experiment ID: 20000173 Result: Down-regulated in Transcription
  misc_feature: MA Experiment 20000173 PARAMETER Experiment Name: At_42deg_Heat_P Parameter: Age (day) Value: 14
  misc_feature: MA Experiment 20000173 PARAMETER Experiment Name: At_42deg_Heat_P Parameter: Organism Value: A. thaliana
  misc_feature: MA Experiment 20000173 PARAMETER Experiment Name: At_42deg_Heat_P Parameter: Plant Line Value: WS
  misc_feature: MA Experiment 20000173 PARAMETER Experiment Name: At_42deg_Heat_P Parameter: Temperature (deg C) Value: 42 vs. 22
  misc_feature: MA Experiment 20000173 PARAMETER Experiment Name: At_42deg_Heat_P Parameter: Timepoint (hr) Value: 6
  misc_feature: MA Experiment 20000173 PARAMETER Experiment Name: At_42deg_Heat_P Parameter: Tissue Value: Aerial
  misc_feature: MA Experiment ID: 20000179 Result: Up-regulated in Transcription
  misc_feature: MA Experiment 20000179 PARAMETER Experiment Name: At_Germinating_Seeds_P Parameter: Age (hr) Value: 6 vs. 0
  misc_feature: MA Experiment 20000179 PARAMETER Experiment Name: At_Germinating_Seeds_P Parameter: Tissue Value: Germinating Seeds
  misc_feature: MA Experiment ID: 20000180 Result: Up-regulated in Transcription
  misc_feature: MA Experiment 20000180 PARAMETER Experiment Name: At_Germinating_Seeds_P Parameter: Age (hr) Value: 24 vs. 0
  misc_feature: MA Experiment 20000180 PARAMETER Experiment Name: At_Germinating_Seeds_P Parameter: Tissue Value: Germinating Seeds
  misc_feature: MA Experiment ID: 20001911 Result: Down-regulated in Transcription
  misc_feature: MA Experiment 20001911 PARAMETER Experiment Name: At_Drought_Reproduction_P Parameter: Age (day) Value: 40
  misc_feature: MA Experiment 20001911 PARAMETER Experiment Name: At_Drought_Reproduction_P Parameter: Organism Value: A. thaliana
  misc_feature: MA Experiment 20001911 PARAMETER Experiment Name: At_Drought_Reproduction_P Parameter: Plant Line Value: WS
  misc_feature: MA Experiment 20001911 PARAMETER Experiment Name: At_Drought_Reproduction_P Parameter: Timepoint (day) Value: 10
  misc_feature: MA Experiment 20001911 PARAMETER Experiment Name: At_Drought_Reproduction_P Parameter: Tissue Value: Flowers
  misc_feature: MA Experiment 20001911 PARAMETER Experiment Name: At_Drought_Reproduction_P Parameter: Treatment Value: Drought vs. No Drought
agattcaaacttgttcatcgaaattttgcttgaagattcgaatcgagaagtccgtggaagaggaagaagaagaagatgtctgtgcaagagtatttagacaagcatatgctttctcggaaaatcgaagacgccgttaatgccgccgtaagggctaaaacctcagatcccgttctcttcatcgctaatcatctgaagaaagctgtatcatctgtgataacgaaggttaaagcacgacagatccttgacagcagaggaattccaacagttgaagttgatctgcacacgaacaaaggcgtttttcgtgcttctgttcccagtggtgattcttctggaacgtatgaagctattgagctacgtgatggagacaaaggaatgtatcttggaaacagtgtggctaaagctgttaagaacataaatgaaaaaatttctgaggcgttgattggtatggacccaaaacttcagggtcagatagatcaggctatgatagatttggataaaactgaaaagaagagtgaacttggtgctaatgctatacttgctgtgtcaattgcggcatgcaaggctggagctgctgagaaagaggtccctttgtgcaagcatctttctgatcttagtggcagagcaaacatggtgttacctgtacctgcgttcactgttttgagtggtgggaagcatgcttcgaatacttttgccattcaggaaattatgattctcccaattggagcaagtagatttgaggaggccctgcaatggggatctgagacatatcatcatttaaaggctgtcatttcagaaaagaatggtggtttgggatgtaatgttggtgaagatggtggtcttgctccagatatctcgagcctcaaggaaggtttggagcttgtaaaagaagctatcaaccgaacagggtacaatgataagataaagatagccattgatattgccgccactaatttttgtttaggtaccaagtatgatttagatatcaagtctccaaataaatctgggcaaaatttcaagtcagcggaagatatgatagatatgtacaaagaaatttgtaatgattatccaattgtgtctatagaggacccttttgacaaggaggactgggaacacaccaagtatttttcgagtcttggaatatgtcaggtggtaggtgacgatttgttgatgtcaaattcaaaacgagttgagcgtgccatacaggagtcttcttgtaatgctcttcttctcaaggtgaatcagattggtacagtaacagaagccattgaagtagtgaaaatggcaagggatgcccagtggggtgtggtgacatctcatagatgtggagaaacagaggactctttcatctctgacttatctgtgggtctcgcaacaggtgtgattaaagctggtgctccttgcagaggagaacgtactatgaagtataaccagttgctacggatagaggaagagcttggggatcaagcagtgtatgctggagaagattggaagctatctctctaaacaaaatgcacatgtgatattaattgttacacttctcgtcttacttcattgttctcgagtctatttctcacgcagacaaattcttgtgtcttgaaagttcaaattttttgttgtttttgccaaatttaagaacaaacagaagtaaagagtgttaaacatgttttttac

SEQ ID NO: 42943 - protein, 475 aa, Arabidopsis thaliana
  peptide (1)..(475): Ceres Seq. ID no. 12489604
  misc_feature (184)..(475): Pfam Name: Enolase, C-terminal TIM barrel domain Pfam Description: Enolase, C-terminal TIM barrel domain
  misc_feature (47)..(472): Homolog of NCBI NO: 28277353 NR Description: Similar to enolase 3, beta muscle [Xenopus laevis]
  misc_feature (46)..(472): Homolog of NCBI NO: 3023702 NR Description: Enolase (2-phosphoglycerate dehydratase)
  misc_feature (50)..(472): Homolog of NCBI NO: 7436883 NR Description: phosphopyruvate hydratase (EC 4.2.1.11) - common
  misc_feature (47)..(472): Homolog of NCBI NO: 6015090 NR Description: Gamma enolase (2-phospho-D-glycerate hydro-lyase)
  misc_feature (47)..(472): Homolog of NCBI NO: 37589645 NR Description: Unknown (protein for MGC:73056) [Danio rerio]
  misc_feature (47)..(472): Homolog of NCBI NO: 8919731 NR Description: enolase [Spinacia oleracea]
  misc_feature (47)..(472): Homolog of NCBI NO: 37590349 NR Description: Unknown (protein for MGC:73152) [Danio rerio]
  misc_feature (2)..(472): Homolog of NCBI NO: 29650775 NR Description: enolase [Dunaliella salina]
  misc_feature (1)..(472): Homolog of NCBI NO: 34902014 NR Description: unknown protein [Oryza sativa (japonica
  misc_feature (1)..(475): Homolog of NCBI NO: 15227561 NR Description: putative enolase (2-phospho-D-glycerate
MSVQEYLDKHMLSRKIEDAVNAAVRAKTSDPVLFIANHLKKAVSSVITKVKARQILDSRGIPTVEVDLHTNKGVFRASVPSGDSSGTYEAIELRDGDKGMYLGNSVAKAVKNINEKISEALIGMDPKLQGQIDQAMIDLDKTEKKSELGANAILAVSIAACKAGAAEKEVPLCKHLSDLSGRANMVLPVPAFTVLSGGKHASNTFAIQEIMILPIGASRFEEALQWGSETYHHLKAVISEKNGGLGCNVGEDGGLAPDISSLKEGLELVKEAINRTGYNDKIKIAIDIAATNFCLGTKYDLDIKSPNKSGQNFKSAEDMIDMYKEICNDYPIVSIEDPFDKEDWEHTKYFSSLGICQVVGDDLLMSNSKRVERAIQESSCNALLLKVNQIGTVTEAIEVVKMARDAQWGVVTSHRCGETEDSFISDLSVGLATGVIKAGAPCRGERTMKYNQLLRIEEELGDQAVYAGEDWKLSL

SEQ ID NO: 42944 - protein, 465 aa, Arabidopsis thaliana
  peptide (1)..(465): Ceres Seq. ID no. 12489605
  misc_feature (174)..(465): Pfam Name: Enolase, C-terminal TIM barrel domain Pfam Description: Enolase, C-terminal TIM barrel domain
  misc_feature (37)..(462): Homolog of NCBI NO: 28277353 NR Description: Similar to enolase 3, beta muscle [Xenopus laevis]
  misc_feature (36)..(462): Homolog of NCBI NO: 3023702 NR Description: Enolase (2-phosphoglycerate dehydratase)
  misc_feature (40)..(462): Homolog of NCBI NO: 7436883 NR Description: phosphopyruvate hydratase (EC 4.2.1.11) - common
  misc_feature (37)..(462): Homolog of NCBI NO: 6015090 NR Description: Gamma enolase (2-phospho-D-glycerate hydro-lyase)
  misc_feature (37)..(462): Homolog of NCBI NO: 37589645 NR Description: Unknown (protein for MGC:73056) [Danio rerio]
  misc_feature (37)..(462): Homolog of NCBI NO: 8919731 NR Description: enolase [Spinacia oleracea]
  misc_feature (37)..(462): Homolog of NCBI NO: 37590349 NR Description: Unknown (protein for MGC:73152) [Danio rerio]
  misc_feature (1)..(462): Homolog of NCBI NO: 29650775 NR Description: enolase [Dunaliella salina]
  misc_feature (1)..(462): Homolog of NCBI NO: 34902014 NR Description: unknown protein [Oryza sativa (japonica
  misc_feature (1)..(465): Homolog of NCBI NO: 15227561 NR Description: putative enolase (2-phospho-D-glycerate
MLSRKIEDAVNAAVRAKTSDPVLFIANHLKKAVSSVITKVKARQILDSRGIPTVEVDLHTNKGVFRASVPSGDSSGTYEAIELRDGDKGMYLGNSVAKAVKNINEKISEALIGMDPKLQGQIDQAMIDLDKTEKKSELGANAILAVSIAACKAGAAEKEVPLCKHLSDLSGRANMVLPVPAFTVLSGGKHASNTFAIQEIMILPIGASRFEEALQWGSETYHHLKAVISEKNGGLGCNVGEDGGLAPDISSLKEGLELVKEAINRTGYNDKIKIAIDIAATNFCLGTKYDLDIKSPNKSGQNFKSAEDMIDMYKEICNDYPIVSIEDPFDKEDWEHTKYFSSLGICQVVGDDLLMSNSKRVERAIQESSCNALLLKVNQIGTVTEAIEVVKMARDAQWGVVTSHRCGETEDSFISDLSVGLATGVIKAGAPCRGERTMKYNQLLRIEEELGDQAVYAGEDWKLSL

SEQ ID NO: 42945 - protein, 376 aa, Arabidopsis thaliana
  peptide (1)..(376): Ceres Seq. ID no. 12489606
  misc_feature (85)..(376): Pfam Name: Enolase, C-terminal TIM barrel domain Pfam Description: Enolase, C-terminal TIM barrel domain
  misc_feature (1)..(373): Homolog of NCBI NO: 28277353 NR Description: Similar to enolase 3, beta muscle [Xenopus laevis]
  misc_feature (1)..(373): Homolog of NCBI NO: 3023702 NR Description: Enolase (2-phosphoglycerate dehydratase)
  misc_feature (1)..(373): Homolog of NCBI NO: 7436883 NR Description: phosphopyruvate hydratase (EC 4.2.1.11) - common
  misc_feature (1)..(373): Homolog of NCBI NO: 6015090 NR Description: Gamma enolase (2-phospho-D-glycerate hydro-lyase)
  misc_feature (1)..(373): Homolog of NCBI NO: 37589645 NR Description: Unknown (protein for MGC:73056) [Danio rerio]
  misc_feature (1)..(373): Homolog of NCBI NO: 8919731 NR Description: enolase [Spinacia oleracea]
  misc_feature (1)..(373): Homolog of NCBI NO: 37590349 NR Description: Unknown (protein for MGC:73152) [Danio rerio]
  misc_feature (1)..(373): Homolog of NCBI NO: 29650775 NR Description: enolase [Dunaliella salina]
  misc_feature (1)..(373): Homolog of NCBI NO: 34902014 NR Description: unknown protein [Oryza sativa (japonica
  misc_feature (1)..(376): Homolog of NCBI NO: 15227561 NR Description: putative enolase (2-phospho-D-glycerate
MYLGNSVAKAVKNINEKISEALIGMDPKLQGQIDQAMIDLDKTEKKSELGANAILAVSIAACKAGAAEKEVPLCKHLSDLSGRANMVLPVPAFTVLSGGKHASNTFAIQEIMILPIGASRFEEALQWGSETYHHLKAVISEKNGGLGCNVGEDGGLAPDISSLKEGLELVKEAINRTGYNDKIKIAIDIAATNFCLGTKYDLDIKSPNKSGQNFKSAEDMIDMYKEICNDYPIVSIEDPFDKEDWEHTKYFSSLGICQVVGDDLLMSNSKRVERAIQESSCNALLLKVNQIGTVTEAIEVVKMARDAQWGVVTSHRCGETEDSFISDLSVGLATGVIKAGAPCRGERTMKYNQLLRIEEELGDQAVYAGEDWKLSL

SEQ ID NO: 42946 - DNA, 1225 bp, Arabidopsis thaliana
  misc_feature (1)..(1225): Ceres Seq. ID no. 13592996
  misc_feature: MA Experiment ID: 20000171 Result: Up-regulated in Transcription
  misc_feature: MA Experiment 20000171 PARAMETER Experiment Name: At_42deg_Heat_P Parameter: Age (day) Value: 14
  misc_feature: MA Experiment 20000171 PARAMETER Experiment Name: At_42deg_Heat_P Parameter: Organism Value: A. thaliana
  misc_feature: MA Experiment 20000171 PARAMETER Experiment Name: At_42deg_Heat_P Parameter: Plant Line Value: WS
  misc_feature: MA Experiment 20000171 PARAMETER Experiment Name: At_42deg_Heat_P Parameter: Temperature (deg C) Value: 42 vs. 22
  misc_feature: MA Experiment 20000171 PARAMETER Experiment Name: At_42deg_Heat_P Parameter: Timepoint (hr) Value: 1
  misc_feature: MA Experiment 20000171 PARAMETER Experiment Name: At_42deg_Heat_P Parameter: Tissue Value: Aerial
  misc_feature: MA Experiment ID: 20000438 Result: Down-regulated in Transcription
  misc_feature: MA Experiment 20000438 PARAMETER Experiment Name: At_Shoots__P Parameter: Age (day) Value: 14
  misc_feature: MA Experiment 20000438 PARAMETER Experiment Name: At_Shoots__P Parameter: Tissue Value: Shoots vs. Whole Plant
  misc_feature: MA Experiment ID: 20001247 Result: Down-regulated in Transcription
  misc_feature: MA Experiment 20001247 PARAMETER Experiment Name: At_Far-red-induction_P Parameter: Age (day) Value: 7
  misc_feature: MA Experiment 20001247 PARAMETER Experiment Name: At_Far-red-induction_P Parameter: Light Value: Far-red vs. White
  misc_feature: MA Experiment 20001247 PARAMETER Experiment Name: At_Far-red-induction_P Parameter: Organism Value: A. thaliana
  misc_feature: MA Experiment 20001247 PARAMETER Experiment Name: At_Far-red-induction_P Parameter: Plant Line Value: Columbia
  misc_feature: MA Experiment 20001247 PARAMETER Experiment Name: At_Far-red-induction_P Parameter: Timepoint (hr) Value: 1
  misc_feature: MA Experiment 20001247 PARAMETER Experiment Name: At_Far-red-induction_P Parameter: Tissue Value: Whole Plant
  misc_feature: MA Experiment ID: 20001248 Result: Up-regulated in Transcription
  misc_feature: MA Experiment 20001248 PARAMETER Experiment Name: At_Far-red-induction_P Parameter: Age (day) Value: 7
  misc_feature: MA Experiment 20001248 PARAMETER Experiment Name: At_Far-red-induction_P Parameter: Light Value: Far-red vs. White
  misc_feature: MA Experiment 20001248 PARAMETER Experiment Name: At_Far-red-induction_P Parameter: Organism Value: A. thaliana
  misc_feature: MA Experiment 20001248 PARAMETER Experiment Name: At_Far-red-induction_P Parameter: Plant Line Value: Columbia
  misc_feature: MA Experiment 20001248 PARAMETER Experiment Name: At_Far-red-induction_P Parameter: Timepoint (hr) Value: 4
  misc_feature: MA Experiment 20001248 PARAMETER Experiment Name: At_Far-red-induction_P Parameter: Tissue Value: Whole Plant
  misc_feature: MA Experiment ID: 20001451 Result: Up-regulated in Transcription
  misc_feature: MA Experiment 20001451 PARAMETER Experiment Name: At_Far-red-induction_P Parameter: Age (day) Value: 7
  misc_feature: MA Experiment 20001451 PARAMETER Experiment Name: At_Far-red-induction_P Parameter: Light Value: Far-red vs. White
  misc_feature: MA Experiment 20001451 PARAMETER Experiment Name: At_Far-red-induction_P Parameter: Organism Value: A. thaliana
  misc_feature: MA Experiment 20001451 PARAMETER Experiment Name: At_Far-red-induction_P Parameter: Plant Line Value: Columbia
  misc_feature: MA Experiment 20001451 PARAMETER Experiment Name: At_Far-red-induction_P Parameter: Timepoint (hr) Value: 24
  misc_feature: MA Experiment 20001451 PARAMETER Experiment Name: At_Far-red-induction_P Parameter: Tissue Value: Whole Plant
  misc_feature: MA Experiment ID: 20001558 Result: Down-regulated in Transcription
  misc_feature: MA Experiment 20001558 PARAMETER Experiment Name: At_Drought_Soil_Dry_P Parameter: Age (day) Value: 27
  misc_feature: MA Experiment 20001558 PARAMETER Experiment Name: At_Drought_Soil_Dry_P Parameter: Organism Value: A. thaliana
  misc_feature: MA Experiment 20001558 PARAMETER Experiment Name: At_Drought_Soil_Dry_P Parameter: Plant Line Value: WS
  misc_feature: MA Experiment 20001558 PARAMETER Experiment Name: At_Drought_Soil_Dry_P Parameter: Post Timepoint (hr) Value: 6
  misc_feature: MA Experiment 20001558 PARAMETER Experiment Name: At_Drought_Soil_Dry_P Parameter: Post-Treatment Value: Re-Water vs. No Drought
  misc_feature: MA Experiment 20001558 PARAMETER Experiment Name: At_Drought_Soil_Dry_P Parameter: Timepoint (day) Value: 13
  misc_feature: MA Experiment 20001558 PARAMETER Experiment Name: At_Drought_Soil_Dry_P Parameter: Treatment Value: Drought vs. No Drought
  misc_feature: MA Experiment ID: 20001560 Result: Down-regulated in Transcription
  misc_feature: MA Experiment 20001560 PARAMETER Experiment Name: At_Drought_Soil_Dry_P Parameter: Age (day) Value: 28
  misc_feature: MA Experiment 20001560 PARAMETER Experiment Name: At_Drought_Soil_Dry_P Parameter: Organism Value: A. thaliana
  misc_feature: MA Experiment 20001560 PARAMETER Experiment Name: At_Drought_Soil_Dry_P Parameter: Plant Line Value: WS
  misc_feature: MA Experiment 20001560 PARAMETER Experiment Name: At_Drought_Soil_Dry_P Parameter: Post Timepoint (hr) Value: None
  misc_feature: MA Experiment 20001560 PARAMETER Experiment Name: At_Drought_Soil_Dry_P Parameter: Post-Treatment Value: None
  misc_feature: MA Experiment 20001560 PARAMETER Experiment Name: At_Drought_Soil_Dry_P Parameter: Timepoint (day) Value: 14
  misc_feature: MA Experiment 20001560 PARAMETER Experiment Name: At_Drought_Soil_Dry_P Parameter: Treatment Value: Drought vs. No Drought
  misc_feature: MA Experiment ID: 20001911 Result: Up-regulated in Transcription
  misc_feature: MA Experiment 20001911 PARAMETER Experiment Name: At_Drought_Reproduction_P Parameter: Age (day) Value: 40
  misc_feature: MA Experiment 20001911 PARAMETER Experiment Name: At_Drought_Reproduction_P Parameter: Organism Value: A. thaliana
  misc_feature: MA Experiment 20001911 PARAMETER Experiment Name: At_Drought_Reproduction_P Parameter: Plant Line Value: WS
  misc_feature: MA Experiment 20001911 PARAMETER Experiment Name: At_Drought_Reproduction_P Parameter: Timepoint (day) Value: 10
  misc_feature: MA Experiment 20001911 PARAMETER Experiment Name: At_Drought_Reproduction_P Parameter: Tissue Value: Flowers
  misc_feature: MA Experiment 20001911 PARAMETER Experiment Name: At_Drought_Reproduction_P Parameter: Treatment Value: Drought vs. No Drought
taatcgaaaacctttcgtctttttctgactcttcaatctctcccaaagcctaaagcgatctctgcaaatctctcgcgactctctctttcaagatgcaaatcttcgtgaaaacactcactggcaagacaatcactctcgaggttgagagctctgacaccatcgacaatgttaaggcaaagattcaggacaaggaaggcattcctccggatcagcaaagattaatattcgccggtaaacagctagaagatggccgtaccttggcggattacaatatccagaaagaatcaacccttcatttggttctccgtttaagaggtggtatgcagatctttgtcaagactctgactggcaaaaccattactttggaagttgagagctctgacactattgataacgtcaaagcaaagatccaggacaaggaaggaatccctccggatcagcaaagacttatctttgccggtaagcagcttgaggacggaagaactcttgctgactacaacattcaaaaggagtcgacccttcatttggtgcttcgtctcagaggtggtatgcaaatctttgtcaagaccctcactggtaaaacaatcacccttgaggttgagagttcagacaccattgacaatgtcaaagctaagatccaggataaagagggaattcctccggatcagcagaggcttatctttgccggtaagcagctcgaagatggacgcacccttgcagattacaacatccaaaaggagtctacccttcatcttgtgcttcgtctccgtggtggtatgcagatctttgtgaagacccttaccggaaagaccattactctggaggttgaaagctcagacactatcgataatgtcaaggctaagattcaggacaaggaagggatcccaccagaccaacagagactcatcttcgctggtaaacagcttgaggatggtcgcacacttgcagattacaacatccagaaggagtcgactcttcacttggttcttcgtcttcgtggtggaagcttctaagctttttttgatctgatgataagtggttggttcgtgtctcatgcacttgggaggtgaactatttcacctggtgtagtttgtgtttccgtctgttggaaaaacttatccctatcgatttcgttttcattttctgcttttcttttatgtaccttcgtttgggcttgtaacgggcctttgtatttcaactctcaataataatccaagtgcatgtt

SEQ ID NO: 42947 - protein, 306 aa, Arabidopsis thaliana
  peptide (1)..(306): Ceres Seq. ID no. 15221193
  misc_feature (1)..(74): Pfam Name: Ubiquitin family Pfam Description: Ubiquitin family
  misc_feature (1)..(304): Homolog of NCBI NO: 481477 NR Description: polyubiquitin 6 - rice
  misc_feature (1)..(304): Homolog of NCBI NO: 481477 NR Description: polyubiquitin 6 - rice
  misc_feature (1)..(304): Homolog of NCBI NO: 418854 NR Description: polyubiquitin 6 - parsley
  misc_feature (1)..(304): Homolog of NCBI NO: 100934 NR Description: polyubiquitin - maize
  misc_feature (1)..(304): Homolog of NCBI NO: 100524 NR Description: polyubiquitin 6 - common sunflower
  misc_feature (1)..(304): Homolog of NCBI NO: 100524 NR Description: polyubiquitin 6 - common sunflower
  misc_feature (1)..(305): Homolog of NCBI NO: 100524 NR Description: polyubiquitin 6 - common sunflower
  misc_feature (1)..(306): Homolog of NCBI NO: 418854 NR Description: polyubiquitin 6 - parsley
  misc_feature (1)..(306): Homolog of NCBI NO: 30679945 NR Description: polyubiquitin (UBQ3) [Arabidopsis thaliana]
  misc_feature (1)..(306): Homolog of NCBI NO: 18420267 NR Description: polyubiquitin (UBQ4) [Arabidopsis thaliana]
MQIFVKTLTGKTITLEVESSDTIDNVKAKIQDKEGIPPDQQRLIFAGKQLEDGRTLADYNIQKESTLHLVLRLRGGMQIFVKTLTGKTITLEVESSDTIDNVKAKIQDKEGIPPDQQRLIFAGKQLEDGRTLADYNIQKESTLHLVLRLRGGMQIFVKTLTGKTITLEVESSDTIDNVKAKIQDKEGIPPDQQRLIFAGKQLEDGRTLADYNIQKESTLHLVLRLRGGMQIFVKTLTGKTITLEVESSDTIDNVKAKIQDKEGIPPDQQRLIFAGKQLEDGRTLADYNIQKESTLHLVLRLRGGSF

SEQ ID NO: 42948 - protein, 230 aa, Arabidopsis thaliana
  peptide (1)..(230): Ceres Seq. ID no. 15221194
  misc_feature (1)..(74): Pfam Name: Ubiquitin family Pfam Description: Ubiquitin family
  misc_feature (1)..(228): Homolog of NCBI NO: 18420267 NR Description: polyubiquitin (UBQ4) [Arabidopsis thaliana]
  misc_feature (1)..(228): Homolog of NCBI NO: 481477 NR Description: polyubiquitin 6 - rice
  misc_feature (1)..(228): Homolog of NCBI NO: 418854 NR Description: polyubiquitin 6 - parsley
  misc_feature (1)..(228): Homolog of NCBI NO: 100934 NR Description: polyubiquitin - maize
  misc_feature (1)..(228): Homolog of NCBI NO: 100934 NR Description: polyubiquitin - maize
  misc_feature (1)..(228): Homolog of NCBI NO: 100524 NR Description: polyubiquitin 6 - common sunflower
  misc_feature (1)..(229): Homolog of NCBI NO: 100524 NR Description: polyubiquitin 6 - common sunflower
  misc_feature (1)..(230): Homolog of NCBI NO: 418854 NR Description: polyubiquitin 6 - parsley
  misc_feature (1)..(230): Homolog of NCBI NO: 30679945 NR Description: polyubiquitin (UBQ3) [Arabidopsis thaliana]
  misc_feature (1)..(230): Homolog of NCBI NO: 18420267 NR Description: polyubiquitin (UBQ4) [Arabidopsis thaliana]
MQIFVKTLTGKTITLEVESSDTIDNVKAKIQDKEGIPPDQQRLIFAGKQLEDGRTLADYNIQKESTLHLVLRLRGGMQIFVKTLTGKTITLEVESSDTIDNVKAKIQDKEGIPPDQQRLIFAGKQLEDGRTLADYNIQKESTLHLVLRLRGGMQIFVKTLTGKTITLEVESSDTIDNVKAKIQDKEGIPPDQQRLIFAGKQLEDGRTLADYNIQKESTLHLVLRLRGGSF

SEQ ID NO: 42949 - protein, 154 aa, Arabidopsis thaliana
  peptide (1)..(154): Ceres Seq. ID no. 15221195
  misc_feature (1)..(74): Pfam Name: Ubiquitin family Pfam Description: Ubiquitin family
  misc_feature (1)..(152): Homolog of NCBI NO: 481477 NR Description: polyubiquitin 6 - rice
  misc_feature (1)..(152): Homolog of NCBI NO: 418854 NR Description: polyubiquitin 6 - parsley
  misc_feature (1)..(152): Homolog of NCBI NO: 100934 NR Description: polyubiquitin - maize
  misc_feature (1)..(152): Homolog of NCBI NO: 100934 NR Description: polyubiquitin - maize
  misc_feature (1)..(152): Homolog of NCBI NO: 100524 NR Description: polyubiquitin 6 - common sunflower
  misc_feature (1)..(152): Homolog of NCBI NO: 100524 NR Description: polyubiquitin 6 - common sunflower
  misc_feature (1)..(153): Homolog of NCBI NO: 100524 NR Description: polyubiquitin 6 - common sunflower
  misc_feature (1)..(154): Homolog of NCBI NO: 418854 NR Description: polyubiquitin 6 - parsley
  misc_feature (1)..(154): Homolog of NCBI NO: 30679945 NR Description: polyubiquitin (UBQ3) [Arabidopsis thaliana]
  misc_feature (1)..(154): Homolog of NCBI NO: 18420267 NR Description: polyubiquitin (UBQ4) [Arabidopsis thaliana]
MQIFVKTLTGKTITLEVESSDTIDNVKAKIQDKEGIPPDQQRLIFAGKQLEDGRTLADYNIQKESTLHLVLRLRGGMQIFVKTLTGKTITLEVESSDTIDNVKAKIQDKEGIPPDQQRLIFAGKQLEDGRTLADYNIQKESTLHLVLRLRGGSF

SEQ ID NO: 42950 - DNA, 1272 bp, Arabidopsis thaliana
  misc_feature (1)..(1272): Ceres Seq. ID no. 12370257
  misc_feature: MA Experiment ID: 108573 Result: Up-regulated in Transcription
  misc_feature: MA Experiment 108573 PARAMETER Experiment Name: At_Drought_cDNA_P Parameter: Timepoint (hr) Value: 6
  misc_feature: MA Experiment 108573 PARAMETER Experiment Name: At_Drought_cDNA_P Parameter: Tissue Value: Aerial
  misc_feature: MA Experiment 108573 PARAMETER Experiment Name: At_Drought_cDNA_P Parameter: Treatment Value: Drought vs. No Drought
  misc_feature: MA Experiment ID: 20001560 Result: Down-regulated in Transcription
  misc_feature: MA Experiment 20001560 PARAMETER Experiment Name: At_Drought_Soil_Dry_P Parameter: Age (day) Value: 28
  misc_feature: MA Experiment 20001560 PARAMETER Experiment Name: At_Drought_Soil_Dry_P Parameter: Organism Value: A. thaliana
  misc_feature: MA Experiment 20001560 PARAMETER Experiment Name: At_Drought_Soil_Dry_P Parameter: Plant Line Value: WS
  misc_feature: MA Experiment 20001560 PARAMETER Experiment Name: At_Drought_Soil_Dry_P Parameter: Post Timepoint (hr) Value: None
  misc_feature: MA Experiment 20001560 PARAMETER Experiment Name: At_Drought_Soil_Dry_P Parameter: Post-Treatment Value: None
  misc_feature: MA Experiment 20001560 PARAMETER Experiment Name: At_Drought_Soil_Dry_P Parameter: Timepoint (day) Value: 14
  misc_feature: MA Experiment 20001560 PARAMETER Experiment Name: At_Drought_Soil_Dry_P Parameter: Treatment Value: Drought vs. No Drought
gtagtcagcgacacggaactcattaactttactcttctcactggtcaatcgtcggagataatcgggtgatcggcgatggagaatacggacgtcttcttggggctgcatgatttcctggagcggatgcgcaaaccctccgccggcgatttcgtcaaatccattaaaagtttcattgtttcattctcgaacaatgcaccagacccggaaaaagattgtgctatggttcaggagttcttttctaagatggaggctgctttcagggctcatccactttggtctggttgttctgaggaggaattggatagtgctggagatggcctggagaagtatgttatgacaaagctatttactcgggtgtttgcttcaaacactgaggaggttatagctgatgagaagctatttcagaagatgtcattggttcaacaattcatttctcccgagaatttggatatacaaccaacttttcaaaatgaatcgtcatggctgctagctcaaaaagagctccagaagataaacatgtacaaagctcctcgtgataagcttgtgtgtatccttaactgttgcaaagtgattaataacttactgctaaatgcttcaattgcttcaaacgagaatgcacctggagcagacgaatttcttcctgttttgatatatgtaacaataaaggctaaccctccacaacttcactcaaacttgttgtatatacaaagctgagtttgaaaagaacatggaatctgcacgggcacgaatttctggtttggacagccagacttatcaaactggtcatggctctggcaccaccccctcgtgatgagtccactcttcagaaaactcaaagtctgaatcccaagagggaaaacactcttttccaatcaaaatcgtctgatagtctttctgggaccaacgaattactgaatataaacagtgaaacaccaatgaagaaagctgaatccatttcagatttggaaaataagggtacgacgcttctgaaggataccgagccaagcaaagtctttcaagaatatccttacatatttgccagtgctggtgatttgaggataggagatgttgaaggcttgttaaatagttataaacagctcgttttcaaatatgtgtgccttaccaaaggattgggtgatggaacatctttagctccatccagttcacccttgcaagcgtcgtccggttttaatacgtctaaggaatctgaggatcatagaagatcgtcttcagatgtacaaatgacaaaggaaactgacaggagtgttgatg

SEQ ID NO: 42951 - protein, 212 aa, Arabidopsis thaliana
  peptide (1)..(212): Ceres Seq. ID no. 12370258
  misc_feature (135)..(211): Pfam Name: Vacuolar sorting protein 9 (VPS9) domain Pfam Description: Vacuolar sorting protein 9 (VPS9) domain
  misc_feature (27)..(212): Homolog of NCBI NO: 20521930 NR Description: KIAA1521 protein [Homo sapiens]
  misc_feature (27)..(212): Homolog of NCBI NO: 7512550 NR Description: hypothetical protein DKFZp434C212.1 - human
  misc_feature (27)..(212): Homolog of NCBI NO: 15489034 NR Description: Unknown (protein for IMAGE:3451647) [Homo sapiens]
  misc_feature (27)..(212): Homolog of NCBI NO: 27882595 NR Description: Similar to RIKEN cDNA 4432404J10 gene [Mus
  misc_feature (27)..(212): Homolog of NCBI NO: 21739944 NR Description: hypothetical protein [Homo sapiens]
  misc_feature (3)..(211): Homolog of NCBI NO: 19112902 NR Description: putative vacuolar protein sorting-associated
  misc_feature (8)..(30): Homolog of NCBI NO: 34902128 NR Description: unknown protein [Oryza sativa (japonica
  misc_feature (32)..(197): Homolog of NCBI NO: 34902128 NR Description: unknown protein [Oryza sativa (japonica
  misc_feature (1)..(211): Homolog of NCBI NO: 15242388 NR Description: putative protein; protein id: At5g09320.1
  misc_feature (1)..(211): Homolog of NCBI NO: 18402362 NR Description: expressed protein
MENTDVFLGLHDFLERMRKPSAGDFVKSIKSFIVSFSNNAPDPEKDCAMVQEFFSKMEAAFRAHPLWSGCSEEELDSAGDGLEKYVMTKLFTRVFASNTEEVIADEKLFQKMSLVQQFISPENLDIQPTFQNESSWLLAQKELQKINMYKAPRDKLVCILNCCKVINNLLLNASIASNENAPGADEFLPVLIYVTIKANPPQLHSNLLYIQS

SEQ ID NO: 42952 - protein, 196 aa, Arabidopsis thaliana
  peptide (1)..(196): Ceres Seq. ID no. 12370259
  misc_feature (119)..(195): Pfam Name: Vacuolar sorting protein 9 (VPS9) domain Pfam Description: Vacuolar sorting protein 9 (VPS9) domain
  misc_feature (11)..(196): Homolog of NCBI NO: 20521930 NR Description: KIAA1521 protein [Homo sapiens]
  misc_feature (11)..(196): Homolog of NCBI NO: 7512550 NR Description: hypothetical protein DKFZp434C212.1 - human
  misc_feature (11)..(196): Homolog of NCBI NO: 15489034 NR Description: Unknown (protein for IMAGE:3451647) [Homo sapiens]
  misc_feature (11)..(196): Homolog of NCBI NO: 27882595 NR Description: Similar to RIKEN cDNA 4432404J10 gene [Mus
  misc_feature (11)..(196): Homolog of NCBI NO: 21739944 NR Description: hypothetical protein [Homo sapiens]
  misc_feature (1)..(195): Homolog of NCBI NO: 19112902 NR Description: putative vacuolar protein sorting-associated
  misc_feature (1)..(14): Homolog of NCBI NO: 34902128 NR Description: unknown protein [Oryza sativa (japonica
  misc_feature (16)..(181): Homolog of NCBI NO: 34902128 NR Description: unknown protein [Oryza sativa (japonica
  misc_feature (1)..(195): Homolog of NCBI NO: 15242388 NR Description: putative protein; protein id: At5g09320.1
  misc_feature (1)..(195): Homolog of NCBI NO: 18402362 NR Description: expressed protein
MRKPSAGDFVKSIKSFIVSFSNNAPDPEKDCAMVQEFFSKMEAAFRAHPLWSGCSEEELDSAGDGLEKYVMTKLFTRVFASNTEEVIADEKLFQKMSLVQQFISPENLDIQPTFQNESSWLLAQKELQKINMYKAPRDKLVCILNCCKVINNLLLNASIASNENAPGADEFLPVLIYVTIKANPPQLHSNLLYIQS

SEQ ID NO: 42953 - protein, 164 aa, Arabidopsis thaliana
  peptide (1)..(164): Ceres Seq. ID no. 12370260
  misc_feature (87)..(163): Pfam Name: Vacuolar sorting protein 9 (VPS9) domain Pfam Description: Vacuolar sorting protein 9 (VPS9) domain
  misc_feature (1)..(164): Homolog of NCBI NO: 26353966 NR Description: unnamed protein product [Mus musculus]
  misc_feature (1)..(164): Homolog of NCBI NO: 20521930 NR Description: KIAA1521 protein [Homo sapiens]
  misc_feature (1)..(164): Homolog of NCBI NO: 7512550 NR Description: hypothetical protein DKFZp434C212.1 - human
  misc_feature (1)..(164): Homolog of NCBI NO: 15489034 NR Description: Unknown (protein for IMAGE:3451647) [Homo sapiens]
  misc_feature (1)..(164): Homolog of NCBI NO: 27882595 NR Description: Similar to RIKEN cDNA 4432404J10 gene [Mus
  misc_feature (1)..(164): Homolog of NCBI NO: 21739944 NR Description: hypothetical protein [Homo sapiens]
  misc_feature (1)..(163): Homolog of NCBI NO: 19112902 NR Description: putative vacuolar protein sorting-associated
  misc_feature (1)..(149): Homolog of NCBI NO: 34902128 NR Description: unknown protein [Oryza sativa (japonica
  misc_feature (1)..(163): Homolog of NCBI NO: 15242388 NR Description: putative protein; protein id: At5g09320.1
  misc_feature (1)..(163): Homolog of NCBI NO: 18402362 NR Description: expressed protein
MVQEFFSKMEAAFRAHPLWSGCSEEELDSAGDGLEKYVMTKLFTRVFASNTEEVIADEKLFQKMSLVQQFISPENLDIQPTFQNESSWLLAQKELQKINMYKAPRDKLVCILNCCKVINNLLLNASIASNENAPGADEFLPVLIYVTIKANPPQLHSNLLYIQS

SEQ ID NO: 42954 - DNA, 1480 bp, Arabidopsis thaliana
  misc_feature (1)..(1480): Ceres Seq. ID no. 12422298
  misc_feature: MA Experiment ID: 108462 Result: Up-regulated in Transcription
  misc_feature: MA Experiment 108462 PARAMETER Experiment Name: At_Germinating_Seeds_cDNA_P Parameter: Age (day) Value: 2 vs. 0
  misc_feature: MA Experiment 108462 PARAMETER Experiment Name: At_Germinating_Seeds_cDNA_P Parameter: Tissue Value: Germinating Seeds
  misc_feature: MA Experiment ID: 108594 Result: Down-regulated in Transcription
  misc_feature: MA Experiment 108594 PARAMETER Experiment Name: At_Ler-rhl_Root_cDNA_P Parameter: Plant Line Value: null
  misc_feature: MA Experiment ID: 20001906 Result: Down-regulated in Transcription
  misc_feature: MA Experiment 20001906 PARAMETER Experiment Name: At_Drought_Reproduction_P Parameter: Age (day) Value: 35
  misc_feature: MA Experiment 20001906 PARAMETER Experiment Name: At_Drought_Reproduction_P Parameter: Organism Value: A. thaliana
  misc_feature: MA Experiment 20001906 PARAMETER Experiment Name: At_Drought_Reproduction_P Parameter: Plant Line Value: WS
  misc_feature: MA Experiment 20001906 PARAMETER Experiment Name: At_Drought_Reproduction_P Parameter: Timepoint (day) Value: 5
  misc_feature: MA Experiment 20001906 PARAMETER Experiment Name: At_Drought_Reproduction_P Parameter: Tissue Value: Siliques
  misc_feature: MA Experiment 20001906 PARAMETER Experiment Name: At_Drought_Reproduction_P Parameter: Treatment Value: Drought vs. No Drought
ataattcctaatttcgacacgttctttacataaatcaccagatttgccactatgagcttcttgattcctaatagaggagtaggaggaaccaagattcctctctccatcatcgttctcgttctttgtggtttcatgttcttcattctcttatacactgaaagaatcagcttgttgtcttcttcttcctcttcgtcttcatctttcttcaagctaaagtcttgtccgaggaaagatgttagctcgaaacctaaggagaaaattcgaaaggaaagatcagagatattggaagtgcttgacgacaggttcgaattcgatcccgaagagtgtaacgttgcagcagggaaatgggtttacaatagctcaattgaaccactctacaccgatagatcatgtccatacatcgatcgtcaattctcttgtatgaaaaacggacagccagaaactgattatcttcggtgggaatggcagcctgatgactgtacaattccacgatttagtccgaagttagcaatgaacaaactcagaggaaaaagactactttttgtgggagattcgttgcaacgaagccaatgggaatcgttcgtgtgtttggtggaatcaataatacccgaaggagaaaaatcaatgaagcgtagccaaaaatactttgtatttaaagcaaaggaatacaatgcgactatagagttctattgggcaccgtatatcgtcgaatcaaacacagatatacctgtgatttcggatccaaagaaacggatagtgaaagtggactcagtgaaagatcgagctaagttttgggaaggagctgatattttggttttcaacacttatgtttggtggatgagtggtctccgcatgaaagctctgtggggttctttcggaaatggagagagtggtgcagaggcactagacacacaagtggcttacaggctagggctcaagacatgggctaattgggttgactctaccgttgaccctaataagaccagagtcttcttcaccaccatgtctcctactcatactagaagtgcggattggggaaagccaaacggcacgaaatgtttcaacgagacgaaaccgataaaagataagaagttttggggaacaggctctaacaagcagatgatgaaagtggtgtcaagcgtgataaagcacatgactacgcacgtgacagtcatcaacatcacgcagctctctgagtatcgtatcgacgctcacacatcagtttacaccgagacaggtgggaagatcctaaccgctgagcagagggctgatccaatgcatcacgctgattgtatacattggtgtttacctggactacccgatacatggaatcggatcctattggctcatttgtaaatcaagctaggaagctgagggttaaacgggaaaaacccaaatcctctgtttttctttctcctcttgtgttgtcggggagatttgtttgtttcagtgtattgtgattgtcgtcaattttcttaag

SEQ ID NO: 42955 - protein, 434 aa, Arabidopsis thaliana
  peptide (1)..(434): Ceres Seq. ID no. 12422299
  misc_feature (262)..(434): Pfam Name: Arabidopsis proteins of unknown function Pfam Description: Arabidopsis proteins of unknown function
  misc_feature (86)..(434): Homolog of NCBI NO: 18405283 NR Description: expressed protein
  misc_feature (64)..(434): Homolog of NCBI NO: 15226647 NR Description: hypothetical protein; protein id: At2g40320.1
  misc_feature (92)..(434): Homolog of NCBI NO: 28876013 NR Description: unknown protein [Oryza sativa (japonica
  misc_feature (64)..(434): Homolog of NCBI NO: 28393743 NR Description: unknown protein [Arabidopsis thaliana]
  misc_feature (72)..(434): Homolog of NCBI NO: 15219382 NR Description: hypothetical protein; protein id: At1g73140.1
  misc_feature (60)..(434): Homolog of NCBI NO: 26452343 NR Description: unknown protein [Arabidopsis thaliana]
  misc_feature (60)..(434): Homolog of NCBI NO: 15228789 NR Description: putative protein; protein id: At3g55990.1
  misc_feature (1)..(197): Homolog of NCBI NO: 11291874 NR Description: hypothetical protein T10O8.70 - Arabidopsis
  misc_feature (205)..(434): Homolog of NCBI NO: 11291874 NR Description: hypothetical protein T10O8.70 - Arabidopsis
  misc_feature (1)..(434): Homolog of NCBI NO: 18412850 NR Description: putative protein
MSFLIPNRGVGGTKIPLSIIVLVLCGFMFFILLYTERISLLSSSSSSSSSFFKLKSCPRKDVSSKPKEKIRKERSEILEVLDDRFEFDPEECNVAAGKWVYNSSIEPLYTDRSCPYIDRQFSCMKNGQPETDYLRWEWQPDDCTIPRFSPKLAMNKLRGKRLLFVGDSLQRSQWESFVCLVESIIPEGEKSMKRSQKYFVFKAKEYNATIEFYWAPYIVESNTDIPVISDPKKRIVKVDSVKDRAKFWEGADILVFNTYVWWMSGLRMKALWGSFGNGESGAEALDTQVAYRLGLKTWANWVDSTVDPNKTRVFFTTMSPTHTRSADWGKPNGTKCFNETKPIKDKKFWGTGSNKQMMKVVSSVIKHMTTHVTVINITQLSEYRIDAHTSVYTETGGKILTAEQRADPMHHADCIHWCLPGLPDTWNRILLAHL

SEQ ID NO: 42956 - protein, 407 aa, Arabidopsis thaliana
  peptide (1)..(407): Ceres Seq. ID no. 12422300
  misc_feature (235)..(407): Pfam Name: Arabidopsis proteins of unknown function Pfam Description: Arabidopsis proteins of unknown function
  misc_feature (59)..(407): Homolog of NCBI NO: 18405283 NR Description: expressed protein
  misc_feature (37)..(407): Homolog of NCBI NO: 15226647 NR Description: hypothetical protein; protein id: At2g40320.1
  misc_feature (65)..(407): Homolog of NCBI NO: 28876013 NR Description: unknown protein [Oryza sativa (japonica
  misc_feature (37)..(407): Homolog of NCBI NO: 28393743 NR Description: unknown protein [Arabidopsis thaliana]
  misc_feature (45)..(407): Homolog of NCBI NO: 15219382 NR Description: hypothetical protein; protein id: At1g73140.1
  misc_feature (33)..(407): Homolog of NCBI NO: 26452343 NR Description: unknown protein [Arabidopsis thaliana]
  misc_feature (33)..(407): Homolog of NCBI NO: 15228789 NR Description: putative protein; protein id: At3g55990.1
  misc_feature (1)..(170): Homolog of NCBI NO: 11291874 NR Description: hypothetical protein T10O8.70 - Arabidopsis
  misc_feature (178)..(407): Homolog of NCBI NO: 11291874 NR Description: hypothetical protein T10O8.70 - Arabidopsis
  misc_feature (1)..(407): Homolog of NCBI NO: 18412850 NR Description: putative protein
MFFILLYTERISLLSSSSSSSSSFFKLKSCPRKDVSSKPKEKIRKERSEILEVLDDRFEFDPEECNVAAGKWVYNSSIEPLYTDRSCPYIDRQFSCMKNGQPETDYLRWEWQPDDCTIPRFSPKLAMNKLRGKRLLFVGDSLQRSQWESFVCLVESIIPEGEKSMKRSQKYFVFKAKEYNATIEFYWAPYIVESNTDIPVISDPKKRIVKVDSVKDRAKFWEGADILVFNTYVWWMSGLRMKALWGSFGNGESGAEALDTQVAYRLGLKTWANWVDSTVDPNKTRVFFTTMSPTHTRSADWGKPNGTKCFNETKPIKDKKFWGTGSNKQMMKVVSSVIKHMTTHVTVINITQLSEYRIDAHTSVYTETGGKILTAEQRADPMHHADCIHWCLPGLPDTWNRILLAHL

SEQ ID NO: 42957 - protein, 311 aa, Arabidopsis thaliana
  peptide (1)..(311): Ceres Seq. ID no. 12422301
  misc_feature (139)..(311): Pfam Name: Arabidopsis proteins of unknown function Pfam Description: Arabidopsis proteins of unknown function
  misc_feature (1)..(311): Homolog of NCBI NO: 18405283 NR Description: expressed protein
  misc_feature (1)..(311): Homolog of NCBI NO: 15226647 NR Description: hypothetical protein; protein id: At2g40320.1
  misc_feature (1)..(311): Homolog of NCBI NO: 28876013 NR Description: unknown protein [Oryza sativa (japonica
  misc_feature (1)..(311): Homolog of NCBI NO: 28393743 NR Description: unknown protein [Arabidopsis thaliana]
  misc_feature (1)..(311): Homolog of NCBI NO: 15219382 NR Description: hypothetical protein; protein id: At1g73140.1
  misc_feature (1)..(311): Homolog of NCBI NO: 26452343 NR Description: unknown protein [Arabidopsis thaliana]
  misc_feature (1)..(311): Homolog of NCBI NO: 15228789 NR Description: putative protein; protein id: At3g55990.1
  misc_feature (1)..(74): Homolog of NCBI NO: 11291874 NR Description: hypothetical protein T10O8.70 - Arabidopsis
  misc_feature (82)..(311): Homolog of NCBI NO: 11291874 NR Description: hypothetical protein T10O8.70 - Arabidopsis
  misc_feature (1)..(311): Homolog of NCBI NO: 18412850 NR Description: putative protein
MKNGQPETDYLRWEWQPDDCTIPRFSPKLAMNKLRGKRLLFVGDSLQRSQWESFVCLVESIIPEGEKSMKRSQKYFVFKAKEYNATIEFYWAPYIVESNTDIPVISDPKKRIVKVDSVKDRAKFWEGADILVFNTYVWWMSGLRMKALWGSFGNGESGAEALDTQVAYRLGLKTWANWVDSTVDPNKTRVFFTTMSPTHTRSADWGKPNGTKCFNETKPIKDKKFWGTGSNKQMMKVVSSVIKHMTTHVTVINITQLSEYRIDAHTSVYTETGGKILTAEQRADPMHHADCIHWCLPGLPDTWNRILLAHL

SEQ ID NO: 42958 - DNA, 839 bp, Arabidopsis thaliana
  misc_feature (1)..(839): Ceres Seq. ID no. 13647083
  misc_feature: MA Experiment ID: 20000180 Result: Up-regulated in Transcription
  misc_feature: MA Experiment 20000180 PARAMETER Experiment Name: At_Germinating_Seeds_P Parameter: Age (hr) Value: 24 vs. 0
  misc_feature: MA Experiment 20000180 PARAMETER Experiment Name: At_Germinating_Seeds_P Parameter: Tissue Value: Germinating Seeds
  misc_feature: MA Experiment ID: 20000184 Result: Up-regulated in Transcription
  misc_feature: MA Experiment 20000184 PARAMETER Experiment Name: At_Shoots__P Parameter: Age (day) Value: 7
  misc_feature: MA Experiment 20000184 PARAMETER Experiment Name: At_Shoots__P Parameter: Tissue Value: Shoots vs. Whole Plant
  misc_feature: MA Experiment ID: 20000185 Result: Up-regulated in Transcription
  misc_feature: MA Experiment 20000185 PARAMETER Experiment Name: At_Roots__P Parameter: Age (day) Value: 7 vs. 21
  misc_feature: MA Experiment 20000185 PARAMETER Experiment Name: At_Roots__P Parameter: Organism Value: A. thaliana
  misc_feature: MA Experiment 20000185 PARAMETER Experiment Name: At_Roots__P Parameter: Tissue Value: Roots vs. Whole Plant
  misc_feature: MA Experiment ID: 20000227 Result: Down-regulated in Transcription
  misc_feature: MA Experiment 20000227 PARAMETER Experiment Name: At_Root-Tips-vs-Tops_P Parameter: Tissue Value: Root Tips vs. Root Tops
  misc_feature: MA Experiment ID: 20000264 Result: Up-regulated in Transcription
  misc_feature: MA Experiment 20000264 PARAMETER Experiment Name: At_Open_Flower_P Parameter: Age (day) Value: 21
  misc_feature: MA Experiment 20000264 PARAMETER Experiment Name: At_Open_Flower_P Parameter: Plant Line Value: WS
  misc_feature: MA Experiment 20000264 PARAMETER Experiment Name: At_Open_Flower_P Parameter: Tissue Value: Open Flower vs. Whole Plant
  misc_feature: MA Experiment ID: 20000265 Result: Up-regulated in Transcription
  misc_feature: MA Experiment 20000265 PARAMETER Experiment Name: At_Open_Flower_P Parameter: Age (day) Value: 21
  misc_feature: MA Experiment 20000265 PARAMETER Experiment Name: At_Open_Flower_P Parameter: Plant Line Value: WS
  misc_feature: MA Experiment 20000265 PARAMETER Experiment Name: At_Open_Flower_P Parameter: Tissue Value: Closed Flower vs. Whole Plant
  misc_feature: MA Experiment ID: 20000286 Result: Up-regulated in Transcription
  misc_feature: MA Experiment 20000286 PARAMETER Experiment Name: At_Open_Flower_P Parameter: Age (day) Value: 21
  misc_feature: MA Experiment 20000286 PARAMETER Experiment Name: At_Open_Flower_P Parameter: Plant Line Value: WS
  misc_feature: MA Experiment 20000286 PARAMETER Experiment Name: At_Open_Flower_P Parameter: Tissue Value: Half Open vs. Whole Plant
  misc_feature: MA Experiment ID: 20000438 Result: Up-regulated in Transcription
  misc_feature: MA Experiment 20000438 PARAMETER Experiment Name: At_Shoots__P Parameter: Age (day) Value: 14
  misc_feature: MA Experiment 20000438 PARAMETER Experiment Name: At_Shoots__P Parameter: Tissue Value: Shoots vs. Whole Plant
  misc_feature: MA Experiment ID: 20000439 Result: Up-regulated in Transcription
  misc_feature: MA Experiment 20000439 PARAMETER Experiment Name: At_Roots__P Parameter: Age (day) Value: 14 vs. 21
  misc_feature: MA Experiment 20000439 PARAMETER Experiment Name: At_Roots__P Parameter: Organism Value: A. thaliana
  misc_feature: MA Experiment 20000439 PARAMETER Experiment Name: At_Roots__P Parameter: Tissue Value: Roots vs. Whole Plant
  misc_feature: MA Experiment ID: 20000460 Result: Down-regulated in Transcription
  misc_feature: MA Experiment 20000460 PARAMETER Experiment Name: At_10percent_PEG_P Parameter: Age (day) Value: 12
  misc_feature: MA Experiment 20000460 PARAMETER Experiment Name: At_10percent_PEG_P Parameter: Organism Value: A. thaliana
  misc_feature: MA Experiment 20000460 PARAMETER Experiment Name: At_10percent_PEG_P Parameter: Plant Line Value: WS
  misc_feature: MA Experiment 20000460 PARAMETER Experiment Name: At_10percent_PEG_P Parameter: Timepoint (day) Value: 12
  misc_feature: MA Experiment 20000460 PARAMETER Experiment Name: At_10percent_PEG_P Parameter: Tissue Value: Whole Plant
  misc_feature: MA Experiment 20000460 PARAMETER Experiment Name: At_10percent_PEG_P Parameter: Treatment Value: 10percent PEG vs. No Treatment
  misc_feature: MA Experiment ID: 20000495 Result: Up-regulated in Transcription
  misc_feature: MA Experiment 20000495 PARAMETER Experiment Name: At_Guard_Cells_P Parameter: Harvest Date Value: 8/2/2002
  misc_feature: MA Experiment 20000495 PARAMETER Experiment Name: At_Guard_Cells_P Parameter: Organism Value: A. thaliana
  misc_feature: MA Experiment 20000495 PARAMETER Experiment Name: At_Guard_Cells_P Parameter: Tissue Value: Guard Cells vs. Leaves
  misc_feature: MA Experiment ID: 20000527 Result: Down-regulated in Transcription
  misc_feature: MA Experiment 20000527 PARAMETER Experiment Name: At_10percent_PEG_P Parameter: Age (day) Value: 20
  misc_feature: MA Experiment 20000527 PARAMETER Experiment Name: At_10percent_PEG_P Parameter: Organism Value: A. thaliana
  misc_feature: MA Experiment 20000527 PARAMETER Experiment Name: At_10percent_PEG_P Parameter: Plant Line Value: WS
  misc_feature: MA Experiment 20000527 PARAMETER Experiment Name: At_10percent_PEG_P Parameter: Timepoint (day) Value: 20
  misc_feature: MA Experiment 20000527 PARAMETER Experiment Name: At_10percent_PEG_P Parameter: Tissue Value: Whole Plant
  misc_feature: MA Experiment 20000527 PARAMETER Experiment Name: At_10percent_PEG_P Parameter: Treatment Value: 10percent PEG vs. No Treatment
  misc_feature: MA Experiment ID: 20000794 Result: Up-regulated in Transcription
  misc_feature: MA Experiment 20000794 PARAMETER Experiment Name: At_Petals_P Parameter: Age (day) Value: 23-25 days
  misc_feature: MA Experiment 20000794 PARAMETER Experiment Name: At_Petals_P Parameter: Plant Line Value: WS
  misc_feature: MA Experiment 20000794 PARAMETER Experiment Name: At_Petals_P Parameter: Tissue Value: Petals vs. Whole plant
  misc_feature: MA Experiment ID: 20001910 Result: Down-regulated in Transcription
  misc_feature: MA Experiment 20001910 PARAMETER Experiment Name: At_Drought_Reproduction_P Parameter: Age (day) Value: 37
  misc_feature: MA Experiment 20001910 PARAMETER Experiment Name: At_Drought_Reproduction_P Parameter: Organism Value: A. thaliana
  misc_feature: MA Experiment 20001910 PARAMETER Experiment Name: At_Drought_Reproduction_P Parameter: Plant Line Value: WS
  misc_feature: MA Experiment 20001910 PARAMETER Experiment Name: At_Drought_Reproduction_P Parameter: Timepoint (day) Value: 7
  misc_feature: MA Experiment 20001910 PARAMETER Experiment Name: At_Drought_Reproduction_P Parameter: Tissue Value: Flowers
  misc_feature: MA Experiment 20001910 PARAMETER Experiment Name: At_Drought_Reproduction_P Parameter: Treatment Value: Drought vs. No Drought
ataaactctctctctcttttcattattaatcttcccgtctataattcattaattctcgttagcagcttcttcttcgttggattcgtaaaatggatggatttggagctaactacgagtgtttgttctttgatatggacgatactttataccctttgagcatcggaatcaacttagcttgtcgaaacaacatccaagagttcatgcttaaccaactcggaatcgaagagagtgaagttccaaagttgtgtttggatctttacaaagaatatggaaccaccatggctggtctcaaggttatgggttacgaattcgacaacgatgaattccatgaatatgtccatggaagacttccctacgagaaactaaaacctgatccactcctccgtaaccttctcctctctatgcctcaccgtaaaatcatctttactaacgcagacaaagctcacgcaacacgagctctcaacagattgggtcttgaggactgctttgaaggaatcatttgcttcgaaacactaaacccttcttctgattcaaacactcaaatcctctgtaaaccctctgttgaagcatttgaagctgcaattcgcattgcagacattgttgatccacgcaaaacgatattcttcgatgacagtattcgtaacatcgctagtgctaaagcaacagggctaaaaaccgtgtttgtgggggaatcagtgctagttccaggtgctgactatgcactaagcagcattcataacataaaggaagcaatacctgatttatgggaagacaacaaagatgagaagctcgagccaattgttcagcaagccgcggttgcaaccatggtcaatgcttag

SEQ ID NO: 42959 - protein, 249 aa, Arabidopsis thaliana
  peptide (1)..(249): Ceres Seq. ID no. 13647084
  misc_feature (8)..(202): Pfam Name: haloacid dehalogenase-like hydrolase Pfam Description: haloacid dehalogenase-like hydrolase
  misc_feature (6)..(162): Homolog of NCBI NO: 21618155 NR Description: putative ripening-related protein-like
  misc_feature (143)..(246): Homolog of NCBI NO: 30697236 NR Description: haloacid dehalogenase-like hydrolase family
  misc_feature (6)..(162): Homolog of NCBI NO: 30697236 NR Description: haloacid dehalogenase-like hydrolase family
  misc_feature (143)..(246): Homolog of NCBI NO: 30697234 NR Description: haloacid dehalogenase-like hydrolase family
  misc_feature (6)..(162): Homolog of NCBI NO: 30697234 NR Description: haloacid dehalogenase-like hydrolase family
  misc_feature (150)..(249): Homolog of NCBI NO: 7406669 NR Description: putative ripening-related protein [Vitis vinifera]
  misc_feature (8)..(148): Homolog of NCBI NO: 7406669 NR Description: putative ripening-related protein [Vitis vinifera]
  misc_feature (1)..(14): Homolog of NCBI NO: 30695534 NR Description: haloacid dehalogenase-related hydrolase family
  misc_feature (25)..(249): Homolog of NCBI NO: 30695534 NR Description: haloacid dehalogenase-related hydrolase family
  misc_feature (1)..(249): Homolog of NCBI NO: 11279021 NR Description: hypothetical protein F21F14.210 - Arabidopsis
MDGFGANYECLFFDMDDTLYPLSIGINLACRNNIQEFMLNQLGIEESEVPKLCLDLYKEYGTTMAGLKVMGYEFDNDEFHEYVHGRLPYEKLKPDPLLRNLLLSMPHRKIIFTNADKAHATRALNRLGLEDCFEGIICFETLNPSSDSNTQILCKPSVEAFEAAIRIADIVDPRKTIFFDDSIRNIASAKATGLKTVFVGESVLVPGADYALSSIHNIKEAIPDLWEDNKDEKLEPIVQQAAVATMVNA

SEQ ID NO: 42960 - protein, 235 aa, Arabidopsis thaliana
  peptide (1)..(235): Ceres Seq. ID no. 13647085
  misc_feature (1)..(188): Pfam Name: haloacid dehalogenase-like hydrolase Pfam Description: haloacid dehalogenase-like hydrolase
  misc_feature (129)..(232): Homolog of NCBI NO: 21618155 NR Description: putative ripening-related protein-like
  misc_feature (1)..(148): Homolog of NCBI NO: 21618155 NR Description: putative ripening-related protein-like
  misc_feature (129)..(232): Homolog of NCBI NO: 30697236 NR Description: haloacid dehalogenase-like hydrolase family
  misc_feature (1)..(148): Homolog of NCBI NO: 30697236 NR Description: haloacid dehalogenase-like hydrolase family
  misc_feature (129)..(232): Homolog of NCBI NO: 30697234 NR Description: haloacid dehalogenase-like hydrolase family
  misc_feature (1)..(148): Homolog of NCBI NO: 30697234 NR Description: haloacid dehalogenase-like hydrolase family
  misc_feature (136)..(235): Homolog of NCBI NO: 7406669 NR Description: putative ripening-related protein [Vitis vinifera]
  misc_feature (1)..(134): Homolog of NCBI NO: 7406669 NR Description: putative ripening-related protein [Vitis vinifera]
  misc_feature (11)..(235): Homolog of NCBI NO: 30695534 NR Description: haloacid dehalogenase-related hydrolase family
  misc_feature (1)..(235): Homolog of NCBI NO: 11279021 NR Description: hypothetical protein F21F14.210 - Arabidopsis
MDDTLYPLSIGINLACRNNIQEFMLNQLGIEESEVPKLCLDLYKEYGTTMAGLKVMGYEFDNDEFHEYVHGRLPYEKLKPDPLLRNLLLSMPHRKIIFTNADKAHATRALNRLGLEDCFEGIICFETLNPSSDSNTQILCKPSVEAFEAAIRIADIVDPRKTIFFDDSIRNIASAKATGLKTVFVGESVLVPGADYALSSIHNIKEAIPDLWEDNKDEKLEPIVQQAAVATMVNA

SEQ ID NO: 42961 - protein, 212 aa, Arabidopsis thaliana
  peptide (1)..(212): Ceres Seq. ID no. 13647086
  misc_feature (1)..(165): Pfam Name: haloacid dehalogenase-like hydrolase Pfam Description: haloacid dehalogenase-like hydrolase
  misc_feature (106)..(209): Homolog of NCBI NO: 21618155 NR Description: putative ripening-related protein-like
  misc_feature (1)..(125): Homolog of NCBI NO: 21618155 NR Description: putative ripening-related protein-like
  misc_feature (106)..(209): Homolog of NCBI NO: 30697236 NR Description: haloacid dehalogenase-like hydrolase family
  misc_feature (1)..(125): Homolog of NCBI NO: 30697236 NR Description: haloacid dehalogenase-like hydrolase family
  misc_feature (106)..(209): Homolog of NCBI NO: 30697234 NR Description: haloacid dehalogenase-like hydrolase family
  misc_feature (1)..(125): Homolog of NCBI NO: 30697234 NR Description: haloacid dehalogenase-like hydrolase family
  misc_feature (113)..(212): Homolog of NCBI NO: 7406669 NR Description: putative ripening-related protein [Vitis vinifera]
  misc_feature (1)..(111): Homolog of NCBI NO: 7406669 NR Description: putative ripening-related protein [Vitis vinifera]
  misc_feature (1)..(212): Homolog of NCBI NO: 30695534 NR Description: haloacid dehalogenase-related hydrolase family
  misc_feature (1)..(212): Homolog of NCBI NO: 11279021 NR Description: hypothetical protein F21F14.210 - Arabidopsis
MLNQLGIEESEVPKLCLDLYKEYGTTMAGLKVMGYEFDNDEFHEYVHGRLPYEKLKPDPLLRNLLLSMPHRKIIFTNADKAHATRALNRLGLEDCFEGIICFETLNPSSDSNTQILCKPSVEAFEAAIRIADIVDPRKTIFFDDSIRNIASAKATGLKTVFVGESVLVPGADYALSSIHNIKEAIPDLWEDNKDEKLEPIVQQAAVATMVNA

SEQ ID NO: 42962 - DNA, 1254 bp, Arabidopsis thaliana
  misc_feature (1)..(1254): Ceres Seq. ID no. 13592855
  misc_feature: MA Experiment ID: 108434 Result: Up-regulated in Transcription
  misc_feature: MA Experiment 108434 PARAMETER Experiment Name: At_Root_Tips_cDNA_P Parameter: Tissue Value: Root Tips
  misc_feature: MA Experiment ID: 108473 Result: Down-regulated in Transcription
  misc_feature: MA Experiment 108473 PARAMETER Experiment Name: At_Drought_Flowers_cDNA_P Parameter: Timepoint (hr) Value: 7 d
  misc_feature: MA Experiment 108473 PARAMETER Experiment Name: At_Drought_Flowers_cDNA_P Parameter: Tissue Value: Flower
  misc_feature: MA Experiment 108473 PARAMETER Experiment Name: At_Drought_Flowers_cDNA_P Parameter: Treatment Value: Drought vs. No Drought
  misc_feature: MA Experiment ID: 20000113 Result: Down-regulated in Transcription
  misc_feature: MA Experiment 20000113 PARAMETER Experiment Name: At_42deg_Heat_cDNA_P Parameter: Temperature (deg C) Value: 42 vs. 22
  misc_feature: MA Experiment 20000113 PARAMETER Experiment Name: At_42deg_Heat_cDNA_P Parameter: Timepoint (hr) Value: 8
  misc_feature: MA Experiment 20000113 PARAMETER Experiment Name: At_42deg_Heat_cDNA_P Parameter: Tissue Value: Aerial
  misc_feature: MA Experiment ID: 20000144 Result: Down-regulated in Transcription
  misc_feature: MA Experiment 20000144 PARAMETER Experiment Name: At_42deg_Heat_cDNA_P Parameter: Temperature (deg C) Value: 42 vs. 22
  misc_feature: MA Experiment 20000144 PARAMETER Experiment Name: At_42deg_Heat_cDNA_P Parameter: Timepoint (hr) Value: 1
  misc_feature: MA Experiment 20000144 PARAMETER Experiment Name: At_42deg_Heat_cDNA_P Parameter: Tissue Value: Aerial
  misc_feature: MA Experiment ID: 20000171 Result: Down-regulated in Transcription
  misc_feature: MA Experiment 20000171 PARAMETER Experiment Name: At_42deg_Heat_P Parameter: Age (day) Value: 14
  misc_feature: MA Experiment 20000171 PARAMETER Experiment Name: At_42deg_Heat_P Parameter: Organism Value: A. thaliana
  misc_feature: MA Experiment 20000171 PARAMETER Experiment Name: At_42deg_Heat_P Parameter: Plant Line Value: WS
  misc_feature: MA Experiment 20000171 PARAMETER Experiment Name: At_42deg_Heat_P Parameter: Temperature (deg C) Value: 42 vs. 22
  misc_feature: MA Experiment 20000171 PARAMETER Experiment Name: At_42deg_Heat_P Parameter: Timepoint (hr) Value: 1
  misc_feature: MA Experiment 20000171 PARAMETER Experiment Name: At_42deg_Heat_P Parameter: Tissue Value: Aerial
  misc_feature: MA Experiment ID: 20000185 Result: Up-regulated in Transcription
  misc_feature: MA Experiment 20000185 PARAMETER Experiment Name: At_Roots__P Parameter: Age (day) Value: 7 vs. 21
  misc_feature: MA Experiment 20000185 PARAMETER Experiment Name: At_Roots__P Parameter: Organism Value: A. thaliana
  misc_feature: MA Experiment 20000185 PARAMETER Experiment Name: At_Roots__P Parameter: Tissue Value: Roots vs. Whole Plant
  misc_feature: MA Experiment ID: 20000265 Result: Up-regulated in Transcription
  misc_feature: MA Experiment 20000265 PARAMETER Experiment Name: At_Open_Flower_P Parameter: Age (day) Value: 21
  misc_feature: MA Experiment 20000265 PARAMETER Experiment Name: At_Open_Flower_P Parameter: Plant Line Value: WS
  misc_feature: MA Experiment 20000265 PARAMETER Experiment Name: At_Open_Flower_P Parameter: Tissue Value: Closed Flower vs. Whole Plant
  misc_feature: MA Experiment ID: 20000439 Result: Up-regulated in Transcription
  misc_feature: MA Experiment 20000439 PARAMETER Experiment Name: At_Roots__P Parameter: Age (day) Value: 14 vs. 21
  misc_feature: MA Experiment 20000439 PARAMETER Experiment Name: At_Roots__P Parameter: Organism Value: A. thaliana
  misc_feature: MA Experiment 20000439 PARAMETER Experiment Name: At_Roots__P Parameter: Tissue Value: Roots vs. Whole Plant
  misc_feature: MA Experiment ID: 20000495 Result: Up-regulated in Transcription
  misc_feature: MA Experiment 20000495 PARAMETER Experiment Name: At_Guard_Cells_P Parameter: Harvest Date Value: 8/2/2002
  misc_feature: MA Experiment 20000495 PARAMETER Experiment Name: At_Guard_Cells_P Parameter: Organism Value: A. thaliana
  misc_feature: MA Experiment 20000495 PARAMETER Experiment Name: At_Guard_Cells_P Parameter: Tissue Value: Guard Cells vs. Leaves
  misc_feature: MA Experiment ID: 20000794 Result: Down-regulated in Transcription
  misc_feature: MA Experiment 20000794 PARAMETER Experiment Name: At_Petals_P Parameter: Age (day) Value: 23-25 days
  misc_feature: MA Experiment 20000794 PARAMETER Experiment Name: At_Petals_P Parameter: Plant Line Value: WS
  misc_feature: MA Experiment 20000794 PARAMETER Experiment Name: At_Petals_P Parameter: Tissue Value: Petals vs. Whole plant
  misc_feature: MA Experiment ID: 20001248 Result: Down-regulated in Transcription
  misc_feature: MA Experiment 20001248 PARAMETER Experiment Name: At_Far-red-induction_P Parameter: Age (day) Value: 7
  misc_feature: MA Experiment 20001248 PARAMETER Experiment Name: At_Far-red-induction_P Parameter: Light Value: Far-red vs. White
  misc_feature: MA Experiment 20001248 PARAMETER Experiment Name: At_Far-red-induction_P Parameter: Organism Value: A. thaliana
  misc_feature: MA Experiment 20001248 PARAMETER Experiment Name: At_Far-red-induction_P Parameter: Plant Line Value: Columbia
  misc_feature: MA Experiment 20001248 PARAMETER Experiment Name: At_Far-red-induction_P Parameter: Timepoint (hr) Value: 4
  misc_feature: MA Experiment 20001248 PARAMETER Experiment Name: At_Far-red-induction_P Parameter: Tissue Value: Whole Plant
  misc_feature: MA Experiment ID: 20001450 Result: Down-regulated in Transcription
  misc_feature: MA Experiment 20001450 PARAMETER Experiment Name: At_Far-red-induction_P Parameter: Age (day) Value: 7
  misc_feature: MA Experiment 20001450 PARAMETER Experiment Name: At_Far-red-induction_P Parameter: Light Value: Far-red vs. White
  misc_feature: MA Experiment 20001450 PARAMETER Experiment Name: At_Far-red-induction_P Parameter: Organism Value: A. thaliana
  misc_feature: MA Experiment 20001450 PARAMETER Experiment Name: At_Far-red-induction_P Parameter: Plant Line Value: Columbia
  misc_feature: MA Experiment 20001450 PARAMETER Experiment Name: At_Far-red-induction_P Parameter: Timepoint (hr) Value: 8
  misc_feature: MA Experiment 20001450 PARAMETER Experiment Name: At_Far-red-induction_P Parameter: Tissue Value: Whole Plant
  misc_feature: MA Experiment ID: 20001911 Result: Down-regulated in Transcription
  misc_feature: MA Experiment 20001911 PARAMETER Experiment Name: At_Drought_Reproduction_P Parameter: Age (day) Value: 40
  misc_feature: MA Experiment 20001911 PARAMETER Experiment Name: At_Drought_Reproduction_P Parameter: Organism Value: A. thaliana
  misc_feature: MA Experiment 20001911 PARAMETER Experiment Name: At_Drought_Reproduction_P Parameter: Plant Line Value: WS
  misc_feature: MA Experiment 20001911 PARAMETER Experiment Name: At_Drought_Reproduction_P Parameter: Timepoint (day) Value: 10
  misc_feature: MA Experiment 20001911 PARAMETER Experiment Name: At_Drought_Reproduction_P Parameter: Tissue Value: Flowers
  misc_feature: MA Experiment 20001911 PARAMETER Experiment Name: At_Drought_Reproduction_P Parameter: Treatment Value: Drought vs. No Drought
attccatcaatttctcatccttgttgttttcttcttcttcttcttcctcttcttttatgtccatcgccgtcgaagtttctccggtaatggaagacatcacacggcagagcaaaaaaacttcggttgagaatgaaaccggcgatgatcagtcagcaacatcagtagtccttaaagctaaacgcaaacgccgatcgcaaccacgagacgctccaccccaacgtagctccgtccatagaggcgtcacaaggcatcgatggactggaaggtacgaagcacatttgtgggataagaatagttggaacgaaactcagaccaagaaaggaagacaagtatatttaggggcatatgacgaggaagatgcagcagcacgtgcctacgacttagcagcattgaaatattggggacgagacaccatcttgaacttccctttgtgtaattatgaagaagacatcaaagaaatggaaagccagtcaaaggaagagtatattggatctttgagaagaaaaagtagtgggttttcacgaggtgtatcaaaatacagaggcgttgcaaagcatcaccacaatgggagatgggaagctcgaatcggaagagtgtttggcaataaatatttataccttggaacttacgcgacgcaagaagaagcagctatagcgtacgatatcgcagctatcgagtaccgtggactcaacgccgttactaacttcgacatcagccgttatctgaaactcccggtgccggagaaccctatcgataccgcgaataatctcctcgagagtccgcattctgatcttagcccatttataaaacctaaccacgagtctgacttatcacagagtcaatcttcgtcagaggacaacgatgatcggaaaacaaagctcttgaagtcgtcacctttagtggcagaggaggtaatcggaccatcgacgccacctgagattgctccgcctcgtcggagcttcccggaagatatccagacgtatttcgggtgtcaaaactccggcaagttaacggcggaggaagatgatgttatcttcggtgatttagattctttccttacgcctgatttctacagcgagttaaatgattgctaaagtgttgttcttctgataagttttgttttttagttgttcagaatctcggttgtgaaaatcaacattgacacatcgattattctttcttgtgacaatcttatataataaagtttgaatctttctaaaaaaaaaaaaaaaaaagcttatcgataccgtcgac

SEQ ID NO: 42963 - protein, 363 aa, Arabidopsis thaliana
  peptide (1)..(363): Ceres Seq. ID no. 13592856
  misc_feature (74)..(147): Pfam Name: AP2 domain Pfam Description: AP2 domain
  misc_feature (72)..(286): Homolog of NCBI NO: 21069051 NR Description: AP2/EREBP transcription factor BABY BOOM1
  misc_feature (72)..(281): Homolog of NCBI NO: 21069057 NR Description: BABY BOOM [Arabidopsis thaliana]
  misc_feature (72)..(286): Homolog of NCBI NO: 21069053 NR Description: AP2/EREBP transcription factor BABY BOOM2
  misc_feature (13)..(262): Homolog of NCBI NO: 15218529 NR Description: ovule development protein, putative [Arabidopsis
  misc_feature (29)..(209): Homolog of NCBI NO: 26449695 NR Description: unknown protein [Arabidopsis thaliana]
  misc_feature (29)..(287): Homolog of NCBI NO: 15219975 NR Description: ovule development protein, putative [Arabidopsis
  misc_feature (263)..(361): Homolog of NCBI NO: 34221733 NR Description: putative AP2 domain transcription factor
  misc_feature (29)..(260): Homolog of NCBI NO: 34221733 NR Description: putative AP2 domain transcription factor
  misc_feature (29)..(363): Homolog of NCBI NO: 25518475 NR Description: hypothetical protein T24D18.16 - Arabidopsis
  misc_feature (19)..(363): Homolog of NCBI NO: 18394319 NR Description: ovule development protein, putative [Arabidopsis
SINFSSLLFSSSSSSSSFMSIAVEVSPVMEDITRQSKKTSVENETGDDQSATSVVLKAKRKRRSQPRDAPPQRSSVHRGVTRHRWTGRYEAHLWDKNSWNETQTKKGRQVYLGAYDEEDAAARAYDLAALKYWGRDTILNFPLCNYEEDIKEMESQSKEEYIGSLRRKSSGFSRGVSKYRGVAKHHHNGRWEARIGRVFGNKYLYLGTYATQEEAAIAYDIAAIEYRGLNAVTNFDISRYLKLPVPENPIDTANNLLESPHSDLSPFIKPNHESDLSQSQSSSEDNDDRKTKLLKSSPLVAEEVIGPSTPPEIAPPRRSFPEDIQTYFGCQNSGKLTAEEDDVIFGDLDSFLTPDFYSELNDC

SEQ ID NO: 42964 - protein, 345 aa, Arabidopsis thaliana
  peptide (1)..(345): Ceres Seq. ID no. 13592857
  misc_feature (56)..(129): Pfam Name: AP2 domain Pfam Description: AP2 domain
  misc_feature (54)..(268): Homolog of NCBI NO: 21069051 NR Description: AP2/EREBP transcription factor BABY BOOM1
  misc_feature (54)..(263): Homolog of NCBI NO: 21069057 NR Description: BABY BOOM [Arabidopsis thaliana]
  misc_feature (54)..(268): Homolog of NCBI NO: 21069053 NR Description: AP2/EREBP transcription factor BABY BOOM2
  misc_feature (1)..(244): Homolog of NCBI NO: 15218529 NR Description: ovule development protein, putative [Arabidopsis
  misc_feature (11)..(191): Homolog of NCBI NO: 26449695 NR Description: unknown protein [Arabidopsis thaliana]
  misc_feature (11)..(269): Homolog of NCBI NO: 15219975 NR Description: ovule development protein, putative [Arabidopsis
  misc_feature (245)..(343): Homolog of NCBI NO: 34221733 NR Description: putative AP2 domain transcription factor
  misc_feature (11)..(242): Homolog of NCBI NO: 34221733 NR Description: putative AP2 domain transcription factor
  misc_feature (11)..(345): Homolog of NCBI NO: 25518475 NR Description: hypothetical protein T24D18.16 - Arabidopsis
  misc_feature (1)..(345): Homolog of NCBI NO: 18394319 NR Description: ovule development protein, putative [Arabidopsis
MSIAVEVSPVMEDITRQSKKTSVENETGDDQSATSVVLKAKRKRRSQPRDAPPQRSSVHRGVTRHRWTGRYEAHLWDKNSWNETQTKKGRQVYLGAYDEEDAAARAYDLAALKYWGRDTILNFPLCNYEEDIKEMESQSKEEYIGSLRRKSSGFSRGVSKYRGVAKHHHNGRWEARIGRVFGNKYLYLGTYATQEEAAIAYDIAAIEYRGLNAVTNFDISRYLKLPVPENPIDTANNLLESPHSDLSPFIKPNHESDLSQSQSSSEDNDDRKTKLLKSSPLVAEEVIGPSTPPEIAPPRRSFPEDIQTYFGCQNSGKLTAEEDDVIFGDLDSFLTPDFYSELNDC

SEQ ID NO: 42965 - protein, 335 aa, Arabidopsis thaliana
  peptide (1)..(335): Ceres Seq. ID no. 13592858
  misc_feature (46)..(119): Pfam Name: AP2 domain Pfam Description: AP2 domain
  misc_feature (44)..(258): Homolog of NCBI NO: 21069051 NR Description: AP2/EREBP transcription factor BABY BOOM1
  misc_feature (44)..(253): Homolog of NCBI NO: 21069057 NR Description: BABY BOOM [Arabidopsis thaliana]
  misc_feature (44)..(258): Homolog of NCBI NO: 21069053 NR Description: AP2/EREBP transcription factor BABY BOOM2
  misc_feature (1)..(234): Homolog of NCBI NO: 15218529 NR Description: ovule development protein, putative [Arabidopsis
  misc_feature (1)..(181): Homolog of NCBI NO: 26449695 NR Description: unknown protein [Arabidopsis thaliana]
  misc_feature (1)..(259): Homolog of NCBI NO: 15219975 NR Description: ovule development protein, putative [Arabidopsis
  misc_feature (235)..(333): Homolog of NCBI NO: 34221733 NR Description: putative AP2 domain transcription factor
  misc_feature (1)..(232): Homolog of NCBI NO: 34221733 NR Description: putative AP2 domain transcription factor
  misc_feature (1)..(335): Homolog of NCBI NO: 25518475 NR Description: hypothetical protein T24D18.16 - Arabidopsis
  misc_feature (1)..(335): Homolog of NCBI NO: 18394319 NR Description: ovule development protein, putative [Arabidopsis
MEDITRQSKKTSVENETGDDQSATSVVLKAKRKRRSQPRDAPPQRSSVHRGVTRHRWTGRYEAHLWDKNSWNETQTKKGRQVYLGAYDEEDAAARAYDLAALKYWGRDTILNFPLCNYEEDIKEMESQSKEEYIGSLRRKSSGFSRGVSKYRGVAKHHHNGRWEARIGRVFGNKYLYLGTYATQEEAAIAYDIAAIEYRGLNAVTNFDISRYLKLPVPENPIDTANNLLESPHSDLSPFIKPNHESDLSQSQSSSEDNDDRKTKLLKSSPLVAEEVIGPSTPPEIAPPRRSFPEDIQTYFGCQNSGKLTAEEDDVIFGDLDSFLTPDFYSELNDC

SEQ ID NO: 42966 - DNA, 1177 bp, Arabidopsis thaliana
  misc_feature (1)..(1177): Ceres Seq. ID no. 12558559
  misc_feature: MA Experiment ID: 20000306 Result: Down-regulated in Transcription
  misc_feature: MA Experiment 20000306 PARAMETER Experiment Name: At_Germinating_Seeds_Sub_P Parameter: Age (hr) Value: 6 vs. 0
  misc_feature: MA Experiment 20000306 PARAMETER Experiment Name: At_Germinating_Seeds_Sub_P Parameter: Organism Value: A. thaliana
  misc_feature: MA Experiment 20000306 PARAMETER Experiment Name: At_Germinating_Seeds_Sub_P Parameter: Plant Line Value: WS
  misc_feature: MA Experiment 20000306 PARAMETER Experiment Name: At_Germinating_Seeds_Sub_P Parameter: Tissue Value: Germinating Seeds
  misc_feature: MA Experiment ID: 20000347 Result: Up-regulated in Transcription
  misc_feature: MA Experiment 20000347 PARAMETER Experiment Name: At_2mM_SA_Sub_P Parameter: Age (day) Value: 14
  misc_feature: MA Experiment 20000347 PARAMETER Experiment Name: At_2mM_SA_Sub_P Parameter: Organism Value: A. thaliana
  misc_feature: MA Experiment 20000347 PARAMETER Experiment Name: At_2mM_SA_Sub_P Parameter: Plant Line Value: WS
  misc_feature: MA Experiment 20000347 PARAMETER Experiment Name: At_2mM_SA_Sub_P Parameter: Timepoint (hr) Value: 6
  misc_feature: MA Experiment 20000347 PARAMETER Experiment Name: At_2mM_SA_Sub_P Parameter: Tissue Value: Aerial
  misc_feature: MA Experiment 20000347 PARAMETER Experiment Name: At_2mM_SA_Sub_P Parameter: Treatment Value: 2mM SA vs. No Treatment
  misc_feature: MA Experiment ID: 20000355 Result: Down-regulated in Transcription
  misc_feature: MA Experiment 20000355 PARAMETER Experiment Name: At_Siliques_Sub_P Parameter: Age (day) Value: 21
  misc_feature: MA Experiment 20000355 PARAMETER Experiment Name: At_Siliques_Sub_P Parameter: Organism Value: A. thaliana
  misc_feature: MA Experiment 20000355 PARAMETER Experiment Name: At_Siliques_Sub_P Parameter: Plant Line Value: WS
  misc_feature: MA Experiment 20000355 PARAMETER Experiment Name: At_Siliques_Sub_P Parameter: Tissue Value: Less Than 5mm Siliques vs. Whole Plant
  misc_feature: MA Experiment ID: 20000440 Result: Down-regulated in Transcription
  misc_feature: MA Experiment 20000440 PARAMETER Experiment Name: At_Closed-Flower__Sub_P Parameter: Tissue Value: Closed Flower vs. Whole Plant
atagagagcttaagcaaaagatctcatactttcaagattgatcgatctctcaagtctcaacaatgtcatcatcatcatcagttcctgcttacttgggagatgaagatctgacacaagaaacaagagctctgatctcttctcttcctaaagagaaaggttggttagtgagtgaaatatatgaattccaaggactttggcacacacaagctattttacaaggaatcttgatctgccaaaaacgctttgaagctaaagattccgacattatcctcgtcactaatcctaaatcaggtaccacttggttaaaagctcttgtctttgctctccttaaccgacacaagtttccagtttcttcttctggtaaccatcctcttctggtcaccaatccacaccttcttgtgcccttcttggaaggagtttactacgagtccccagatttcgatttctccagtttgccttctccaagactgatgaacacgcacatatcgcatctttcgctccccgagtctgttaagagctcgtcttgtaagattgtgtattgttgtaggaaccctaaggacatgtttgtgtccttatggcattttgggaaaaagctagctcctgaggaaaccgcggattatcctatcgaaaaagcggttgaagcgttttgtgaagggaagtttataggtggacccttttgggatcatatattggagtactggtatgcaagccgcgagaatccgaacaaggtcttgtttgttacttacgaggagctaaagaagcagaccgaagttgagatgaagcggatcgcggagttcttggaatgtggctttattgaagaagaagaagtgagagagattgtgaagttgtgtagctttgagagtttaagtaatttggaagttaacaaagaagggaaattgccaaatggaatagagactaaaactttctttagaaaaggagagattggaggatggagagatactttgagtgagtcattggcagaggaaattgatagaaccattgaagagaagtttaaaggttctggtcttaaattttcttcttgaatcaatctttgaaacttgttctcatgttcttgttttgcttcaattatgttatttcttgttttatatatttttctgctgttatgtttgtgtttgtgtttatgaataaaatgaaataaattatgtttgtgttttct

SEQ ID NO: 42967 - protein, 326 aa, Arabidopsis thaliana
  peptide (1)..(326): Ceres Seq. ID no. 12558560
  misc_feature (7)..(324): Homolog of NCBI NO: 9759557 NR Description: steroid sulfotransferase-like protein
  misc_feature (13)..(324): Homolog of NCBI NO: 15230603 NR Description: sulfotransferase-like protein; protein id:
  misc_feature (14)..(324): Homolog of NCBI NO: 15230602 NR Description: sulfotransferase-like protein; protein id:
  misc_feature (3)..(324): Homolog of NCBI NO: 15227704 NR Description: putative steroid sulfotransferase; protein id:
  misc_feature (4)..(326): Homolog of NCBI NO: 7434981 NR Description: probable steroid sulfotransferase (EC 2.8.2.15) 1
  misc_feature (1)..(325): Homolog of NCBI NO: 7434973 NR Description: probable steroid sulfotransferase (EC 2.8.2.15) 2
  misc_feature (1)..(325): Homolog of NCBI NO: 38230552 NR Description: steroid sulfotransferase 4 [Brassica napus]
  misc_feature (1)..(325): Homolog of NCBI NO: 7434974 NR Description: probable steroid sulfotransferase (EC 2.8.2.15) 3
  misc_feature (1)..(300): Homolog of NCBI NO: 2129586 NR Description: probable flavonol sulfotransferase (EC 2.8.2.-) -
  misc_feature (1)..(326): Homolog of NCBI NO: 15227699 NR Description: putative steroid sulfotransferase
MSSSSSVPAYLGDEDLTQETRALISSLPKEKGWLVSEIYEFQGLWHTQAILQGILICQKRFEAKDSDIILVTNPKSGTTWLKALVFALLNRHKFPVSSSGNHPLLVTNPHLLVPFLEGVYYESPDFDFSSLPSPRLMNTHISHLSLPESVKSSSCKIVYCCRNPKDMFVSLWHFGKKLAPEETADYPIEKAVEAFCEGKFIGGPFWDHILEYWYASRENPNKVLFVTYEELKKQTEVEMKRIAEFLECGFIEEEEVREIVKLCSFESLSNLEVNKEGKLPNGIETKTFFRKGEIGGWRDTLSESLAEEIDRTIEEKFKGSGLKFSS

SEQ ID NO: 42968 - protein, 190 aa, Arabidopsis thaliana
  peptide (1)..(190): Ceres Seq. ID no. 12558561
  misc_feature (1)..(188): Homolog of NCBI NO: 9759557 NR Description: steroid sulfotransferase-like protein
  misc_feature (1)..(188): Homolog of NCBI NO: 15230603 NR Description: sulfotransferase-like protein; protein id:
  misc_feature (1)..(188): Homolog of NCBI NO: 15230602 NR Description: sulfotransferase-like protein; protein id:
  misc_feature (1)..(188): Homolog of NCBI NO: 15227704 NR Description: putative steroid sulfotransferase; protein id:
  misc_feature (1)..(190): Homolog of NCBI NO: 7434981 NR Description: probable steroid sulfotransferase (EC 2.8.2.15) 1
  misc_feature (1)..(189): Homolog of NCBI NO: 7434973 NR Description: probable steroid sulfotransferase (EC 2.8.2.15) 2
  misc_feature (1)..(189): Homolog of NCBI NO: 38230552 NR Description: steroid sulfotransferase 4 [Brassica napus]
  misc_feature (1)..(189): Homolog of NCBI NO: 7434974 NR Description: probable steroid sulfotransferase (EC 2.8.2.15) 3
  misc_feature (1)..(164): Homolog of NCBI NO: 2129586 NR Description: probable flavonol sulfotransferase (EC 2.8.2.-) -
  misc_feature (1)..(190): Homolog of NCBI NO: 15227699 NR Description: putative steroid sulfotransferase
MNTHISHLSLPESVKSSSCKIVYCCRNPKDMFVSLWHFGKKLAPEETADYPIEKAVEAFCEGKFIGGPFWDHILEYWYASRENPNKVLFVTYEELKKQTEVEMKRIAEFLECGFIEEEEVREIVKLCSFESLSNLEVNKEGKLPNGIETKTFFRKGEIGGWRDTLSESLAEEIDRTIEEKFKGSGLKFSS

SEQ ID NO: 42969 - DNA, 1163 bp, Arabidopsis thaliana; identical to SEQ ID NO: 22762
  misc_feature (1)..(1163): Ceres Seq. ID no. 12558793
  misc_feature: MA Experiment ID: 108434 Result: Up-regulated in Transcription
  misc_feature: MA Experiment 108434 PARAMETER Experiment Name: At_Root_Tips_cDNA_P Parameter: Tissue Value: Root Tips
  misc_feature: MA Experiment ID: 108461 Result: Up-regulated in Transcription
  misc_feature: MA Experiment 108461 PARAMETER Experiment Name: At_Germinating_Seeds_cDNA_P Parameter: Age (day) Value: 1 vs. 0
  misc_feature: MA Experiment 108461 PARAMETER Experiment Name: At_Germinating_Seeds_cDNA_P Parameter: Tissue Value: Germinating Seeds
  misc_feature: MA Experiment ID: 108668 Result: Down-regulated in Transcription
  misc_feature: MA Experiment 108668 PARAMETER Experiment Name: At_2mM_SA_cDNA_P Parameter: Plant Line Value: WS
  misc_feature: MA Experiment 108668 PARAMETER Experiment Name: At_2mM_SA_cDNA_P Parameter: Timepoint (hr) Value: 6
  misc_feature: MA Experiment 108668 PARAMETER Experiment Name: At_2mM_SA_cDNA_P Parameter: Treatment Value: 2mM SA vs. No Treatment
  misc_feature: MA Experiment ID: 20000069 Result: Down-regulated in Transcription
  misc_feature: MA Experiment 20000069 PARAMETER Experiment Name: At_100uM_ABA_Mutants_cDNA_P Parameter: Plant Line Value: CS23
  misc_feature: MA Experiment 20000069 PARAMETER Experiment Name: At_100uM_ABA_Mutants_cDNA_P Parameter: Timepoint (hr) Value: 6
  misc_feature: MA Experiment 20000069 PARAMETER Experiment Name: At_100uM_ABA_Mutants_cDNA_P Parameter: Tissue Value: Aerial
  misc_feature: MA Experiment 20000069 PARAMETER Experiment Name: At_100uM_ABA_Mutants_cDNA_P Parameter: Treatment Value: 100uM ABA vs. No Treatment
  misc_feature: MA Experiment ID: 20000087 Result: Down-regulated in Transcription
  misc_feature: MA Experiment 20000087 PARAMETER Experiment Name: At_100uM_ABA_Mutants_cDNA_P Parameter: Plant Line Value: WS
  misc_feature: MA Experiment 20000087 PARAMETER Experiment Name: At_100uM_ABA_Mutants_cDNA_P Parameter: Timepoint (hr) Value: 6
  misc_feature: MA Experiment 20000087 PARAMETER Experiment Name: At_100uM_ABA_Mutants_cDNA_P Parameter: Tissue Value: Aerial
  misc_feature: MA Experiment 20000087 PARAMETER Experiment Name: At_100uM_ABA_Mutants_cDNA_P Parameter: Treatment Value: 100uM ABA vs. No Treatment
  misc_feature: MA Experiment ID: 20000111 Result: Up-regulated in Transcription
  misc_feature: MA Experiment 20000111 PARAMETER Experiment Name: At_42deg_Heat_cDNA_P Parameter: Temperature (deg C) Value: 42 vs. 22
  misc_feature: MA Experiment 20000111 PARAMETER Experiment Name: At_42deg_Heat_cDNA_P Parameter: Timepoint (hr) Value: 6
  misc_feature: MA Experiment 20000111 PARAMETER Experiment Name: At_42deg_Heat_cDNA_P Parameter: Tissue Value: Aerial
  misc_feature: MA Experiment ID: 20000113 Result: Up-regulated in Transcription
  misc_feature: MA Experiment 20000113 PARAMETER Experiment Name: At_42deg_Heat_cDNA_P Parameter: Temperature (deg C) Value: 42 vs. 22
  misc_feature: MA Experiment 20000113 PARAMETER Experiment Name: At_42deg_Heat_cDNA_P Parameter: Timepoint (hr) Value: 8
  misc_feature: MA Experiment 20000113 PARAMETER Experiment Name: At_42deg_Heat_cDNA_P Parameter: Tissue Value: Aerial
  misc_feature: MA Experiment ID: 20000117 Result: Down-regulated in Transcription
  misc_feature: MA Experiment 20000117 PARAMETER Experiment Name: At_100uM_ABA_Mutants_cDNA_P Parameter: Plant Line Value: Columbia
  misc_feature: MA Experiment 20000117 PARAMETER Experiment Name: At_100uM_ABA_Mutants_cDNA_P Parameter: Timepoint (hr) Value: 6
  misc_feature: MA Experiment 20000117 PARAMETER Experiment Name: At_100uM_ABA_Mutants_cDNA_P Parameter: Tissue Value: Aerial
  misc_feature: MA Experiment 20000117 PARAMETER Experiment Name: At_100uM_ABA_Mutants_cDNA_P Parameter: Treatment Value: 100uM ABA vs. No Treatment
  misc_feature: MA Experiment ID: 20000173 Result: Up-regulated in Transcription
  misc_feature: MA Experiment 20000173 PARAMETER Experiment Name: At_42deg_Heat_P Parameter: Age (day) Value: 14
  misc_feature: MA Experiment 20000173 PARAMETER Experiment Name: At_42deg_Heat_P Parameter: Organism Value: A. thaliana
  misc_feature: MA Experiment 20000173 PARAMETER Experiment Name: At_42deg_Heat_P Parameter: Plant Line Value: WS
  misc_feature: MA Experiment 20000173 PARAMETER Experiment Name: At_42deg_Heat_P Parameter: Temperature (deg C) Value: 42 vs. 22
  misc_feature: MA Experiment 20000173 PARAMETER Experiment Name: At_42deg_Heat_P Parameter: Timepoint (hr) Value: 6
  misc_feature: MA Experiment 20000173 PARAMETER Experiment Name: At_42deg_Heat_P Parameter: Tissue Value: Aerial
  misc_feature: MA Experiment ID: 20000179 Result: Up-regulated in Transcription
  misc_feature: MA Experiment 20000179 PARAMETER Experiment Name: At_Germinating_Seeds_P Parameter: Age (hr) Value: 6 vs. 0
  misc_feature: MA Experiment 20000179 PARAMETER Experiment Name: At_Germinating_Seeds_P Parameter: Tissue Value: Germinating Seeds
  misc_feature: MA Experiment ID: 20000180 Result: Up-regulated in Transcription
  misc_feature: MA Experiment 20000180 PARAMETER Experiment Name: At_Germinating_Seeds_P Parameter: Age (hr) Value: 24 vs. 0
  misc_feature: MA Experiment 20000180 PARAMETER Experiment Name: At_Germinating_Seeds_P Parameter: Tissue Value: Germinating Seeds
  misc_feature: MA Experiment ID: 20000182 Result: Down-regulated in Transcription
  misc_feature: MA Experiment 20000182 PARAMETER Experiment Name: At_2mM_SA_P Parameter: Age (day) Value: 14
  misc_feature: MA Experiment 20000182 PARAMETER Experiment Name: At_2mM_SA_P Parameter: Organism Value: A. thaliana
  misc_feature: MA Experiment 20000182 PARAMETER Experiment Name: At_2mM_SA_P Parameter: Plant Line Value: WS
  misc_feature: MA Experiment 20000182 PARAMETER Experiment Name: At_2mM_SA_P Parameter: Timepoint (hr) Value: 6
  misc_feature: MA Experiment 20000182 PARAMETER Experiment Name: At_2mM_SA_P Parameter: Tissue Value: Aerial
  misc_feature: MA Experiment 20000182 PARAMETER Experiment Name: At_2mM_SA_P Parameter: Treatment Value: 2mM SA vs. No Treatment
  misc_feature: MA Experiment ID: 20000234 Result: Up-regulated in Transcription
  misc_feature: MA Experiment 20000234 PARAMETER Experiment Name: At_Siliques_P Parameter: Age (day) Value: 21
  misc_feature: MA Experiment 20000234 PARAMETER Experiment Name: At_Siliques_P Parameter: Organism Value: A. thaliana
  misc_feature: MA Experiment 20000234 PARAMETER Experiment Name: At_Siliques_P Parameter: Plant Line Value: WS
  misc_feature: MA Experiment 20000234 PARAMETER Experiment Name: At_Siliques_P Parameter: Tissue Value: Less Than 5mm Siliques vs. Whole Plant
  misc_feature: MA Experiment ID: 20000235 Result: Up-regulated in Transcription
  misc_feature: MA Experiment 20000235 PARAMETER Experiment Name: At_Siliques_P Parameter: Age (day) Value: 21
  misc_feature: MA Experiment 20000235 PARAMETER Experiment Name: At_Siliques_P Parameter: Organism Value: A. thaliana
  misc_feature: MA Experiment 20000235 PARAMETER Experiment Name: At_Siliques_P Parameter: Plant Line Value: WS
  misc_feature: MA Experiment 20000235 PARAMETER Experiment Name: At_Siliques_P Parameter: Tissue Value: 5-10mm Siliques vs. Whole Plant
  misc_feature: MA Experiment ID: 20000496 Result: Up-regulated in Transcription
  misc_feature: MA Experiment 20000496 PARAMETER Experiment Name: At_Guard_Cells_P Parameter: Harvest Date Value: 7/19/2002
  misc_feature: MA Experiment 20000496 PARAMETER Experiment Name: At_Guard_Cells_P Parameter: Organism Value: Canola
  misc_feature: MA Experiment 20000496 PARAMETER Experiment Name: At_Guard_Cells_P Parameter: Tissue Value: Guard Cells vs. Leaves
  misc_feature: MA Experiment ID: 20000573 Result: Down-regulated in Transcription
  misc_feature: MA Experiment 20000573 PARAMETER Experiment Name: At_100uM_ABA_Mutants__P Parameter: Organism Value: A. thaliana
  misc_feature: MA Experiment 20000573 PARAMETER Experiment Name: At_100uM_ABA_Mutants__P Parameter: Plant Line Value: CS22 vs. Ler wt
  misc_feature: MA Experiment 20000573 PARAMETER Experiment Name: At_100uM_ABA_Mutants__P Parameter: Timepoint (hr) Value: N/A
  misc_feature: MA Experiment 20000573 PARAMETER Experiment Name: At_100uM_ABA_Mutants__P Parameter: Tissue Value: Whole Plant
  misc_feature: MA Experiment 20000573 PARAMETER Experiment Name: At_100uM_ABA_Mutants__P Parameter: Treatment Value: None
  misc_feature: MA Experiment ID: 20000574 Result: Down-regulated in Transcription
  misc_feature: MA Experiment 20000574 PARAMETER Experiment Name: At_100uM_ABA_Mutants__P Parameter: Organism Value: A. thaliana
  misc_feature: MA Experiment 20000574 PARAMETER Experiment Name: At_100uM_ABA_Mutants__P Parameter: Plant Line Value: CS23 vs. Ler wt
  misc_feature: MA Experiment 20000574 PARAMETER Experiment Name: At_100uM_ABA_Mutants__P Parameter: Timepoint (hr) Value: N/A
  misc_feature: MA Experiment 20000574 PARAMETER Experiment Name: At_100uM_ABA_Mutants__P Parameter: Tissue Value: Whole Plant
  misc_feature: MA Experiment 20000574 PARAMETER Experiment Name: At_100uM_ABA_Mutants__P Parameter: Treatment Value: None
  misc_feature: MA Experiment ID: 20001555 Result: Up-regulated in Transcription
  misc_feature: MA Experiment 20001555 PARAMETER Experiment Name: At_Drought_Soil_Dry_P Parameter: Age (day) Value: 24
  misc_feature: MA Experiment 20001555 PARAMETER Experiment Name: At_Drought_Soil_Dry_P Parameter: Organism Value: A. thaliana
  misc_feature: MA Experiment 20001555 PARAMETER Experiment Name: At_Drought_Soil_Dry_P Parameter: Plant Line Value: WS
  misc_feature: MA Experiment 20001555 PARAMETER Experiment Name: At_Drought_Soil_Dry_P Parameter: Post Timepoint (hr) Value: None
  misc_feature: MA Experiment 20001555 PARAMETER Experiment Name: At_Drought_Soil_Dry_P Parameter: Post-Treatment Value: None
  misc_feature: MA Experiment 20001555 PARAMETER Experiment Name: At_Drought_Soil_Dry_P Parameter: Timepoint (day) Value: 10
  misc_feature: MA Experiment 20001555 PARAMETER Experiment Name: At_Drought_Soil_Dry_P Parameter: Treatment Value: Drought vs. No Drought
  misc_feature: MA Experiment ID: 20001556 Result: Up-regulated in Transcription
  misc_feature: MA Experiment 20001556 PARAMETER Experiment Name: At_Drought_Soil_Dry_P Parameter: Age (day) Value: 26
  misc_feature: MA Experiment 20001556 PARAMETER Experiment Name: At_Drought_Soil_Dry_P Parameter: Organism Value: A. thaliana
  misc_feature: MA Experiment 20001556 PARAMETER Experiment Name: At_Drought_Soil_Dry_P Parameter: Plant Line Value: WS
  misc_feature: MA Experiment 20001556 PARAMETER Experiment Name: At_Drought_Soil_Dry_P Parameter: Post Timepoint (hr) Value: None
  misc_feature: MA Experiment 20001556 PARAMETER Experiment Name: At_Drought_Soil_Dry_P Parameter: Post-Treatment Value: None
  misc_feature: MA Experiment 20001556 PARAMETER Experiment Name: At_Drought_Soil_Dry_P Parameter: Timepoint (day) Value: 12
  misc_feature: MA Experiment 20001556 PARAMETER Experiment Name: At_Drought_Soil_Dry_P Parameter: Treatment Value: Drought vs. No Drought
  misc_feature: MA Experiment ID: 20001558 Result: Up-regulated in Transcription
  misc_feature: MA Experiment 20001558 PARAMETER Experiment Name: At_Drought_Soil_Dry_P Parameter: Age (day) Value: 27
  misc_feature: MA Experiment 20001558 PARAMETER Experiment Name: At_Drought_Soil_Dry_P Parameter: Organism Value: A. thaliana
  misc_feature: MA Experiment 20001558 PARAMETER Experiment Name: At_Drought_Soil_Dry_P Parameter: Plant Line Value: WS
  misc_feature: MA Experiment 20001558 PARAMETER Experiment Name: At_Drought_Soil_Dry_P Parameter: Post Timepoint (hr) Value: 6
  misc_feature: MA Experiment 20001558 PARAMETER Experiment Name: At_Drought_Soil_Dry_P Parameter: Post-Treatment Value: Re-Water vs. No Drought
  misc_feature: MA Experiment 20001558 PARAMETER Experiment Name: At_Drought_Soil_Dry_P Parameter: Timepoint (day) Value: 13
  misc_feature: MA Experiment 20001558 PARAMETER Experiment Name: At_Drought_Soil_Dry_P Parameter: Treatment Value: Drought vs. No Drought

SEQ ID NO: 42970 - protein, 314 aa, Arabidopsis thaliana; identical to SEQ ID NO: 22763
  peptide (1)..(314): Ceres Seq. ID no. 12558794
  misc_feature (6)..(314): Homolog of NCBI NO: 34908280 NR Description: putative aldose reductase
  misc_feature (1)..(314): Homolog of NCBI NO: 13160399 NR Description: aldose reductase [Digitalis purpurea]
  misc_feature (1)..(314): Homolog of NCBI NO: 13160397 NR Description: aldose reductase [Digitalis purpurea]
  misc_feature (1)..(289): Homolog of NCBI NO: 7431114 NR Description: aldehyde dehydrogenase homolog At2g37770 -
  misc_feature (1)..(314): Homolog of NCBI NO: 15232354 NR Description: aldo/keto reductase family
  misc_feature (12)..(314): Homolog of NCBI NO: 28393400 NR Description: putative aldo/keto reductase [Arabidopsis
  misc_feature (1)..(314): Homolog of NCBI NO: 30687247 NR Description: aldo/keto reductase family [Arabidopsis thaliana]
  misc_feature (287)..(314): Homolog of NCBI NO: 25283479 NR Description: probable alcohol dehydrogenase [imported] -
  misc_feature (1)..(287): Homolog of NCBI NO: 25283479 NR Description: probable alcohol dehydrogenase [imported] -
  misc_feature (1)..(314): Homolog of NCBI NO: 30687261 NR Description: aldo/keto reductase family [Arabidopsis thaliana]
  misc_feature (1)..(314): Homolog of NCBI NO: 13160399 NR Description: aldose reductase [Digitalis purpurea]
  misc_feature (1)..(314): Homolog of NCBI NO: 13160397 NR Description: aldose reductase [Digitalis purpurea]
  misc_feature (1)..(289): Homolog of NCBI NO: 7431114 NR Description: aldehyde dehydrogenase homolog At2g37770 -
  misc_feature (1)..(314): Homolog of NCBI NO: 15232354 NR Description: aldo/keto reductase family
  misc_feature (12)..(314): Homolog of NCBI NO: 28393400 NR Description: putative aldo/keto reductase [Arabidopsis
  misc_feature (1)..(314): Homolog of NCBI NO: 30687247 NR Description: aldo/keto reductase family [Arabidopsis thaliana]
  misc_feature (287)..(314): Homolog of NCBI NO: 25283479 NR Description: probable alcohol dehydrogenase [imported] -
  misc_feature (1)..(287): Homolog of NCBI NO: 25283479 NR Description: probable alcohol dehydrogenase [imported] -
  misc_feature (1)..(314): Homolog of NCBI NO: 30687261 NR Description: aldo/keto reductase family [Arabidopsis thaliana]
  misc_feature (6)..(314): Homolog of NCBI NO: 34908280 NR Description: putative aldose reductase

SEQ ID NO: 42971 - protein, 239 aa, Arabidopsis thaliana; identical to SEQ ID NO: 22764
  peptide (1)..(239): Ceres Seq. ID no. 12558795
  misc_feature (1)..(239): Homolog of NCBI NO: 34908280 NR Description: putative aldose reductase
  misc_feature (1)..(239): Homolog of NCBI NO: 13160399 NR Description: aldose reductase [Digitalis purpurea]
  misc_feature (1)..(239): Homolog of NCBI NO: 13160397 NR Description: aldose reductase [Digitalis purpurea]
  misc_feature (1)..(214): Homolog of NCBI NO: 7431114 NR Description: aldehyde dehydrogenase homolog At2g37770 -
  misc_feature (1)..(239): Homolog of NCBI NO: 15232354 NR Description: aldo/keto reductase family
  misc_feature (1)..(239): Homolog of NCBI NO: 28393400 NR Description: putative aldo/keto reductase [Arabidopsis
  misc_feature (1)..(239): Homolog of NCBI NO: 30687247 NR Description: aldo/keto reductase family [Arabidopsis thaliana]
  misc_feature (212)..(239): Homolog of NCBI NO: 25283479 NR Description: probable alcohol dehydrogenase [imported] -
  misc_feature (1)..(212): Homolog of NCBI NO: 25283479 NR Description: probable alcohol dehydrogenase [imported] -
  misc_feature (1)..(239): Homolog of NCBI NO: 30687261 NR Description: aldo/keto reductase family [Arabidopsis thaliana]
  misc_feature (1)..(239): Homolog of NCBI NO: 34908280 NR Description: putative aldose reductase
  misc_feature (1)..(239): Homolog of NCBI NO: 13160399 NR Description: aldose reductase [Digitalis purpurea]
  misc_feature (1)..(239): Homolog of NCBI NO: 13160397 NR Description: aldose reductase [Digitalis purpurea]
  misc_feature (1)..(214): Homolog of NCBI NO: 7431114 NR Description: aldehyde dehydrogenase homolog At2g37770 -
  misc_feature (1)..(239): Homolog of NCBI NO: 15232354 NR Description: aldo/keto reductase family
  misc_feature (1)..(239): Homolog of NCBI NO: 28393400 NR Description: putative aldo/keto reductase [Arabidopsis
  misc_feature (1)..(239): Homolog of NCBI NO: 30687247 NR Description: aldo/keto reductase family [Arabidopsis thaliana]
  misc_feature (212)..(239): Homolog of NCBI NO: 25283479 NR Description: probable alcohol dehydrogenase [imported] -
  misc_feature (1)..(212): Homolog of NCBI NO: 25283479 NR Description: probable alcohol dehydrogenase [imported] -
  misc_feature (1)..(239): Homolog of NCBI NO: 30687261 NR Description: aldo/keto reductase family [Arabidopsis thaliana]

SEQ ID NO: 42972 - protein, 172 aa, Arabidopsis thaliana; identical to SEQ ID NO: 22765
  peptide (1)..(172): Ceres Seq. ID no. 12558796
  misc_feature (1)..(172): Homolog of NCBI NO: 34908280 NR Description: putative aldose reductase
  misc_feature (1)..(172): Homolog of NCBI NO: 13160399 NR Description: aldose reductase [Digitalis purpurea]
  misc_feature (1)..(172): Homolog of NCBI NO: 13160397 NR Description: aldose reductase [Digitalis purpurea]
  misc_feature (1)..(147): Homolog of NCBI NO: 7431114 NR Description: aldehyde dehydrogenase homolog At2g37770 -
  misc_feature (1)..(172): Homolog of NCBI NO: 15232354 NR Description: aldo/keto reductase family
  misc_feature (1)..(172): Homolog of NCBI NO: 28393400 NR Description: putative aldo/keto reductase [Arabidopsis
  misc_feature (1)..(172): Homolog of NCBI NO: 30687247 NR Description: aldo/keto reductase family [Arabidopsis thaliana]
  misc_feature (145)..(172): Homolog of NCBI NO: 25283479 NR Description: probable alcohol dehydrogenase [imported] -
  misc_feature (1)..(145): Homolog of NCBI NO: 25283479 NR Description: probable alcohol dehydrogenase [imported] -
  misc_feature (1)..(172): Homolog of NCBI NO: 30687261 NR Description: aldo/keto reductase family [Arabidopsis thaliana]
  misc_feature (1)..(172): Homolog of NCBI NO: 34908280 NR Description: putative aldose reductase
  misc_feature (1)..(172): Homolog of NCBI NO: 13160399 NR Description: aldose reductase [Digitalis purpurea]
  misc_feature (1)..(172): Homolog of NCBI NO: 13160397 NR Description: aldose reductase [Digitalis purpurea]
  misc_feature (1)..(147): Homolog of NCBI NO: 7431114 NR Description: aldehyde dehydrogenase homolog At2g37770 -
  misc_feature (1)..(172): Homolog of NCBI NO: 15232354 NR Description: aldo/keto reductase family
  misc_feature (1)..(172): Homolog of NCBI NO: 28393400 NR Description: putative aldo/keto reductase [Arabidopsis
  misc_feature (1)..(172): Homolog of NCBI NO: 30687247 NR Description: aldo/keto reductase family [Arabidopsis thaliana]
  misc_feature (145)..(172): Homolog of NCBI NO: 25283479 NR Description: probable alcohol dehydrogenase [imported] -
  misc_feature (1)..(145): Homolog of NCBI NO: 25283479 NR Description: probable alcohol dehydrogenase [imported] -
  misc_feature (1)..(172): Homolog of NCBI NO: 30687261 NR Description: aldo/keto reductase family [Arabidopsis thaliana]

SEQ ID NO: 42973 - DNA, 2041 bp, Arabidopsis thaliana
  misc_feature (1)..(2041): Ceres Seq. ID no. 12394599
  misc_feature: MA Experiment ID: 20000184 Result: Down-regulated in Transcription
  misc_feature: MA Experiment 20000184 PARAMETER Experiment Name: At_Shoots__P Parameter: Age (day) Value: 7
  misc_feature: MA Experiment 20000184 PARAMETER Experiment Name: At_Shoots__P Parameter: Tissue Value: Shoots vs. Whole Plant
  misc_feature: MA Experiment ID: 20000234 Result: Down-regulated in Transcription
  misc_feature: MA Experiment 20000234 PARAMETER Experiment Name: At_Siliques_P Parameter: Age (day) Value: 21
  misc_feature: MA Experiment 20000234 PARAMETER Experiment Name: At_Siliques_P Parameter: Organism Value: A. thaliana
  misc_feature: MA Experiment 20000234 PARAMETER Experiment Name: At_Siliques_P Parameter: Plant Line Value: WS
  misc_feature: MA Experiment 20000234 PARAMETER Experiment Name: At_Siliques_P Parameter: Tissue Value: Less Than 5mm Siliques vs. Whole Plant
  misc_feature: MA Experiment ID: 20000235 Result: Down-regulated in Transcription
  misc_feature: MA Experiment 20000235 PARAMETER Experiment Name: At_Siliques_P Parameter: Age (day) Value: 21
  misc_feature: MA Experiment 20000235 PARAMETER Experiment Name: At_Siliques_P Parameter: Organism Value: A. thaliana
  misc_feature: MA Experiment 20000235 PARAMETER Experiment Name: At_Siliques_P Parameter: Plant Line Value: WS
  misc_feature: MA Experiment 20000235 PARAMETER Experiment Name: At_Siliques_P Parameter: Tissue Value: 5-10mm Siliques vs. Whole Plant
  misc_feature: MA Experiment ID: 20000265 Result: Down-regulated in Transcription
  misc_feature: MA Experiment 20000265 PARAMETER Experiment Name: At_Open_Flower_P Parameter: Age (day) Value: 21
  misc_feature: MA Experiment 20000265 PARAMETER Experiment Name: At_Open_Flower_P Parameter: Plant Line Value: WS
  misc_feature: MA Experiment 20000265 PARAMETER Experiment Name: At_Open_Flower_P Parameter: Tissue Value: Closed Flower vs. Whole Plant
  misc_feature: MA Experiment ID: 20000286 Result: Down-regulated in Transcription
  misc_feature: MA Experiment 20000286 PARAMETER Experiment Name: At_Open_Flower_P Parameter: Age (day) Value: 21
  misc_feature: MA Experiment 20000286 PARAMETER Experiment Name: At_Open_Flower_P Parameter: Plant Line Value: WS
  misc_feature: MA Experiment 20000286 PARAMETER Experiment Name: At_Open_Flower_P Parameter: Tissue Value: Half Open vs. Whole Plant
aaaattacatctcaaatacacaatccagcaacacctttctctctctaacagcttcgagcttctacactcatggctgcttcatcctttgtagacggagaaagagatatggagaaaggaggaatgatattactacagtcaagtgagaatcaaaatcctatgatagatccttcaccaacaccttcaccatctgcaactgctactgccccagctttggttttgtctaattcaggcaagagaatggatcaagctggcaagaaaaagtatgttaagcaagtcacgggtcgccacaacgacaccgagcttcacttagcggcccaacgaggtgatttggctgctgtgcagcagattctcaaggatattaactctcagatggaagggattctgagtggggaagagtttgatgctgaagttgcggagattcgagcatcgattgtgaatgaggtgaatgagttaggggagacggcgctcttcactgctgcggataaaggacatcttgatgttgtcaaagagctgttgaagtattcgagtagagagagtattgctaagaagaatcgttctggatatgatccacttcatattgctgccatacagggtcatcatgctattgttgaggtctcgctagatcatgatgcgacgcttagccagacatttggcccatcgaatgcaactccgcttgtgtctgcagctatgagaggccatacagaagttgtgaaccagctcttatccaaagctgggaatttgctagaaatttctcggtctaacaacaaaaatgccttgcatctagctgcaaggcaaggacatgtggaggtcataaaagctcttctctccaaggatcctcagctagcgagacggattgacaagaaaggacaaactgcacttcacatggctgttaaaggccagagttctgaagtagtgaaattgcttcttgatgcagatcctgctattgttatgcaaccggacaagtcttgtaacacagcgttacatgttgccaccaggaaaaaacgagcagagattgtagaactattgttgtcactgcctgataccaacgccaatactttaacccgcgatcacaagacagcgcttgacatagcagaaggacttcccctctcagaagaatcttcatacataaaagagtgtcttgctcgtagcggggctcttagggcgaatgagctgaaccagccaagggacgagctgagaagcactgtcacccaaatcaagaacgatgtacacatccagctggaacagacgaaaaggacgaacaaaaacgtgcacaacatttcaaaagaactcaggaaactccacagagaagggatcaacaatgcaaccaattctgtaactgttgtggctgtattgtttgcaactgtagcttttgctgctatattcacagtgccgggaggagacaacaatgacgggtctgcagtggtggtgggccgagcatcattcaagatcttcttcatcttcaacgcactcgcgttgtttacgtctctggcggttgtggttgtccagatcacattggtgagaggagagacaaaagctgagaagagggtagtggaagtgatcaacaaactcatgtggttggcatcgatgtgtacatctgtggcatttttggcatcttcatacatagtggttgggcgtaagaacgagtgggcggctgagctggtgaccgtggttgggggtgtgataatggctggtgttcttggaaccatgacttattacgtggtaaaatcgaagaggacaaggtcgatgaggaagaaggtgaagagtgctcgcaggagtggttccaactcgtggcatcattcagatttctctaactcggaagttgatcctattttcgcaatctaagatgcgtaaaagaatcgtgtatatatattgttgtatttggtgaagagagctagactatttagtgtataaagccccctgaccatcaaaaggcaaacactattgtcaaccattaaaggtttacactgctcaactcatctgtaaaacagttaacaattgtcttcttcggaaagcaaagaaaagcaaaggttcctttgttagg

SEQ ID NO: 42974 - protein, 590 aa, Arabidopsis thaliana
  peptide (1)..(590): Ceres Seq. ID no. 12394600
  misc_feature (299)..(334): Pfam Name: Ankyrin repeat Pfam Description: Ankyrin repeat
  misc_feature (62)..(583): Homolog of NCBI NO: 24796797 NR Description: putative ankyrin repeat containing protein
  misc_feature (55)..(113): Homolog of NCBI NO: 15225141 NR Description: ankyrin-like protein; protein id: At2g31820.1
  misc_feature (121)..(583): Homolog of NCBI NO: 15225141 NR Description: ankyrin-like protein; protein id: At2g31820.1
  misc_feature (314)..(590): Homolog of NCBI NO: 24796795 NR Description: hypothetical protein, 5'-partial
  misc_feature (118)..(590): Homolog of NCBI NO: 15795155 NR Description: ankyrin-like protein [Arabidopsis thaliana]
  misc_feature (1)..(320): Homolog of NCBI NO: 15795155 NR Description: ankyrin-like protein [Arabidopsis thaliana]
  misc_feature (159)..(590): Homolog of NCBI NO: 15232714 NR Description: putative ankyrin; protein id: At3g09550.1
  misc_feature (40)..(590): Homolog of NCBI NO: 34908074 NR Description: P0506B12.26 [Oryza sativa (japonica
  misc_feature (57)..(590): Homolog of NCBI NO: 21553618 NR Description: ankyrin-like protein [Arabidopsis thaliana]
  misc_feature (1)..(590): Homolog of NCBI NO: 15230470 NR Description: ankyrin-like protein; protein id: At3g12360.1
MAASSFVDGERDMEKGGMILLQSSENQNPMIDPSPTPSPSATATAPALVLSNSGKRMDQAGKKKYVKQVTGRHNDTELHLAAQRGDLAAVQQILKDINSQMEGILSGEEFDAEVAEIRASIVNEVNELGETALFTAADKGHLDVVKELLKYSSRESIAKKNRSGYDPLHIAAIQGHHAIVEVSLDHDATLSQTFGPSNATPLVSAAMRGHTEVVNQLLSKAGNLLEISRSNNKNALHLAARQGHVEVIKALLSKDPQLARRIDKKGQTALHMAVKGQSSEVVKLLLDADPAIVMQPDKSCNTALHVATRKKRAEIVELLLSLPDTNANTLTRDHKTALDIAEGLPLSEESSYIKECLARSGALRANELNQPRDELRSTVTQIKNDVHIQLEQTKRTNKNVHNISKELRKLHREGINNATNSVTVVAVLFATVAFAAIFTVPGGDNNDGSAVVVGRASFKIFFIFNALALFTSLAVVVVQITLVRGETKAEKRVVEVINKLMWLASMCTSVAFLASSYIVVGRKNEWAAELVTVVGGVIMAGVLGTMTYYVVKSKRTRSMRKKVKSARRSGSNSWHHSDFSNSEVDPIFAI

SEQ ID NO: 42975 - protein, 578 aa, Arabidopsis thaliana
  peptide (1)..(578): Ceres Seq. ID no. 12394601
  misc_feature (287)..(322): Pfam Name: Ankyrin repeat Pfam Description: Ankyrin repeat
  misc_feature (50)..(571): Homolog of NCBI NO: 24796797 NR Description: putative ankyrin repeat containing protein
  misc_feature (43)..(101): Homolog of NCBI NO: 15225141 NR Description: ankyrin-like protein; protein id: At2g31820.1
  misc_feature (109)..(571): Homolog of NCBI NO: 15225141 NR Description: ankyrin-like protein; protein id: At2g31820.1
  misc_feature (302)..(578): Homolog of NCBI NO: 24796795 NR Description: hypothetical protein, 5'-partial
  misc_feature (106)..(578): Homolog of NCBI NO: 15795155 NR Description: ankyrin-like protein [Arabidopsis thaliana]
  misc_feature (1)..(308): Homolog of NCBI NO: 15795155 NR Description: ankyrin-like protein [Arabidopsis thaliana]
  misc_feature (147)..(578): Homolog of NCBI NO: 15232714 NR Description: putative ankyrin; protein id: At3g09550.1
  misc_feature (28)..(578): Homolog of NCBI NO: 34908074 NR Description: P0506B12.26 [Oryza sativa (japonica
  misc_feature (45)..(578): Homolog of NCBI NO: 21553618 NR Description: ankyrin-like protein [Arabidopsis thaliana]
  misc_feature (1)..(578): Homolog of NCBI NO: 15230470 NR Description: ankyrin-like protein; protein id: At3g12360.1
MEKGGMILLQSSENQNPMIDPSPTPSPSATATAPALVLSNSGKRMDQAGKKKYVKQVTGRHNDTELHLAAQRGDLAAVQQILKDINSQMEGILSGEEFDAEVAEIRASIVNEVNELGETALFTAADKGHLDVVKELLKYSSRESIAKKNRSGYDPLHIAAIQGHHAIVEVSLDHDATLSQTFGPSNATPLVSAAMRGHTEVVNQLLSKAGNLLEISRSNNKNALHLAARQGHVEVIKALLSKDPQLARRIDKKGQTALHMAVKGQSSEVVKLLLDADPAIVMQPDKSCNTALHVATRKKRAEIVELLLSLPDTNANTLTRDHKTALDIAEGLPLSEESSYIKECLARSGALRANELNQPRDELRSTVTQIKNDVHIQLEQTKRTNKNVHNISKELRKLHREGINNATNSVTVVAVLFATVAFAAIFTVPGGDNNDGSAVVVGRASFKIFFIFNALALFTSLAVVVVQITLVRGETKAEKRVVEVINKLMWLASMCTSVAFLASSYIVVGRKNEWAAELVTVVGGVIMAGVLGTMTYYVVKSKRTRSMRKKVKSARRSGSNSWHHSDFSNSEVDPIFAI

SEQ ID NO: 42976 - protein, 573 aa, Arabidopsis thaliana
  peptide (1)..(573): Ceres Seq. ID no. 12394602
  misc_feature (282)..(317): Pfam Name: Ankyrin repeat Pfam Description: Ankyrin repeat
  misc_feature (45)..(566): Homolog of NCBI NO: 24796797 NR Description: putative ankyrin repeat containing protein
  misc_feature (38)..(96): Homolog of NCBI NO: 15225141 NR Description: ankyrin-like protein; protein id: At2g31820.1
  misc_feature (104)..(566): Homolog of NCBI NO: 15225141 NR Description: ankyrin-like protein; protein id: At2g31820.1
  misc_feature (297)..(573): Homolog of NCBI NO: 24796795 NR Description: hypothetical protein, 5'-partial
  misc_feature (101)..(573): Homolog of NCBI NO: 15795155 NR Description: ankyrin-like protein [Arabidopsis thaliana]
  misc_feature (1)..(303): Homolog of NCBI NO: 15795155 NR Description: ankyrin-like protein [Arabidopsis thaliana]
  misc_feature (142)..(573): Homolog of NCBI NO: 15232714 NR Description: putative ankyrin; protein id: At3g09550.1
  misc_feature (23)..(573): Homolog of NCBI NO: 34908074 NR Description: P0506B12.26 [Oryza sativa (japonica
  misc_feature (40)..(573): Homolog of NCBI NO: 21553618 NR Description: ankyrin-like protein [Arabidopsis thaliana]
  misc_feature (1)..(573): Homolog of NCBI NO: 15230470 NR Description: ankyrin-like protein; protein id: At3g12360.1
MILLQSSENQNPMIDPSPTPSPSATATAPALVLSNSGKRMDQAGKKKYVKQVTGRHNDTELHLAAQRGDLAAVQQILKDINSQMEGILSGEEFDAEVAEIRASIVNEVNELGETALFTAADKGHLDVVKELLKYSSRESIAKKNRSGYDPLHIAAIQGHHAIVEVSLDHDATLSQTFGPSNATPLVSAAMRGHTEVVNQLLSKAGNLLEISRSNNKNALHLAARQGHVEVIKALLSKDPQLARRIDKKGQTALHMAVKGQSSEVVKLLLDADPAIVMQPDKSCNTALHVATRKKRAEIVELLLSLPDTNANTLTRDHKTALDIAEGLPLSEESSYIKECLARSGALRANELNQPRDELRSTVTQIKNDVHIQLEQTKRTNKNVHNISKELRKLHREGINNATNSVTVVAVLFATVAFAAIFTVPGGDNNDGSAVVVGRASFKIFFIFNALALFTSLAVVVVQITLVRGETKAEKRVVEVINKLMWLASMCTSVAFLASSYIVVGRKNEWAAELVTVVGGVIMAGVLGTMTYYVVKSKRTRSMRKKVKSARRSGSNSWHHSDFSNSEVDPIFAI

SEQ ID NO: 42977 - DNA, 1232 bp, Arabidopsis thaliana
  misc_feature (1)..(1232): Ceres Seq. ID no. 12338068
  misc_feature: MA Experiment ID: 108579 Result: Down-regulated in Transcription
  misc_feature: MA Experiment 108579 PARAMETER Experiment Name: At_4deg_Cold_cDNA_P Parameter: Temperature (deg C) Value: 4 vs. 22
  misc_feature: MA Experiment 108579 PARAMETER Experiment Name: At_4deg_Cold_cDNA_P Parameter: Timepoint (hr) Value: 6
  misc_feature: MA Experiment 108579 PARAMETER Experiment Name: At_4deg_Cold_cDNA_P Parameter: Tissue Value: Aerial
  misc_feature: MA Experiment ID: 20000171 Result: Up-regulated in Transcription
  misc_feature: MA Experiment 20000171 PARAMETER Experiment Name: At_42deg_Heat_P Parameter: Age (day) Value: 14
  misc_feature: MA Experiment 20000171 PARAMETER Experiment Name: At_42deg_Heat_P Parameter: Organism Value: A. thaliana
  misc_feature: MA Experiment 20000171 PARAMETER Experiment Name: At_42deg_Heat_P Parameter: Plant Line Value: WS
  misc_feature: MA Experiment 20000171 PARAMETER Experiment Name: At_42deg_Heat_P Parameter: Temperature (deg C) Value: 42 vs. 22
  misc_feature: MA Experiment 20000171 PARAMETER Experiment Name: At_42deg_Heat_P Parameter: Timepoint (hr) Value: 1
  misc_feature: MA Experiment 20000171 PARAMETER Experiment Name: At_42deg_Heat_P Parameter: Tissue Value: Aerial
  misc_feature: MA Experiment ID: 20000173 Result: Up-regulated in Transcription
  misc_feature: MA Experiment 20000173 PARAMETER Experiment Name: At_42deg_Heat_P Parameter: Age (day) Value: 14
  misc_feature: MA Experiment 20000173 PARAMETER Experiment Name: At_42deg_Heat_P Parameter: Organism Value: A. thaliana
  misc_feature: MA Experiment 20000173 PARAMETER Experiment Name: At_42deg_Heat_P Parameter: Plant Line Value: WS
  misc_feature: MA Experiment 20000173 PARAMETER Experiment Name: At_42deg_Heat_P Parameter: Temperature (deg C) Value: 42 vs. 22
  misc_feature: MA Experiment 20000173 PARAMETER Experiment Name: At_42deg_Heat_P Parameter: Timepoint (hr) Value: 6
  misc_feature: MA Experiment 20000173 PARAMETER Experiment Name: At_42deg_Heat_P Parameter: Tissue Value: Aerial
  misc_feature: MA Experiment ID: 20001247 Result: Up-regulated in Transcription
  misc_feature: MA Experiment 20001247 PARAMETER Experiment Name: At_Far-red-induction_P Parameter: Age (day) Value: 7
  misc_feature: MA Experiment 20001247 PARAMETER Experiment Name: At_Far-red-induction_P Parameter: Light Value: Far-red vs. White
  misc_feature: MA Experiment 20001247 PARAMETER Experiment Name: At_Far-red-induction_P Parameter: Organism Value: A. thaliana
  misc_feature: MA Experiment 20001247 PARAMETER Experiment Name: At_Far-red-induction_P Parameter: Plant Line Value: Columbia
  misc_feature: MA Experiment 20001247 PARAMETER Experiment Name: At_Far-red-induction_P Parameter: Timepoint (hr) Value: 1
  misc_feature: MA Experiment 20001247 PARAMETER Experiment Name: At_Far-red-induction_P Parameter: Tissue Value: Whole Plant
  misc_feature: MA Experiment ID: 20001248 Result: Up-regulated in Transcription
  misc_feature: MA Experiment 20001248 PARAMETER Experiment Name: At_Far-red-induction_P Parameter: Age (day) Value: 7
  misc_feature: MA Experiment 20001248 PARAMETER Experiment Name: At_Far-red-induction_P Parameter: Light Value: Far-red vs. White
  misc_feature: MA Experiment 20001248 PARAMETER Experiment Name: At_Far-red-induction_P Parameter: Organism Value: A. thaliana
  misc_feature: MA Experiment 20001248 PARAMETER Experiment Name: At_Far-red-induction_P Parameter: Plant Line Value: Columbia
  misc_feature: MA Experiment 20001248 PARAMETER Experiment Name: At_Far-red-induction_P Parameter: Timepoint (hr) Value: 4
  misc_feature: MA Experiment 20001248 PARAMETER Experiment Name: At_Far-red-induction_P Parameter: Tissue Value: Whole Plant
  misc_feature: MA Experiment ID: 20001450 Result: Up-regulated in Transcription
  misc_feature: MA Experiment 20001450 PARAMETER Experiment Name: At_Far-red-induction_P Parameter: Age (day) Value: 7
  misc_feature: MA Experiment 20001450 PARAMETER Experiment Name: At_Far-red-induction_P Parameter: Light Value: Far-red vs. White
  misc_feature: MA Experiment 20001450 PARAMETER Experiment Name: At_Far-red-induction_P Parameter: Organism Value: A. thaliana
  misc_feature: MA Experiment 20001450 PARAMETER Experiment Name: At_Far-red-induction_P Parameter: Plant Line Value: Columbia
  misc_feature: MA Experiment 20001450 PARAMETER Experiment Name: At_Far-red-induction_P Parameter: Timepoint (hr) Value: 8
  misc_feature: MA Experiment 20001450 PARAMETER Experiment Name: At_Far-red-induction_P Parameter: Tissue Value: Whole Plant
ctctctcgcgttcgttcttatccacgagctctgcaccgtcgcaatctccgtcttctccatttagatccaacacagagccttttctacatgaaattcggcaaagagtttcgtactcacctcgaagaaactttaccagagtggagagacaagttcctttgctataaacctttaaaaaagcttctcaaatattatccttattactccgccgattttggacccgccaattccgatcacaacgattcgcgtccagtatttgctgatactactaacatctcttccgccgccgacgacggcggtgtggttcccggcgtcaggccatcggaagatctccagggttcgtttgtgaggatacttaacgatgaacttgagaagtttaacgatttttacgttgataaggaagaagatttcgttatcagattacaggagctcaaggaaagaatcgagcaagttaaagaaaagaatggggaatttgcatcagaaagtgagttcagcgaagaaatgatggatattcggagagaccttgttaccattcatggcgagatggtgctcctgaaaaactacagctcccttaattttgcaggacttgtcaagattttgaagaagtacgataaaagaacaggtggacttttacgtttgcctttcacacagcttgttctccatcaacccttctttactacagagccacttactaggttagtccgtgaatgtgaggccaatcttgagcttctttttccttcagaagcggaagttgtagagtcttctagcgcagtgcaagcacactcaagctcacatcagcacaactccccaagaatctcagctgagacttcctcaactctcggcaatgaaaatcttgatatatataagagtacactcgctgcaatgagagctataagagggttacaaaaggctagctcgacgtacaaccctttatcattctcatcgcttcttcagaacgaggatgatgagacggtaacagctgaaaactctccaaactctgggaacaaagatgattcagagaaggaagatactggaccttcccactgatcagaagagaatgatgctctttttgatcaagattttgagaatttgcttcttgatttcaccctaacttttcataaaattaacacattttactttacttcttcaccttttgcaggacacaacttctgtatgcatttgaattttagtacagtcgtttatagattttcaatgaaattttcctccattgtcgc

SEQ ID NO: 42978 - protein, 347 aa, Arabidopsis thaliana
  peptide (1)..(347): Ceres Seq. ID no. 12338069
  misc_feature (30)..(219): Pfam Name: SPX domain Pfam Description: SPX domain
  misc_feature (181)..(347): Homolog of NCBI NO: 7489382 NR Description: ids-4 protein - barley
  misc_feature (30)..(70): Homolog of NCBI NO: 21592813 NR Description: ids4-like protein [Arabidopsis thaliana]
  misc_feature (114)..(265): Homolog of NCBI NO: 21592813 NR Description: ids4-like protein [Arabidopsis thaliana]
  misc_feature (30)..(70): Homolog of NCBI NO: 15241275 NR Description: ids4-like protein
  misc_feature (113)..(265): Homolog of NCBI NO: 15241275 NR Description: ids4-like protein
  misc_feature (30)..(72): Homolog of NCBI NO: 37533962 NR Description: hypothetical protein [Oryza sativa (japonica
  misc_feature (92)..(311): Homolog of NCBI NO: 37533962 NR Description: hypothetical protein [Oryza sativa (japonica
  misc_feature (80)..(342): Homolog of NCBI NO: 34897330 NR Description: putative signal transduction protein [Oryza
  misc_feature (30)..(347): Homolog of NCBI NO: 18417630 NR Description: ids-4 protein - like
  misc_feature (1)..(347): Homolog of NCBI NO: 11358467 NR Description: ids-4 protein-like - Arabidopsis thaliana
LSRVRSYPRALHRRNLRLLHLDPTQSLFYMKFGKEFRTHLEETLPEWRDKFLCYKPLKKLLKYYPYYSADFGPANSDHNDSRPVFADTTNISSAADDGGVVPGVRPSEDLQGSFVRILNDELEKFNDFYVDKEEDFVIRLQELKERIEQVKEKNGEFASESEFSEEMMDIRRDLVTIHGEMVLLKNYSSLNFAGLVKILKKYDKRTGGLLRLPFTQLVLHQPFFTTEPLTRLVRECEANLELLFPSEAEVVESSSAVQAHSSSHQHNSPRISAETSSTLGNENLDIYKSTLAAMRAIRGLQKASSTYNPLSFSSLLQNEDDETVTAENSPNSGNKDDSEKEDTGPSH

SEQ ID NO: 42979 - protein, 318 aa, Arabidopsis thaliana; identical to SEQ ID NO: 41480
  peptide (1)..(318): Ceres Seq. ID no. 12338070
  misc_feature (1)..(190): Pfam Name: SPX domain Pfam Description: SPX domain
  misc_feature (152)..(318): Homolog of NCBI NO: 7489382 NR Description: ids-4 protein - barley
  misc_feature (1)..(41): Homolog of NCBI NO: 21592813 NR Description: ids4-like protein [Arabidopsis thaliana]
  misc_feature (85)..(236): Homolog of NCBI NO: 21592813 NR Description: ids4-like protein [Arabidopsis thaliana]
  misc_feature (1)..(41): Homolog of NCBI NO: 15241275 NR Description: ids4-like protein
  misc_feature (84)..(236): Homolog of NCBI NO: 15241275 NR Description: ids4-like protein
  misc_feature (1)..(43): Homolog of NCBI NO: 37533962 NR Description: hypothetical protein [Oryza sativa (japonica
  misc_feature (63)..(282): Homolog of NCBI NO: 37533962 NR Description: hypothetical protein [Oryza sativa (japonica
  misc_feature (51)..(313): Homolog of NCBI NO: 34897330 NR Description: putative signal transduction protein [Oryza
  misc_feature (1)..(318): Homolog of NCBI NO: 18417630 NR Description: ids-4 protein - like
  misc_feature (1)..(318): Homolog of NCBI NO: 11358467 NR Description: ids-4 protein-like - Arabidopsis thaliana

SEQ ID NO: 42980 - protein, 181 aa, Arabidopsis thaliana
  peptide (1)..(181): Ceres Seq. ID no. 12338071
  misc_feature (1)..(53): Pfam Name: SPX domain Pfam Description: SPX domain
  misc_feature (1)..(152): Homolog of NCBI NO: 16506648 NR Description: IDS-4-like protein [Castanea sativa]
  misc_feature (1)..(155): Homolog of NCBI NO: 15225770 NR Description: unknown protein; protein id: At2g26660.1
  misc_feature (1)..(99): Homolog of NCBI NO: 31415907 NR Description: putative SPX domain containing protein
  misc_feature (15)..(181): Homolog of NCBI NO: 7489382 NR Description: ids-4 protein - barley
  misc_feature (1)..(99): Homolog of NCBI NO: 21592813 NR Description: ids4-like protein [Arabidopsis thaliana]
  misc_feature (1)..(99): Homolog of NCBI NO: 15241275 NR Description: ids4-like protein
  misc_feature (1)..(145): Homolog of NCBI NO: 37533962 NR Description: hypothetical protein [Oryza sativa (japonica
  misc_feature (1)..(176): Homolog of NCBI NO: 34897330 NR Description: putative signal transduction protein [Oryza
  misc_feature (1)..(181): Homolog of NCBI NO: 18417630 NR Description: ids-4 protein - like
  misc_feature (1)..(181): Homolog of NCBI NO: 11358467 NR Description: ids-4 protein-like - Arabidopsis thaliana
MMDIRRDLVTIHGEMVLLKNYSSLNFAGLVKILKKYDKRTGGLLRLPFTQLVLHQPFFTTEPLTRLVRECEANLELLFPSEAEVVESSSAVQAHSSSHQHNSPRISAETSSTLGNENLDIYKSTLAAMRAIRGLQKASSTYNPLSFSSLLQNEDDETVTAENSPNSGNKDDSEKEDTGPSH

SEQ ID NO: 42981 - DNA, 1029 bp, Arabidopsis thaliana
  misc_feature (1)..(1029): Ceres Seq. ID no. 12422288
  misc_feature: MA Experiment ID: 108473 Result: Down-regulated in Transcription
  misc_feature: MA Experiment 108473 PARAMETER Experiment Name: At_Drought_Flowers_cDNA_P Parameter: Timepoint (hr) Value: 7 d
  misc_feature: MA Experiment 108473 PARAMETER Experiment Name: At_Drought_Flowers_cDNA_P Parameter: Tissue Value: Flower
  misc_feature: MA Experiment 108473 PARAMETER Experiment Name: At_Drought_Flowers_cDNA_P Parameter: Treatment Value: Drought vs. No Drought
  misc_feature: MA Experiment ID: 108501 Result: Down-regulated in Transcription
  misc_feature: MA Experiment 108501 PARAMETER Experiment Name: At_ap2_floral_buds_cDNA_P Parameter: Plant Line Value: ap2 (Ler.)
  misc_feature: MA Experiment 108501 PARAMETER Experiment Name: At_ap2_floral_buds_cDNA_P Parameter: Tissue Value: Closed Flower
  misc_feature: MA Experiment ID: 20000440 Result: Up-regulated in Transcription
  misc_feature: MA Experiment 20000440 PARAMETER Experiment Name: At_Closed-Flower__Sub_P Parameter: Tissue Value: Closed Flower vs. Whole Plant
aacaaagtgtgttcttaaattatcttctctgataaccaaaaaagccctattttccgagatgaataccctagaagaagtagatgaatccactcatatcttcaacgctttgatgagtctaatgaggaaatttttgttcagagttctatgcgtcggtccaatccctactaacatttcattcatcatggatggaaaccgcaggttcgctaagaaacacaatcttataggcctagatgcaggacatagagctggtttcatatccgtgaaatatattcttcaatactgcaaagagattggtgtaccgtacgtcacactccacgcgtttggtatggataatttcaagagaggacctgaagaagtcaagtgtgtgatggatctaatgcttgagaaagtcgagctcgcgatcgatcaagctgtatcagggaatatgaacggcgtgagaataatctttgccggtgatttggattcgttaaacgagcattttagagctgcgacaaagaaactgatggagcttacggaggagaatagagatctgattgtggtggtttgcgttgcttacagcacaagtctcgagattgttcacgctgttcgaaaatcttgtgttagaaaatgtacgaatggagatgatcttgtacttttggagttgagtgatgttgaagagtgtatgtatacatcgattgtgccggttccggatcttgtgataagaaccggaggaggagatcggctgagtaacttcatgacgtggcaaacttcgaggtctcttcttcacagaacggaggctctttggccggagttagggctctggcatttggtttgggcaattcttaaattccaaagaatgcaagattacttgacgaagaagaaaaagctcgattagatagtttctaaagttaaaccctgcaggaaagaacttttaactctttattacgtttaatttacgtgtttctatgactggaaacgagaaagctcacaagcaaatcttttttattatgtattggatccgtataacaaacacgaatatacaaaacatcg

SEQ ID NO: 42982 - protein, 290 aa, Arabidopsis thaliana
  peptide (1)..(290): Ceres Seq. ID no. 12422289
  misc_feature (60)..(285): Pfam Name: Putative undecaprenyl diphosphate synthase Pfam Description: Putative undecaprenyl diphosphate synthase
  misc_feature (50)..(205): Homolog of NCBI NO: 25314045 NR Description: hypothetical protein At2g17570 [imported] -
  misc_feature (212)..(288): Homolog of NCBI NO: 20336659 NR Description: hypothetical protein [Arabidopsis thaliana]
  misc_feature (30)..(205): Homolog of NCBI NO: 20336659 NR Description: hypothetical protein [Arabidopsis thaliana]
  misc_feature (212)..(288): Homolog of NCBI NO: 18398467 NR Description: undecaprenyl pyrophosphate synthetase (UPP
  misc_feature (30)..(205): Homolog of NCBI NO: 18398467 NR Description: undecaprenyl pyrophosphate synthetase (UPP
  misc_feature (40)..(289): Homolog of NCBI NO: 9757753 NR Description: undecaprenyl pyrophosphate synthetase-like
  misc_feature (21)..(289): Homolog of NCBI NO: 21593244 NR Description: undecaprenyl diphosphate synthase [Arabidopsis
  misc_feature (21)..(289): Homolog of NCBI NO: 15239358 NR Description: undecaprenyl pyrophosphate synthetase (UPP
  misc_feature (40)..(290): Homolog of NCBI NO: 9757752 NR Description: undecaprenyl pyrophosphate synthetase-like
  misc_feature (20)..(290): Homolog of NCBI NO: 15239357 NR Description: undecaprenyl pyrophosphate synthetase (UPP
TKCVLKLSSLITKKALFSEMNTLEEVDESTHIFNALMSLMRKFLFRVLCVGPIPTNISFIMDGNRRFAKKHNLIGLDAGHRAGFISVKYILQYCKEIGVPYVTLHAFGMDNFKRGPEEVKCVMDLMLEKVELAIDQAVSGNMNGVRIIFAGDLDSLNEHFRAATKKLMELTEENRDLIVVVCVAYSTSLEIVHAVRKSCVRKCTNGDDLVLLELSDVEECMYTSIVPVPDLVIRTGGGDRLSNFMTWQTSRSLLHRTEALWPELGLWHLVWAILKFQRMQDYLTKKKKLD

SEQ ID NO: 42983 - protein, 271 aa, Arabidopsis thaliana
  peptide (1)..(271): Ceres Seq. ID no. 12422290
  misc_feature (41)..(266): Pfam Name: Putative undecaprenyl diphosphate synthase Pfam Description: Putative undecaprenyl diphosphate synthase
  misc_feature (31)..(186): Homolog of NCBI NO: 25314045 NR Description: hypothetical protein At2g17570 [imported] -
  misc_feature (193)..(269): Homolog of NCBI NO: 20336659 NR Description: hypothetical protein [Arabidopsis thaliana]
  misc_feature (11)..(186): Homolog of NCBI NO: 20336659 NR Description: hypothetical protein [Arabidopsis thaliana]
  misc_feature (193)..(269): Homolog of NCBI NO: 18398467 NR Description: undecaprenyl pyrophosphate synthetase (UPP
  misc_feature (11)..(186): Homolog of NCBI NO: 18398467 NR Description: undecaprenyl pyrophosphate synthetase (UPP
  misc_feature (21)..(270): Homolog of NCBI NO: 9757753 NR Description: undecaprenyl pyrophosphate synthetase-like
  misc_feature (2)..(270): Homolog of NCBI NO: 21593244 NR Description: undecaprenyl diphosphate synthase [Arabidopsis
  misc_feature (2)..(270): Homolog of NCBI NO: 15239358 NR Description: undecaprenyl pyrophosphate synthetase (UPP
  misc_feature (21)..(271): Homolog of NCBI NO: 9757752 NR Description: undecaprenyl pyrophosphate synthetase-like
  misc_feature (1)..(271): Homolog of NCBI NO: 15239357 NR Description: undecaprenyl pyrophosphate synthetase (UPP
MNTLEEVDESTHIFNALMSLMRKFLFRVLCVGPIPTNISFIMDGNRRFAKKHNLIGLDAGHRAGFISVKYILQYCKEIGVPYVTLHAFGMDNFKRGPEEVKCVMDLMLEKVELAIDQAVSGNMNGVRIIFAGDLDSLNEHFRAATKKLMELTEENRDLIVVVCVAYSTSLEIVHAVRKSCVRKCTNGDDLVLLELSDVEECMYTSIVPVPDLVIRTGGGDRLSNFMTWQTSRSLLHRTEALWPELGLWHLVWAILKFQRMQDYLTKKKKLD

SEQ ID NO: 42984 - protein, 254 aa, Arabidopsis thaliana
  peptide (1)..(254): Ceres Seq. ID no. 12422291
  misc_feature (24)..(249): Pfam Name: Putative undecaprenyl diphosphate synthase Pfam Description: Putative undecaprenyl diphosphate synthase
  misc_feature (14)..(169): Homolog of NCBI NO: 25314045 NR Description: hypothetical protein At2g17570 [imported] -
  misc_feature (176)..(252): Homolog of NCBI NO: 20336659 NR Description: hypothetical protein [Arabidopsis thaliana]
  misc_feature (1)..(169): Homolog of NCBI NO: 20336659 NR Description: hypothetical protein [Arabidopsis thaliana]
  misc_feature (176)..(252): Homolog of NCBI NO: 18398467 NR Description: undecaprenyl pyrophosphate synthetase (UPP
  misc_feature (1)..(169): Homolog of NCBI NO: 18398467 NR Description: undecaprenyl pyrophosphate synthetase (UPP
  misc_feature (4)..(253): Homolog of NCBI NO: 9757753 NR Description: undecaprenyl pyrophosphate synthetase-like
  misc_feature (1)..(253): Homolog of NCBI NO: 21593244 NR Description: undecaprenyl diphosphate synthase [Arabidopsis
  misc_feature (1)..(253): Homolog of NCBI NO: 15239358 NR Description: undecaprenyl pyrophosphate synthetase (UPP
  misc_feature (4)..(254): Homolog of NCBI NO: 9757752 NR Description: undecaprenyl pyrophosphate synthetase-like
  misc_feature (1)..(254): Homolog of NCBI NO: 15239357 NR Description: undecaprenyl pyrophosphate synthetase (UPP
MSLMRKFLFRVLCVGPIPTNISFIMDGNRRFAKKHNLIGLDAGHRAGFISVKYILQYCKEIGVPYVTLHAFGMDNFKRGPEEVKCVMDLMLEKVELAIDQAVSGNMNGVRIIFAGDLDSLNEHFRAATKKLMELTEENRDLIVVVCVAYSTSLEIVHAVRKSCVRKCTNGDDLVLLELSDVEECMYTSIVPVPDLVIRTGGGDRLSNFMTWQTSRSLLHRTEALWPELGLWHLVWAILKFQRMQDYLTKKKKLD

SEQ ID NO: 42985 - DNA, 1847 bp, Arabidopsis thaliana
  misc_feature (1)..(1847): Ceres Seq. ID no. 12337058
  misc_feature: MA Experiment ID: 108579 Result: Up-regulated in Transcription
  misc_feature: MA Experiment 108579 PARAMETER Experiment Name: At_4deg_Cold_cDNA_P Parameter: Temperature (deg C) Value: 4 vs. 22
  misc_feature: MA Experiment 108579 PARAMETER Experiment Name: At_4deg_Cold_cDNA_P Parameter: Timepoint (hr) Value: 6
  misc_feature: MA Experiment 108579 PARAMETER Experiment Name: At_4deg_Cold_cDNA_P Parameter: Tissue Value: Aerial
  misc_feature: MA Experiment ID: 108607 Result: Up-regulated in Transcription
  misc_feature: MA Experiment 108607 PARAMETER Experiment Name: At_100uM_ABA_cDNA_P Parameter: Timepoint (hr) Value: 4
  misc_feature: MA Experiment 108607 PARAMETER Experiment Name: At_100uM_ABA_cDNA_P Parameter: Tissue Value: Aerial
  misc_feature: MA Experiment 108607 PARAMETER Experiment Name: At_100uM_ABA_cDNA_P Parameter: Treatment Value: 100uM ABA vs. No Treatment
  misc_feature: MA Experiment ID: 20000112 Result: Up-regulated in Transcription
  misc_feature: MA Experiment 20000112 PARAMETER Experiment Name: At_42deg_Heat_cDNA_P Parameter: Temperature (deg C) Value: 42 vs. 22
  misc_feature: MA Experiment 20000112 PARAMETER Experiment Name: At_42deg_Heat_cDNA_P Parameter: Timepoint (hr) Value: 2
  misc_feature: MA Experiment 20000112 PARAMETER Experiment Name: At_42deg_Heat_cDNA_P Parameter: Tissue Value: Aerial
  misc_feature: MA Experiment ID: 20000182 Result: Up-regulated in Transcription
  misc_feature: MA Experiment 20000182 PARAMETER Experiment Name: At_2mM_SA_P Parameter: Age (day) Value: 14
  misc_feature: MA Experiment 20000182 PARAMETER Experiment Name: At_2mM_SA_P Parameter: Organism Value: A. thaliana
  misc_feature: MA Experiment 20000182 PARAMETER Experiment Name: At_2mM_SA_P Parameter: Plant Line Value: WS
  misc_feature: MA Experiment 20000182 PARAMETER Experiment Name: At_2mM_SA_P Parameter: Timepoint (hr) Value: 6
  misc_feature: MA Experiment 20000182 PARAMETER Experiment Name: At_2mM_SA_P Parameter: Tissue Value: Aerial
  misc_feature: MA Experiment 20000182 PARAMETER Experiment Name: At_2mM_SA_P Parameter: Treatment Value: 2mM SA vs. No Treatment
  misc_feature: MA Experiment ID: 20000184 Result: Up-regulated in Transcription
  misc_feature: MA Experiment 20000184 PARAMETER Experiment Name: At_Shoots__P Parameter: Age (day) Value: 7
  misc_feature: MA Experiment 20000184 PARAMETER Experiment Name: At_Shoots__P Parameter: Tissue Value: Shoots vs. Whole Plant
  misc_feature: MA Experiment ID: 20000185 Result: Up-regulated in Transcription
  misc_feature: MA Experiment 20000185 PARAMETER Experiment Name: At_Roots__P Parameter: Age (day) Value: 7 vs. 21
  misc_feature: MA Experiment 20000185 PARAMETER Experiment Name: At_Roots__P Parameter: Organism Value: A. thaliana
  misc_feature: MA Experiment 20000185 PARAMETER Experiment Name: At_Roots__P Parameter: Tissue Value: Roots vs. Whole Plant
  misc_feature: MA Experiment ID: 20000235 Result: Up-regulated in Transcription
  misc_feature: MA Experiment 20000235 PARAMETER Experiment Name: At_Siliques_P Parameter: Age (day) Value: 21
  misc_feature: MA Experiment 20000235 PARAMETER Experiment Name: At_Siliques_P Parameter: Organism Value: A. thaliana
  misc_feature: MA Experiment 20000235 PARAMETER Experiment Name: At_Siliques_P Parameter: Plant Line Value: WS
  misc_feature: MA Experiment 20000235 PARAMETER Experiment Name: At_Siliques_P Parameter: Tissue Value: 5-10mm Siliques vs. Whole Plant
  misc_feature: MA Experiment ID: 20000264 Result: Up-regulated in Transcription
  misc_feature: MA Experiment 20000264 PARAMETER Experiment Name: At_Open_Flower_P Parameter: Age (day) Value: 21
  misc_feature: MA Experiment 20000264 PARAMETER Experiment Name: At_Open_Flower_P Parameter: Plant Line Value: WS
  misc_feature: MA Experiment 20000264 PARAMETER Experiment Name: At_Open_Flower_P Parameter: Tissue Value: Open Flower vs. Whole Plant
  misc_feature: MA Experiment ID: 20000286 Result: Up-regulated in Transcription
  misc_feature: MA Experiment 20000286 PARAMETER Experiment Name: At_Open_Flower_P Parameter: Age (day) Value: 21
  misc_feature: MA Experiment 20000286 PARAMETER Experiment Name: At_Open_Flower_P Parameter: Plant Line Value: WS
  misc_feature: MA Experiment 20000286 PARAMETER Experiment Name: At_Open_Flower_P Parameter: Tissue Value: Half Open vs. Whole Plant
  misc_feature: MA Experiment ID: 20000439 Result: Up-regulated in Transcription
  misc_feature: MA Experiment 20000439 PARAMETER Experiment Name: At_Roots__P Parameter: Age (day) Value: 14 vs. 21
  misc_feature: MA Experiment 20000439 PARAMETER Experiment Name: At_Roots__P Parameter: Organism Value: A. thaliana
  misc_feature: MA Experiment 20000439 PARAMETER Experiment Name: At_Roots__P Parameter: Tissue Value: Roots vs. Whole Plant
  misc_feature: MA Experiment ID: 20000794 Result: Up-regulated in Transcription
  misc_feature: MA Experiment 20000794 PARAMETER Experiment Name: At_Petals_P Parameter: Age (day) Value: 23-25 days
  misc_feature: MA Experiment 20000794 PARAMETER Experiment Name: At_Petals_P Parameter: Plant Line Value: WS
  misc_feature: MA Experiment 20000794 PARAMETER Experiment Name: At_Petals_P Parameter: Tissue Value: Petals vs. Whole plant
  misc_feature: MA Experiment ID: 20001248 Result: Down-regulated in Transcription
  misc_feature: MA Experiment 20001248 PARAMETER Experiment Name: At_Far-red-induction_P Parameter: Age (day) Value: 7
  misc_feature: MA Experiment 20001248 PARAMETER Experiment Name: At_Far-red-induction_P Parameter: Light Value: Far-red vs. White
  misc_feature: MA Experiment 20001248 PARAMETER Experiment Name: At_Far-red-induction_P Parameter: Organism Value: A. thaliana
  misc_feature: MA Experiment 20001248 PARAMETER Experiment Name: At_Far-red-induction_P Parameter: Plant Line Value: Columbia
  misc_feature: MA Experiment 20001248 PARAMETER Experiment Name: At_Far-red-induction_P Parameter: Timepoint (hr) Value: 4
  misc_feature: MA Experiment 20001248 PARAMETER Experiment Name: At_Far-red-induction_P Parameter: Tissue Value: Whole Plant
  misc_feature: MA Experiment ID: 20001757 Result: Down-regulated in Transcription
  misc_feature: MA Experiment 20001757 PARAMETER Experiment Name: At_50mM_NH4NO3_L-to-H_P Parameter: Timepoint (hr) Value: 6
  misc_feature: MA Experiment 20001757 PARAMETER Experiment Name: At_50mM_NH4NO3_L-to-H_P Parameter: Tissue Value: Leaf
  misc_feature: MA Experiment 20001757 PARAMETER Experiment Name: At_50mM_NH4NO3_L-to-H_P Parameter: Treatment Value: 50mM NH4NO3 vs 100mM Mannitol
ctcttgatcttttagtgttcttgctttgtcgcttcaacgcttaaggtaacactgcttcttctttgatattcgcgattcatcgaacgatttcatcattatagacaaacatcctatcgatcggtttggatttgtgtgagtctgcataatcatggcgaggaagatgcttgttgatggtgagattgataaggtggcggctgatgaagccaacgcgacgcactatgattttgatttgtttgtcatcggtgccgggagtggcggtgttcgtgctgctaggttttcggctaatcatggcgctaaggttggtatttgtgagcttccatttcaccctattagctctgaggagattggaggcgttggtggaacctgtgttatccgtggttgtgttcctaaaaagattctcgtctatggagctacttacggtggtgaacttgaggatgctaaaaattatgggtgggaaataaatgagaaagtcgacttcacatggaagaagcttttgcaaaagaagactgatgagatactaagactgaataatatctacaagcggttattggcaaatgctgcggtgaaattgtatgaaggtgaaggaagagtagttggtcccaacgaagtggaggtgagacaaatagatggcacaaaaataagttataccgcaaagcacatattgattgccactggcagtcgggcgcaaaagcctaatattcctggacatgagctggctattacatctgatgaagctttgagcttggaagaatttcccaagcgtgctatagtgcttggaggagggtatattgctgtggagtttgcatcaatatggcgtggaatgggtgctactgtagatttattcttcaggaaggaacttccgctaaggggttttgatgacgaaatgagggcactagttgctagaaatcttgaaggaaggggcgttaatctgcatccacaaacaagtttgactcagttgacaaaaacagaccaggggatcaaagtcatatcgtcccatggggaggaattcgtggcagatgtcgtcctatttgctactggcagaagtcctaataccaaaagattgaatttagaagctgttggtgttgaacttgatcaggctggagctgtgaaggttgacgagtattcacgaactaatatacctagcatatgggctgtaggagatgccacaaaccgaattaaccttacacctgttgcgttaatggaggccacctgttttgcgaacactgcttttggtggaaagcctactaaagcagaatacagcaatgtcgcctgtgctgtattttgcataccaccactagctgtagtgggtctcagcgaagaagaagcagtagaacaagcaaccggtgatattctggtcttcacctcaggctttaatccaatgaagaacaccatttctggacgccaggaaaagacattgatgaagctaatagttgatgagaagagtgataaggttattggagcatccatgtgcggtcctgatgcagctgagatcatgcaggggattgcaattgcgctcaagtgtggagcaaccaaagcacaatttgatagcacggttgggatacatccatcttctgcagaggaatttgtgacaatgcgcagtgtgaccagacgcattgcccacaaacccaaacctaagacaaatctatgaaccgcaaaatataaagagctatatagcatgaaaactcggtacacttagtttgatcaaagagtcagacaacgatgagtttaatcatactcgtgtcccaataaaggatttgtaatttttgtttgtttgtatgatgcttctcttcttacttacttgagaaaacatcaaggtttcttctcttattgcttagtggaactttatt

SEQ ID NO: 42986 - protein, 499 aa, Arabidopsis thaliana; identical to SEQ ID NO: 24219
  peptide (1)..(499): Ceres Seq. ID no. 12337059
  misc_feature (27)..(348): Pfam Name: Pyridine nucleotide-disulphide oxidoreductase Pfam Description: Pyridine nucleotide-disulphide oxidoreductase
  misc_feature (61)..(418): Homolog of NCBI NO: 6723469 NR Description: glutathione reductase [Betula pendula]
  misc_feature (1)..(499): Homolog of NCBI NO: 7431855 NR Description: probable glutathione-disulfide reductase (EC
  misc_feature (1)..(499): Homolog of NCBI NO: 19860133 NR Description: Glutathione reductase, cytosolic (GR) (GRase)
  misc_feature (17)..(469): Homolog of NCBI NO: 10862871 NR Description: glutathione reductase [Mesembryanthemum
  misc_feature (1)..(499): Homolog of NCBI NO: 2500116 NR Description: Glutathione reductase, cytosolic (GR) (GRase)
  misc_feature (12)..(499): Homolog of NCBI NO: 2500115 NR Description: Glutathione reductase, chloroplast precursor (GR)
  misc_feature (1)..(499): Homolog of NCBI NO: 7431864 NR Description: glutathione-disulfide reductase (EC 1.8.1.7) -
  misc_feature (1)..(499): Homolog of NCBI NO: 21263645 NR Description: Glutathione reductase, cytosolic (GR) (GRase)
  misc_feature (1)..(499): Homolog of NCBI NO: 13430632 NR Description: putative glutathione reductase [Arabidopsis
  misc_feature (1)..(499): Homolog of NCBI NO: 15230074 NR Description: glutathione reductase, putative

SEQ ID NO: 42987 - protein, 495 aa, Arabidopsis thaliana; identical to SEQ ID NO: 24220
  peptide (1)..(495): Ceres Seq. ID no. 12337060
  misc_feature (23)..(344): Pfam Name: Pyridine nucleotide-disulphide oxidoreductase Pfam Description: Pyridine nucleotide-disulphide oxidoreductase
  misc_feature (57)..(414): Homolog of NCBI NO: 6723469 NR Description: glutathione reductase [Betula pendula]
  misc_feature (1)..(495): Homolog of NCBI NO: 7431855 NR Description: probable glutathione-disulfide reductase (EC
  misc_feature (1)..(495): Homolog of NCBI NO: 19860133 NR Description: Glutathione reductase, cytosolic (GR) (GRase)
  misc_feature (13)..(465): Homolog of NCBI NO: 10862871 NR Description: glutathione reductase [Mesembryanthemum
  misc_feature (1)..(495): Homolog of NCBI NO: 2500116 NR Description: Glutathione reductase, cytosolic (GR) (GRase)
  misc_feature (8)..(495): Homolog of NCBI NO: 2500115 NR Description: Glutathione reductase, chloroplast precursor (GR)
  misc_feature (1)..(495): Homolog of NCBI NO: 7431864 NR Description: glutathione-disulfide reductase (EC 1.8.1.7) -
  misc_feature (1)..(495): Homolog of NCBI NO: 21263645 NR Description: Glutathione reductase, cytosolic (GR) (GRase)
  misc_feature (1)..(495): Homolog of NCBI NO: 13430632 NR Description: putative glutathione reductase [Arabidopsis
  misc_feature (1)..(495): Homolog of NCBI NO: 15230074 NR Description: glutathione reductase, putative

SEQ ID NO: 42988 - protein, 275 aa, Arabidopsis thaliana; identical to SEQ ID NO: 24221
  peptide (1)..(275): Ceres Seq. ID no. 12337061
  misc_feature (1)..(124): Pfam Name: Pyridine nucleotide-disulphide oxidoreductase Pfam Description: Pyridine nucleotide-disulphide oxidoreductase
  misc_feature (1)..(194): Homolog of NCBI NO: 6723469 NR Description: glutathione reductase [Betula pendula]
  misc_feature (1)..(275): Homolog of NCBI NO: 7431855 NR Description: probable glutathione-disulfide reductase (EC
  misc_feature (1)..(275): Homolog of NCBI NO: 19860133 NR Description: Glutathione reductase, cytosolic (GR) (GRase)
  misc_feature (1)..(245): Homolog of NCBI NO: 10862871 NR Description: glutathione reductase [Mesembryanthemum
  misc_feature (1)..(275): Homolog of NCBI NO: 2500116 NR Description: Glutathione reductase, cytosolic (GR) (GRase)
  misc_feature (1)..(275): Homolog of NCBI NO: 2500115 NR Description: Glutathione reductase, chloroplast precursor (GR)
  misc_feature (1)..(275): Homolog of NCBI NO: 7431864 NR Description: glutathione-disulfide reductase (EC 1.8.1.7) -
  misc_feature (1)..(275): Homolog of NCBI NO: 21263645 NR Description: Glutathione reductase, cytosolic (GR) (GRase)
  misc_feature (1)..(275): Homolog of NCBI NO: 13430632 NR Description: putative glutathione reductase [Arabidopsis
  misc_feature (1)..(275): Homolog of NCBI NO: 15230074 NR Description: glutathione reductase, putative

SEQ ID NO: 42989 - DNA, 830 bp, Arabidopsis thaliana
  misc_feature (1)..(830): Ceres Seq. ID no. 13645928
  misc_feature: MA Experiment ID: 20000307 Result: Up-regulated in Transcription
  misc_feature: MA Experiment 20000307 PARAMETER Experiment Name: At_Germinating_Seeds_Sub_P Parameter: Age (hr) Value: 24 vs. 0
  misc_feature: MA Experiment 20000307 PARAMETER Experiment Name: At_Germinating_Seeds_Sub_P Parameter: Organism Value: A. thaliana
  misc_feature: MA Experiment 20000307 PARAMETER Experiment Name: At_Germinating_Seeds_Sub_P Parameter: Plant Line Value: WS
  misc_feature: MA Experiment 20000307 PARAMETER Experiment Name: At_Germinating_Seeds_Sub_P Parameter: Tissue Value: Germinating Seeds
  misc_feature: MA Experiment ID: 20000315 Result: Down-regulated in Transcription
  misc_feature: MA Experiment 20000315 PARAMETER Experiment Name: At_14day_Shoots-Roots_Sub_P Parameter: Age (day) Value: 14
  misc_feature: MA Experiment 20000315 PARAMETER Experiment Name: At_14day_Shoots-Roots_Sub_P Parameter: Organism Value: A. thaliana
  misc_feature: MA Experiment 20000315 PARAMETER Experiment Name: At_14day_Shoots-Roots_Sub_P Parameter: Plant Line Value: WS
  misc_feature: MA Experiment 20000315 PARAMETER Experiment Name: At_14day_Shoots-Roots_Sub_P Parameter: Tissue Value: Shoots vs. Whole Plant
  misc_feature: MA Experiment ID: 20000346 Result: Up-regulated in Transcription
  misc_feature: MA Experiment 20000346 PARAMETER Experiment Name: At_2mM_SA_Sub_P Parameter: Age (day) Value: 14
  misc_feature: MA Experiment 20000346 PARAMETER Experiment Name: At_2mM_SA_Sub_P Parameter: Organism Value: A. thaliana
  misc_feature: MA Experiment 20000346 PARAMETER Experiment Name: At_2mM_SA_Sub_P Parameter: Plant Line Value: WS
  misc_feature: MA Experiment 20000346 PARAMETER Experiment Name: At_2mM_SA_Sub_P Parameter: Timepoint (hr) Value: 1
  misc_feature: MA Experiment 20000346 PARAMETER Experiment Name: At_2mM_SA_Sub_P Parameter: Tissue Value: Aerial
  misc_feature: MA Experiment 20000346 PARAMETER Experiment Name: At_2mM_SA_Sub_P Parameter: Treatment Value: 2mM SA vs. No Treatment
  misc_feature: MA Experiment ID: 20000347 Result: Up-regulated in Transcription
  misc_feature: MA Experiment 20000347 PARAMETER Experiment Name: At_2mM_SA_Sub_P Parameter: Age (day) Value: 14
  misc_feature: MA Experiment 20000347 PARAMETER Experiment Name: At_2mM_SA_Sub_P Parameter: Organism Value: A. thaliana
  misc_feature: MA Experiment 20000347 PARAMETER Experiment Name: At_2mM_SA_Sub_P Parameter: Plant Line Value: WS
  misc_feature: MA Experiment 20000347 PARAMETER Experiment Name: At_2mM_SA_Sub_P Parameter: Timepoint (hr) Value: 6
  misc_feature: MA Experiment 20000347 PARAMETER Experiment Name: At_2mM_SA_Sub_P Parameter: Tissue Value: Aerial
  misc_feature: MA Experiment 20000347 PARAMETER Experiment Name: At_2mM_SA_Sub_P Parameter: Treatment Value: 2mM SA vs. No Treatment
  misc_feature: MA Experiment ID: 20000355 Result: Down-regulated in Transcription
  misc_feature: MA Experiment 20000355 PARAMETER Experiment Name: At_Siliques_Sub_P Parameter: Age (day) Value: 21
  misc_feature: MA Experiment 20000355 PARAMETER Experiment Name: At_Siliques_Sub_P Parameter: Organism Value: A. thaliana
  misc_feature: MA Experiment 20000355 PARAMETER Experiment Name: At_Siliques_Sub_P Parameter: Plant Line Value: WS
  misc_feature: MA Experiment 20000355 PARAMETER Experiment Name: At_Siliques_Sub_P Parameter: Tissue Value: Less Than 5mm Siliques vs. Whole Plant
  misc_feature: MA Experiment ID: 20001807 Result: Down-regulated in Transcription
  misc_feature: MA Experiment 20001807 PARAMETER Experiment Name: At_50mM_NH4NO3_L-to-H_Sub_P Parameter: Timepoint (hr) Value: 6
  misc_feature: MA Experiment 20001807 PARAMETER Experiment Name: At_50mM_NH4NO3_L-to-H_Sub_P Parameter: Tissue Value: Leaf
  misc_feature: MA Experiment 20001807 PARAMETER Experiment Name: At_50mM_NH4NO3_L-to-H_Sub_P Parameter: Treatment Value: 50mM NH4NO3 vs 100mM Mannitol
ttcctttgctttcacgaatagaaaccttagcttcttccatttcttctttctctcctcgtttaaattagtttttgacaaggaagaaaaagatggggagaagaccatgctgtgagaagataggattgaagaaagggccatggagtgctgaagaagatcgaatcttgatcaattatattagtctccatggccatcccaattggagagctctccctaaactagccgggctacttcggtgcggaaaaagttgcaggcttcgttggattaattatttgagaccagacatcaaacgtggcaatttcactcctcatgaagaagatactatcatcagcttacatcaactcttaggcaacagatggtctgcgatagctgcaaaattgcctggacgaacagacaacgaaattaaaaatgtttggcacactcatttaaagaaaagactccaccacagtcaagatcaaaacaacaaggaagatttcgtctctactacagctgcggagatgccaacctctccgcaacaacaatctagtagtagtgccgacatttcagcaattacaacattgggaaacaacaatgacatctccaatagcaacaaagactccgcgacgtcatccgaagatgttcttgcaattatagatgagagcttttggtcagaagtggtattgatggactgtgacatttcaggaaatgagaagaatgagaaaaagatagagaattgggagggctcactagatagaaacgataagggatataaccatgacatggagttttggtttgaccatctcactagtagtagttgtataattggagaaatgtccgacatttctgagttttga

SEQ ID NO: 42990 - protein, 246 aa, Arabidopsis thaliana
  peptide (1)..(246): Ceres Seq. ID no. 13645929
  misc_feature (14)..(61): Pfam Name: Myb-like DNA-binding domain Pfam Description: Myb-like DNA-binding domain
  misc_feature (1)..(246): Homolog of NCBI NO: 15224628 NR Description: myb family transcription factor [Arabidopsis
  misc_feature (1)..(246): Homolog of NCBI NO: 2129646 NR Description: myb-related protein, 28K, leaf-specific -
  misc_feature (1)..(246): Homolog of NCBI NO: 15221419 NR Description: myb family transcription factor [Arabidopsis
MGRRPCCEKIGLKKGPWSAEEDRILINYISLHGHPNWRALPKLAGLLRCGKSCRLRWINYLRPDIKRGNFTPHEEDTIISLHQLLGNRWSAIAAKLPGRTDNEIKNVWHTHLKKRLHHSQDQNNKEDFVSTTAAEMPTSPQQQSSSSADISAITTLGNNNDISNSNKDSATSSEDVLAIIDESFWSEVVLMDCDISGNEKNEKKIENWEGSLDRNDKGYNHDMEFWFDHLTSSSCIIGEMSDISEF

SEQ ID NO: 42991 - DNA, 1290 bp, Arabidopsis thaliana
  misc_feature (1)..(1290): Ceres Seq. ID no. 12481784
  misc_feature: MA Experiment ID: 108595 Result: Down-regulated in Transcription
  misc_feature: MA Experiment 108595 PARAMETER Experiment Name: At_Ler-pi_Ovule_cDNA_P Parameter: Plant Line Value: null
  misc_feature: MA Experiment ID: 108668 Result: Down-regulated in Transcription
  misc_feature: MA Experiment 108668 PARAMETER Experiment Name: At_2mM_SA_cDNA_P Parameter: Plant Line Value: WS
  misc_feature: MA Experiment 108668 PARAMETER Experiment Name: At_2mM_SA_cDNA_P Parameter: Timepoint (hr) Value: 6
  misc_feature: MA Experiment 108668 PARAMETER Experiment Name: At_2mM_SA_cDNA_P Parameter: Treatment Value: 2mM SA vs. No Treatment
  misc_feature: MA Experiment ID: 20000184 Result: Up-regulated in Transcription
  misc_feature: MA Experiment 20000184 PARAMETER Experiment Name: At_Shoots__P Parameter: Age (day) Value: 7
  misc_feature: MA Experiment 20000184 PARAMETER Experiment Name: At_Shoots__P Parameter: Tissue Value: Shoots vs. Whole Plant
  misc_feature: MA Experiment ID: 20000185 Result: Down-regulated in Transcription
  misc_feature: MA Experiment 20000185 PARAMETER Experiment Name: At_Roots__P Parameter: Age (day) Value: 7 vs. 21
  misc_feature: MA Experiment 20000185 PARAMETER Experiment Name: At_Roots__P Parameter: Organism Value: A. thaliana
  misc_feature: MA Experiment 20000185 PARAMETER Experiment Name: At_Roots__P Parameter: Tissue Value: Roots vs. Whole Plant
  misc_feature: MA Experiment ID: 20000234 Result: Up-regulated in Transcription
  misc_feature: MA Experiment 20000234 PARAMETER Experiment Name: At_Siliques_P Parameter: Age (day) Value: 21
  misc_feature: MA Experiment 20000234 PARAMETER Experiment Name: At_Siliques_P Parameter: Organism Value: A. thaliana
  misc_feature: MA Experiment 20000234 PARAMETER Experiment Name: At_Siliques_P Parameter: Plant Line Value: WS
  misc_feature: MA Experiment 20000234 PARAMETER Experiment Name: At_Siliques_P Parameter: Tissue Value: Less Than 5mm Siliques vs. Whole Plant
  misc_feature: MA Experiment ID: 20000437 Result: Down-regulated in Transcription
  misc_feature: MA Experiment 20000437 PARAMETER Experiment Name: At_Drought_P Parameter: Age (day) Value: 8
  misc_feature: MA Experiment 20000437 PARAMETER Experiment Name: At_Drought_P Parameter: Organism Value: A. thaliana
  misc_feature: MA Experiment 20000437 PARAMETER Experiment Name: At_Drought_P Parameter: Plant Line Value: WS
  misc_feature: MA Experiment 20000437 PARAMETER Experiment Name: At_Drought_P Parameter: Timepoint (hr) Value: 24
  misc_feature: MA Experiment 20000437 PARAMETER Experiment Name: At_Drought_P Parameter: Tissue Value: Whole Plant
  misc_feature: MA Experiment 20000437 PARAMETER Experiment Name: At_Drought_P Parameter: Treatment Value: Drought vs. No Drought
  misc_feature: MA Experiment ID: 20000438 Result: Up-regulated in Transcription
  misc_feature: MA Experiment 20000438 PARAMETER Experiment Name: At_Shoots__P Parameter: Age (day) Value: 14
  misc_feature: MA Experiment 20000438 PARAMETER Experiment Name: At_Shoots__P Parameter: Tissue Value: Shoots vs. Whole Plant
  misc_feature: MA Experiment ID: 20000439 Result: Down-regulated in Transcription
  misc_feature: MA Experiment 20000439 PARAMETER Experiment Name: At_Roots__P Parameter: Age (day) Value: 14 vs. 21
  misc_feature: MA Experiment 20000439 PARAMETER Experiment Name: At_Roots__P Parameter: Organism Value: A. thaliana
  misc_feature: MA Experiment 20000439 PARAMETER Experiment Name: At_Roots__P Parameter: Tissue Value: Roots vs. Whole Plant
  misc_feature: MA Experiment ID: 20000495 Result: Up-regulated in Transcription
  misc_feature: MA Experiment 20000495 PARAMETER Experiment Name: At_Guard_Cells_P Parameter: Harvest Date Value: 8/2/2002
  misc_feature: MA Experiment 20000495 PARAMETER Experiment Name: At_Guard_Cells_P Parameter: Organism Value: A. thaliana
  misc_feature: MA Experiment 20000495 PARAMETER Experiment Name: At_Guard_Cells_P Parameter: Tissue Value: Guard Cells vs. Leaves
  misc_feature: MA Experiment ID: 20001451 Result: Up-regulated in Transcription
  misc_feature: MA Experiment 20001451 PARAMETER Experiment Name: At_Far-red-induction_P Parameter: Age (day) Value: 7
  misc_feature: MA Experiment 20001451 PARAMETER Experiment Name: At_Far-red-induction_P Parameter: Light Value: Far-red vs. White
  misc_feature: MA Experiment 20001451 PARAMETER Experiment Name: At_Far-red-induction_P Parameter: Organism Value: A. thaliana
  misc_feature: MA Experiment 20001451 PARAMETER Experiment Name: At_Far-red-induction_P Parameter: Plant Line Value: Columbia
  misc_feature: MA Experiment 20001451 PARAMETER Experiment Name: At_Far-red-induction_P Parameter: Timepoint (hr) Value: 24
  misc_feature: MA Experiment 20001451 PARAMETER Experiment Name: At_Far-red-induction_P Parameter: Tissue Value: Whole Plant
  misc_feature: MA Experiment ID: 20001757 Result: Up-regulated in Transcription
  misc_feature: MA Experiment 20001757 PARAMETER Experiment Name: At_50mM_NH4NO3_L-to-H_P Parameter: Timepoint (hr) Value: 6
  misc_feature: MA Experiment 20001757 PARAMETER Experiment Name: At_50mM_NH4NO3_L-to-H_P Parameter: Tissue Value: Leaf
  misc_feature: MA Experiment 20001757 PARAMETER Experiment Name: At_50mM_NH4NO3_L-to-H_P Parameter: Treatment Value: 50mM NH4NO3 vs 100mM Mannitol
actgcatcttatctccactctcaaaatcatcttcttcacccaaaaacccctaaaagccttatcccttcttcttcccatggctgcttcagacttcgtctctcgctctctcttccttcaaccctaaatctcttcctttcggcgtctccagacctgcctccgtttccctcttatctccttccctctcctttaaactcaattccgactccgtttccttctccatcgccgccaaatggaactctcccgcttctcgcttcgtccgtaacgttgcgattacctcagagttcgaggtggaagaagatggtttcgctgacgtcgctccgccaaaagagcaatctttctctgctgaccttaaactcttcgttggtaaccttcctttcaacgttgacagtgctcagctcgctcagctctttgagagtgccggaaatgttgagatggttgaggtaatctatgacaaaattacagagaggttttggattcgtgactatgtcttcagtttctgaagttaaggcagctgctcagcagttcaatggctatgagttggatggtagacctttgagagtcaatgctggtcccccaccaccaaagagggaagatggtttctccagaggacctaggagcagctttggaagctcaggttctggatatggaggaggtggtggttctggtgctggttcaggaaaccgtgtttatgtgggtaacctctcttggggagttgatgacatggctcttgagagtttgttctcggagcaaggaaaggttgttgaggccagagtcatctacgacagggacagtggtcgatccaagggttttggatttgtgacatacgactcttctcaagaggtccaaaatgccatcaagtccttggatggtgctgatttggacggtagacaaattagagtctcggaagctgaggctaggcctccaaggccgccaatattgagcaccaatctatgacttcctattctcaaaaacgcatattctggagggcgcttcgaagtaaagagggtttgtgagatgatggcagtttcagacggtactaagctcttagttcgcctatgtttgttgccttggatgcaagaaggtcgtaaaggaatggtcttttttttttttgagaaacgtataattaagatagaaactggagagaccatgttcttgtctgtctgaatgctgccattgactgcttcgctttggttttgattcaatttttttttctctctatatcgtggtctcttcttcctaatgcttctctgtttatttgatcctctgctcaaatgaatatgaacacacttg

SEQ ID NO: 42992 - protein, 168 aa, Arabidopsis thaliana
  peptide (1)..(168): Ceres Seq. ID no. 12481785
  misc_feature (80)..(151): Pfam Name: RNA recognition motif. (a.k.a. RRM, RBD, or RNP domain) Pfam Description: RNA recognition motif. (a.k.a. RRM, RBD, or RNP
  misc_feature (75)..(160): Homolog of NCBI NO: 18921322 NR Description: putative ribonucleoprotein [Oryza sativa]
  misc_feature (6)..(160): Homolog of NCBI NO: 1350821 NR Description: 31 kDa ribonucleoprotein, chloroplast precursor
  misc_feature (1)..(160): Homolog of NCBI NO: 12230585 NR Description: 29 kDa ribonucleoprotein B, chloroplast precursor
  misc_feature (1)..(160): Homolog of NCBI NO: 17432522 NR Description: single-stranded DNA binding protein precursor
  misc_feature (1)..(160): Homolog of NCBI NO: 1350820 NR Description: 30 kDa ribonucleoprotein, chloroplast precursor
  misc_feature (50)..(160): Homolog of NCBI NO: 681904 NR Description: cp29 [Arabidopsis thaliana]
  misc_feature (50)..(160): Homolog of NCBI NO: 30693824 NR Description: 29 kDa ribonucleoprotein, chloroplast
  misc_feature (50)..(160): Homolog of NCBI NO: 15231817 NR Description: 29 kDa ribonucleoprotein, chloroplast precursor
  misc_feature (1)..(160): Homolog of NCBI NO: 15228102 NR Description: chloroplast RNA-binding protein cp29, putative
  misc_feature (1)..(160): Homolog of NCBI NO: 21617920 NR Description: putative RNA-binding protein [Arabidopsis
MTKLQRGFGFVTMSSVSEVKAAAQQFNGYELDGRPLRVNAGPPPPKREDGFSRGPRSSFGSSGSGYGGGGGSGAGSGNRVYVGNLSWGVDDMALESLFSEQGKVVEARVIYDRDSGRSKGFGFVTYDSSQEVQNAIKSLDGADLDGRQIRVSEAEARPPRPPILSTNL

SEQ ID NO: 42993 - protein, 156 aa, Arabidopsis thaliana
  peptide (1)..(156): Ceres Seq. ID no. 12481786
  misc_feature (68)..(139): Pfam Name: RNA recognition motif. (a.k.a. RRM, RBD, or RNP domain) Pfam Description: RNA recognition motif. (a.k.a. RRM, RBD, or RNP
  misc_feature (63)..(148): Homolog of NCBI NO: 18921322 NR Description: putative ribonucleoprotein [Oryza sativa]
  misc_feature (1)..(148): Homolog of NCBI NO: 1350821 NR Description: 31 kDa ribonucleoprotein, chloroplast precursor
  misc_feature (1)..(148): Homolog of NCBI NO: 12230585 NR Description: 29 kDa ribonucleoprotein B, chloroplast precursor
  misc_feature (1)..(148): Homolog of NCBI NO: 17432522 NR Description: single-stranded DNA binding protein precursor
  misc_feature (1)..(148): Homolog of NCBI NO: 1350820 NR Description: 30 kDa ribonucleoprotein, chloroplast precursor
  misc_feature (38)..(148): Homolog of NCBI NO: 681904 NR Description: cp29 [Arabidopsis thaliana]
  misc_feature (38)..(148): Homolog of NCBI NO: 30693824 NR Description: 29 kDa ribonucleoprotein, chloroplast
  misc_feature (38)..(148): Homolog of NCBI NO: 15231817 NR Description: 29 kDa ribonucleoprotein, chloroplast precursor
  misc_feature (1)..(148): Homolog of NCBI NO: 15228102 NR Description: chloroplast RNA-binding protein cp29, putative
  misc_feature (1)..(148): Homolog of NCBI NO: 21617920 NR Description: putative RNA-binding protein [Arabidopsis
MSSVSEVKAAAQQFNGYELDGRPLRVNAGPPPPKREDGFSRGPRSSFGSSGSGYGGGGGSGAGSGNRVYVGNLSWGVDDMALESLFSEQGKVVEARVIYDRDSGRSKGFGFVTYDSSQEVQNAIKSLDGADLDGRQIRVSEAEARPPRPPILSTNL

SEQ ID NO: 42994 - protein, 147 aa, Arabidopsis thaliana
  peptide (1)..(147): Ceres Seq. ID no. 12481787
TASYLHSQNHLLHPKTPKSLIPSSSHGCFRLRLSLSLPSTLNLFLSASPDLPPFPSYLLPSPLNSIPTPFPSPSPPNGTLPLLASSVTLRLPQSSRWKKMVSLTSLRQKSNLSLLTLNSSLVTFLSTLTVLSSLSSLRVPEMLRWLR

SEQ ID NO: 42995 - DNA, 1261 bp, Arabidopsis thaliana
  misc_feature (1)..(1261): Ceres Seq. ID no. 13494006
  misc_feature: MA Experiment ID: 108573 Result: Up-regulated in Transcription
  misc_feature: MA Experiment 108573 PARAMETER Experiment Name: At_Drought_cDNA_P Parameter: Timepoint (hr) Value: 6
  misc_feature: MA Experiment 108573 PARAMETER Experiment Name: At_Drought_cDNA_P Parameter: Tissue Value: Aerial
  misc_feature: MA Experiment 108573 PARAMETER Experiment Name: At_Drought_cDNA_P Parameter: Treatment Value: Drought vs. No Drought
  misc_feature: MA Experiment ID: 108577 Result: Up-regulated in Transcription
  misc_feature: MA Experiment 108577 PARAMETER Experiment Name: At_42deg_Heat_cDNA_P Parameter: Temperature (deg C) Value: 42 vs. 22
  misc_feature: MA Experiment 108577 PARAMETER Experiment Name: At_42deg_Heat_cDNA_P Parameter: Timepoint (hr) Value: 6
  misc_feature: MA Experiment 108577 PARAMETER Experiment Name: At_42deg_Heat_cDNA_P Parameter: Tissue Value: Aerial
  misc_feature: MA Experiment ID: 20000111 Result: Up-regulated in Transcription
  misc_feature: MA Experiment 20000111 PARAMETER Experiment Name: At_42deg_Heat_cDNA_P Parameter: Temperature (deg C) Value: 42 vs. 22
  misc_feature: MA Experiment 20000111 PARAMETER Experiment Name: At_42deg_Heat_cDNA_P Parameter: Timepoint (hr) Value: 6
  misc_feature: MA Experiment 20000111 PARAMETER Experiment Name: At_42deg_Heat_cDNA_P Parameter: Tissue Value: Aerial
  misc_feature: MA Experiment ID: 20000112 Result: Up-regulated in Transcription
  misc_feature: MA Experiment 20000112 PARAMETER Experiment Name: At_42deg_Heat_cDNA_P Parameter: Temperature (deg C) Value: 42 vs. 22
  misc_feature: MA Experiment 20000112 PARAMETER Experiment Name: At_42deg_Heat_cDNA_P Parameter: Timepoint (hr) Value: 2
  misc_feature: MA Experiment 20000112 PARAMETER Experiment Name: At_42deg_Heat_cDNA_P Parameter: Tissue Value: Aerial
  misc_feature: MA Experiment ID: 20000113 Result: Up-regulated in Transcription
  misc_feature: MA Experiment 20000113 PARAMETER Experiment Name: At_42deg_Heat_cDNA_P Parameter: Temperature (deg C) Value: 42 vs. 22
  misc_feature: MA Experiment 20000113 PARAMETER Experiment Name: At_42deg_Heat_cDNA_P Parameter: Timepoint (hr) Value: 8
  misc_feature: MA Experiment 20000113 PARAMETER Experiment Name: At_42deg_Heat_cDNA_P Parameter: Tissue Value: Aerial
  misc_feature: MA Experiment ID: 20000144 Result: Up-regulated in Transcription
  misc_feature: MA Experiment 20000144 PARAMETER Experiment Name: At_42deg_Heat_cDNA_P Parameter: Temperature (deg C) Value: 42 vs. 22
  misc_feature: MA Experiment 20000144 PARAMETER Experiment Name: At_42deg_Heat_cDNA_P Parameter: Timepoint (hr) Value: 1
  misc_feature: MA Experiment 20000144 PARAMETER Experiment Name: At_42deg_Heat_cDNA_P Parameter: Tissue Value: Aerial
  misc_feature: MA Experiment ID: 20000171 Result: Up-regulated in Transcription
  misc_feature: MA Experiment 20000171 PARAMETER Experiment Name: At_42deg_Heat_P Parameter: Age (day) Value: 14
  misc_feature: MA Experiment 20000171 PARAMETER Experiment Name: At_42deg_Heat_P Parameter: Organism Value: A. thaliana
  misc_feature: MA Experiment 20000171 PARAMETER Experiment Name: At_42deg_Heat_P Parameter: Plant Line Value: WS
  misc_feature: MA Experiment 20000171 PARAMETER Experiment Name: At_42deg_Heat_P Parameter: Temperature (deg C) Value: 42 vs. 22
  misc_feature: MA Experiment 20000171 PARAMETER Experiment Name: At_42deg_Heat_P Parameter: Timepoint (hr) Value: 1
  misc_feature: MA Experiment 20000171 PARAMETER Experiment Name: At_42deg_Heat_P Parameter: Tissue Value: Aerial
  misc_feature: MA Experiment ID: 20000173 Result: Up-regulated in Transcription
  misc_feature: MA Experiment 20000173 PARAMETER Experiment Name: At_42deg_Heat_P Parameter: Age (day) Value: 14
  misc_feature: MA Experiment 20000173 PARAMETER Experiment Name: At_42deg_Heat_P Parameter: Organism Value: A. thaliana
  misc_feature: MA Experiment 20000173 PARAMETER Experiment Name: At_42deg_Heat_P Parameter: Plant Line Value: WS
  misc_feature: MA Experiment 20000173 PARAMETER Experiment Name: At_42deg_Heat_P Parameter: Temperature (deg C) Value: 42 vs. 22
  misc_feature: MA Experiment 20000173 PARAMETER Experiment Name: At_42deg_Heat_P Parameter: Timepoint (hr) Value: 6
  misc_feature: MA Experiment 20000173 PARAMETER Experiment Name: At_42deg_Heat_P Parameter: Tissue Value: Aerial
  misc_feature: MA Experiment ID: 20000224 Result: Down-regulated in Transcription
  misc_feature: MA Experiment ID: 20000234 Result: Down-regulated in Transcription
  misc_feature: MA Experiment 20000234 PARAMETER Experiment Name: At_Siliques_P Parameter: Age (day) Value: 21
  misc_feature: MA Experiment 20000234 PARAMETER Experiment Name: At_Siliques_P Parameter: Organism Value: A. thaliana
  misc_feature: MA Experiment 20000234 PARAMETER Experiment Name: At_Siliques_P Parameter: Plant Line Value: WS
  misc_feature: MA Experiment 20000234 PARAMETER Experiment Name: At_Siliques_P Parameter: Tissue Value: Less Than 5mm Siliques vs. Whole Plant
  misc_feature: MA Experiment ID: 20000264 Result: Down-regulated in Transcription
  misc_feature: MA Experiment 20000264 PARAMETER Experiment Name: At_Open_Flower_P Parameter: Age (day) Value: 21
  misc_feature: MA Experiment 20000264 PARAMETER Experiment Name: At_Open_Flower_P Parameter: Plant Line Value: WS
  misc_feature: MA Experiment 20000264 PARAMETER Experiment Name: At_Open_Flower_P Parameter: Tissue Value: Open Flower vs. Whole Plant
  misc_feature: MA Experiment ID: 20000265 Result: Down-regulated in Transcription
  misc_feature: MA Experiment 20000265 PARAMETER Experiment Name: At_Open_Flower_P Parameter: Age (day) Value: 21
  misc_feature: MA Experiment 20000265 PARAMETER Experiment Name: At_Open_Flower_P Parameter: Plant Line Value: WS
  misc_feature: MA Experiment 20000265 PARAMETER Experiment Name: At_Open_Flower_P Parameter: Tissue Value: Closed Flower vs. Whole Plant
  misc_feature: MA Experiment ID: 20000437 Result: Up-regulated in Transcription
  misc_feature: MA Experiment 20000437 PARAMETER Experiment Name: At_Drought_P Parameter: Age (day) Value: 8
  misc_feature: MA Experiment 20000437 PARAMETER Experiment Name: At_Drought_P Parameter: Organism Value: A. thaliana
  misc_feature: MA Experiment 20000437 PARAMETER Experiment Name: At_Drought_P Parameter: Plant Line Value: WS
  misc_feature: MA Experiment 20000437 PARAMETER Experiment Name: At_Drought_P Parameter: Timepoint (hr) Value: 24
  misc_feature: MA Experiment 20000437 PARAMETER Experiment Name: At_Drought_P Parameter: Tissue Value: Whole Plant
  misc_feature: MA Experiment 20000437 PARAMETER Experiment Name: At_Drought_P Parameter: Treatment Value: Drought vs. No Drought
  misc_feature: MA Experiment ID: 20001247 Result: Up-regulated in Transcription
  misc_feature: MA Experiment 20001247 PARAMETER Experiment Name: At_Far-red-induction_P Parameter: Age (day) Value: 7
  misc_feature: MA Experiment 20001247 PARAMETER Experiment Name: At_Far-red-induction_P Parameter: Light Value: Far-red vs. White
  misc_feature: MA Experiment 20001247 PARAMETER Experiment Name: At_Far-red-induction_P Parameter: Organism Value: A. thaliana
  misc_feature: MA Experiment 20001247 PARAMETER Experiment Name: At_Far-red-induction_P Parameter: Plant Line Value: Columbia
  misc_feature: MA Experiment 20001247 PARAMETER Experiment Name: At_Far-red-induction_P Parameter: Timepoint (hr) Value: 1
  misc_feature: MA Experiment 20001247 PARAMETER Experiment Name: At_Far-red-induction_P Parameter: Tissue Value: Whole Plant
acatacgcggaaaaaaaaaaaaaaagcgaatcgtttacttacccctctttgaaaccgacggtggtatttttcgccggagaagatgaagcagagaacctggccttgtagatctgaaggatctcgattctcctccttatcgtttttgaaacctcacgacaaggataaacggagtagaatttcatcaatcaacaaagcaacggcgaagtcaaccacaagttcaaggtcttcttcttcctcttcttcttcacgtcctccatcgaatgagttcggagatttctcgatgcttccgtatgatatactgatgaagattgctgcaccgtttagtcatccgaatcttcaagcggcgtctttggtatgtaaatcgtggagagacgcgctaaagccgttgcgagagtcgatgttgttgattcggtgggggaaaaagtacaagcacggaagaggaggtgtgcgagcgaatctcgacaaagctcttgattcgtttctgaaaggagctatgcgtggatccacgctcgctatggtcgacgctgggcttgtgtattgggaaagaggagagaaggagaaagcggtgaatttgtatcggagagcttcggagcttggtgatgctgttggtcaatgtaatttagggattgcttatcttcaagttcaaccttcaaatcccaaggaagcgatgaaatggttgaaacaatctgcagagaatggttatgttcgagcacagtatcagttagctctttgtttacaccatggtcgggtcgtgcaaaccaatctgcttgaagctactaaatggtacctaaaggcagcagaaggtgggtatgtacgagcgatgtataacatttcgctttgttattcggttggagaaggcttaccacaaaaccgcaagctagcaagaaaatggatgaaacgagcagctgatcacggccacagtaaagctcagtttgaacacggccttgctctattttctgaaggggagatgctgaagtcagtgctttacttagaacttgccgaacgtggtggcgaagcagctgctactcccgtcaaagaagttgtacaccaacagctttctgcaacttttggtggtcaggccgtacaccatgccatacaccaagccaataactggcgtcctctaccagttactcgatgactcctatcatttatttcagtgaggtctagtgattggctagttacatgtccataacttaaattccaatttgacaatgtatcaatgacaaaaccttatttcagatttctacttttagttcgtact

SEQ ID NO: 42996 - protein, 351 aa, Arabidopsis thaliana
  peptide (1)..(351): Ceres Seq. ID no. 13494007
  misc_feature (144)..(274): Pfam Name: TPR repeat region Pfam Description: TPR repeat region
  misc_feature (112)..(332): Homolog of NCBI NO: 9967440 NR Description: SEL1L [Mesocricetus auratus]
  misc_feature (112)..(320): Homolog of NCBI NO: 22999260 NR Description: hypothetical protein [Magnetococcus sp. MC-1]
  misc_feature (112)..(283): Homolog of NCBI NO: 22999260 NR Description: hypothetical protein [Magnetococcus sp. MC-1]
  misc_feature (112)..(314): Homolog of NCBI NO: 22999260 NR Description: hypothetical protein [Magnetococcus sp. MC-1]
  misc_feature (112)..(314): Homolog of NCBI NO: 22999260 NR Description: hypothetical protein [Magnetococcus sp. MC-1]
  misc_feature (95)..(293): Homolog of NCBI NO: 39997985 NR Description: conserved hypothetical protein [Geobacter
  misc_feature (97)..(295): Homolog of NCBI NO: 22999260 NR Description: hypothetical protein [Magnetococcus sp. MC-1]
  misc_feature (64)..(346): Homolog of NCBI NO: 38344482 NR Description: OSJNBa0022H21.17 [Oryza sativa (japonica
  misc_feature (1)..(351): Homolog of NCBI NO: 25406056 NR Description: hypothetical protein F5A18.23 [imported] -
  misc_feature (1)..(351): Homolog of NCBI NO: 18409624 NR Description: F-box protein family [Arabidopsis thaliana]
MKQRTWPCRSEGSRFSSLSFLKPHDKDKRSRISSINKATAKSTTSSRSSSSSSSSRPPSNEFGDFSMLPYDILMKIAAPFSHPNLQAASLVCKSWRDALKPLRESMLLIRWGKKYKHGRGGVRANLDKALDSFLKGAMRGSTLAMVDAGLVYWERGEKEKAVNLYRRASELGDAVGQCNLGIAYLQVQPSNPKEAMKWLKQSAENGYVRAQYQLALCLHHGRVVQTNLLEATKWYLKAAEGGYVRAMYNISLCYSVGEGLPQNRKLARKWMKRAADHGHSKAQFEHGLALFSEGEMLKSVLYLELAERGGEAAATPVKEVVHQQLSATFGGQAVHHAIHQANNWRPLPVTR

SEQ ID NO: 42997 - protein, 285 aa, Arabidopsis thaliana
  peptide (1)..(285): Ceres Seq. ID no. 13494008
  misc_feature (78)..(208): Pfam Name: TPR repeat region Pfam Description: TPR repeat region
  misc_feature (46)..(266): Homolog of NCBI NO: 9967440 NR Description: SEL1L [Mesocricetus auratus]
  misc_feature (46)..(254): Homolog of NCBI NO: 22999260 NR Description: hypothetical protein [Magnetococcus sp. MC-1]
  misc_feature (46)..(217): Homolog of NCBI NO: 22999260 NR Description: hypothetical protein [Magnetococcus sp. MC-1]
  misc_feature (46)..(248): Homolog of NCBI NO: 22999260 NR Description: hypothetical protein [Magnetococcus sp. MC-1]
  misc_feature (46)..(248): Homolog of NCBI NO: 22999260 NR Description: hypothetical protein [Magnetococcus sp. MC-1]
  misc_feature (29)..(227): Homolog of NCBI NO: 39997985 NR Description: conserved hypothetical protein [Geobacter
  misc_feature (31)..(229): Homolog of NCBI NO: 22999260 NR Description: hypothetical protein [Magnetococcus sp. MC-1]
  misc_feature (1)..(280): Homolog of NCBI NO: 38344482 NR Description: OSJNBa0022H21.17 [Oryza sativa (japonica
  misc_feature (1)..(285): Homolog of NCBI NO: 25406056 NR Description: hypothetical protein F5A18.23 [imported] -
  misc_feature (1)..(285): Homolog of NCBI NO: 18409624 NR Description: F-box protein family [Arabidopsis thaliana]
MLPYDILMKIAAPFSHPNLQAASLVCKSWRDALKPLRESMLLIRWGKKYKHGRGGVRANLDKALDSFLKGAMRGSTLAMVDAGLVYWERGEKEKAVNLYRRASELGDAVGQCNLGIAYLQVQPSNPKEAMKWLKQSAENGYVRAQYQLALCLHHGRVVQTNLLEATKWYLKAAEGGYVRAMYNISLCYSVGEGLPQNRKLARKWMKRAADHGHSKAQFEHGLALFSEGEMLKSVLYLELAERGGEAAATPVKEVVHQQLSATFGGQAVHHAIHQANNWRPLPVTR

SEQ ID NO: 42998 - protein, 278 aa, Arabidopsis thaliana
  peptide (1)..(278): Ceres Seq. ID no. 13494009
  misc_feature (71)..(201): Pfam Name: TPR repeat region Pfam Description: TPR repeat region
  misc_feature (39)..(259): Homolog of NCBI NO: 9967440 NR Description: SEL1L [Mesocricetus auratus]
  misc_feature (39)..(247): Homolog of NCBI NO: 22999260 NR Description: hypothetical protein [Magnetococcus sp. MC-1]
  misc_feature (39)..(210): Homolog of NCBI NO: 22999260 NR Description: hypothetical protein [Magnetococcus sp. MC-1]
  misc_feature (39)..(241): Homolog of NCBI NO: 22999260 NR Description: hypothetical protein [Magnetococcus sp. MC-1]
  misc_feature (39)..(241): Homolog of NCBI NO: 22999260 NR Description: hypothetical protein [Magnetococcus sp. MC-1]
  misc_feature (22)..(220): Homolog of NCBI NO: 39997985 NR Description: conserved hypothetical protein [Geobacter
  misc_feature (24)..(222): Homolog of NCBI NO: 22999260 NR Description: hypothetical protein [Magnetococcus sp. MC-1]
  misc_feature (1)..(273): Homolog of NCBI NO: 38344482 NR Description: OSJNBa0022H21.17 [Oryza sativa (japonica
  misc_feature (1)..(278): Homolog of NCBI NO: 25406056 NR Description: hypothetical protein F5A18.23 [imported] -
  misc_feature (1)..(278): Homolog of NCBI NO: 18409624 NR Description: F-box protein family [Arabidopsis thaliana]
MKIAAPFSHPNLQAASLVCKSWRDALKPLRESMLLIRWGKKYKHGRGGVRANLDKALDSFLKGAMRGSTLAMVDAGLVYWERGEKEKAVNLYRRASELGDAVGQCNLGIAYLQVQPSNPKEAMKWLKQSAENGYVRAQYQLALCLHHGRVVQTNLLEATKWYLKAAEGGYVRAMYNISLCYSVGEGLPQNRKLARKWMKRAADHGHSKAQFEHGLALFSEGEMLKSVLYLELAERGGEAAATPVKEVVHQQLSATFGGQAVHHAIHQANNWRPLPVTR

SEQ ID NO: 42999 - DNA, 1331 bp, Arabidopsis thaliana; identical to SEQ ID NO: 36290
  misc_feature (1)..(1331): Ceres Seq. ID no. 12330652
  misc_feature: MA Experiment ID: 108434 Result: Up-regulated in Transcription
  misc_feature: MA Experiment 108434 PARAMETER Experiment Name: At_Root_Tips_cDNA_P Parameter: Tissue Value: Root Tips
  misc_feature: MA Experiment ID: 108463 Result: Down-regulated in Transcription
  misc_feature: MA Experiment 108463 PARAMETER Experiment Name: At_Germinating_Seeds_cDNA_P Parameter: Age (day) Value: 3 vs. 0
  misc_feature: MA Experiment 108463 PARAMETER Experiment Name: At_Germinating_Seeds_cDNA_P Parameter: Tissue Value: Germinating Seeds
  misc_feature: MA Experiment ID: 108464 Result: Down-regulated in Transcription
  misc_feature: MA Experiment 108464 PARAMETER Experiment Name: At_Germinating_Seeds_cDNA_P Parameter: Age (day) Value: 4 vs. 0
  misc_feature: MA Experiment 108464 PARAMETER Experiment Name: At_Germinating_Seeds_cDNA_P Parameter: Tissue Value: Germinating Seeds
  misc_feature: MA Experiment ID: 108595 Result: Down-regulated in Transcription
  misc_feature: MA Experiment 108595 PARAMETER Experiment Name: At_Ler-pi_Ovule_cDNA_P Parameter: Plant Line Value: null
  misc_feature: MA Experiment ID: 20000224 Result: Up-regulated in Transcription
  misc_feature: MA Experiment ID: 20000227 Result: Up-regulated in Transcription
  misc_feature: MA Experiment 20000227 PARAMETER Experiment Name: At_Root-Tips-vs-Tops_P Parameter: Tissue Value: Root Tips vs. Root Tops
  misc_feature: MA Experiment ID: 20000234 Result: Up-regulated in Transcription
  misc_feature: MA Experiment 20000234 PARAMETER Experiment Name: At_Siliques_P Parameter: Age (day) Value: 21
  misc_feature: MA Experiment 20000234 PARAMETER Experiment Name: At_Siliques_P Parameter: Organism Value: A. thaliana
  misc_feature: MA Experiment 20000234 PARAMETER Experiment Name: At_Siliques_P Parameter: Plant Line Value: WS
  misc_feature: MA Experiment 20000234 PARAMETER Experiment Name: At_Siliques_P Parameter: Tissue Value: Less Than 5mm Siliques vs. Whole Plant
  misc_feature: MA Experiment ID: 20000264 Result: Up-regulated in Transcription
  misc_feature: MA Experiment 20000264 PARAMETER Experiment Name: At_Open_Flower_P Parameter: Age (day) Value: 21
  misc_feature: MA Experiment 20000264 PARAMETER Experiment Name: At_Open_Flower_P Parameter: Plant Line Value: WS
  misc_feature: MA Experiment 20000264 PARAMETER Experiment Name: At_Open_Flower_P Parameter: Tissue Value: Open Flower vs. Whole Plant
  misc_feature: MA Experiment ID: 20000265 Result: Up-regulated in Transcription
  misc_feature: MA Experiment 20000265 PARAMETER Experiment Name: At_Open_Flower_P Parameter: Age (day) Value: 21
  misc_feature: MA Experiment 20000265 PARAMETER Experiment Name: At_Open_Flower_P Parameter: Plant Line Value: WS
  misc_feature: MA Experiment 20000265 PARAMETER Experiment Name: At_Open_Flower_P Parameter: Tissue Value: Closed Flower vs. Whole Plant
  misc_feature: MA Experiment ID: 20000286 Result: Up-regulated in Transcription
  misc_feature: MA Experiment 20000286 PARAMETER Experiment Name: At_Open_Flower_P Parameter: Age (day) Value: 21
  misc_feature: MA Experiment 20000286 PARAMETER Experiment Name: At_Open_Flower_P Parameter: Plant Line Value: WS
  misc_feature: MA Experiment 20000286 PARAMETER Experiment Name: At_Open_Flower_P Parameter: Tissue Value: Half Open vs. Whole Plant

SEQ ID NO: 43000 - protein, 383 aa, Arabidopsis thaliana; identical to SEQ ID NO: 36291
  peptide (1)..(383): Ceres Seq. ID no. 12330653
  misc_feature (128)..(317): Homolog of NCBI NO: 34393638 NR Description: pentatricopeptide (PPR) repeat-containing
  misc_feature (165)..(317): Homolog of NCBI NO: 7486589 NR Description: hypothetical protein F7J7.130 - Arabidopsis
  misc_feature (153)..(374): Homolog of NCBI NO: 34909686 NR Description: B1131G08.1 [Oryza sativa (japonica
  misc_feature (154)..(347): Homolog of NCBI NO: 7485419 NR Description: hypothetical protein F13C5.140 - Arabidopsis
  misc_feature (99)..(317): Homolog of NCBI NO: 18415645 NR Description: putative protein
  misc_feature (93)..(317): Homolog of NCBI NO: 18415213 NR Description: putative protein; protein id: At4g18975.1
  misc_feature (5)..(158): Homolog of NCBI NO: 25406795 NR Description: hypothetical protein [imported] - Arabidopsis
  misc_feature (158)..(383): Homolog of NCBI NO: 25406795 NR Description: hypothetical protein [imported] - Arabidopsis
  misc_feature (5)..(383): Homolog of NCBI NO: 30678929 NR Description: expressed protein [Arabidopsis thaliana]
  misc_feature (5)..(383): Homolog of NCBI NO: 18390413 NR Description: expressed protein
  misc_feature (128)..(317): Homolog of NCBI NO: 34393638 NR Description: pentatricopeptide (PPR) repeat-containing
  misc_feature (165)..(317): Homolog of NCBI NO: 7486589 NR Description: hypothetical protein F7J7.130 - Arabidopsis
  misc_feature (153)..(374): Homolog of NCBI NO: 34909686 NR Description: B1131G08.1 [Oryza sativa (japonica
  misc_feature (154)..(347): Homolog of NCBI NO: 7485419 NR Description: hypothetical protein F13C5.140 - Arabidopsis
  misc_feature (99)..(317): Homolog of NCBI NO: 18415645 NR Description: putative protein
  misc_feature (93)..(317): Homolog of NCBI NO: 18415213 NR Description: putative protein; protein id: At4g18975.1
  misc_feature (5)..(158): Homolog of NCBI NO: 25406795 NR Description: hypothetical protein [imported] - Arabidopsis
  misc_feature (158)..(383): Homolog of NCBI NO: 25406795 NR Description: hypothetical protein [imported] - Arabidopsis
  misc_feature (5)..(383): Homolog of NCBI NO: 30678929 NR Description: expressed protein [Arabidopsis thaliana]
  misc_feature (5)..(383): Homolog of NCBI NO: 18390413 NR Description: expressed protein

SEQ ID NO: 43001 - protein, 379 aa, Arabidopsis thaliana; identical to SEQ ID NO: 36292
  peptide (1)..(379): Ceres Seq. ID no. 12330654
  misc_feature (124)..(313): Homolog of NCBI NO: 34393638 NR Description: pentatricopeptide (PPR) repeat-containing
  misc_feature (161)..(313): Homolog of NCBI NO: 7486589 NR Description: hypothetical protein F7J7.130 - Arabidopsis
  misc_feature (149)..(370): Homolog of NCBI NO: 34909686 NR Description: B1131G08.1 [Oryza sativa (japonica
  misc_feature (150)..(343): Homolog of NCBI NO: 7485419 NR Description: hypothetical protein F13C5.140 - Arabidopsis
  misc_feature (95)..(313): Homolog of NCBI NO: 18415645 NR Description: putative protein
  misc_feature (89)..(313): Homolog of NCBI NO: 18415213 NR Description: putative protein; protein id: At4g18975.1
  misc_feature (1)..(154): Homolog of NCBI NO: 25406795 NR Description: hypothetical protein [imported] - Arabidopsis
  misc_feature (154)..(379): Homolog of NCBI NO: 25406795 NR Description: hypothetical protein [imported] - Arabidopsis
  misc_feature (1)..(379): Homolog of NCBI NO: 30678929 NR Description: expressed protein [Arabidopsis thaliana]
  misc_feature (1)..(379): Homolog of NCBI NO: 18390413 NR Description: expressed protein
  misc_feature (124)..(313): Homolog of NCBI NO: 34393638 NR Description: pentatricopeptide (PPR) repeat-containing
  misc_feature (161)..(313): Homolog of NCBI NO: 7486589 NR Description: hypothetical protein F7J7.130 - Arabidopsis
  misc_feature (149)..(370): Homolog of NCBI NO: 34909686 NR Description: B1131G08.1 [Oryza sativa (japonica
  misc_feature (150)..(343): Homolog of NCBI NO: 7485419 NR Description: hypothetical protein F13C5.140 - Arabidopsis
  misc_feature (95)..(313): Homolog of NCBI NO: 18415645 NR Description: putative protein
  misc_feature (89)..(313): Homolog of NCBI NO: 18415213 NR Description: putative protein; protein id: At4g18975.1
  misc_feature (1)..(154): Homolog of NCBI NO: 25406795 NR Description: hypothetical protein [imported] - Arabidopsis
  misc_feature (154)..(379): Homolog of NCBI NO: 25406795 NR Description: hypothetical protein [imported] - Arabidopsis
  misc_feature (1)..(379): Homolog of NCBI NO: 30678929 NR Description: expressed protein [Arabidopsis thaliana]
  misc_feature (1)..(379): Homolog of NCBI NO: 18390413 NR Description: expressed protein

SEQ ID NO: 43002 - protein, 284 aa, Arabidopsis thaliana; identical to SEQ ID NO: 36293
  peptide (1)..(284): Ceres Seq. ID no. 12330655
  misc_feature (29)..(218): Homolog of NCBI NO: 34393638 NR Description: pentatricopeptide (PPR) repeat-containing
  misc_feature (66)..(218): Homolog of NCBI NO: 7486589 NR Description: hypothetical protein F7J7.130 - Arabidopsis
  misc_feature (54)..(275): Homolog of NCBI NO: 34909686 NR Description: B1131G08.1 [Oryza sativa (japonica
  misc_feature (55)..(248): Homolog of NCBI NO: 7485419 NR Description: hypothetical protein F13C5.140 - Arabidopsis
  misc_feature (1)..(218): Homolog of NCBI NO: 18415645 NR Description: putative protein
  misc_feature (1)..(218): Homolog of NCBI NO: 18415213 NR Description: putative protein; protein id: At4g18975.1
  misc_feature (1)..(59): Homolog of NCBI NO: 25406795 NR Description: hypothetical protein [imported] - Arabidopsis
  misc_feature (59)..(284): Homolog of NCBI NO: 25406795 NR Description: hypothetical protein [imported] - Arabidopsis
  misc_feature (1)..(284): Homolog of NCBI NO: 30678929 NR Description: expressed protein [Arabidopsis thaliana]
  misc_feature (1)..(284): Homolog of NCBI NO: 18390413 NR Description: expressed protein
  misc_feature (29)..(218): Homolog of NCBI NO: 34393638 NR Description: pentatricopeptide (PPR) repeat-containing
  misc_feature (66)..(218): Homolog of NCBI NO: 7486589 NR Description: hypothetical protein F7J7.130 - Arabidopsis
  misc_feature (54)..(275): Homolog of NCBI NO: 34909686 NR Description: B1131G08.1 [Oryza sativa (japonica
  misc_feature (55)..(248): Homolog of NCBI NO: 7485419 NR Description: hypothetical protein F13C5.140 - Arabidopsis
  misc_feature (1)..(218): Homolog of NCBI NO: 18415645 NR Description: putative protein
  misc_feature (1)..(218): Homolog of NCBI NO: 18415213 NR Description: putative protein; protein id: At4g18975.1
  misc_feature (1)..(59): Homolog of NCBI NO: 25406795 NR Description: hypothetical protein [imported] - Arabidopsis
  misc_feature (59)..(284): Homolog of NCBI NO: 25406795 NR Description: hypothetical protein [imported] - Arabidopsis
  misc_feature (1)..(284): Homolog of NCBI NO: 30678929 NR Description: expressed protein [Arabidopsis thaliana]
  misc_feature (1)..(284): Homolog of NCBI NO: 18390413 NR Description: expressed protein

SEQ ID NO: 43003 - DNA, 1692 bp, Arabidopsis thaliana
  misc_feature (1)..(1692): Ceres Seq. ID no. 12338706
  misc_feature: MA Experiment ID: 108433 Result: Up-regulated in Transcription
  misc_feature: MA Experiment 108433 PARAMETER Experiment Name: At_rhl_Mutant2_cDNA_P Parameter: Age (day) Value: 7
  misc_feature: MA Experiment 108433 PARAMETER Experiment Name: At_rhl_Mutant2_cDNA_P Parameter: Organism Value: A. thaliana
  misc_feature: MA Experiment 108433 PARAMETER Experiment Name: At_rhl_Mutant2_cDNA_P Parameter: Plant Line Value: rhl Mutant vs. wt landsburg
  misc_feature: MA Experiment 108433 PARAMETER Experiment Name: At_rhl_Mutant2_cDNA_P Parameter: Tissue Value: Roots
  misc_feature: MA Experiment ID: 20000441 Result: Down-regulated in Transcription
  misc_feature: MA Experiment 20000441 PARAMETER Experiment Name: At_1uM_BR-BRZ__P Parameter: Tissue Value: Shoot Apices
  misc_feature: MA Experiment 20000441 PARAMETER Experiment Name: At_1uM_BR-BRZ__P Parameter: Treatment Value: 1uM BR vs. No Treatment
  misc_feature: MA Experiment ID: 20001458 Result: Up-regulated in Transcription
  misc_feature: MA Experiment 20001458 PARAMETER Experiment Name: At_50mM_NH4NO3_L-to-H_P Parameter: Age (day) Value: Undefined
  misc_feature: MA Experiment 20001458 PARAMETER Experiment Name: At_50mM_NH4NO3_L-to-H_P Parameter: Organism Value: Undefined
  misc_feature: MA Experiment 20001458 PARAMETER Experiment Name: At_50mM_NH4NO3_L-to-H_P Parameter: Plant Line Value: Undefined
  misc_feature: MA Experiment 20001458 PARAMETER Experiment Name: At_50mM_NH4NO3_L-to-H_P Parameter: Timepoint (hr) Value: 2
  misc_feature: MA Experiment 20001458 PARAMETER Experiment Name: At_50mM_NH4NO3_L-to-H_P Parameter: Tissue Value: Siliques
  misc_feature: MA Experiment 20001458 PARAMETER Experiment Name: At_50mM_NH4NO3_L-to-H_P Parameter: Treatment Value: 50mM NH4NO3 vs. 100mM Manitol
aagatttgttttctttctctctcgtcatctctcttcctctctgtaatcccaaccngagttacgattccttcttatcgtaactcctgcttccgatctcgatccaattttcacttttgttttgtccgaacggtaaatcatttcgcggcttttttttttttaagggaaggaggaataagcaaattttgatttgattccgtttttttgggggtgttagtgatcttttagatgaagtaaagaaattttgattattgaggggattatgtgagttatggtatcatcggcaactatattgcggatggtagcaccatgttggaggcgaccttctgttaaaggagatcattctactagagacgctaatggtcgatgtgatggtcttctttggtataaagattctggtaaccatgttgctggagagttctctatgtctgttattcaagctaataatcttctcgaagatcatagcaagcttgagtctggacctgttagtatgtttgattctggtcctcaagctacttttgttggtgtttatgatggtcatggtggtcctgaagctgcccgtttcgttaataaacacctcttcgacaacatcaggaagtttacatcagagaatcatggaatgtctgccaatgttataactaaagcgtttttagctacggaagaagattttctttctcttgtccggcggcagtggcagattaaaccacagattgcttctgttggagcttgttgtctggtagggatcatatgtagtggattgttgtatattgcaaacgctggagattctcgggttgtgctaggaagactggaaaaagcgtttaaaattgtcaaggccgttcagttatcgtctgagcataatgcaagtcttgaatctgtgagagaggagttgcgctcgttgcatccaaatgatcctcagattgtggtcttgaagcacaaagtttggcgtgtcaaaggtattatacaggtaaaaatactttcacggtaatgcgagttgctgacttctagactcttttcttgcaagtagcttgactgtgaaagatacaactaagtaagccctatgcatgtataagaagaggatttttcgctagatataacccgtggctggttcttgaaggtttcacggtcgattggtgatgcatacttaaagaaagcagaattcaaccgggaaccattgttggcaaagttcagggtccctgaggttttccataagcccatccttagagcagagccggcaattacagtacacaaaatccatccagaagatcagtttcttatatttgcatcagacggcttgtgggagcacttgtccaatcaagaagctgttgacattgtgaacacatgcccgcgcaatgggattgcaaggaagctcataaaaacagctctaagagaggcagcaaagaagagagagatgagatattcggatctaaaaaagatcgatagaggagtgcggagacattttcatgatgatataacagtcatagttgtgtttcttgattcacatctcgtcagtcgcagtacctcacgccgacctctcctctccatctcaggtggtggtgatttagctggaccttctacttgactctactctcaccacatctatatatatcttatatatacattatccactatatataaaaacacattgcaaaacgcaattcaagttccttcttttttttttttctctatatataaaaa

SEQ ID NO: 43004 - protein, 237 aa, Arabidopsis thaliana
  peptide (1)..(237): Ceres Seq. ID no. 12338707
  misc_feature (47)..(232): Pfam Name: Protein phosphatase 2C Pfam Description: Protein phosphatase 2C
  misc_feature (1)..(232): Homolog of NCBI NO: 37536574 NR Description: putative protein phosphatase 2C
  misc_feature (5)..(232): Homolog of NCBI NO: 11282001 NR Description: protein phosphatase 2C-like protein - Arabidopsis
  misc_feature (5)..(232): Homolog of NCBI NO: 20340237 NR Description: protein phosphatase 2c-like protein
  misc_feature (7)..(232): Homolog of NCBI NO: 11282004 NR Description: protein phosphatase 2C homolog [imported] -
  misc_feature (7)..(232): Homolog of NCBI NO: 7768153 NR Description: protein phosphatase 2C (PP2C) [Fagus sylvatica]
  misc_feature (6)..(232): Homolog of NCBI NO: 18855039 NR Description: putative protein phosphatase [Oryza sativa]
  misc_feature (28)..(232): Homolog of NCBI NO: 11282002 NR Description: protein phosphatase 2C-like protein - Arabidopsis
  misc_feature (1)..(232): Homolog of NCBI NO: 30694180 NR Description: protein phosphatase 2C - like protein
  misc_feature (10)..(232): Homolog of NCBI NO: 15230540 NR Description: protein phosphatase 2C, putative; protein id:
  misc_feature (1)..(232): Homolog of NCBI NO: 9294356 NR Description: protein phosphatase 2C [Arabidopsis thaliana]
MVSSATILRMVAPCWRRPSVKGDHSTRDANGRCDGLLWYKDSGNHVAGEFSMSVIQANNLLEDHSKLESGPVSMFDSGPQATFVGVYDGHGGPEAARFVNKHLFDNIRKFTSENHGMSANVITKAFLATEEDFLSLVRRQWQIKPQIASVGACCLVGIICSGLLYIANAGDSRVVLGRLEKAFKIVKAVQLSSEHNASLESVREELRSLHPNDPQIVVLKHKVWRVKGIIQVKILSR

SEQ ID NO: 43005 - protein, 228 aa, Arabidopsis thaliana
  peptide (1)..(228): Ceres Seq. ID no. 12338708
  misc_feature (38)..(223): Pfam Name: Protein phosphatase 2C Pfam Description: Protein phosphatase 2C
  misc_feature (1)..(223): Homolog of NCBI NO: 37536574 NR Description: putative protein phosphatase 2C
  misc_feature (1)..(223): Homolog of NCBI NO: 11282001 NR Description: protein phosphatase 2C-like protein - Arabidopsis
  misc_feature (1)..(223): Homolog of NCBI NO: 20340237 NR Description: protein phosphatase 2c-like protein
  misc_feature (1)..(223): Homolog of NCBI NO: 11282004 NR Description: protein phosphatase 2C homolog [imported] -
  misc_feature (1)..(223): Homolog of NCBI NO: 7768153 NR Description: protein phosphatase 2C (PP2C) [Fagus sylvatica]
  misc_feature (1)..(223): Homolog of NCBI NO: 18855039 NR Description: putative protein phosphatase [Oryza sativa]
  misc_feature (19)..(223): Homolog of NCBI NO: 11282002 NR Description: protein phosphatase 2C-like protein - Arabidopsis
  misc_feature (1)..(223): Homolog of NCBI NO: 30694180 NR Description: protein phosphatase 2C - like protein
  misc_feature (1)..(223): Homolog of NCBI NO: 15230540 NR Description: protein phosphatase 2C, putative; protein id:
  misc_feature (1)..(223): Homolog of NCBI NO: 9294356 NR Description: protein phosphatase 2C [Arabidopsis thaliana]
MVAPCWRRPSVKGDHSTRDANGRCDGLLWYKDSGNHVAGEFSMSVIQANNLLEDHSKLESGPVSMFDSGPQATFVGVYDGHGGPEAARFVNKHLFDNIRKFTSENHGMSANVITKAFLATEEDFLSLVRRQWQIKPQIASVGACCLVGIICSGLLYIANAGDSRVVLGRLEKAFKIVKAVQLSSEHNASLESVREELRSLHPNDPQIVVLKHKVWRVKGIIQVKILSR

SEQ ID NO: 43006 - protein, 186 aa, Arabidopsis thaliana
  peptide (1)..(186): Ceres Seq. ID no. 12338709
  misc_feature (1)..(181): Pfam Name: Protein phosphatase 2C Pfam Description: Protein phosphatase 2C
  misc_feature (1)..(181): Homolog of NCBI NO: 37536574 NR Description: putative protein phosphatase 2C
  misc_feature (1)..(181): Homolog of NCBI NO: 11282001 NR Description: protein phosphatase 2C-like protein - Arabidopsis
  misc_feature (1)..(181): Homolog of NCBI NO: 20340237 NR Description: protein phosphatase 2c-like protein
  misc_feature (1)..(181): Homolog of NCBI NO: 11282004 NR Description: protein phosphatase 2C homolog [imported] -
  misc_feature (1)..(181): Homolog of NCBI NO: 7768153 NR Description: protein phosphatase 2C (PP2C) [Fagus sylvatica]
  misc_feature (1)..(181): Homolog of NCBI NO: 18855039 NR Description: putative protein phosphatase [Oryza sativa]
  misc_feature (1)..(181): Homolog of NCBI NO: 11282002 NR Description: protein phosphatase 2C-like protein - Arabidopsis
  misc_feature (1)..(181): Homolog of NCBI NO: 30694180 NR Description: protein phosphatase 2C - like protein
  misc_feature (1)..(181): Homolog of NCBI NO: 15230540 NR Description: protein phosphatase 2C, putative; protein id:
  misc_feature (1)..(181): Homolog of NCBI NO: 9294356 NR Description: protein phosphatase 2C [Arabidopsis thaliana]
MSVIQANNLLEDHSKLESGPVSMFDSGPQATFVGVYDGHGGPEAARFVNKHLFDNIRKFTSENHGMSANVITKAFLATEEDFLSLVRRQWQIKPQIASVGACCLVGIICSGLLYIANAGDSRVVLGRLEKAFKIVKAVQLSSEHNASLESVREELRSLHPNDPQIVVLKHKVWRVKGIIQVKILSR

SEQ ID NO: 43007 - DNA, 1524 bp, Arabidopsis thaliana
  misc_feature (1)..(1524): Ceres Seq. ID no. 12603009
  misc_feature: MA Experiment ID: 20000171 Result: Down-regulated in Transcription
  misc_feature: MA Experiment 20000171 PARAMETER Experiment Name: At_42deg_Heat_P Parameter: Age (day) Value: 14
  misc_feature: MA Experiment 20000171 PARAMETER Experiment Name: At_42deg_Heat_P Parameter: Organism Value: A. thaliana
  misc_feature: MA Experiment 20000171 PARAMETER Experiment Name: At_42deg_Heat_P Parameter: Plant Line Value: WS
  misc_feature: MA Experiment 20000171 PARAMETER Experiment Name: At_42deg_Heat_P Parameter: Temperature (deg C) Value: 42 vs. 22
  misc_feature: MA Experiment 20000171 PARAMETER Experiment Name: At_42deg_Heat_P Parameter: Timepoint (hr) Value: 1
  misc_feature: MA Experiment 20000171 PARAMETER Experiment Name: At_42deg_Heat_P Parameter: Tissue Value: Aerial
  misc_feature: MA Experiment ID: 20000173 Result: Down-regulated in Transcription
  misc_feature: MA Experiment 20000173 PARAMETER Experiment Name: At_42deg_Heat_P Parameter: Age (day) Value: 14
  misc_feature: MA Experiment 20000173 PARAMETER Experiment Name: At_42deg_Heat_P Parameter: Organism Value: A. thaliana
  misc_feature: MA Experiment 20000173 PARAMETER Experiment Name: At_42deg_Heat_P Parameter: Plant Line Value: WS
  misc_feature: MA Experiment 20000173 PARAMETER Experiment Name: At_42deg_Heat_P Parameter: Temperature (deg C) Value: 42 vs. 22
  misc_feature: MA Experiment 20000173 PARAMETER Experiment Name: At_42deg_Heat_P Parameter: Timepoint (hr) Value: 6
  misc_feature: MA Experiment 20000173 PARAMETER Experiment Name: At_42deg_Heat_P Parameter: Tissue Value: Aerial
  misc_feature: MA Experiment ID: 20000182 Result: Up-regulated in Transcription
  misc_feature: MA Experiment 20000182 PARAMETER Experiment Name: At_2mM_SA_P Parameter: Age (day) Value: 14
  misc_feature: MA Experiment 20000182 PARAMETER Experiment Name: At_2mM_SA_P Parameter: Organism Value: A. thaliana
  misc_feature: MA Experiment 20000182 PARAMETER Experiment Name: At_2mM_SA_P Parameter: Plant Line Value: WS
  misc_feature: MA Experiment 20000182 PARAMETER Experiment Name: At_2mM_SA_P Parameter: Timepoint (hr) Value: 6
  misc_feature: MA Experiment 20000182 PARAMETER Experiment Name: At_2mM_SA_P Parameter: Tissue Value: Aerial
  misc_feature: MA Experiment 20000182 PARAMETER Experiment Name: At_2mM_SA_P Parameter: Treatment Value: 2mM SA vs. No Treatment
  misc_feature: MA Experiment ID: 20000185 Result: Up-regulated in Transcription
  misc_feature: MA Experiment 20000185 PARAMETER Experiment Name: At_Roots__P Parameter: Age (day) Value: 7 vs. 21
  misc_feature: MA Experiment 20000185 PARAMETER Experiment Name: At_Roots__P Parameter: Organism Value: A. thaliana
  misc_feature: MA Experiment 20000185 PARAMETER Experiment Name: At_Roots__P Parameter: Tissue Value: Roots vs. Whole Plant
  misc_feature: MA Experiment ID: 20000286 Result: Up-regulated in Transcription
  misc_feature: MA Experiment 20000286 PARAMETER Experiment Name: At_Open_Flower_P Parameter: Age (day) Value: 21
  misc_feature: MA Experiment 20000286 PARAMETER Experiment Name: At_Open_Flower_P Parameter: Plant Line Value: WS
  misc_feature: MA Experiment 20000286 PARAMETER Experiment Name: At_Open_Flower_P Parameter: Tissue Value: Half Open vs. Whole Plant
  misc_feature: MA Experiment ID: 20000437 Result: Down-regulated in Transcription
  misc_feature: MA Experiment 20000437 PARAMETER Experiment Name: At_Drought_P Parameter: Age (day) Value: 8
  misc_feature: MA Experiment 20000437 PARAMETER Experiment Name: At_Drought_P Parameter: Organism Value: A. thaliana
  misc_feature: MA Experiment 20000437 PARAMETER Experiment Name: At_Drought_P Parameter: Plant Line Value: WS
  misc_feature: MA Experiment 20000437 PARAMETER Experiment Name: At_Drought_P Parameter: Timepoint (hr) Value: 24
  misc_feature: MA Experiment 20000437 PARAMETER Experiment Name: At_Drought_P Parameter: Tissue Value: Whole Plant
  misc_feature: MA Experiment 20000437 PARAMETER Experiment Name: At_Drought_P Parameter: Treatment Value: Drought vs. No Drought
  misc_feature: MA Experiment ID: 20000527 Result: Down-regulated in Transcription
  misc_feature: MA Experiment 20000527 PARAMETER Experiment Name: At_10percent_PEG_P Parameter: Age (day) Value: 20
  misc_feature: MA Experiment 20000527 PARAMETER Experiment Name: At_10percent_PEG_P Parameter: Organism Value: A. thaliana
  misc_feature: MA Experiment 20000527 PARAMETER Experiment Name: At_10percent_PEG_P Parameter: Plant Line Value: WS
  misc_feature: MA Experiment 20000527 PARAMETER Experiment Name: At_10percent_PEG_P Parameter: Timepoint (day) Value: 20
  misc_feature: MA Experiment 20000527 PARAMETER Experiment Name: At_10percent_PEG_P Parameter: Tissue Value: Whole Plant
  misc_feature: MA Experiment 20000527 PARAMETER Experiment Name: At_10percent_PEG_P Parameter: Treatment Value: 10percent PEG vs. No Treatment
  misc_feature: MA Experiment ID: 20000573 Result: Down-regulated in Transcription
  misc_feature: MA Experiment 20000573 PARAMETER Experiment Name: At_100uM_ABA_Mutants__P Parameter: Organism Value: A. thaliana
  misc_feature: MA Experiment 20000573 PARAMETER Experiment Name: At_100uM_ABA_Mutants__P Parameter: Plant Line Value: CS22 vs. Ler wt
  misc_feature: MA Experiment 20000573 PARAMETER Experiment Name: At_100uM_ABA_Mutants__P Parameter: Timepoint (hr) Value: N/A
  misc_feature: MA Experiment 20000573 PARAMETER Experiment Name: At_100uM_ABA_Mutants__P Parameter: Tissue Value: Whole Plant
  misc_feature: MA Experiment 20000573 PARAMETER Experiment Name: At_100uM_ABA_Mutants__P Parameter: Treatment Value: None
  misc_feature: MA Experiment ID: 20001248 Result: Down-regulated in Transcription
  misc_feature: MA Experiment 20001248 PARAMETER Experiment Name: At_Far-red-induction_P Parameter: Age (day) Value: 7
  misc_feature: MA Experiment 20001248 PARAMETER Experiment Name: At_Far-red-induction_P Parameter: Light Value: Far-red vs. White
  misc_feature: MA Experiment 20001248 PARAMETER Experiment Name: At_Far-red-induction_P Parameter: Organism Value: A. thaliana
  misc_feature: MA Experiment 20001248 PARAMETER Experiment Name: At_Far-red-induction_P Parameter: Plant Line Value: Columbia
  misc_feature: MA Experiment 20001248 PARAMETER Experiment Name: At_Far-red-induction_P Parameter: Timepoint (hr) Value: 4
  misc_feature: MA Experiment 20001248 PARAMETER Experiment Name: At_Far-red-induction_P Parameter: Tissue Value: Whole Plant
  misc_feature: MA Experiment ID: 20001559 Result: Down-regulated in Transcription
  misc_feature: MA Experiment 20001559 PARAMETER Experiment Name: At_Drought_Soil_Dry_P Parameter: Age (day) Value: 28
  misc_feature: MA Experiment 20001559 PARAMETER Experiment Name: At_Drought_Soil_Dry_P Parameter: Organism Value: A. thaliana
  misc_feature: MA Experiment 20001559 PARAMETER Experiment Name: At_Drought_Soil_Dry_P Parameter: Plant Line Value: WS
  misc_feature: MA Experiment 20001559 PARAMETER Experiment Name: At_Drought_Soil_Dry_P Parameter: Post Timepoint (hr) Value: 29
  misc_feature: MA Experiment 20001559 PARAMETER Experiment Name: At_Drought_Soil_Dry_P Parameter: Post-Treatment Value: Re-Water vs. No Drought
  misc_feature: MA Experiment 20001559 PARAMETER Experiment Name: At_Drought_Soil_Dry_P Parameter: Timepoint (day) Value: 14
  misc_feature: MA Experiment 20001559 PARAMETER Experiment Name: At_Drought_Soil_Dry_P Parameter: Treatment Value: Drought vs. No Drought
  misc_feature: MA Experiment ID: 20001911 Result: Down-regulated in Transcription
  misc_feature: MA Experiment 20001911 PARAMETER Experiment Name: At_Drought_Reproduction_P Parameter: Age (day) Value: 40
  misc_feature: MA Experiment 20001911 PARAMETER Experiment Name: At_Drought_Reproduction_P Parameter: Organism Value: A. thaliana
  misc_feature: MA Experiment 20001911 PARAMETER Experiment Name: At_Drought_Reproduction_P Parameter: Plant Line Value: WS
  misc_feature: MA Experiment 20001911 PARAMETER Experiment Name: At_Drought_Reproduction_P Parameter: Timepoint (day) Value: 10
  misc_feature: MA Experiment 20001911 PARAMETER Experiment Name: At_Drought_Reproduction_P Parameter: Tissue Value: Flowers
  misc_feature: MA Experiment 20001911 PARAMETER Experiment Name: At_Drought_Reproduction_P Parameter: Treatment Value: Drought vs. No Drought
ggaaaaaatctctctttcgaataaaaaaaaaatctcagaatccaaaaatgggtcgtgtccgaaaatcagatttcggttccattgttcttgttctgtgttgtgtcctaaatagcttactctgtaatggaggcatcaccagtagatatgtcagaaaattagaagcaaccgttgatatgcctcttgatagcgatgtttttcgtgttccttgtggctacaatgctcctcaacaggtgcatataacacaaggagatgtagaaggaaaggcagtgatagtatcatgggtgacacaagaagcaaaaggatctaacaaagtcatttactggaaagagaatagcaccaaaaagcacaaagctcatggcaaaaccaatacttacaagttctacaattatacttctggttttatccatcattgccctatcagaaacttagagtatgacaccaagtactattatgtgttaggtgtgggacaaacggagcgtaagttttggttcttcactcctcctgagatcggtcctgatgttccctacacttttggtctcattggggatcttgggcagagttatgactcaaacataaccttaacacattatgagaataacccaacaaaagggcaagcggttttgttcgtcggcgatatctcatacgctgatacttatccggatcatgacaataggagatgggacagttggggaagatttgctgaaagaagcacagcttatcagccttggatttggactaccggaaaccatgaactcgattttgccccggagattggtgaaaacagaccgtttaagccgttcacgcataggtaccgaactccttaccgatcatcaggcagcaccgaaccattctggtactcgataaagagaggaccggcttacataatcgtgctagcttcatattcagcatatggaaaatacacaccacagtaccaatggctcgaagaggagttcccaaaggttaacagaacggaaactccgtggttgattgttctgatgcattcaccatggtacaacagctatgattaccattacatggaaggtgaaacaatgagggtaatgtatgaggcttggtttgtcaagtacaaagtagatgtagtttttgcaggtcatgtccacgcctacgaaagatcggaacgtgtatcaaacatagcttacaatgttgttaacggcatttgcactccagtcaaagatcaatcagctccagtctatatcaccattggtgatggaggcaatattgagggcttggctaccaaaatgactgagcctcagcctaagtactctgcctttagagaagcaagcttcgggcatgctatattctcgataaagaacaggacgcatgctcactatggatggcataggaaccatgatggttatgctgtggagggtgacagaatgtggttttataacagattttggcatcctgttgatgattctccttcttgtaattcttgagaatctatgaggaataggatttgttgtatctctatgattgaacaaccatccaaataaatgaattgtttga

SEQ ID NO: 43008 - protein, 483 aa, Arabidopsis thaliana
  peptide (1)..(483): Ceres Seq. ID no. 12603010
  misc_feature (175)..(374): Pfam Name: Calcineurin-like phosphoesterase Pfam Description: Calcineurin-like phosphoesterase
  misc_feature (16)..(483): Homolog of NCBI NO: 27597239 NR Description: purple acid phosphatase [Nicotiana tabacum]
  misc_feature (27)..(483): Homolog of NCBI NO: 11262830 NR Description: acid phosphatase (EC 3.1.3.2) purple PAP32,
  misc_feature (16)..(478): Homolog of NCBI NO: 11262828 NR Description: acid phosphatase (EC 3.1.3.2) purple 2, precursor
  misc_feature (16)..(478): Homolog of NCBI NO: 11262827 NR Description: acid phosphatase (EC 3.1.3.2) purple 1, precursor
  misc_feature (16)..(478): Homolog of NCBI NO: 27597229 NR Description: purple acid phosphatase [Nicotiana tabacum]
  misc_feature (16)..(483): Homolog of NCBI NO: 15227205 NR Description: putative purple acid phosphatase precursor
KKSLFRIKKKSQNPKMGRVRKSDFGSIVLVLCCVLNSLLCNGGITSRYVRKLEATVDMPLDSDVFRVPCGYNAPQQVHITQGDVEGKAVIVSWVTQEAKGSNKVIYWKENSTKKHKAHGKTNTYKFYNYTSGFIHHCPIRNLEYDTKYYYVLGVGQTERKFWFFTPPEIGPDVPYTFGLIGDLGQSYDSNITLTHYENNPTKGQAVLFVGDISYADTYPDHDNRRWDSWGRFAERSTAYQPWIWTTGNHELDFAPEIGENRPFKPFTHRYRTPYRSSGSTEPFWYSIKRGPAYIIVLASYSAYGKYTPQYQWLEEEFPKVNRTETPWLIVLMHSPWYNSYDYHYMEGETMRVMYEAWFVKYKVDVVFAGHVHAYERSERVSNIAYNVVNGICTPVKDQSAPVYITIGDGGNIEGLATKMTEPQPKYSAFREASFGHAIFSIKNRTHAHYGWHRNHDGYAVEGDRMWFYNRFWHPVDDSPSCNS

SEQ ID NO: 43009 - protein, 468 aa, Arabidopsis thaliana
  peptide (1)..(468): Ceres Seq. ID no. 12603011
  misc_feature (160)..(359): Pfam Name: Calcineurin-like phosphoesterase Pfam Description: Calcineurin-like phosphoesterase
  misc_feature (1)..(468): Homolog of NCBI NO: 27597239 NR Description: purple acid phosphatase [Nicotiana tabacum]
  misc_feature (12)..(468): Homolog of NCBI NO: 11262830 NR Description: acid phosphatase (EC 3.1.3.2) purple PAP32,
  misc_feature (1)..(463): Homolog of NCBI NO: 11262828 NR Description: acid phosphatase (EC 3.1.3.2) purple 2, precursor
  misc_feature (1)..(463): Homolog of NCBI NO: 11262827 NR Description: acid phosphatase (EC 3.1.3.2) purple 1, precursor
  misc_feature (1)..(463): Homolog of NCBI NO: 27597229 NR Description: purple acid phosphatase [Nicotiana tabacum]
  misc_feature (1)..(468): Homolog of NCBI NO: 15227205 NR Description: putative purple acid phosphatase precursor
MGRVRKSDFGSIVLVLCCVLNSLLCNGGITSRYVRKLEATVDMPLDSDVFRVPCGYNAPQQVHITQGDVEGKAVIVSWVTQEAKGSNKVIYWKENSTKKHKAHGKTNTYKFYNYTSGFIHHCPIRNLEYDTKYYYVLGVGQTERKFWFFTPPEIGPDVPYTFGLIGDLGQSYDSNITLTHYENNPTKGQAVLFVGDISYADTYPDHDNRRWDSWGRFAERSTAYQPWIWTTGNHELDFAPEIGENRPFKPFTHRYRTPYRSSGSTEPFWYSIKRGPAYIIVLASYSAYGKYTPQYQWLEEEFPKVNRTETPWLIVLMHSPWYNSYDYHYMEGETMRVMYEAWFVKYKVDVVFAGHVHAYERSERVSNIAYNVVNGICTPVKDQSAPVYITIGDGGNIEGLATKMTEPQPKYSAFREASFGHAIFSIKNRTHAHYGWHRNHDGYAVEGDRMWFYNRFWHPVDDSPSCNS

SEQ ID NO: 43010 - protein, 426 aa, Arabidopsis thaliana
  peptide (1)..(426): Ceres Seq. ID no. 12603012
  misc_feature (118)..(317): Pfam Name: Calcineurin-like phosphoesterase Pfam Description: Calcineurin-like phosphoesterase
  misc_feature (1)..(426): Homolog of NCBI NO: 27597239 NR Description: purple acid phosphatase [Nicotiana tabacum]
  misc_feature (1)..(426): Homolog of NCBI NO: 11262830 NR Description: acid phosphatase (EC 3.1.3.2) purple PAP32,
  misc_feature (1)..(421): Homolog of NCBI NO: 11262828 NR Description: acid phosphatase (EC 3.1.3.2) purple 2, precursor
  misc_feature (1)..(421): Homolog of NCBI NO: 11262827 NR Description: acid phosphatase (EC 3.1.3.2) purple 1, precursor
  misc_feature (1)..(421): Homolog of NCBI NO: 27597229 NR Description: purple acid phosphatase [Nicotiana tabacum]
  misc_feature (1)..(426): Homolog of NCBI NO: 15227205 NR Description: putative purple acid phosphatase precursor
MPLDSDVFRVPCGYNAPQQVHITQGDVEGKAVIVSWVTQEAKGSNKVIYWKENSTKKHKAHGKTNTYKFYNYTSGFIHHCPIRNLEYDTKYYYVLGVGQTERKFWFFTPPEIGPDVPYTFGLIGDLGQSYDSNITLTHYENNPTKGQAVLFVGDISYADTYPDHDNRRWDSWGRFAERSTAYQPWIWTTGNHELDFAPEIGENRPFKPFTHRYRTPYRSSGSTEPFWYSIKRGPAYIIVLASYSAYGKYTPQYQWLEEEFPKVNRTETPWLIVLMHSPWYNSYDYHYMEGETMRVMYEAWFVKYKVDVVFAGHVHAYERSERVSNIAYNVVNGICTPVKDQSAPVYITIGDGGNIEGLATKMTEPQPKYSAFREASFGHAIFSIKNRTHAHYGWHRNHDGYAVEGDRMWFYNRFWHPVDDSPSCNS

SEQ ID NO: 43011 - DNA, 1153 bp, Arabidopsis thaliana
  misc_feature (1)..(1153): Ceres Seq. ID no. 12326605
gacataacttgcaagctgttgagattttccatcctcaataactttattcttccatatctctcccatttcgctctctatttcacatccccatataacataatatacaatcacacatatcatttctatatagtatttaatggggagacagccatgctgtgacaagctaggggtgaagaaagggccgtggacggtggaggaagataagaagcttataaacttcatactaaccaatggccattgttgctggcgtgctttgccgaagctggccggtctccgtcgctgtggaaagagctgccgcctccggtggactaactatctccggcctgacttaaaacgaggccttctctcgcatgatgaagaacaacttgtcatagatcttcatgctaatctcggcaataagtggtctaagatagcttcaagattacctggaagaacagataacgaaataaaaaaccattggaatactcatatcaagaagaaacttcttaagatgggaatcgatcctatgacccatcaacccctaaatcaagaaccttctaatatcgataattccaaaaccattccgtccaatccagacgatgtctcagtggaaccaaagacaactaacacgaaatacgtggagataagtgtcacgacaacagaagaagaaagtagtagcacggttactgatcaaaacagttcgatggataatgaaaatcatctaattgacaacatttatgatgatgatgaattgtttagttacttatggtccgacgaaactactaaagatgaggcctcttggagtgatagtaactttggtgttggtggaacattatatgaccacaatatctccggcgccgatgcagattttccgatatggtcaccggaaagaatcaatgacgagaagatgtttttggattattgtcaagactttggtgttcatgattttgggttttgactgttcaccattgacatattggcaactctatggagatgaacacaagcattgagttgtcatgtttatacatacgtggcatatacatatatatatatgtacattatatgtaaacatatacacgcatacaaatcataaacatgtaaggataataaatccatgtaaatcagtaagggtgcaccatggttttcaagtattattaattagggtttggtaggt

SEQ ID NO: 43012 - protein, 266 aa, Arabidopsis thaliana
  peptide (1)..(266): Ceres Seq. ID no. 12326606
  misc_feature (14)..(61): Pfam Name: Myb-like DNA-binding domain Pfam Description: Myb-like DNA-binding domain
  misc_feature (1)..(228): Homolog of NCBI NO: 15219601 NR Description: myb family transcription factor(MYB20); protein
  misc_feature (1)..(184): Homolog of NCBI NO: 15237380 NR Description: myb family transcription factor
  misc_feature (1)..(187): Homolog of NCBI NO: 7446177 NR Description: myb-related transcription factor - tomato
  misc_feature (1)..(263): Homolog of NCBI NO: 23343577 NR Description: Myb13 protein [Oryza sativa]
  misc_feature (39)..(266): Homolog of NCBI NO: 11358679 NR Description: probable transcription factor - Arabidopsis
  misc_feature (1)..(219): Homolog of NCBI NO: 6651292 NR Description: myb-related transcription factor [Pimpinella
  misc_feature (201)..(266): Homolog of NCBI NO: 7438358 NR Description: myb-related protein homolog T12H17.70 -
  misc_feature (1)..(90): Homolog of NCBI NO: 7438358 NR Description: myb-related protein homolog T12H17.70 -
  misc_feature (1)..(266): Homolog of NCBI NO: 5823331 NR Description: putative transcription factor [Arabidopsis
  misc_feature (1)..(266): Homolog of NCBI NO: 18415984 NR Description: myb family transcription factor
MGRQPCCDKLGVKKGPWTVEEDKKLINFILTNGHCCWRALPKLAGLRRCGKSCRLRWTNYLRPDLKRGLLSHDEEQLVIDLHANLGNKWSKIASRLPGRTDNEIKNHWNTHIKKKLLKMGIDPMTHQPLNQEPSNIDNSKTIPSNPDDVSVEPKTTNTKYVEISVTTTEEESSSTVTDQNSSMDNENHLIDNIYDDDELFSYLWSDETTKDEASWSDSNFGVGGTLYDHNISGADADFPIWSPERINDEKMFLDYCQDFGVHDFGF

SEQ ID NO: 43013 - protein, 148 aa, Arabidopsis thaliana
  peptide (1)..(148): Ceres Seq. ID no. 12326607
  misc_feature (1)..(77): Homolog of NCBI NO: 19072740 NR Description: typical P-type R2R3 Myb protein [Zea mays]
  misc_feature (1)..(110): Homolog of NCBI NO: 15219601 NR Description: myb family transcription factor(MYB20); protein
  misc_feature (1)..(66): Homolog of NCBI NO: 15237380 NR Description: myb family transcription factor
  misc_feature (1)..(69): Homolog of NCBI NO: 7446177 NR Description: myb-related transcription factor - tomato
  misc_feature (1)..(145): Homolog of NCBI NO: 23343577 NR Description: Myb13 protein [Oryza sativa]
  misc_feature (1)..(148): Homolog of NCBI NO: 11358679 NR Description: probable transcription factor - Arabidopsis
  misc_feature (1)..(101): Homolog of NCBI NO: 6651292 NR Description: myb-related transcription factor [Pimpinella
  misc_feature (83)..(148): Homolog of NCBI NO: 7438358 NR Description: myb-related protein homolog T12H17.70 -
  misc_feature (1)..(148): Homolog of NCBI NO: 5823331 NR Description: putative transcription factor [Arabidopsis
  misc_feature (1)..(148): Homolog of NCBI NO: 18415984 NR Description: myb family transcription factor
MGIDPMTHQPLNQEPSNIDNSKTIPSNPDDVSVEPKTTNTKYVEISVTTTEEESSSTVTDQNSSMDNENHLIDNIYDDDELFSYLWSDETTKDEASWSDSNFGVGGTLYDHNISGADADFPIWSPERINDEKMFLDYCQDFGVHDFGF

SEQ ID NO: 43014 - protein, 143 aa, Arabidopsis thaliana
  peptide (1)..(143): Ceres Seq. ID no. 12326608
  misc_feature (1)..(72): Homolog of NCBI NO: 19072740 NR Description: typical P-type R2R3 Myb protein [Zea mays]
  misc_feature (1)..(105): Homolog of NCBI NO: 15219601 NR Description: myb family transcription factor(MYB20); protein
  misc_feature (1)..(61): Homolog of NCBI NO: 15237380 NR Description: myb family transcription factor
  misc_feature (1)..(64): Homolog of NCBI NO: 7446177 NR Description: myb-related transcription factor - tomato
  misc_feature (1)..(140): Homolog of NCBI NO: 23343577 NR Description: Myb13 protein [Oryza sativa]
  misc_feature (1)..(143): Homolog of NCBI NO: 11358679 NR Description: probable transcription factor - Arabidopsis
  misc_feature (1)..(96): Homolog of NCBI NO: 6651292 NR Description: myb-related transcription factor [Pimpinella
  misc_feature (78)..(143): Homolog of NCBI NO: 7438358 NR Description: myb-related protein homolog T12H17.70 -
  misc_feature (1)..(143): Homolog of NCBI NO: 5823331 NR Description: putative transcription factor [Arabidopsis
  misc_feature (1)..(143): Homolog of NCBI NO: 18415984 NR Description: myb family transcription factor
MTHQPLNQEPSNIDNSKTIPSNPDDVSVEPKTTNTKYVEISVTTTEEESSSTVTDQNSSMDNENHLIDNIYDDDELFSYLWSDETTKDEASWSDSNFGVGGTLYDHNISGADADFPIWSPERINDEKMFLDYCQDFGVHDFGF

SEQ ID NO: 43015 - DNA, 1931 bp, Arabidopsis thaliana
  misc_feature (1)..(1931): Ceres Seq. ID no. 12326601
  misc_feature: MA Experiment ID: 20000234 Result: Up-regulated in Transcription
  misc_feature: MA Experiment 20000234 PARAMETER Experiment Name: At_Siliques_P Parameter: Age (day) Value: 21
  misc_feature: MA Experiment 20000234 PARAMETER Experiment Name: At_Siliques_P Parameter: Organism Value: A. thaliana
  misc_feature: MA Experiment 20000234 PARAMETER Experiment Name: At_Siliques_P Parameter: Plant Line Value: WS
  misc_feature: MA Experiment 20000234 PARAMETER Experiment Name: At_Siliques_P Parameter: Tissue Value: Less Than 5mm Siliques vs. Whole Plant
  misc_feature: MA Experiment ID: 20000264 Result: Up-regulated in Transcription
  misc_feature: MA Experiment 20000264 PARAMETER Experiment Name: At_Open_Flower_P Parameter: Age (day) Value: 21
  misc_feature: MA Experiment 20000264 PARAMETER Experiment Name: At_Open_Flower_P Parameter: Plant Line Value: WS
  misc_feature: MA Experiment 20000264 PARAMETER Experiment Name: At_Open_Flower_P Parameter: Tissue Value: Open Flower vs. Whole Plant
  misc_feature: MA Experiment ID: 20000437 Result: Down-regulated in Transcription
  misc_feature: MA Experiment 20000437 PARAMETER Experiment Name: At_Drought_P Parameter: Age (day) Value: 8
  misc_feature: MA Experiment 20000437 PARAMETER Experiment Name: At_Drought_P Parameter: Organism Value: A. thaliana
  misc_feature: MA Experiment 20000437 PARAMETER Experiment Name: At_Drought_P Parameter: Plant Line Value: WS
  misc_feature: MA Experiment 20000437 PARAMETER Experiment Name: At_Drought_P Parameter: Timepoint (hr) Value: 24
  misc_feature: MA Experiment 20000437 PARAMETER Experiment Name: At_Drought_P Parameter: Tissue Value: Whole Plant
  misc_feature: MA Experiment 20000437 PARAMETER Experiment Name: At_Drought_P Parameter: Treatment Value: Drought vs. No Drought
  misc_feature: MA Experiment ID: 20000495 Result: Up-regulated in Transcription
  misc_feature: MA Experiment 20000495 PARAMETER Experiment Name: At_Guard_Cells_P Parameter: Harvest Date Value: 8/2/2002
  misc_feature: MA Experiment 20000495 PARAMETER Experiment Name: At_Guard_Cells_P Parameter: Organism Value: A. thaliana
  misc_feature: MA Experiment 20000495 PARAMETER Experiment Name: At_Guard_Cells_P Parameter: Tissue Value: Guard Cells vs. Leaves
  misc_feature: MA Experiment ID: 20001557 Result: Up-regulated in Transcription
  misc_feature: MA Experiment 20001557 PARAMETER Experiment Name: At_Drought_Soil_Dry_P Parameter: Age (day) Value: 27
  misc_feature: MA Experiment 20001557 PARAMETER Experiment Name: At_Drought_Soil_Dry_P Parameter: Organism Value: A. thaliana
  misc_feature: MA Experiment 20001557 PARAMETER Experiment Name: At_Drought_Soil_Dry_P Parameter: Plant Line Value: WS
  misc_feature: MA Experiment 20001557 PARAMETER Experiment Name: At_Drought_Soil_Dry_P Parameter: Post Timepoint (hr) Value: 3
  misc_feature: MA Experiment 20001557 PARAMETER Experiment Name: At_Drought_Soil_Dry_P Parameter: Post-Treatment Value: Re-Water vs. No Drought
  misc_feature: MA Experiment 20001557 PARAMETER Experiment Name: At_Drought_Soil_Dry_P Parameter: Timepoint (day) Value: 13
  misc_feature: MA Experiment 20001557 PARAMETER Experiment Name: At_Drought_Soil_Dry_P Parameter: Treatment Value: Drought vs. No Drought
  misc_feature: MA Experiment ID: 20001558 Result: Up-regulated in Transcription
  misc_feature: MA Experiment 20001558 PARAMETER Experiment Name: At_Drought_Soil_Dry_P Parameter: Age (day) Value: 27
  misc_feature: MA Experiment 20001558 PARAMETER Experiment Name: At_Drought_Soil_Dry_P Parameter: Organism Value: A. thaliana
  misc_feature: MA Experiment 20001558 PARAMETER Experiment Name: At_Drought_Soil_Dry_P Parameter: Plant Line Value: WS
  misc_feature: MA Experiment 20001558 PARAMETER Experiment Name: At_Drought_Soil_Dry_P Parameter: Post Timepoint (hr) Value: 6
  misc_feature: MA Experiment 20001558 PARAMETER Experiment Name: At_Drought_Soil_Dry_P Parameter: Post-Treatment Value: Re-Water vs. No Drought
  misc_feature: MA Experiment 20001558 PARAMETER Experiment Name: At_Drought_Soil_Dry_P Parameter: Timepoint (day) Value: 13
  misc_feature: MA Experiment 20001558 PARAMETER Experiment Name: At_Drought_Soil_Dry_P Parameter: Treatment Value: Drought vs. No Drought
  misc_feature: MA Experiment ID: 20001911 Result: Down-regulated in Transcription
  misc_feature: MA Experiment 20001911 PARAMETER Experiment Name: At_Drought_Reproduction_P Parameter: Age (day) Value: 40
  misc_feature: MA Experiment 20001911 PARAMETER Experiment Name: At_Drought_Reproduction_P Parameter: Organism Value: A. thaliana
  misc_feature: MA Experiment 20001911 PARAMETER Experiment Name: At_Drought_Reproduction_P Parameter: Plant Line Value: WS
  misc_feature: MA Experiment 20001911 PARAMETER Experiment Name: At_Drought_Reproduction_P Parameter: Timepoint (day) Value: 10
  misc_feature: MA Experiment 20001911 PARAMETER Experiment Name: At_Drought_Reproduction_P Parameter: Tissue Value: Flowers
  misc_feature: MA Experiment 20001911 PARAMETER Experiment Name: At_Drought_Reproduction_P Parameter: Treatment Value: Drought vs. No Drought
aatttttcactttctatttctctatatctatttttttatagatatatattttgtcttggttggattttgttctcgtgggttacttacttgagagaacctcgagacctgtcttgtctttatgcttcagaagcaaatcaaagcatctctccaagatttgaagctccatctatggctgcccttcttctccttttccttttcctcttcgcaagctctgctctctctcaagattctttgatcggtgtgaatattggtactgaagtgacaaacatgccaagtccaacacaagtagtagcactcctcaaatcacagaacatcaaccgcgtccgcctctatgacgcagaccgctcaatgcttctcgcgtttgctcacaccggggttcaagttataatctcagtacctaacgaccagcttctcggtatcagccaatcaaatgcaaccgcagccaattgggtgactagaaatgtagctgcatattaccctgcgaccaacattaccacaattgctgtcggatcagaagtcctaaccagcctaacaaacgcagcttctgtccttgtctcagccctcaaatacatacaagctgctctcgtcacggccaatctcgaccgtcagatcaaagtatcgacaccgcactcttcaaccatcattcttgattctttccctccttcgcaagctttcttcaacaagacttgggatccagttattgtccctctcctcaaattcctacagtccacaggatcgccattgctgctcaacgtttacccgtatttcgactatgttcagtccaatggagttataccgcttgactacgcgcttttccagcctctccaagccaacaaagaagctgtagacgccaacacattgttacattacacaaacgtttttgatgcaatcgtagacgctgcttattttgcaatgtcttatcttaacttcaccaacattccaatcgtggtcacagaatctggatggccatctaaaggaggcccttctgagcacgacgcaacggtagagaatgcaaacacttacaatagcaatttgatccagcatgtgatcaacaagactggaacgccaaaacacccgggaactgcagttactacatacatctacgagctttacaacgaggatacgaggccaggaccggtatctgagaagaactgggggctgttttatacaaacgggactccggtttacacattgcgtttagcgggtgcaggggcgattctggcaaatgatactacaaaccagacattttgtatagcgaaggaaaaggttgatagaaagatgcttcaagcagctcttgactgggcttgcggtccagggaaggtcgattgctcggcactgatgcagggagagtcatgttatgaacccgacgatgtggttgcacattctacttatgcgtttaatgcttattaccagaagatgggaaaagcttcaggaagctgtgatttcaaaggagttgctacagtcaccaccactgatccaagtcgaggaacatgcgtgttccctggaagtgcaaaaagcaatcagacacttggaaacaacacctcggcgttggccccctcagcgaactctacaacctctggatgtatcccaaagtactatcatcaccctcacgcatctttcggtgacttaacattactctcccttctactgatcattgccttagtattcttgtagaaactctgaaaagaacaacaactctcaattcttgtttctctaaattttaacttctttctttgcaacacttgagacaaaagagctcggtgggtttgttctctctgtgtctagttgtctacccagttttgttgatcatctccttttaacatggagttcattgagggtagcatgtaggttcggcttcaagatcatggatgattgtaactaatttcctgtgttgaaagcttgattctttcttttttatggctgaatatttc

SEQ ID NO: 43016 - protein, 557 aa, Arabidopsis thaliana
  peptide (1)..(557): Ceres Seq. ID no. 12326602
  misc_feature (79)..(400): Pfam Name: Glycosyl hydrolases family 17 Pfam Description: Glycosyl hydrolases family 17
  misc_feature (74)..(497): Homolog of NCBI NO: 34394649 NR Description: putative beta-1,3-glucanase
  misc_feature (74)..(526): Homolog of NCBI NO: 34394648 NR Description: putative beta-1,3-glucanase
  misc_feature (59)..(550): Homolog of NCBI NO: 15231273 NR Description: glycosyl hydrolase family 17
  misc_feature (203)..(557): Homolog of NCBI NO: 15150341 NR Description: beta-1,3-glucanase [Camellia sinensis]
  misc_feature (75)..(495): Homolog of NCBI NO: 25402689 NR Description: hypothetical protein [imported] - Arabidopsis
  misc_feature (75)..(523): Homolog of NCBI NO: 15220923 NR Description: glycosyl hydrolase family 17; protein id:
  misc_feature (90)..(495): Homolog of NCBI NO: 15219603 NR Description: glycosyl hydrolase family 17; protein id:
  misc_feature (63)..(555): Homolog of NCBI NO: 22748323 NR Description: Putative beta-1,3-glucanase
  misc_feature (57)..(494): Homolog of NCBI NO: 25410916 NR Description: probable beta-1,3-glucanase [imported] -
  misc_feature (57)..(557): Homolog of NCBI NO: 18379267 NR Description: glycosyl hydrolase family 17 (beta-1,3-glucanase)
NFSLSISLYLFFYRYIFCLGWILFSWVTYLREPRDLSCLYASEANQSISPRFEAPSMAALLLLFLFLFASSALSQDSLIGVNIGTEVTNMPSPTQVVALLKSQNINRVRLYDADRSMLLAFAHTGVQVIISVPNDQLLGISQSNATAANWVTRNVAAYYPATNITTIAVGSEVLTSLTNAASVLVSALKYIQAALVTANLDRQIKVSTPHSSTIILDSFPPSQAFFNKTWDPVIVPLLKFLQSTGSPLLLNVYPYFDYVQSNGVIPLDYALFQPLQANKEAVDANTLLHYTNVFDAIVDAAYFAMSYLNFTNIPIVVTESGWPSKGGPSEHDATVENANTYNSNLIQHVINKTGTPKHPGTAVTTYIYELYNEDTRPGPVSEKNWGLFYTNGTPVYTLRLAGAGAILANDTTNQTFCIAKEKVDRKMLQAALDWACGPGKVDCSALMQGESCYEPDDVVAHSTYAFNAYYQKMGKASGSCDFKGVATVTTTDPSRGTCVFPGSAKSNQTLGNNTSALAPSANSTTSGCIPKYYHHPHASFGDLTLLSLLLIIALVFL

SEQ ID NO: 43017 - protein, 501 aa, Arabidopsis thaliana
  peptide (1)..(501): Ceres Seq. ID no. 12326603
  misc_feature (23)..(344): Pfam Name: Glycosyl hydrolases family 17 Pfam Description: Glycosyl hydrolases family 17
  misc_feature (18)..(441): Homolog of NCBI NO: 34394649 NR Description: putative beta-1,3-glucanase
  misc_feature (18)..(470): Homolog of NCBI NO: 34394648 NR Description: putative beta-1,3-glucanase
  misc_feature (3)..(494): Homolog of NCBI NO: 15231273 NR Description: glycosyl hydrolase family 17
  misc_feature (147)..(501): Homolog of NCBI NO: 15150341 NR Description: beta-1,3-glucanase [Camellia sinensis]
  misc_feature (19)..(439): Homolog of NCBI NO: 25402689 NR Description: hypothetical protein [imported] - Arabidopsis
  misc_feature (19)..(467): Homolog of NCBI NO: 15220923 NR Description: glycosyl hydrolase family 17; protein id:
  misc_feature (34)..(439): Homolog of NCBI NO: 15219603 NR Description: glycosyl hydrolase family 17; protein id:
  misc_feature (7)..(499): Homolog of NCBI NO: 22748323 NR Description: Putative beta-1,3-glucanase
  misc_feature (1)..(438): Homolog of NCBI NO: 25410916 NR Description: probable beta-1,3-glucanase [imported] -
  misc_feature (1)..(501): Homolog of NCBI NO: 18379267 NR Description: glycosyl hydrolase family 17 (beta-1,3-glucanase)
MAALLLLFLFLFASSALSQDSLIGVNIGTEVTNMPSPTQVVALLKSQNINRVRLYDADRSMLLAFAHTGVQVIISVPNDQLLGISQSNATAANWVTRNVAAYYPATNITTIAVGSEVLTSLTNAASVLVSALKYIQAALVTANLDRQIKVSTPHSSTIILDSFPPSQAFFNKTWDPVIVPLLKFLQSTGSPLLLNVYPYFDYVQSNGVIPLDYALFQPLQANKEAVDANTLLHYTNVFDAIVDAAYFAMSYLNFTNIPIVVTESGWPSKGGPSEHDATVENANTYNSNLIQHVINKTGTPKHPGTAVTTYIYELYNEDTRPGPVSEKNWGLFYTNGTPVYTLRLAGAGAILANDTTNQTFCIAKEKVDRKMLQAALDWACGPGKVDCSALMQGESCYEPDDVVAHSTYAFNAYYQKMGKASGSCDFKGVATVTTTDPSRGTCVFPGSAKSNQTLGNNTSALAPSANSTTSGCIPKYYHHPHASFGDLTLLSLLLIIALVFL

SEQ ID NO: 43018 - protein, 468 aa, Arabidopsis thaliana
  peptide (1)..(468): Ceres Seq. ID no. 12326604
  misc_feature (1)..(311): Pfam Name: Glycosyl hydrolases family 17 Pfam Description: Glycosyl hydrolases family 17
  misc_feature (1)..(408): Homolog of NCBI NO: 34394649 NR Description: putative beta-1,3-glucanase
  misc_feature (1)..(437): Homolog of NCBI NO: 34394648 NR Description: putative beta-1,3-glucanase
  misc_feature (1)..(461): Homolog of NCBI NO: 15231273 NR Description: glycosyl hydrolase family 17
  misc_feature (114)..(468): Homolog of NCBI NO: 15150341 NR Description: beta-1,3-glucanase [Camellia sinensis]
  misc_feature (1)..(406): Homolog of NCBI NO: 25402689 NR Description: hypothetical protein [imported] - Arabidopsis
  misc_feature (1)..(434): Homolog of NCBI NO: 15220923 NR Description: glycosyl hydrolase family 17; protein id:
  misc_feature (1)..(406): Homolog of NCBI NO: 15219603 NR Description: glycosyl hydrolase family 17; protein id:
  misc_feature (1)..(466): Homolog of NCBI NO: 22748323 NR Description: Putative beta-1,3-glucanase
  misc_feature (1)..(405): Homolog of NCBI NO: 25410916 NR Description: probable beta-1,3-glucanase [imported] -
  misc_feature (1)..(468): Homolog of NCBI NO: 18379267 NR Description: glycosyl hydrolase family 17 (beta-1,3-glucanase)
MPSPTQVVALLKSQNINRVRLYDADRSMLLAFAHTGVQVIISVPNDQLLGISQSNATAANWVTRNVAAYYPATNITTIAVGSEVLTSLTNAASVLVSALKYIQAALVTANLDRQIKVSTPHSSTIILDSFPPSQAFFNKTWDPVIVPLLKFLQSTGSPLLLNVYPYFDYVQSNGVIPLDYALFQPLQANKEAVDANTLLHYTNVFDAIVDAAYFAMSYLNFTNIPIVVTESGWPSKGGPSEHDATVENANTYNSNLIQHVINKTGTPKHPGTAVTTYIYELYNEDTRPGPVSEKNWGLFYTNGTPVYTLRLAGAGAILANDTTNQTFCIAKEKVDRKMLQAALDWACGPGKVDCSALMQGESCYEPDDVVAHSTYAFNAYYQKMGKASGSCDFKGVATVTTTDPSRGTCVFPGSAKSNQTLGNNTSALAPSANSTTSGCIPKYYHHPHASFGDLTLLSLLLIIALVFL

SEQ ID NO: 43019 - DNA, 1257 bp, Arabidopsis thaliana
  misc_feature (1)..(1257): Ceres Seq. ID no. 12558562
  misc_feature: MA Experiment ID: 20000171 Result: Up-regulated in Transcription
  misc_feature: MA Experiment 20000171 PARAMETER Experiment Name: At_42deg_Heat_P Parameter: Age (day) Value: 14
  misc_feature: MA Experiment 20000171 PARAMETER Experiment Name: At_42deg_Heat_P Parameter: Organism Value: A. thaliana
  misc_feature: MA Experiment 20000171 PARAMETER Experiment Name: At_42deg_Heat_P Parameter: Plant Line Value: WS
  misc_feature: MA Experiment 20000171 PARAMETER Experiment Name: At_42deg_Heat_P Parameter: Temperature (deg C) Value: 42 vs. 22
  misc_feature: MA Experiment 20000171 PARAMETER Experiment Name: At_42deg_Heat_P Parameter: Timepoint (hr) Value: 1
  misc_feature: MA Experiment 20000171 PARAMETER Experiment Name: At_42deg_Heat_P Parameter: Tissue Value: Aerial
  misc_feature: MA Experiment ID: 20000173 Result: Up-regulated in Transcription
  misc_feature: MA Experiment 20000173 PARAMETER Experiment Name: At_42deg_Heat_P Parameter: Age (day) Value: 14
  misc_feature: MA Experiment 20000173 PARAMETER Experiment Name: At_42deg_Heat_P Parameter: Organism Value: A. thaliana
  misc_feature: MA Experiment 20000173 PARAMETER Experiment Name: At_42deg_Heat_P Parameter: Plant Line Value: WS
  misc_feature: MA Experiment 20000173 PARAMETER Experiment Name: At_42deg_Heat_P Parameter: Temperature (deg C) Value: 42 vs. 22
  misc_feature: MA Experiment 20000173 PARAMETER Experiment Name: At_42deg_Heat_P Parameter: Timepoint (hr) Value: 6
  misc_feature: MA Experiment 20000173 PARAMETER Experiment Name: At_42deg_Heat_P Parameter: Tissue Value: Aerial
  misc_feature: MA Experiment ID: 20000179 Result: Up-regulated in Transcription
  misc_feature: MA Experiment 20000179 PARAMETER Experiment Name: At_Germinating_Seeds_P Parameter: Age (hr) Value: 6 vs. 0
  misc_feature: MA Experiment 20000179 PARAMETER Experiment Name: At_Germinating_Seeds_P Parameter: Tissue Value: Germinating Seeds
  misc_feature: MA Experiment ID: 20000453 Result: Up-regulated in Transcription
  misc_feature: MA Experiment 20000453 PARAMETER Experiment Name: At_100uM_ABA_P Parameter: Age (day) Value: 15
  misc_feature: MA Experiment 20000453 PARAMETER Experiment Name: At_100uM_ABA_P Parameter: Organism Value: A. thaliana
  misc_feature: MA Experiment 20000453 PARAMETER Experiment Name: At_100uM_ABA_P Parameter: Plant Line Value: WS
  misc_feature: MA Experiment 20000453 PARAMETER Experiment Name: At_100uM_ABA_P Parameter: Timepoint (hr) Value: 24
  misc_feature: MA Experiment 20000453 PARAMETER Experiment Name: At_100uM_ABA_P Parameter: Tissue Value: Aerial
  misc_feature: MA Experiment 20000453 PARAMETER Experiment Name: At_100uM_ABA_P Parameter: Treatment Value: 100uM ABA vs. No Treatment
  misc_feature: MA Experiment ID: 20000495 Result: Up-regulated in Transcription
  misc_feature: MA Experiment 20000495 PARAMETER Experiment Name: At_Guard_Cells_P Parameter: Harvest Date Value: 8/2/2002
  misc_feature: MA Experiment 20000495 PARAMETER Experiment Name: At_Guard_Cells_P Parameter: Organism Value: A. thaliana
  misc_feature: MA Experiment 20000495 PARAMETER Experiment Name: At_Guard_Cells_P Parameter: Tissue Value: Guard Cells vs. Leaves
  misc_feature: MA Experiment ID: 20001554 Result: Up-regulated in Transcription
  misc_feature: MA Experiment 20001554 PARAMETER Experiment Name: At_Drought_Soil_Dry_P Parameter: Age (day) Value: 21
  misc_feature: MA Experiment 20001554 PARAMETER Experiment Name: At_Drought_Soil_Dry_P Parameter: Organism Value: A. thaliana
  misc_feature: MA Experiment 20001554 PARAMETER Experiment Name: At_Drought_Soil_Dry_P Parameter: Plant Line Value: WS
  misc_feature: MA Experiment 20001554 PARAMETER Experiment Name: At_Drought_Soil_Dry_P Parameter: Post Timepoint (hr) Value: None
  misc_feature: MA Experiment 20001554 PARAMETER Experiment Name: At_Drought_Soil_Dry_P Parameter: Post-Treatment Value: None
  misc_feature: MA Experiment 20001554 PARAMETER Experiment Name: At_Drought_Soil_Dry_P Parameter: Timepoint (day) Value: 7
  misc_feature: MA Experiment 20001554 PARAMETER Experiment Name: At_Drought_Soil_Dry_P Parameter: Treatment Value: Drought vs. No Drought
  misc_feature: MA Experiment ID: 20001556 Result: Up-regulated in Transcription
  misc_feature: MA Experiment 20001556 PARAMETER Experiment Name: At_Drought_Soil_Dry_P Parameter: Age (day) Value: 26
  misc_feature: MA Experiment 20001556 PARAMETER Experiment Name: At_Drought_Soil_Dry_P Parameter: Organism Value: A. thaliana
  misc_feature: MA Experiment 20001556 PARAMETER Experiment Name: At_Drought_Soil_Dry_P Parameter: Plant Line Value: WS
  misc_feature: MA Experiment 20001556 PARAMETER Experiment Name: At_Drought_Soil_Dry_P Parameter: Post Timepoint (hr) Value: None
  misc_feature: MA Experiment 20001556 PARAMETER Experiment Name: At_Drought_Soil_Dry_P Parameter: Post-Treatment Value: None
  misc_feature: MA Experiment 20001556 PARAMETER Experiment Name: At_Drought_Soil_Dry_P Parameter: Timepoint (day) Value: 12
  misc_feature: MA Experiment 20001556 PARAMETER Experiment Name: At_Drought_Soil_Dry_P Parameter: Treatment Value: Drought vs. No Drought
  misc_feature: MA Experiment ID: 20001559 Result: Up-regulated in Transcription
  misc_feature: MA Experiment 20001559 PARAMETER Experiment Name: At_Drought_Soil_Dry_P Parameter: Age (day) Value: 28
  misc_feature: MA Experiment 20001559 PARAMETER Experiment Name: At_Drought_Soil_Dry_P Parameter: Organism Value: A. thaliana
  misc_feature: MA Experiment 20001559 PARAMETER Experiment Name: At_Drought_Soil_Dry_P Parameter: Plant Line Value: WS
  misc_feature: MA Experiment 20001559 PARAMETER Experiment Name: At_Drought_Soil_Dry_P Parameter: Post Timepoint (hr) Value: 29
  misc_feature: MA Experiment 20001559 PARAMETER Experiment Name: At_Drought_Soil_Dry_P Parameter: Post-Treatment Value: Re-Water vs. No Drought
  misc_feature: MA Experiment 20001559 PARAMETER Experiment Name: At_Drought_Soil_Dry_P Parameter: Timepoint (day) Value: 14
  misc_feature: MA Experiment 20001559 PARAMETER Experiment Name: At_Drought_Soil_Dry_P Parameter: Treatment Value: Drought vs. No Drought
taggaagaagaagaataaactcttgttcccatgatcttcgtcgatgttctttggaaattgtttcctctatactcgtttggatcaggaagagactctctctcagagtccattttgcagatcattcccgagacaatggcttcttctaccactaaaatcctctgtgatgctggcgaatcagacctctgtagagacgattctgctgcatttctccttaagtttgtagccattgcctccattctactagctggagctgctggtgtagccatacctctcattggcaggaaccgccggtttcttcaaaccgagggaaatctctttgtagctgctaaagcctttgcagctggtgtcatactcgccaccggctttgtccatatgcttgcaggtggcacagaagctctgagtaatccgtgtttaccggattttccgtggtctaagtttccctttcccgggttctttgcaatggttgctgctttagctactctgcttgttgatttcatggggacacagtactatgagaggaagcaagagaggaatcaggctgctactgaagccgctgctggtagtgaagagattgctgttgttcctgtggttggggaaagagtgaccgataataaagtgtttggtgaagaagacggtggcgggattcacattgtcggcattcgtgcacatgctgctcaccataggcatagtcactctaatagtcatggtacatgtgatggacatgctcatggacattcacacggacatatgcacgggaattcagatgttgaaaatggagctaggcatgttgttgtttctcagatattggagctcgggattgtgtcgcactcaatcatcatcggtttatccctgggggtatcacagtctccatgcacgatcaggcctcttattgcagctctgtcatttcaccagttctttgaaggatttgcgctcggaggctgcatctctcaggcacagttcaggaacaaatcagcgaccataatggcttgcttctttgcgctaaccacaccattagggatcgggattggaactgcagtggcctcatctttcaactcgcatagccctggagctttggtcactgaggggatactggactcgctgtcagctggaatactggtgtacatggctctggtggacctcatcgcagctgattttctgagtaagaggatgagttgtaatttgaggcttcaagttgtgtcttatgtaatgttgttccttggagctggacttatgtctgctctcgccatttgggcttag

SEQ ID NO: 43020 - protein, 408 aa, Arabidopsis thaliana
  peptide (1)..(408): Ceres Seq. ID no. 12558563
  misc_feature (59)..(405): Pfam Name: ZIP Zinc transporter Pfam Description: ZIP Zinc transporter
  misc_feature (52)..(408): Homolog of NCBI NO: 30526082 NR Description: putative ZIP-like zinc transporter
  misc_feature (36)..(373): Homolog of NCBI NO: 28070974 NR Description: putative Zn transporter [Thlaspi caerulescens]
  misc_feature (35)..(374): Homolog of NCBI NO: 16304806 NR Description: putative Zn and Cd transporter [Thlaspi
  misc_feature (35)..(407): Homolog of NCBI NO: 12006859 NR Description: putative Zn transporter ZNT4 [Thlaspi
  misc_feature (35)..(408): Homolog of NCBI NO: 21553732 NR Description: putative iron-regulated transporter [Arabidopsis
  misc_feature (22)..(408): Homolog of NCBI NO: 18406954 NR Description: putative iron-regulated transporter
  misc_feature (1)..(407): Homolog of NCBI NO: 14582257 NR Description: ZIP-like zinc transporter [Thlaspi caerulescens]
  misc_feature (35)..(408): Homolog of NCBI NO: 7381054 NR Description: Zn and Cd transporter ZNT1 [Thlaspi caerulescens]
  misc_feature (1)..(408): Homolog of NCBI NO: 14582255 NR Description: ZIP-like zinc transporter [Thlaspi caerulescens]
  misc_feature (1)..(408): Homolog of NCBI NO: 30682009 NR Description: metal transporter, putative (ZIP4) [Arabidopsis
MIFVDVLWKLFPLYSFGSGRDSLSESILQIIPETMASSTTKILCDAGESDLCRDDSAAFLLKFVAIASILLAGAAGVAIPLIGRNRRFLQTEGNLFVAAKAFAAGVILATGFVHMLAGGTEALSNPCLPDFPWSKFPFPGFFAMVAALATLLVDFMGTQYYERKQERNQAATEAAAGSEEIAVVPVVGERVTDNKVFGEEDGGGIHIVGIRAHAAHHRHSHSNSHGTCDGHAHGHSHGHMHGNSDVENGARHVVVSQILELGIVSHSIIIGLSLGVSQSPCTIRPLIAALSFHQFFEGFALGGCISQAQFRNKSATIMACFFALTTPLGIGIGTAVASSFNSHSPGALVTEGILDSLSAGILVYMALVDLIAADFLSKRMSCNLRLQVVSYVMLFLGAGLMSALAIWA

SEQ ID NO: 43021 - protein, 374 aa, Arabidopsis thaliana
  peptide (1)..(374): Ceres Seq. ID no. 12558564
  misc_feature (25)..(371): Pfam Name: ZIP Zinc transporter Pfam Description: ZIP Zinc transporter
  misc_feature (18)..(374): Homolog of NCBI NO: 30526082 NR Description: putative ZIP-like zinc transporter
  misc_feature (2)..(339): Homolog of NCBI NO: 28070974 NR Description: putative Zn transporter [Thlaspi caerulescens]
  misc_feature (1)..(340): Homolog of NCBI NO: 16304806 NR Description: putative Zn and Cd transporter [Thlaspi
  misc_feature (1)..(373): Homolog of NCBI NO: 12006859 NR Description: putative Zn transporter ZNT4 [Thlaspi
  misc_feature (1)..(374): Homolog of NCBI NO: 21553732 NR Description: putative iron-regulated transporter [Arabidopsis
  misc_feature (1)..(374): Homolog of NCBI NO: 18406954 NR Description: putative iron-regulated transporter
  misc_feature (1)..(373): Homolog of NCBI NO: 14582257 NR Description: ZIP-like zinc transporter [Thlaspi caerulescens]
  misc_feature (1)..(374): Homolog of NCBI NO: 7381054 NR Description: Zn and Cd transporter ZNT1 [Thlaspi caerulescens]
  misc_feature (1)..(374): Homolog of NCBI NO: 14582255 NR Description: ZIP-like zinc transporter [Thlaspi caerulescens]
  misc_feature (1)..(374): Homolog of NCBI NO: 30682009 NR Description: metal transporter, putative (ZIP4) [Arabidopsis
MASSTTKILCDAGESDLCRDDSAAFLLKFVAIASILLAGAAGVAIPLIGRNRRFLQTEGNLFVAAKAFAAGVILATGFVHMLAGGTEALSNPCLPDFPWSKFPFPGFFAMVAALATLLVDFMGTQYYERKQERNQAATEAAAGSEEIAVVPVVGERVTDNKVFGEEDGGGIHIVGIRAHAAHHRHSHSNSHGTCDGHAHGHSHGHMHGNSDVENGARHVVVSQILELGIVSHSIIIGLSLGVSQSPCTIRPLIAALSFHQFFEGFALGGCISQAQFRNKSATIMACFFALTTPLGIGIGTAVASSFNSHSPGALVTEGILDSLSAGILVYMALVDLIAADFLSKRMSCNLRLQVVSYVMLFLGAGLMSALAIWA

SEQ ID NO: 43022 - protein, 294 aa, Arabidopsis thaliana
  peptide (1)..(294): Ceres Seq. ID no. 12558565
  misc_feature (1)..(291): Pfam Name: ZIP Zinc transporter Pfam Description: ZIP Zinc transporter
  misc_feature (1)..(294): Homolog of NCBI NO: 30526082 NR Description: putative ZIP-like zinc transporter
  misc_feature (1)..(259): Homolog of NCBI NO: 28070974 NR Description: putative Zn transporter [Thlaspi caerulescens]
  misc_feature (1)..(260): Homolog of NCBI NO: 16304806 NR Description: putative Zn and Cd transporter [Thlaspi
  misc_feature (1)..(293): Homolog of NCBI NO: 12006859 NR Description: putative Zn transporter ZNT4 [Thlaspi
  misc_feature (1)..(294): Homolog of NCBI NO: 21553732 NR Description: putative iron-regulated transporter [Arabidopsis
  misc_feature (1)..(294): Homolog of NCBI NO: 18406954 NR Description: putative iron-regulated transporter
  misc_feature (1)..(293): Homolog of NCBI NO: 14582257 NR Description: ZIP-like zinc transporter [Thlaspi caerulescens]
  misc_feature (1)..(294): Homolog of NCBI NO: 7381054 NR Description: Zn and Cd transporter ZNT1 [Thlaspi caerulescens]
  misc_feature (1)..(294): Homolog of NCBI NO: 14582255 NR Description: ZIP-like zinc transporter [Thlaspi caerulescens]
  misc_feature (1)..(294): Homolog of NCBI NO: 30682009 NR Description: metal transporter, putative (ZIP4) [Arabidopsis
MLAGGTEALSNPCLPDFPWSKFPFPGFFAMVAALATLLVDFMGTQYYERKQERNQAATEAAAGSEEIAVVPVVGERVTDNKVFGEEDGGGIHIVGIRAHAAHHRHSHSNSHGTCDGHAHGHSHGHMHGNSDVENGARHVVVSQILELGIVSHSIIIGLSLGVSQSPCTIRPLIAALSFHQFFEGFALGGCISQAQFRNKSATIMACFFALTTPLGIGIGTAVASSFNSHSPGALVTEGILDSLSAGILVYMALVDLIAADFLSKRMSCNLRLQVVSYVMLFLGAGLMSALAIWA

SEQ ID NO: 43023 - DNA, 1421 bp, Arabidopsis thaliana
  misc_feature (1)..(1421): Ceres Seq. ID no. 12738411
  misc_feature: MA Experiment ID: 108434 Result: Up-regulated in Transcription
  misc_feature: MA Experiment 108434 PARAMETER Experiment Name: At_Root_Tips_cDNA_P Parameter: Tissue Value: Root Tips
  misc_feature: MA Experiment ID: 108463 Result: Up-regulated in Transcription
  misc_feature: MA Experiment 108463 PARAMETER Experiment Name: At_Germinating_Seeds_cDNA_P Parameter: Age (day) Value: 3 vs. 0
  misc_feature: MA Experiment 108463 PARAMETER Experiment Name: At_Germinating_Seeds_cDNA_P Parameter: Tissue Value: Germinating Seeds
  misc_feature: MA Experiment ID: 108464 Result: Up-regulated in Transcription
  misc_feature: MA Experiment 108464 PARAMETER Experiment Name: At_Germinating_Seeds_cDNA_P Parameter: Age (day) Value: 4 vs. 0
  misc_feature: MA Experiment 108464 PARAMETER Experiment Name: At_Germinating_Seeds_cDNA_P Parameter: Tissue Value: Germinating Seeds
  misc_feature: MA Experiment ID: 108489 Result: Down-regulated in Transcription
  misc_feature: MA Experiment ID: 108585 Result: Down-regulated in Transcription
  misc_feature: MA Experiment 108585 PARAMETER Experiment Name: At_5mM_NaNP_cDNA_P Parameter: Timepoint (hr) Value: 6
  misc_feature: MA Experiment 108585 PARAMETER Experiment Name: At_5mM_NaNP_cDNA_P Parameter: Tissue Value: Aerial
  misc_feature: MA Experiment 108585 PARAMETER Experiment Name: At_5mM_NaNP_cDNA_P Parameter: Treatment Value: null
  misc_feature: MA Experiment ID: 108595 Result: Down-regulated in Transcription
  misc_feature: MA Experiment 108595 PARAMETER Experiment Name: At_Ler-pi_Ovule_cDNA_P Parameter: Plant Line Value: null
  misc_feature: MA Experiment ID: 108607 Result: Down-regulated in Transcription
  misc_feature: MA Experiment 108607 PARAMETER Experiment Name: At_100uM_ABA_cDNA_P Parameter: Timepoint (hr) Value: 4
  misc_feature: MA Experiment 108607 PARAMETER Experiment Name: At_100uM_ABA_cDNA_P Parameter: Tissue Value: Aerial
  misc_feature: MA Experiment 108607 PARAMETER Experiment Name: At_100uM_ABA_cDNA_P Parameter: Treatment Value: 100uM ABA vs. No Treatment
  misc_feature: MA Experiment ID: 20000070 Result: Down-regulated in Transcription
  misc_feature: MA Experiment 20000070 PARAMETER Experiment Name: At_100uM_ABA_Mutants_cDNA_P Parameter: Plant Line Value: CS24
  misc_feature: MA Experiment 20000070 PARAMETER Experiment Name: At_100uM_ABA_Mutants_cDNA_P Parameter: Timepoint (hr) Value: 6
  misc_feature: MA Experiment 20000070 PARAMETER Experiment Name: At_100uM_ABA_Mutants_cDNA_P Parameter: Tissue Value: Aerial
  misc_feature: MA Experiment 20000070 PARAMETER Experiment Name: At_100uM_ABA_Mutants_cDNA_P Parameter: Treatment Value: 100uM ABA vs. No Treatment
  misc_feature: MA Experiment ID: 20000087 Result: Down-regulated in Transcription
  misc_feature: MA Experiment 20000087 PARAMETER Experiment Name: At_100uM_ABA_Mutants_cDNA_P Parameter: Plant Line Value: WS
  misc_feature: MA Experiment 20000087 PARAMETER Experiment Name: At_100uM_ABA_Mutants_cDNA_P Parameter: Timepoint (hr) Value: 6
  misc_feature: MA Experiment 20000087 PARAMETER Experiment Name: At_100uM_ABA_Mutants_cDNA_P Parameter: Tissue Value: Aerial
  misc_feature: MA Experiment 20000087 PARAMETER Experiment Name: At_100uM_ABA_Mutants_cDNA_P Parameter: Treatment Value: 100uM ABA vs. No Treatment
  misc_feature: MA Experiment ID: 20000088 Result: Down-regulated in Transcription
  misc_feature: MA Experiment 20000088 PARAMETER Experiment Name: At_100uM_ABA_Mutants_cDNA_P Parameter: Plant Line Value: Landsberg
  misc_feature: MA Experiment 20000088 PARAMETER Experiment Name: At_100uM_ABA_Mutants_cDNA_P Parameter: Timepoint (hr) Value: 6
  misc_feature: MA Experiment 20000088 PARAMETER Experiment Name: At_100uM_ABA_Mutants_cDNA_P Parameter: Tissue Value: Aerial
  misc_feature: MA Experiment 20000088 PARAMETER Experiment Name: At_100uM_ABA_Mutants_cDNA_P Parameter: Treatment Value: 100uM ABA vs. No Treatment
  misc_feature: MA Experiment ID: 20000090 Result: Down-regulated in Transcription
  misc_feature: MA Experiment ID: 20000111 Result: Down-regulated in Transcription
  misc_feature: MA Experiment 20000111 PARAMETER Experiment Name: At_42deg_Heat_cDNA_P Parameter: Temperature (deg C) Value: 42 vs. 22
  misc_feature: MA Experiment 20000111 PARAMETER Experiment Name: At_42deg_Heat_cDNA_P Parameter: Timepoint (hr) Value: 6
  misc_feature: MA Experiment 20000111 PARAMETER Experiment Name: At_42deg_Heat_cDNA_P Parameter: Tissue Value: Aerial
  misc_feature: MA Experiment ID: 20000113 Result: Down-regulated in Transcription
  misc_feature: MA Experiment 20000113 PARAMETER Experiment Name: At_42deg_Heat_cDNA_P Parameter: Temperature (deg C) Value: 42 vs. 22
  misc_feature: MA Experiment 20000113 PARAMETER Experiment Name: At_42deg_Heat_cDNA_P Parameter: Timepoint (hr) Value: 8
  misc_feature: MA Experiment 20000113 PARAMETER Experiment Name: At_42deg_Heat_cDNA_P Parameter: Tissue Value: Aerial
  misc_feature: MA Experiment ID: 20000185 Result: Up-regulated in Transcription
  misc_feature: MA Experiment 20000185 PARAMETER Experiment Name: At_Roots__P Parameter: Age (day) Value: 7 vs. 21
  misc_feature: MA Experiment 20000185 PARAMETER Experiment Name: At_Roots__P Parameter: Organism Value: A. thaliana
  misc_feature: MA Experiment 20000185 PARAMETER Experiment Name: At_Roots__P Parameter: Tissue Value: Roots vs. Whole Plant
  misc_feature: MA Experiment ID: 20000437 Result: Down-regulated in Transcription
  misc_feature: MA Experiment 20000437 PARAMETER Experiment Name: At_Drought_P Parameter: Age (day) Value: 8
  misc_feature: MA Experiment 20000437 PARAMETER Experiment Name: At_Drought_P Parameter: Organism Value: A. thaliana
  misc_feature: MA Experiment 20000437 PARAMETER Experiment Name: At_Drought_P Parameter: Plant Line Value: WS
  misc_feature: MA Experiment 20000437 PARAMETER Experiment Name: At_Drought_P Parameter: Timepoint (hr) Value: 24
  misc_feature: MA Experiment 20000437 PARAMETER Experiment Name: At_Drought_P Parameter: Tissue Value: Whole Plant
  misc_feature: MA Experiment 20000437 PARAMETER Experiment Name: At_Drought_P Parameter: Treatment Value: Drought vs. No Drought
  misc_feature: MA Experiment ID: 20000438 Result: Up-regulated in Transcription
  misc_feature: MA Experiment 20000438 PARAMETER Experiment Name: At_Shoots__P Parameter: Age (day) Value: 14
  misc_feature: MA Experiment 20000438 PARAMETER Experiment Name: At_Shoots__P Parameter: Tissue Value: Shoots vs. Whole Plant
  misc_feature: MA Experiment ID: 20000527 Result: Down-regulated in Transcription
  misc_feature: MA Experiment 20000527 PARAMETER Experiment Name: At_10percent_PEG_P Parameter: Age (day) Value: 20
  misc_feature: MA Experiment 20000527 PARAMETER Experiment Name: At_10percent_PEG_P Parameter: Organism Value: A. thaliana
  misc_feature: MA Experiment 20000527 PARAMETER Experiment Name: At_10percent_PEG_P Parameter: Plant Line Value: WS
  misc_feature: MA Experiment 20000527 PARAMETER Experiment Name: At_10percent_PEG_P Parameter: Timepoint (day) Value: 20
  misc_feature: MA Experiment 20000527 PARAMETER Experiment Name: At_10percent_PEG_P Parameter: Tissue Value: Whole Plant
  misc_feature: MA Experiment 20000527 PARAMETER Experiment Name: At_10percent_PEG_P Parameter: Treatment Value: 10percent PEG vs. No Treatment
  misc_feature: MA Experiment ID: 20000573 Result: Down-regulated in Transcription
  misc_feature: MA Experiment 20000573 PARAMETER Experiment Name: At_100uM_ABA_Mutants__P Parameter: Organism Value: A. thaliana
  misc_feature: MA Experiment 20000573 PARAMETER Experiment Name: At_100uM_ABA_Mutants__P Parameter: Plant Line Value: CS22 vs. Ler wt
  misc_feature: MA Experiment 20000573 PARAMETER Experiment Name: At_100uM_ABA_Mutants__P Parameter: Timepoint (hr) Value: N/A
  misc_feature: MA Experiment 20000573 PARAMETER Experiment Name: At_100uM_ABA_Mutants__P Parameter: Tissue Value: Whole Plant
  misc_feature: MA Experiment 20000573 PARAMETER Experiment Name: At_100uM_ABA_Mutants__P Parameter: Treatment Value: None
  misc_feature: MA Experiment ID: 20000574 Result: Down-regulated in Transcription
  misc_feature: MA Experiment 20000574 PARAMETER Experiment Name: At_100uM_ABA_Mutants__P Parameter: Organism Value: A. thaliana
  misc_feature: MA Experiment 20000574 PARAMETER Experiment Name: At_100uM_ABA_Mutants__P Parameter: Plant Line Value: CS23 vs. Ler wt
  misc_feature: MA Experiment 20000574 PARAMETER Experiment Name: At_100uM_ABA_Mutants__P Parameter: Timepoint (hr) Value: N/A
  misc_feature: MA Experiment 20000574 PARAMETER Experiment Name: At_100uM_ABA_Mutants__P Parameter: Tissue Value: Whole Plant
  misc_feature: MA Experiment 20000574 PARAMETER Experiment Name: At_100uM_ABA_Mutants__P Parameter: Treatment Value: None
  misc_feature: MA Experiment ID: 20000794 Result: Down-regulated in Transcription
  misc_feature: MA Experiment 20000794 PARAMETER Experiment Name: At_Petals_P Parameter: Age (day) Value: 23-25 days
  misc_feature: MA Experiment 20000794 PARAMETER Experiment Name: At_Petals_P Parameter: Plant Line Value: WS
  misc_feature: MA Experiment 20000794 PARAMETER Experiment Name: At_Petals_P Parameter: Tissue Value: Petals vs. Whole plant
  misc_feature: MA Experiment ID: 20001450 Result: Up-regulated in Transcription
  misc_feature: MA Experiment 20001450 PARAMETER Experiment Name: At_Far-red-induction_P Parameter: Age (day) Value: 7
  misc_feature: MA Experiment 20001450 PARAMETER Experiment Name: At_Far-red-induction_P Parameter: Light Value: Far-red vs. White
  misc_feature: MA Experiment 20001450 PARAMETER Experiment Name: At_Far-red-induction_P Parameter: Organism Value: A. thaliana
  misc_feature: MA Experiment 20001450 PARAMETER Experiment Name: At_Far-red-induction_P Parameter: Plant Line Value: Columbia
  misc_feature: MA Experiment 20001450 PARAMETER Experiment Name: At_Far-red-induction_P Parameter: Timepoint (hr) Value: 8
  misc_feature: MA Experiment 20001450 PARAMETER Experiment Name: At_Far-red-induction_P Parameter: Tissue Value: Whole Plant
  misc_feature: MA Experiment ID: 20001555 Result: Down-regulated in Transcription
  misc_feature: MA Experiment 20001555 PARAMETER Experiment Name: At_Drought_Soil_Dry_P Parameter: Age (day) Value: 24
  misc_feature: MA Experiment 20001555 PARAMETER Experiment Name: At_Drought_Soil_Dry_P Parameter: Organism Value: A. thaliana
  misc_feature: MA Experiment 20001555 PARAMETER Experiment Name: At_Drought_Soil_Dry_P Parameter: Plant Line Value: WS
  misc_feature: MA Experiment 20001555 PARAMETER Experiment Name: At_Drought_Soil_Dry_P Parameter: Post Timepoint (hr) Value: None
  misc_feature: MA Experiment 20001555 PARAMETER Experiment Name: At_Drought_Soil_Dry_P Parameter: Post-Treatment Value: None
  misc_feature: MA Experiment 20001555 PARAMETER Experiment Name: At_Drought_Soil_Dry_P Parameter: Timepoint (day) Value: 10
  misc_feature: MA Experiment 20001555 PARAMETER Experiment Name: At_Drought_Soil_Dry_P Parameter: Treatment Value: Drought vs. No Drought
  misc_feature: MA Experiment ID: 20001556 Result: Down-regulated in Transcription
  misc_feature: MA Experiment 20001556 PARAMETER Experiment Name: At_Drought_Soil_Dry_P Parameter: Age (day) Value: 26
  misc_feature: MA Experiment 20001556 PARAMETER Experiment Name: At_Drought_Soil_Dry_P Parameter: Organism Value: A. thaliana
  misc_feature: MA Experiment 20001556 PARAMETER Experiment Name: At_Drought_Soil_Dry_P Parameter: Plant Line Value: WS
  misc_feature: MA Experiment 20001556 PARAMETER Experiment Name: At_Drought_Soil_Dry_P Parameter: Post Timepoint (hr) Value: None
  misc_feature: MA Experiment 20001556 PARAMETER Experiment Name: At_Drought_Soil_Dry_P Parameter: Post-Treatment Value: None
  misc_feature: MA Experiment 20001556 PARAMETER Experiment Name: At_Drought_Soil_Dry_P Parameter: Timepoint (day) Value: 12
  misc_feature: MA Experiment 20001556 PARAMETER Experiment Name: At_Drought_Soil_Dry_P Parameter: Treatment Value: Drought vs. No Drought
  misc_feature: MA Experiment ID: 20001557 Result: Down-regulated in Transcription
  misc_feature: MA Experiment 20001557 PARAMETER Experiment Name: At_Drought_Soil_Dry_P Parameter: Age (day) Value: 27
  misc_feature: MA Experiment 20001557 PARAMETER Experiment Name: At_Drought_Soil_Dry_P Parameter: Organism Value: A. thaliana
  misc_feature: MA Experiment 20001557 PARAMETER Experiment Name: At_Drought_Soil_Dry_P Parameter: Plant Line Value: WS
  misc_feature: MA Experiment 20001557 PARAMETER Experiment Name: At_Drought_Soil_Dry_P Parameter: Post Timepoint (hr) Value: 3
  misc_feature: MA Experiment 20001557 PARAMETER Experiment Name: At_Drought_Soil_Dry_P Parameter: Post-Treatment Value: Re-Water vs. No Drought
  misc_feature: MA Experiment 20001557 PARAMETER Experiment Name: At_Drought_Soil_Dry_P Parameter: Timepoint (day) Value: 13
  misc_feature: MA Experiment 20001557 PARAMETER Experiment Name: At_Drought_Soil_Dry_P Parameter: Treatment Value: Drought vs. No Drought
  misc_feature: MA Experiment ID: 20001558 Result: Down-regulated in Transcription
  misc_feature: MA Experiment 20001558 PARAMETER Experiment Name: At_Drought_Soil_Dry_P Parameter: Age (day) Value: 27
  misc_feature: MA Experiment 20001558 PARAMETER Experiment Name: At_Drought_Soil_Dry_P Parameter: Organism Value: A. thaliana
  misc_feature: MA Experiment 20001558 PARAMETER Experiment Name: At_Drought_Soil_Dry_P Parameter: Plant Line Value: WS
  misc_feature: MA Experiment 20001558 PARAMETER Experiment Name: At_Drought_Soil_Dry_P Parameter: Post Timepoint (hr) Value: 6
  misc_feature: MA Experiment 20001558 PARAMETER Experiment Name: At_Drought_Soil_Dry_P Parameter: Post-Treatment Value: Re-Water vs. No Drought
  misc_feature: MA Experiment 20001558 PARAMETER Experiment Name: At_Drought_Soil_Dry_P Parameter: Timepoint (day) Value: 13
  misc_feature: MA Experiment 20001558 PARAMETER Experiment Name: At_Drought_Soil_Dry_P Parameter: Treatment Value: Drought vs. No Drought
  misc_feature: MA Experiment ID: 20001559 Result: Down-regulated in Transcription
  misc_feature: MA Experiment 20001559 PARAMETER Experiment Name: At_Drought_Soil_Dry_P Parameter: Age (day) Value: 28
  misc_feature: MA Experiment 20001559 PARAMETER Experiment Name: At_Drought_Soil_Dry_P Parameter: Organism Value: A. thaliana
  misc_feature: MA Experiment 20001559 PARAMETER Experiment Name: At_Drought_Soil_Dry_P Parameter: Plant Line Value: WS
  misc_feature: MA Experiment 20001559 PARAMETER Experiment Name: At_Drought_Soil_Dry_P Parameter: Post Timepoint (hr) Value: 29
  misc_feature: MA Experiment 20001559 PARAMETER Experiment Name: At_Drought_Soil_Dry_P Parameter: Post-Treatment Value: Re-Water vs. No Drought
  misc_feature: MA Experiment 20001559 PARAMETER Experiment Name: At_Drought_Soil_Dry_P Parameter: Timepoint (day) Value: 14
  misc_feature: MA Experiment 20001559 PARAMETER Experiment Name: At_Drought_Soil_Dry_P Parameter: Treatment Value: Drought vs. No Drought
  misc_feature: MA Experiment ID: 20001560 Result: Down-regulated in Transcription
  misc_feature: MA Experiment 20001560 PARAMETER Experiment Name: At_Drought_Soil_Dry_P Parameter: Age (day) Value: 28
  misc_feature: MA Experiment 20001560 PARAMETER Experiment Name: At_Drought_Soil_Dry_P Parameter: Organism Value: A. thaliana
  misc_feature: MA Experiment 20001560 PARAMETER Experiment Name: At_Drought_Soil_Dry_P Parameter: Plant Line Value: WS
  misc_feature: MA Experiment 20001560 PARAMETER Experiment Name: At_Drought_Soil_Dry_P Parameter: Post Timepoint (hr) Value: None
  misc_feature: MA Experiment 20001560 PARAMETER Experiment Name: At_Drought_Soil_Dry_P Parameter: Post-Treatment Value: None
  misc_feature: MA Experiment 20001560 PARAMETER Experiment Name: At_Drought_Soil_Dry_P Parameter: Timepoint (day) Value: 14
  misc_feature: MA Experiment 20001560 PARAMETER Experiment Name: At_Drought_Soil_Dry_P Parameter: Treatment Value: Drought vs. No Drought
  misc_feature: MA Experiment ID: 20001905 Result: Down-regulated in Transcription
  misc_feature: MA Experiment 20001905 PARAMETER Experiment Name: At_Drought_Reproduction_P Parameter: Age (day) Value: 40
  misc_feature: MA Experiment 20001905 PARAMETER Experiment Name: At_Drought_Reproduction_P Parameter: Organism Value: A. thaliana
  misc_feature: MA Experiment 20001905 PARAMETER Experiment Name: At_Drought_Reproduction_P Parameter: Plant Line Value: WS
  misc_feature: MA Experiment 20001905 PARAMETER Experiment Name: At_Drought_Reproduction_P Parameter: Timepoint (day) Value: 10
  misc_feature: MA Experiment 20001905 PARAMETER Experiment Name: At_Drought_Reproduction_P Parameter: Tissue Value: Rosettes
  misc_feature: MA Experiment 20001905 PARAMETER Experiment Name: At_Drought_Reproduction_P Parameter: Treatment Value: Drought vs. No Drought
attaaaaattttagttatgaaacaatataaccaaaaaattgccaagattgttcttgaatcttacttgtgcattgtaaatagagtctgttagcaaactttgaccattgagtattttgtgatttgtgtctagattcttgaatcttattctatggttattggacttcataaatccattttgttctttagtagttggtacccaaatattgatttttcaatagtttcagaaaacagaccaacatggaagatcggtgcttgatcaagaacgatgtcactgaattggttggtaacacaccaatggtgtatctgaacaatgttgttgatggttgcgtggctcgtatcgctgcaaagcttgagatgatggagccttgttctagcgtcaaagacagaatcgcgtatagtatgatcaaagatgcagaagaaaaaggattgattactcccggaaagagtacattgatagagccaactgctggtaacaccgggattggtttagcttgcatgggagctgcaagaggctataaagtgatccttgtgatgccttcaactatgagcttagagagaagaatcattctgagggcactaggtgcagaccttcatctctcggaccagcgcataggccttaaaggaatgttggagaaaactgaagcgattttaagcaaaactcctggtggttacattccacaacaatttgaaaatcctgcaaaccccgagattcattaccgaaccacgggaccggaaatatggagagattcagccgggaaagtagatatattggtcgctggcgtagggactggtggaactgctactggagtagggaagttcctcaaggagcagaacaaagacatcaaggtttgtgtggtggaaccagtagaaagtccggtacttagcggaggtcaaccaggtccacatttgattcagggaattggctctggtatcgtcccattcaatttggacttaaccattgttgatgaaattattcaagtggcaggtgaagaggctattgaaacagccaagcttcttgccctcaaagaaggattactggtgggaatatcctctggagccgcagcagcggctgcgttaaaggttgcaaagcggccagaaaacgcggggaaactcattgtggtggtttttcctagtggaggagaacgttatttatcgactaaactgttcgattcgattagatatgaagcagagaatttgcctattgaatgaatgttggacgtgtgccggtttcgtgtgtaataagagacgttcgttccaagagtccaagatttcaatttgcttattactggtcaatgtgaaatgtataaaaagttgcatatttgattatgaataattttagttgactacttccattgcaattcttggtcgaaaacatgaattttaataaaacagaataatctacatgaacgtttcattgactc

SEQ ID NO: 43024 - protein, 323 aa, Arabidopsis thaliana
  peptide (1)..(323): Ceres Seq. ID no. 12738412
  misc_feature (11)..(300): Pfam Name: Pyridoxal-phosphate dependent enzyme Pfam Description: Pyridoxal-phosphate dependent enzyme
  misc_feature (1)..(323): Homolog of NCBI NO: 2493895 NR Description: Cysteine synthase (O-acetylserine sulfhydrylase)
  misc_feature (7)..(323): Homolog of NCBI NO: 38350579 NR Description: cysteine synthase [Nicotiana plumbaginifolia]
  misc_feature (2)..(323): Homolog of NCBI NO: 18397061 NR Description: putative cysteine synthase
  misc_feature (1)..(323): Homolog of NCBI NO: 12322845 NR Description: putative cysteine synthase; 39489-37437
  misc_feature (2)..(323): Homolog of NCBI NO: 21593263 NR Description: putative cysteine synthase [Arabidopsis thaliana]
  misc_feature (1)..(323): Homolog of NCBI NO: 15241112 NR Description: cysteine synthase - like
  misc_feature (1)..(323): Homolog of NCBI NO: 2245144 NR Description: O-acetylserine(thiol) lyase [Brassica juncea]
  misc_feature (1)..(323): Homolog of NCBI NO: 15241111 NR Description: cysteine synthase
  misc_feature (1)..(323): Homolog of NCBI NO: 21553635 NR Description: cysteine synthase [Arabidopsis thaliana]
MEDRCLIKNDVTELVGNTPMVYLNNVVDGCVARIAAKLEMMEPCSSVKDRIAYSMIKDAEEKGLITPGKSTLIEPTAGNTGIGLACMGAARGYKVILVMPSTMSLERRIILRALGADLHLSDQRIGLKGMLEKTEAILSKTPGGYIPQQFENPANPEIHYRTTGPEIWRDSAGKVDILVAGVGTGGTATGVGKFLKEQNKDIKVCVVEPVESPVLSGGQPGPHLIQGIGSGIVPFNLDLTIVDEIIQVAGEEAIETAKLLALKEGLLVGISSGAAAAAALKVAKRPENAGKLIVVVFPSGGERYLSTKLFDSIRYEAENLPIE

SEQ ID NO: 43025 - protein, 304 aa, Arabidopsis thaliana
  peptide (1)..(304): Ceres Seq. ID no. 12738413
  misc_feature (1)..(281): Pfam Name: Pyridoxal-phosphate dependent enzyme Pfam Description: Pyridoxal-phosphate dependent enzyme
  misc_feature (1)..(304): Homolog of NCBI NO: 2493895 NR Description: Cysteine synthase (O-acetylserine sulfhydrylase)
  misc_feature (1)..(304): Homolog of NCBI NO: 38350579 NR Description: cysteine synthase [Nicotiana plumbaginifolia]
  misc_feature (1)..(304): Homolog of NCBI NO: 18397061 NR Description: putative cysteine synthase
  misc_feature (1)..(304): Homolog of NCBI NO: 12322845 NR Description: putative cysteine synthase; 39489-37437
  misc_feature (1)..(304): Homolog of NCBI NO: 21593263 NR Description: putative cysteine synthase [Arabidopsis thaliana]
  misc_feature (1)..(304): Homolog of NCBI NO: 15241112 NR Description: cysteine synthase - like
  misc_feature (1)..(304): Homolog of NCBI NO: 2245144 NR Description: O-acetylserine(thiol) lyase [Brassica juncea]
  misc_feature (1)..(304): Homolog of NCBI NO: 15241111 NR Description: cysteine synthase
  misc_feature (1)..(304): Homolog of NCBI NO: 21553635 NR Description: cysteine synthase [Arabidopsis thaliana]
MVYLNNVVDGCVARIAAKLEMMEPCSSVKDRIAYSMIKDAEEKGLITPGKSTLIEPTAGNTGIGLACMGAARGYKVILVMPSTMSLERRIILRALGADLHLSDQRIGLKGMLEKTEAILSKTPGGYIPQQFENPANPEIHYRTTGPEIWRDSAGKVDILVAGVGTGGTATGVGKFLKEQNKDIKVCVVEPVESPVLSGGQPGPHLIQGIGSGIVPFNLDLTIVDEIIQVAGEEAIETAKLLALKEGLLVGISSGAAAAAALKVAKRPENAGKLIVVVFPSGGERYLSTKLFDSIRYEAENLPIE

SEQ ID NO: 43026 - protein, 284 aa, Arabidopsis thaliana
  peptide (1)..(284): Ceres Seq. ID no. 12738414
  misc_feature (1)..(261): Pfam Name: Pyridoxal-phosphate dependent enzyme Pfam Description: Pyridoxal-phosphate dependent enzyme
  misc_feature (1)..(284): Homolog of NCBI NO: 2493895 NR Description: Cysteine synthase (O-acetylserine sulfhydrylase)
  misc_feature (1)..(284): Homolog of NCBI NO: 38350579 NR Description: cysteine synthase [Nicotiana plumbaginifolia]
  misc_feature (1)..(284): Homolog of NCBI NO: 18397061 NR Description: putative cysteine synthase
  misc_feature (1)..(284): Homolog of NCBI NO: 12322845 NR Description: putative cysteine synthase; 39489-37437
  misc_feature (1)..(284): Homolog of NCBI NO: 21593263 NR Description: putative cysteine synthase [Arabidopsis thaliana]
  misc_feature (1)..(284): Homolog of NCBI NO: 15241112 NR Description: cysteine synthase - like
  misc_feature (1)..(284): Homolog of NCBI NO: 2245144 NR Description: O-acetylserine(thiol) lyase [Brassica juncea]
  misc_feature (1)..(284): Homolog of NCBI NO: 15241111 NR Description: cysteine synthase
  misc_feature (1)..(284): Homolog of NCBI NO: 21553635 NR Description: cysteine synthase [Arabidopsis thaliana]
MMEPCSSVKDRIAYSMIKDAEEKGLITPGKSTLIEPTAGNTGIGLACMGAARGYKVILVMPSTMSLERRIILRALGADLHLSDQRIGLKGMLEKTEAILSKTPGGYIPQQFENPANPEIHYRTTGPEIWRDSAGKVDILVAGVGTGGTATGVGKFLKEQNKDIKVCVVEPVESPVLSGGQPGPHLIQGIGSGIVPFNLDLTIVDEIIQVAGEEAIETAKLLALKEGLLVGISSGAAAAAALKVAKRPENAGKLIVVVFPSGGERYLSTKLFDSIRYEAENLPIE

SEQ ID NO: 43027 - DNA, 1239 bp, Arabidopsis thaliana
  misc_feature (1)..(1239): Ceres Seq. ID no. 13494022
  misc_feature: MA Experiment ID: 108434 Result: Down-regulated in Transcription
  misc_feature: MA Experiment 108434 PARAMETER Experiment Name: At_Root_Tips_cDNA_P Parameter: Tissue Value: Root Tips
atcttttcttacaaagactttttgacatctccccctccagctattatatagtctccttttttcttttctgcattcacataatattgcccctatatagtttacacaacatcatacccaccaacatatataatcttgatcatagagagataaacagaggccgctatcaagaacaagactaagaacaagacttcactaggagtacaagtatgggaagagcaccgtgttgtgacaaagcaaacgtgaagaaagggccttggtctcctgaggaagatgcaaaactcaaatcttacattgaaaatagtggcaccggaggcaattggatcgctttgcctcaaaagattggtttaaagagatgtggaaagagttgcaggctgaggtggcttaactatcttagaccaaacatcaaacacggtggcttctctgaggaagaagaaaacatcatttgtagcctttaccttacaattggtagcaggtggtctataatcgctgctcaattgccgggacgaacagacaacgatataaaaaactattggaacacgaggctcaagaagaaactcattaacaaacaacgcaaggagcttcaagaagcttgtatggagcagcaagagatgatggtgatgatgaagagacaacaccaacaacaacaaatccaaacttcttttatgatgagacaagaccaaacaatgttcacatggccactacatcatcataatgttcaagttccagctcttttcatgaatcaaaccaactcgttttgcgaccaagaagatgttaagccagtgctcatcaagaacatggtcaagatcgaagatcaagaactggagaaaacaaaccctcatcatcatcaagattcaatgacaaacgcttttgatcatctctctttctctcaactcttgttagatcctaatcataaccacttaggatcaggagagggtttctccatgaactctatcttgagcgccaacacaaactctccattgcttaacacaagtaatgataatcagtggttcgggaatttccaggccgaaaccgtaaacttgttctcaggagcctccacaagtacttcggcagatcaaagcactataagttgggaagacataagctctcttgtttattctgattcaaagcaatttttttaattataataatatattattcttaagatgaaacgtacatcattattattaattgggggtacgtaacgtatatatggaataacgatctagtttgtttaaattt

SEQ ID NO: 43028 - protein, 310 aa, Arabidopsis thaliana
  peptide (1)..(310): Ceres Seq. ID no. 15222911
  misc_feature (14)..(62): Pfam Name: Myb-like DNA-binding domain Pfam Description: Myb-like DNA-binding domain
  misc_feature (1)..(118): Homolog of NCBI NO: 18419456 NR Description: blind [Lycopersicon esculentum]
  misc_feature (1)..(122): Homolog of NCBI NO: 40253739 NR Description: putative P-type R2R3 Myb protein
  misc_feature (1)..(301): Homolog of NCBI NO: 11358686 NR Description: probable transcription factor MYB36
  misc_feature (1)..(301): Homolog of NCBI NO: 15242793 NR Description: myb family transcription factor [Arabidopsis
  misc_feature (1)..(142): Homolog of NCBI NO: 33773103 NR Description: P-type R2R3 Myb protein [Sorghum bicolor]
  misc_feature (1)..(142): Homolog of NCBI NO: 19073324 NR Description: typical P-type R2R3 Myb protein [Sorghum bicolor]
  misc_feature (1)..(288): Homolog of NCBI NO: 15239158 NR Description: myb DNA-binding protein (MYB68) [Arabidopsis
  misc_feature (1)..(288): Homolog of NCBI NO: 11273952 NR Description: myb-related transcription factor MYB68
  misc_feature (1)..(310): Homolog of NCBI NO: 2832408 NR Description: R2R3-MYB transcription factor [Arabidopsis
  misc_feature (1)..(310): Homolog of NCBI NO: 15229192 NR Description: myb family transcription factor(AtMYB84)
MGRAPCCDKANVKKGPWSPEEDAKLKSYIENSGTGGNWIALPQKIGLKRCGKSCRLRWLNYLRPNIKHGGFSEEEENIICSLYLTIGSRWSIIAAQLPGRTDNDIKNYWNTRLKKKLINKQRKELQEACMEQQEMMVMMKRQHQQQQIQTSFMMRQDQTMFTWPLHHHNVQVPALFMNQTNSFCDQEDVKPVLIKNMVKIEDQELEKTNPHHHQDSMTNAFDHLSFSQLLLDPNHNHLGSGEGFSMNSILSANTNSPLLNTSNDNQWFGNFQAETVNLFSGASTSTSADQSTISWEDISSLVYSDSKQFF

SEQ ID NO: 43029 - protein, 181 aa, Arabidopsis thaliana
  peptide (1)..(181): Ceres Seq. ID no. 15222912
  misc_feature (1)..(79): Homolog of NCBI NO: 6552361 NR Description: myb-related transcription factor LBM2 [Nicotiana
  misc_feature (1)..(96): Homolog of NCBI NO: 15235710 NR Description: myb DNA-binding protein (AtMYB87) [Arabidopsis
  misc_feature (1)..(172): Homolog of NCBI NO: 11358686 NR Description: probable transcription factor MYB36
  misc_feature (1)..(172): Homolog of NCBI NO: 15242793 NR Description: myb family transcription factor [Arabidopsis
  misc_feature (1)..(13): Homolog of NCBI NO: 33773103 NR Description: P-type R2R3 Myb protein [Sorghum bicolor]
  misc_feature (1)..(13): Homolog of NCBI NO: 19073324 NR Description: typical P-type R2R3 Myb protein [Sorghum bicolor]
  misc_feature (1)..(159): Homolog of NCBI NO: 15239158 NR Description: myb DNA-binding protein (MYB68) [Arabidopsis
  misc_feature (1)..(159): Homolog of NCBI NO: 11273952 NR Description: myb-related transcription factor MYB68
  misc_feature (1)..(181): Homolog of NCBI NO: 2832408 NR Description: R2R3-MYB transcription factor [Arabidopsis
  misc_feature (1)..(181): Homolog of NCBI NO: 15229192 NR Description: myb family transcription factor(AtMYB84)
MEQQEMMVMMKRQHQQQQIQTSFMMRQDQTMFTWPLHHHNVQVPALFMNQTNSFCDQEDVKPVLIKNMVKIEDQELEKTNPHHHQDSMTNAFDHLSFSQLLLDPNHNHLGSGEGFSMNSILSANTNSPLLNTSNDNQWFGNFQAETVNLFSGASTSTSADQSTISWEDISSLVYSDSKQFF

SEQ ID NO: 43030 - protein, 176 aa, Arabidopsis thaliana
  peptide (1)..(176): Ceres Seq. ID no. 15222913
  misc_feature (1)..(39): Homolog of NCBI NO: 15226524 NR Description: MYB transcription factor (Atmyb2) [Arabidopsis
  misc_feature (1)..(167): Homolog of NCBI NO: 30024600 NR Description: transcription factor MYB102 [Lotus japonicus]
  misc_feature (1)..(74): Homolog of NCBI NO: 6552361 NR Description: myb-related transcription factor LBM2 [Nicotiana
  misc_feature (1)..(91): Homolog of NCBI NO: 15235710 NR Description: myb DNA-binding protein (AtMYB87) [Arabidopsis
  misc_feature (1)..(167): Homolog of NCBI NO: 11358686 NR Description: probable transcription factor MYB36
  misc_feature (1)..(167): Homolog of NCBI NO: 15242793 NR Description: myb family transcription factor [Arabidopsis
  misc_feature (1)..(154): Homolog of NCBI NO: 15239158 NR Description: myb DNA-binding protein (MYB68) [Arabidopsis
  misc_feature (1)..(154): Homolog of NCBI NO: 11273952 NR Description: myb-related transcription factor MYB68
  misc_feature (1)..(176): Homolog of NCBI NO: 2832408 NR Description: R2R3-MYB transcription factor [Arabidopsis
  misc_feature (1)..(176): Homolog of NCBI NO: 15229192 NR Description: myb family transcription factor(AtMYB84)
MMVMMKRQHQQQQIQTSFMMRQDQTMFTWPLHHHNVQVPALFMNQTNSFCDQEDVKPVLIKNMVKIEDQELEKTNPHHHQDSMTNAFDHLSFSQLLLDPNHNHLGSGEGFSMNSILSANTNSPLLNTSNDNQWFGNFQAETVNLFSGASTSTSADQSTISWEDISSLVYSDSKQFF

SEQ ID NO: 43031 - DNA, 1499 bp, Arabidopsis thaliana
  misc_feature (1)..(1499): Ceres Seq. ID no. 12330711
  misc_feature: MA Experiment ID: 108433 Result: Down-regulated in Transcription
  misc_feature: MA Experiment 108433 PARAMETER Experiment Name: At_rhl_Mutant2_cDNA_P Parameter: Age (day) Value: 7
  misc_feature: MA Experiment 108433 PARAMETER Experiment Name: At_rhl_Mutant2_cDNA_P Parameter: Organism Value: A. thaliana
  misc_feature: MA Experiment 108433 PARAMETER Experiment Name: At_rhl_Mutant2_cDNA_P Parameter: Plant Line Value: rhl Mutant vs. wt landsburg
  misc_feature: MA Experiment 108433 PARAMETER Experiment Name: At_rhl_Mutant2_cDNA_P Parameter: Tissue Value: Roots
  misc_feature: MA Experiment ID: 108463 Result: Up-regulated in Transcription
  misc_feature: MA Experiment 108463 PARAMETER Experiment Name: At_Germinating_Seeds_cDNA_P Parameter: Age (day) Value: 3 vs. 0
  misc_feature: MA Experiment 108463 PARAMETER Experiment Name: At_Germinating_Seeds_cDNA_P Parameter: Tissue Value: Germinating Seeds
  misc_feature: MA Experiment ID: 108473 Result: Down-regulated in Transcription
  misc_feature: MA Experiment 108473 PARAMETER Experiment Name: At_Drought_Flowers_cDNA_P Parameter: Timepoint (hr) Value: 7 d
  misc_feature: MA Experiment 108473 PARAMETER Experiment Name: At_Drought_Flowers_cDNA_P Parameter: Tissue Value: Flower
  misc_feature: MA Experiment 108473 PARAMETER Experiment Name: At_Drought_Flowers_cDNA_P Parameter: Treatment Value: Drought vs. No Drought
  misc_feature: MA Experiment ID: 108573 Result: Up-regulated in Transcription
  misc_feature: MA Experiment 108573 PARAMETER Experiment Name: At_Drought_cDNA_P Parameter: Timepoint (hr) Value: 6
  misc_feature: MA Experiment 108573 PARAMETER Experiment Name: At_Drought_cDNA_P Parameter: Tissue Value: Aerial
  misc_feature: MA Experiment 108573 PARAMETER Experiment Name: At_Drought_cDNA_P Parameter: Treatment Value: Drought vs. No Drought
  misc_feature: MA Experiment ID: 108577 Result: Down-regulated in Transcription
  misc_feature: MA Experiment 108577 PARAMETER Experiment Name: At_42deg_Heat_cDNA_P Parameter: Temperature (deg C) Value: 42 vs. 22
  misc_feature: MA Experiment 108577 PARAMETER Experiment Name: At_42deg_Heat_cDNA_P Parameter: Timepoint (hr) Value: 6
  misc_feature: MA Experiment 108577 PARAMETER Experiment Name: At_42deg_Heat_cDNA_P Parameter: Tissue Value: Aerial
  misc_feature: MA Experiment ID: 108579 Result: Up-regulated in Transcription
  misc_feature: MA Experiment 108579 PARAMETER Experiment Name: At_4deg_Cold_cDNA_P Parameter: Temperature (deg C) Value: 4 vs. 22
  misc_feature: MA Experiment 108579 PARAMETER Experiment Name: At_4deg_Cold_cDNA_P Parameter: Timepoint (hr) Value: 6
  misc_feature: MA Experiment 108579 PARAMETER Experiment Name: At_4deg_Cold_cDNA_P Parameter: Tissue Value: Aerial
  misc_feature: MA Experiment ID: 20000087 Result: Down-regulated in Transcription
  misc_feature: MA Experiment 20000087 PARAMETER Experiment Name: At_100uM_ABA_Mutants_cDNA_P Parameter: Plant Line Value: WS
  misc_feature: MA Experiment 20000087 PARAMETER Experiment Name: At_100uM_ABA_Mutants_cDNA_P Parameter: Timepoint (hr) Value: 6
  misc_feature: MA Experiment 20000087 PARAMETER Experiment Name: At_100uM_ABA_Mutants_cDNA_P Parameter: Tissue Value: Aerial
  misc_feature: MA Experiment 20000087 PARAMETER Experiment Name: At_100uM_ABA_Mutants_cDNA_P Parameter: Treatment Value: 100uM ABA vs. No Treatment
  misc_feature: MA Experiment ID: 20000089 Result: Down-regulated in Transcription
  misc_feature: MA Experiment ID: 20000090 Result: Down-regulated in Transcription
  misc_feature: MA Experiment ID: 20000224 Result: Down-regulated in Transcription
  misc_feature: MA Experiment ID: 20000438 Result: Down-regulated in Transcription
  misc_feature: MA Experiment 20000438 PARAMETER Experiment Name: At_Shoots__P Parameter: Age (day) Value: 14
  misc_feature: MA Experiment 20000438 PARAMETER Experiment Name: At_Shoots__P Parameter: Tissue Value: Shoots vs. Whole Plant
  misc_feature: MA Experiment ID: 20000439 Result: Down-regulated in Transcription
  misc_feature: MA Experiment 20000439 PARAMETER Experiment Name: At_Roots__P Parameter: Age (day) Value: 14 vs. 21
  misc_feature: MA Experiment 20000439 PARAMETER Experiment Name: At_Roots__P Parameter: Organism Value: A. thaliana
  misc_feature: MA Experiment 20000439 PARAMETER Experiment Name: At_Roots__P Parameter: Tissue Value: Roots vs. Whole Plant
  misc_feature: MA Experiment ID: 20000573 Result: Down-regulated in Transcription
  misc_feature: MA Experiment 20000573 PARAMETER Experiment Name: At_100uM_ABA_Mutants__P Parameter: Organism Value: A. thaliana
  misc_feature: MA Experiment 20000573 PARAMETER Experiment Name: At_100uM_ABA_Mutants__P Parameter: Plant Line Value: CS22 vs. Ler wt
  misc_feature: MA Experiment 20000573 PARAMETER Experiment Name: At_100uM_ABA_Mutants__P Parameter: Timepoint (hr) Value: N/A
  misc_feature: MA Experiment 20000573 PARAMETER Experiment Name: At_100uM_ABA_Mutants__P Parameter: Tissue Value: Whole Plant
  misc_feature: MA Experiment 20000573 PARAMETER Experiment Name: At_100uM_ABA_Mutants__P Parameter: Treatment Value: None
  misc_feature: MA Experiment ID: 20000574 Result: Down-regulated in Transcription
  misc_feature: MA Experiment 20000574 PARAMETER Experiment Name: At_100uM_ABA_Mutants__P Parameter: Organism Value: A. thaliana
  misc_feature: MA Experiment 20000574 PARAMETER Experiment Name: At_100uM_ABA_Mutants__P Parameter: Plant Line Value: CS23 vs. Ler wt
  misc_feature: MA Experiment 20000574 PARAMETER Experiment Name: At_100uM_ABA_Mutants__P Parameter: Timepoint (hr) Value: N/A
  misc_feature: MA Experiment 20000574 PARAMETER Experiment Name: At_100uM_ABA_Mutants__P Parameter: Tissue Value: Whole Plant
  misc_feature: MA Experiment 20000574 PARAMETER Experiment Name: At_100uM_ABA_Mutants__P Parameter: Treatment Value: None
  misc_feature: MA Experiment ID: 20001247 Result: Up-regulated in Transcription
  misc_feature: MA Experiment 20001247 PARAMETER Experiment Name: At_Far-red-induction_P Parameter: Age (day) Value: 7
  misc_feature: MA Experiment 20001247 PARAMETER Experiment Name: At_Far-red-induction_P Parameter: Light Value: Far-red vs. White
  misc_feature: MA Experiment 20001247 PARAMETER Experiment Name: At_Far-red-induction_P Parameter: Organism Value: A. thaliana
  misc_feature: MA Experiment 20001247 PARAMETER Experiment Name: At_Far-red-induction_P Parameter: Plant Line Value: Columbia
  misc_feature: MA Experiment 20001247 PARAMETER Experiment Name: At_Far-red-induction_P Parameter: Timepoint (hr) Value: 1
  misc_feature: MA Experiment 20001247 PARAMETER Experiment Name: At_Far-red-induction_P Parameter: Tissue Value: Whole Plant
cttagcagatgcttttgggaaaaaaaatatataccaaaataaaagatctgcatctgtcttcttcttcttcttcatttcctctaaatttaattacccattttttccgataaatttttgttgaggaagaatttttgttgtaaagagagtttaattaaattatgccttcaatagaagatgagctgtttccgtcaacgccgggtaaattcaaaattgaccggtcaaaccgtcagctccaccgttgtttcgcttctacgagcaccatgtttctttgggctctcttcctcatcgctctcaccgcttcttacttgagtttccaaagcttcgtcgattccggtagccgttatctaaccgcttcttggggcggcatccagtgggagaaacaggttcgtacctccgctcagatccatcgctccggcggtatctccgtccttgttaccggcgctaccggattcgtcggtagccacgtgtcacttgccttgaggaaacgcggcgatggtgttgttggacttgataatttcaacaattactacgatccgtcgttgaaacgtgctcgtagatctctgttgtcgtcgagagggatcttcgtcgttgaaggagatctaaacgacgcgaagctgttagcaaagcttttcgatgtggttgctttcactcacgtgatgcatctcgctgctcaagctggtgttagatacgctttggagaatcctcaatcgtatgttcatagcaacatcgccggacttgtgaatcttctcgagatttgcaaagcggcgaatcctcagccggcgatagtttgggcttcatcgagctccgtttatggactcaacgagaaagttccattctctgaatctgaccggacggatcaaccggcgagtctctacgccgcaacgaaaaaagccggcgaagaaatcacccacacttataaccatatttacggtcttgccattaccggtttaagattcttcacggtttacggaccatggggtagaccggatatggcttacttctccttcaccagaaacatcctacaaggtaaaccgatcacaatctaccggggcaaaaaccgggtcgatttagcccgggatttcacatacatcgacgatatagtgaaaggatgtttaggatctctggattcatcgggtaaaagtaccgggtcgggtggtaaaaaacgtggagcagcaccgtaccggatatttaacctgggaaacacatctccggttacagtaccgattctggtggatatattggagaagcatttaaaggtgaaagcgaagaggaacttcgtggagatgccaggaaacggcgacgtaccgttcacacatgccaatattagctcagcccgaaatgaattcgggtataaaccgacaaccgatttggaaaccgggttgaagaagttcgttagatggtatctttcttattacggatacaatactaaagccaagcttgtacattaaccgtgactattattattatttttaatgaaattatttttttctttctcccct

SEQ ID NO: 43032 - protein, 429 aa, Arabidopsis thaliana
  peptide (1)..(429): Ceres Seq. ID no. 12330712
  misc_feature (90)..(419): Pfam Name: NAD dependent epimerase/dehydratase family Pfam Description: NAD dependent epimerase/dehydratase family
  misc_feature (47)..(427): Homolog of NCBI NO: 29647497 NR Description: OJ1191_A10.21 [Oryza sativa (japonica
  misc_feature (44)..(426): Homolog of NCBI NO: 24417280 NR Description: unknown [Arabidopsis thaliana]
  misc_feature (44)..(426): Homolog of NCBI NO: 15229524 NR Description: NAD dependent epimerase, putative
  misc_feature (6)..(419): Homolog of NCBI NO: 15293119 NR Description: putative nucleotide sugar epimerase [Arabidopsis
  misc_feature (6)..(419): Homolog of NCBI NO: 15234486 NR Description: nucleotide sugar epimerase -like protein
  misc_feature (18)..(419): Homolog of NCBI NO: 21536982 NR Description: nucleotide sugar epimerase, putative [Arabidopsis
  misc_feature (1)..(425): Homolog of NCBI NO: 15225451 NR Description: putative nucleotide sugar epimerase; protein id:
  misc_feature (1)..(425): Homolog of NCBI NO: 15236712 NR Description: putative nucleotide sugar epimerase; protein id:
  misc_feature (1)..(419): Homolog of NCBI NO: 15217591 NR Description: nucleotide sugar epimerase, putative
  misc_feature (1)..(429): Homolog of NCBI NO: 15234745 NR Description: nucleotide sugar epimerase-like protein
MPSIEDELFPSTPGKFKIDRSNRQLHRCFASTSTMFLWALFLIALTASYLSFQSFVDSGSRYLTASWGGIQWEKQVRTSAQIHRSGGISVLVTGATGFVGSHVSLALRKRGDGVVGLDNFNNYYDPSLKRARRSLLSSRGIFVVEGDLNDAKLLAKLFDVVAFTHVMHLAAQAGVRYALENPQSYVHSNIAGLVNLLEICKAANPQPAIVWASSSSVYGLNEKVPFSESDRTDQPASLYAATKKAGEEITHTYNHIYGLAITGLRFFTVYGPWGRPDMAYFSFTRNILQGKPITIYRGKNRVDLARDFTYIDDIVKGCLGSLDSSGKSTGSGGKKRGAAPYRIFNLGNTSPVTVPILVDILEKHLKVKAKRNFVEMPGNGDVPFTHANISSARNEFGYKPTTDLETGLKKFVRWYLSYYGYNTKAKLVH

SEQ ID NO: 43033 - protein, 395 aa, Arabidopsis thaliana
  peptide (1)..(395): Ceres Seq. ID no. 12330713
  misc_feature (56)..(385): Pfam Name: NAD dependent epimerase/dehydratase family Pfam Description: NAD dependent epimerase/dehydratase family
  misc_feature (13)..(393): Homolog of NCBI NO: 29647497 NR Description: OJ1191_A10.21 [Oryza sativa (japonica
  misc_feature (10)..(392): Homolog of NCBI NO: 24417280 NR Description: unknown [Arabidopsis thaliana]
  misc_feature (10)..(392): Homolog of NCBI NO: 15229524 NR Description: NAD dependent epimerase, putative
  misc_feature (1)..(385): Homolog of NCBI NO: 15293119 NR Description: putative nucleotide sugar epimerase [Arabidopsis
  misc_feature (1)..(385): Homolog of NCBI NO: 15234486 NR Description: nucleotide sugar epimerase -like protein
  misc_feature (1)..(385): Homolog of NCBI NO: 21536982 NR Description: nucleotide sugar epimerase, putative [Arabidopsis
  misc_feature (1)..(391): Homolog of NCBI NO: 15225451 NR Description: putative nucleotide sugar epimerase; protein id:
  misc_feature (1)..(391): Homolog of NCBI NO: 15236712 NR Description: putative nucleotide sugar epimerase; protein id:
  misc_feature (1)..(385): Homolog of NCBI NO: 15217591 NR Description: nucleotide sugar epimerase, putative
  misc_feature (1)..(395): Homolog of NCBI NO: 15234745 NR Description: nucleotide sugar epimerase-like protein
MFLWALFLIALTASYLSFQSFVDSGSRYLTASWGGIQWEKQVRTSAQIHRSGGISVLVTGATGFVGSHVSLALRKRGDGVVGLDNFNNYYDPSLKRARRSLLSSRGIFVVEGDLNDAKLLAKLFDVVAFTHVMHLAAQAGVRYALENPQSYVHSNIAGLVNLLEICKAANPQPAIVWASSSSVYGLNEKVPFSESDRTDQPASLYAATKKAGEEITHTYNHIYGLAITGLRFFTVYGPWGRPDMAYFSFTRNILQGKPITIYRGKNRVDLARDFTYIDDIVKGCLGSLDSSGKSTGSGGKKRGAAPYRIFNLGNTSPVTVPILVDILEKHLKVKAKRNFVEMPGNGDVPFTHANISSARNEFGYKPTTDLETGLKKFVRWYLSYYGYNTKAKLVH

SEQ ID NO: 43034 - protein, 263 aa, Arabidopsis thaliana
  peptide (1)..(263): Ceres Seq. ID no. 12330714
  misc_feature (1)..(253): Pfam Name: NAD dependent epimerase/dehydratase family Pfam Description: NAD dependent epimerase/dehydratase family
  misc_feature (1)..(261): Homolog of NCBI NO: 29647497 NR Description: OJ1191_A10.21 [Oryza sativa (japonica
  misc_feature (1)..(260): Homolog of NCBI NO: 24417280 NR Description: unknown [Arabidopsis thaliana]
  misc_feature (1)..(260): Homolog of NCBI NO: 15229524 NR Description: NAD dependent epimerase, putative
  misc_feature (1)..(253): Homolog of NCBI NO: 15293119 NR Description: putative nucleotide sugar epimerase [Arabidopsis
  misc_feature (1)..(253): Homolog of NCBI NO: 15234486 NR Description: nucleotide sugar epimerase -like protein
  misc_feature (1)..(253): Homolog of NCBI NO: 21536982 NR Description: nucleotide sugar epimerase, putative [Arabidopsis
  misc_feature (1)..(259): Homolog of NCBI NO: 15225451 NR Description: putative nucleotide sugar epimerase; protein id:
  misc_feature (1)..(259): Homolog of NCBI NO: 15236712 NR Description: putative nucleotide sugar epimerase; protein id:
  misc_feature (1)..(253): Homolog of NCBI NO: 15217591 NR Description: nucleotide sugar epimerase, putative
  misc_feature (1)..(263): Homolog of NCBI NO: 15234745 NR Description: nucleotide sugar epimerase-like protein
MHLAAQAGVRYALENPQSYVHSNIAGLVNLLEICKAANPQPAIVWASSSSVYGLNEKVPFSESDRTDQPASLYAATKKAGEEITHTYNHIYGLAITGLRFFTVYGPWGRPDMAYFSFTRNILQGKPITIYRGKNRVDLARDFTYIDDIVKGCLGSLDSSGKSTGSGGKKRGAAPYRIFNLGNTSPVTVPILVDILEKHLKVKAKRNFVEMPGNGDVPFTHANISSARNEFGYKPTTDLETGLKKFVRWYLSYYGYNTKAKLVH

SEQ ID NO: 43035 - DNA, 1149 bp, Arabidopsis thaliana
  misc_feature (1)..(1149): Ceres Seq. ID no. 12324746
  misc_feature: MA Experiment ID: 20000171 Result: Down-regulated in Transcription
  misc_feature: MA Experiment 20000171 PARAMETER Experiment Name: At_42deg_Heat_P Parameter: Age (day) Value: 14
  misc_feature: MA Experiment 20000171 PARAMETER Experiment Name: At_42deg_Heat_P Parameter: Organism Value: A. thaliana
  misc_feature: MA Experiment 20000171 PARAMETER Experiment Name: At_42deg_Heat_P Parameter: Plant Line Value: WS
  misc_feature: MA Experiment 20000171 PARAMETER Experiment Name: At_42deg_Heat_P Parameter: Temperature (deg C) Value: 42 vs. 22
  misc_feature: MA Experiment 20000171 PARAMETER Experiment Name: At_42deg_Heat_P Parameter: Timepoint (hr) Value: 1
  misc_feature: MA Experiment 20000171 PARAMETER Experiment Name: At_42deg_Heat_P Parameter: Tissue Value: Aerial
  misc_feature: MA Experiment ID: 20000173 Result: Down-regulated in Transcription
  misc_feature: MA Experiment 20000173 PARAMETER Experiment Name: At_42deg_Heat_P Parameter: Age (day) Value: 14
  misc_feature: MA Experiment 20000173 PARAMETER Experiment Name: At_42deg_Heat_P Parameter: Organism Value: A. thaliana
  misc_feature: MA Experiment 20000173 PARAMETER Experiment Name: At_42deg_Heat_P Parameter: Plant Line Value: WS
  misc_feature: MA Experiment 20000173 PARAMETER Experiment Name: At_42deg_Heat_P Parameter: Temperature (deg C) Value: 42 vs. 22
  misc_feature: MA Experiment 20000173 PARAMETER Experiment Name: At_42deg_Heat_P Parameter: Timepoint (hr) Value: 6
  misc_feature: MA Experiment 20000173 PARAMETER Experiment Name: At_42deg_Heat_P Parameter: Tissue Value: Aerial
  misc_feature: MA Experiment ID: 20000184 Result: Down-regulated in Transcription
  misc_feature: MA Experiment 20000184 PARAMETER Experiment Name: At_Shoots__P Parameter: Age (day) Value: 7
  misc_feature: MA Experiment 20000184 PARAMETER Experiment Name: At_Shoots__P Parameter: Tissue Value: Shoots vs. Whole Plant
  misc_feature: MA Experiment ID: 20000437 Result: Up-regulated in Transcription
  misc_feature: MA Experiment 20000437 PARAMETER Experiment Name: At_Drought_P Parameter: Age (day) Value: 8
  misc_feature: MA Experiment 20000437 PARAMETER Experiment Name: At_Drought_P Parameter: Organism Value: A. thaliana
  misc_feature: MA Experiment 20000437 PARAMETER Experiment Name: At_Drought_P Parameter: Plant Line Value: WS
  misc_feature: MA Experiment 20000437 PARAMETER Experiment Name: At_Drought_P Parameter: Timepoint (hr) Value: 24
  misc_feature: MA Experiment 20000437 PARAMETER Experiment Name: At_Drought_P Parameter: Tissue Value: Whole Plant
  misc_feature: MA Experiment 20000437 PARAMETER Experiment Name: At_Drought_P Parameter: Treatment Value: Drought vs. No Drought
  misc_feature: MA Experiment ID: 20000794 Result: Up-regulated in Transcription
  misc_feature: MA Experiment 20000794 PARAMETER Experiment Name: At_Petals_P Parameter: Age (day) Value: 23-25 days
  misc_feature: MA Experiment 20000794 PARAMETER Experiment Name: At_Petals_P Parameter: Plant Line Value: WS
  misc_feature: MA Experiment 20000794 PARAMETER Experiment Name: At_Petals_P Parameter: Tissue Value: Petals vs. Whole plant
  misc_feature: MA Experiment ID: 20001905 Result: Up-regulated in Transcription
  misc_feature: MA Experiment 20001905 PARAMETER Experiment Name: At_Drought_Reproduction_P Parameter: Age (day) Value: 40
  misc_feature: MA Experiment 20001905 PARAMETER Experiment Name: At_Drought_Reproduction_P Parameter: Organism Value: A. thaliana
  misc_feature: MA Experiment 20001905 PARAMETER Experiment Name: At_Drought_Reproduction_P Parameter: Plant Line Value: WS
  misc_feature: MA Experiment 20001905 PARAMETER Experiment Name: At_Drought_Reproduction_P Parameter: Timepoint (day) Value: 10
  misc_feature: MA Experiment 20001905 PARAMETER Experiment Name: At_Drought_Reproduction_P Parameter: Tissue Value: Rosettes
  misc_feature: MA Experiment 20001905 PARAMETER Experiment Name: At_Drought_Reproduction_P Parameter: Treatment Value: Drought vs. No Drought
aacttttccttttcttcttcttcttctttatctttctcacttctcctttctccatcgttctatcattttctcctttccttcacctcaagatctcaaaaacacaaaaagagaaatcaatcaaaaccttagggttttctactaatttatctgtgtgatgttaagagaatcatcatcatcttcgtcgtcatgggaggagtaacttcatcaatcgctgcaaaattcgcttttttcccgccatcaccaccgtcttatggatttgtttccgacgttgaccgattatacataacagaagtacctcgccgtgatgatgtagatgtattgaagctaaagactcgtcgtggtaacgagattgtagctatttatattaaacatcctaaagctaatggtacgcttttgtattcacatggtaacgctgctgatttgggtcaaatgtttgagctttttatcgaacttagtaatcgtctccgacttaatctcatggggtatgattactctggttatggtcagtctactggaaaggcaagtgaatgtaatacctatgctgatatagatgcagcatatacttgcctcaaggaacattatggtgtaaaagatgatcaactgatattatatggtcagtctgttggtagtggaccaacgattgatttagcttcacgcacgcctaatttgcgaggagtggttttgcacagccctattctctctgggatgagagttttgtatccggttaaacgtacctattggtttgacatttacaaggggactgcagatgaagtggttgattgttctcatggaaaacaactttgggaactttcaaaagaaaagtatgagcctttatgggtatctggaggaggacactgcaatctagaactctatccagagttcataaaacatctgaagaaatacgtaatttctatttccaagggaccaagaactggttcgaacaagactgcaacgacggatgcagccaaaaaacagagcaagcctgcagagaacgggcgtgctgatacgtttcaacttggctgttgccttccagaagtttctagaaacagtgtagacagtcagctggagaaatctaagaagactagtaaacccgagaagtctcgtatgagcattgataggtttagaaggaaaaaaggttcagtctggtga

SEQ ID NO: 43036 - protein, 320 aa, Arabidopsis thaliana
  peptide (1)..(320): Ceres Seq. ID no. 12324747
  misc_feature (98)..(166): Pfam Name: alpha/beta hydrolase fold Pfam Description: alpha/beta hydrolase fold
  misc_feature (1)..(319): Homolog of NCBI NO: 15230760 NR Description: unknown protein; protein id: At3g30380.1
  misc_feature (1)..(313): Homolog of NCBI NO: 15233975 NR Description: putative protein
  misc_feature (1)..(319): Homolog of NCBI NO: 15232168 NR Description: unknown protein; protein id: At3g01690.1
  misc_feature (1)..(309): Homolog of NCBI NO: 15241394 NR Description: putative protein
  misc_feature (1)..(38): Homolog of NCBI NO: 34911338 NR Description: P0519D04.38 [Oryza sativa (japonica
  misc_feature (40)..(310): Homolog of NCBI NO: 34911338 NR Description: P0519D04.38 [Oryza sativa (japonica
  misc_feature (1)..(243): Homolog of NCBI NO: 22330474 NR Description: hypothetical protein
  misc_feature (1)..(243): Homolog of NCBI NO: 25404647 NR Description: hypothetical protein T4O24.3 [imported] -
  misc_feature (1)..(320): Homolog of NCBI NO: 10177798 NR Description: emb|CAB87778.1~gene_id:MXA21.9~strong similarity
  misc_feature (1)..(320): Homolog of NCBI NO: 15240861 NR Description: putative protein; protein id: At5g38220.1
MGGVTSSIAAKFAFFPPSPPSYGFVSDVDRLYITEVPRRDDVDVLKLKTRRGNEIVAIYIKHPKANGTLLYSHGNAADLGQMFELFIELSNRLRLNLMGYDYSGYGQSTGKASECNTYADIDAAYTCLKEHYGVKDDQLILYGQSVGSGPTIDLASRTPNLRGVVLHSPILSGMRVLYPVKRTYWFDIYKGTADEVVDCSHGKQLWELSKEKYEPLWVSGGGHCNLELYPEFIKHLKKYVISISKGPRTGSNKTATTDAAKKQSKPAENGRADTFQLGCCLPEVSRNSVDSQLEKSKKTSKPEKSRMSIDRFRRKKGSVW

SEQ ID NO: 43037 - protein, 239 aa, Arabidopsis thaliana
  peptide (1)..(239): Ceres Seq. ID no. 12324748
  misc_feature (17)..(85): Pfam Name: alpha/beta hydrolase fold Pfam Description: alpha/beta hydrolase fold
  misc_feature (1)..(109): Homolog of NCBI NO: 30688887 NR Description: expressed protein [Arabidopsis thaliana]
  misc_feature (1)..(238): Homolog of NCBI NO: 15230760 NR Description: unknown protein; protein id: At3g30380.1
  misc_feature (1)..(232): Homolog of NCBI NO: 15233975 NR Description: putative protein
  misc_feature (1)..(238): Homolog of NCBI NO: 15232168 NR Description: unknown protein; protein id: At3g01690.1
  misc_feature (1)..(228): Homolog of NCBI NO: 15241394 NR Description: putative protein
  misc_feature (1)..(229): Homolog of NCBI NO: 34911338 NR Description: P0519D04.38 [Oryza sativa (japonica
  misc_feature (1)..(162): Homolog of NCBI NO: 22330474 NR Description: hypothetical protein
  misc_feature (1)..(162): Homolog of NCBI NO: 25404647 NR Description: hypothetical protein T4O24.3 [imported] -
  misc_feature (1)..(239): Homolog of NCBI NO: 10177798 NR Description: emb|CAB87778.1~gene_id:MXA21.9~strong similarity
  misc_feature (1)..(239): Homolog of NCBI NO: 15240861 NR Description: putative protein; protein id: At5g38220.1
MFELFIELSNRLRLNLMGYDYSGYGQSTGKASECNTYADIDAAYTCLKEHYGVKDDQLILYGQSVGSGPTIDLASRTPNLRGVVLHSPILSGMRVLYPVKRTYWFDIYKGTADEVVDCSHGKQLWELSKEKYEPLWVSGGGHCNLELYPEFIKHLKKYVISISKGPRTGSNKTATTDAAKKQSKPAENGRADTFQLGCCLPEVSRNSVDSQLEKSKKTSKPEKSRMSIDRFRRKKGSVW

SEQ ID NO: 43038 - protein, 223 aa, Arabidopsis thaliana
  peptide (1)..(223): Ceres Seq. ID no. 12324749
  misc_feature (1)..(69): Pfam Name: alpha/beta hydrolase fold Pfam Description: alpha/beta hydrolase fold
  misc_feature (1)..(93): Homolog of NCBI NO: 30688887 NR Description: expressed protein [Arabidopsis thaliana]
  misc_feature (1)..(222): Homolog of NCBI NO: 15230760 NR Description: unknown protein; protein id: At3g30380.1
  misc_feature (1)..(216): Homolog of NCBI NO: 15233975 NR Description: putative protein
  misc_feature (1)..(222): Homolog of NCBI NO: 15232168 NR Description: unknown protein; protein id: At3g01690.1
  misc_feature (1)..(212): Homolog of NCBI NO: 15241394 NR Description: putative protein
  misc_feature (1)..(213): Homolog of NCBI NO: 34911338 NR Description: P0519D04.38 [Oryza sativa (japonica
  misc_feature (1)..(146): Homolog of NCBI NO: 22330474 NR Description: hypothetical protein
  misc_feature (1)..(146): Homolog of NCBI NO: 25404647 NR Description: hypothetical protein T4O24.3 [imported] -
  misc_feature (1)..(223): Homolog of NCBI NO: 10177798 NR Description: emb|CAB87778.1~gene_id:MXA21.9~strong similarity
  misc_feature (1)..(223): Homolog of NCBI NO: 15240861 NR Description: putative protein; protein id: At5g38220.1
MGYDYSGYGQSTGKASECNTYADIDAAYTCLKEHYGVKDDQLILYGQSVGSGPTIDLASRTPNLRGVVLHSPILSGMRVLYPVKRTYWFDIYKGTADEVVDCSHGKQLWELSKEKYEPLWVSGGGHCNLELYPEFIKHLKKYVISISKGPRTGSNKTATTDAAKKQSKPAENGRADTFQLGCCLPEVSRNSVDSQLEKSKKTSKPEKSRMSIDRFRRKKGSVW

SEQ ID NO: 43039 - DNA, 1192 bp, Arabidopsis thaliana
  misc_feature (1)..(1192): Ceres Seq. ID no. 14302709
  misc_feature: MA Experiment ID: 20000307 Result: Up-regulated in Transcription
  misc_feature: MA Experiment 20000307 PARAMETER Experiment Name: At_Germinating_Seeds_Sub_P Parameter: Age (hr) Value: 24 vs. 0
  misc_feature: MA Experiment 20000307 PARAMETER Experiment Name: At_Germinating_Seeds_Sub_P Parameter: Organism Value: A. thaliana
  misc_feature: MA Experiment 20000307 PARAMETER Experiment Name: At_Germinating_Seeds_Sub_P Parameter: Plant Line Value: WS
  misc_feature: MA Experiment 20000307 PARAMETER Experiment Name: At_Germinating_Seeds_Sub_P Parameter: Tissue Value: Germinating Seeds
  misc_feature: MA Experiment ID: 20000314 Result: Down-regulated in Transcription
  misc_feature: MA Experiment 20000314 PARAMETER Experiment Name: At_14day_Shoots-Roots_Sub_P Parameter: Age (day) Value: 14
  misc_feature: MA Experiment 20000314 PARAMETER Experiment Name: At_14day_Shoots-Roots_Sub_P Parameter: Organism Value: A. thaliana
  misc_feature: MA Experiment 20000314 PARAMETER Experiment Name: At_14day_Shoots-Roots_Sub_P Parameter: Plant Line Value: WS
  misc_feature: MA Experiment 20000314 PARAMETER Experiment Name: At_14day_Shoots-Roots_Sub_P Parameter: Tissue Value: Roots vs. Whole Plant
  misc_feature: MA Experiment ID: 20001807 Result: Up-regulated in Transcription
  misc_feature: MA Experiment 20001807 PARAMETER Experiment Name: At_50mM_NH4NO3_L-to-H_Sub_P Parameter: Timepoint (hr) Value: 6
  misc_feature: MA Experiment 20001807 PARAMETER Experiment Name: At_50mM_NH4NO3_L-to-H_Sub_P Parameter: Tissue Value: Leaf
  misc_feature: MA Experiment 20001807 PARAMETER Experiment Name: At_50mM_NH4NO3_L-to-H_Sub_P Parameter: Treatment Value: 50mM NH4NO3 vs 100mM Mannitol
actcatctctaacgtttctttctatctctaatccaagcaacaatatggattccgtaatcgctttcgacagatctccgatgtttcgagtctacaagagtggccgcattgagcgtctcttaggagaaacaaccgtcccaccatctcttacaccacaaaacggtgtcgtctccaaagatatcatccattcaccggagaaaaacctctccctccgcatctacctaccggagaaagtcactgttaaaaagctcccaatcctcatctacttccacggtggtggtttcatcatagaaacagctttttctccaccctaccacactttcctcacatccaccgtcgcggccgctaactgcttagcaatatcagtaaactatcgccgtgcaccggagtttccggtacctattccgtacgaagattcatgggattcactcaaatgggtgttaactcatatcacaggaaccggaccggaaacttggataaacaaacacggcgatttcggaaaagtgtttctcgccggagatagcgccggtggaaacatatctcatcatctaacgatgcgagcgaaaaaagagaagctttgtgattctttaatatcagggataatcttgattcatccatatttttggagtaagactccaattgatgagtttgaggttagagacgtggggaagacgaaaggtgttgaaggaagttggagagtcgcaagtccgaatagtaaacaaggagttgatgatccatggctcaacgttgtcggatcggatccatccggattaggttgcgggcgggttttggtaatggtagctggagatgatctgtttgtgagacaaggttggtgttacgcggagaagctgaagaagagtggatgggaaggtgaagttgaggtaatggaggctaaaaatgaaggtcatgtttttcatttgaagaatcctaatagtgataatgctcgtcaagtcgtgaagaaacttgaagagtttattaataagtaatattaatgagtacgtttgtcgaaggagataacaataactaaagaataaattggtgtatttgtcactgattacatatagaattatgctatcacatttagggttaaagccaagaggagtcagttaaagtttcagttacttttctttcaagtaactgatagaaagacgattaattgtattagtttgtggtaaataaatggtttggtttgaat

SEQ ID NO: 43040 - protein, 326 aa, Arabidopsis thaliana
  peptide (1)..(326): Ceres Seq. ID no. 14302710
  misc_feature (71)..(124): Pfam Name: Carboxylesterase Pfam Description: Carboxylesterase
  misc_feature (25)..(324): Homolog of NCBI NO: 15222791 NR Description: hypothetical protein [Arabidopsis thaliana]
  misc_feature (13)..(324): Homolog of NCBI NO: 18402731 NR Description: expressed protein [Arabidopsis thaliana]
  misc_feature (15)..(324): Homolog of NCBI NO: 15222795 NR Description: expressed protein [Arabidopsis thaliana]
  misc_feature (13)..(324): Homolog of NCBI NO: 21537287 NR Description: putative esterase [Arabidopsis thaliana]
  misc_feature (15)..(326): Homolog of NCBI NO: 15221975 NR Description: expressed protein [Arabidopsis thaliana]
  misc_feature (15)..(324): Homolog of NCBI NO: 15228426 NR Description: expressed protein [Arabidopsis thaliana]
  misc_feature (15)..(324): Homolog of NCBI NO: 18086341 NR Description: AT3g48690/T8P19_200 [Arabidopsis thaliana]
  misc_feature (15)..(324): Homolog of NCBI NO: 15228425 NR Description: expressed protein [Arabidopsis thaliana]
  misc_feature (19)..(326): Homolog of NCBI NO: 28393060 NR Description: putative esterase [Arabidopsis thaliana]
  misc_feature (15)..(326): Homolog of NCBI NO: 15227669 NR Description: expressed protein [Arabidopsis thaliana]
SSLTFLSISNPSNNMDSVIAFDRSPMFRVYKSGRIERLLGETTVPPSLTPQNGVVSKDIIHSPEKNLSLRIYLPEKVTVKKLPILIYFHGGGFIIETAFSPPYHTFLTSTVAAANCLAISVNYRRAPEFPVPIPYEDSWDSLKWVLTHITGTGPETWINKHGDFGKVFLAGDSAGGNISHHLTMRAKKEKLCDSLISGIILIHPYFWSKTPIDEFEVRDVGKTKGVEGSWRVASPNSKQGVDDPWLNVVGSDPSGLGCGRVLVMVAGDDLFVRQGWCYAEKLKKSGWEGEVEVMEAKNEGHVFHLKNPNSDNARQVVKKLEEFINK

SEQ ID NO: 43041 - protein, 312 aa, Arabidopsis thaliana
  peptide (1)..(312): Ceres Seq. ID no. 14302711
  misc_feature (57)..(110): Pfam Name: Carboxylesterase Pfam Description: Carboxylesterase
  misc_feature (11)..(310): Homolog of NCBI NO: 15222791 NR Description: hypothetical protein [Arabidopsis thaliana]
  misc_feature (1)..(310): Homolog of NCBI NO: 18402731 NR Description: expressed protein [Arabidopsis thaliana]
  misc_feature (1)..(310): Homolog of NCBI NO: 15222795 NR Description: expressed protein [Arabidopsis thaliana]
  misc_feature (1)..(310): Homolog of NCBI NO: 21537287 NR Description: putative esterase [Arabidopsis thaliana]
  misc_feature (1)..(312): Homolog of NCBI NO: 15221975 NR Description: expressed protein [Arabidopsis thaliana]
  misc_feature (1)..(310): Homolog of NCBI NO: 15228426 NR Description: expressed protein [Arabidopsis thaliana]
  misc_feature (1)..(310): Homolog of NCBI NO: 18086341 NR Description: AT3g48690/T8P19_200 [Arabidopsis thaliana]
  misc_feature (1)..(310): Homolog of NCBI NO: 15228425 NR Description: expressed protein [Arabidopsis thaliana]
  misc_feature (5)..(312): Homolog of NCBI NO: 28393060 NR Description: putative esterase [Arabidopsis thaliana]
  misc_feature (1)..(312): Homolog of NCBI NO: 15227669 NR Description: expressed protein [Arabidopsis thaliana]
MDSVIAFDRSPMFRVYKSGRIERLLGETTVPPSLTPQNGVVSKDIIHSPEKNLSLRIYLPEKVTVKKLPILIYFHGGGFIIETAFSPPYHTFLTSTVAAANCLAISVNYRRAPEFPVPIPYEDSWDSLKWVLTHITGTGPETWINKHGDFGKVFLAGDSAGGNISHHLTMRAKKEKLCDSLISGIILIHPYFWSKTPIDEFEVRDVGKTKGVEGSWRVASPNSKQGVDDPWLNVVGSDPSGLGCGRVLVMVAGDDLFVRQGWCYAEKLKKSGWEGEVEVMEAKNEGHVFHLKNPNSDNARQVVKKLEEFINK

SEQ ID NO: 43042 - protein, 301 aa, Arabidopsis thaliana
  peptide (1)..(301): Ceres Seq. ID no. 14302712
  misc_feature (46)..(99): Pfam Name: Carboxylesterase Pfam Description: Carboxylesterase
  misc_feature (1)..(299): Homolog of NCBI NO: 15222791 NR Description: hypothetical protein [Arabidopsis thaliana]
  misc_feature (1)..(299): Homolog of NCBI NO: 18402731 NR Description: expressed protein [Arabidopsis thaliana]
  misc_feature (1)..(299): Homolog of NCBI NO: 15222795 NR Description: expressed protein [Arabidopsis thaliana]
  misc_feature (1)..(299): Homolog of NCBI NO: 21537287 NR Description: putative esterase [Arabidopsis thaliana]
  misc_feature (1)..(301): Homolog of NCBI NO: 15221975 NR Description: expressed protein [Arabidopsis thaliana]
  misc_feature (1)..(299): Homolog of NCBI NO: 15228426 NR Description: expressed protein [Arabidopsis thaliana]
  misc_feature (1)..(299): Homolog of NCBI NO: 18086341 NR Description: AT3g48690/T8P19_200 [Arabidopsis thaliana]
  misc_feature (1)..(299): Homolog of NCBI NO: 15228425 NR Description: expressed protein [Arabidopsis thaliana]
  misc_feature (1)..(301): Homolog of NCBI NO: 28393060 NR Description: putative esterase [Arabidopsis thaliana]
  misc_feature (1)..(301): Homolog of NCBI NO: 15227669 NR Description: expressed protein [Arabidopsis thaliana]
MFRVYKSGRIERLLGETTVPPSLTPQNGVVSKDIIHSPEKNLSLRIYLPEKVTVKKLPILIYFHGGGFIIETAFSPPYHTFLTSTVAAANCLAISVNYRRAPEFPVPIPYEDSWDSLKWVLTHITGTGPETWINKHGDFGKVFLAGDSAGGNISHHLTMRAKKEKLCDSLISGIILIHPYFWSKTPIDEFEVRDVGKTKGVEGSWRVASPNSKQGVDDPWLNVVGSDPSGLGCGRVLVMVAGDDLFVRQGWCYAEKLKKSGWEGEVEVMEAKNEGHVFHLKNPNSDNARQVVKKLEEFINK

SEQ ID NO: 43043 - DNA, 1307 bp, Arabidopsis thaliana
  misc_feature (1)..(1307): Ceres Seq. ID no. 13647064
  misc_feature: MA Experiment ID: 20000496 Result: Up-regulated in Transcription
  misc_feature: MA Experiment 20000496 PARAMETER Experiment Name: At_Guard_Cells_P Parameter: Harvest Date Value: 7/19/2002
  misc_feature: MA Experiment 20000496 PARAMETER Experiment Name: At_Guard_Cells_P Parameter: Organism Value: Canola
  misc_feature: MA Experiment 20000496 PARAMETER Experiment Name: At_Guard_Cells_P Parameter: Tissue Value: Guard Cells vs. Leaves
  misc_feature: MA Experiment ID: 20000794 Result: Down-regulated in Transcription
  misc_feature: MA Experiment 20000794 PARAMETER Experiment Name: At_Petals_P Parameter: Age (day) Value: 23-25 days
  misc_feature: MA Experiment 20000794 PARAMETER Experiment Name: At_Petals_P Parameter: Plant Line Value: WS
  misc_feature: MA Experiment 20000794 PARAMETER Experiment Name: At_Petals_P Parameter: Tissue Value: Petals vs. Whole plant
  misc_feature: MA Experiment ID: 20001905 Result: Down-regulated in Transcription
  misc_feature: MA Experiment 20001905 PARAMETER Experiment Name: At_Drought_Reproduction_P Parameter: Age (day) Value: 40
  misc_feature: MA Experiment 20001905 PARAMETER Experiment Name: At_Drought_Reproduction_P Parameter: Organism Value: A. thaliana
  misc_feature: MA Experiment 20001905 PARAMETER Experiment Name: At_Drought_Reproduction_P Parameter: Plant Line Value: WS
  misc_feature: MA Experiment 20001905 PARAMETER Experiment Name: At_Drought_Reproduction_P Parameter: Timepoint (day) Value: 10
  misc_feature: MA Experiment 20001905 PARAMETER Experiment Name: At_Drought_Reproduction_P Parameter: Tissue Value: Rosettes
  misc_feature: MA Experiment 20001905 PARAMETER Experiment Name: At_Drought_Reproduction_P Parameter: Treatment Value: Drought vs. No Drought
tggtgagaaactcgatggcgaggaggcgacgttcatcggcggcggagagtttgaaacggcggaacgacggatacgagtcactgtgtcaagtcgtacaacaagattcagatcggagactcatcaccattttcgtaatcttcttcattgtgattcccgccgtttcgattgctgtgtacaaagtcaaattcgctgatcgagtcatccaaacggaatcatcaatacgtcaaaagggaatcgttaaaactgatattaatttccaagaaatcctcactgaacattccaaggcttcagagaattcaactaggcactatgattatccagtgttagcttacattactccatggaactctaaaggctatgatatggcaaagatattcaactcaaagtttacacatttatcgccggtatggtacgacctgaagagccaagggtctggattggttttggaagggagacataatgctgataagggatggattcaagagcttcggtcaagaggcaatgcactgatattaccaagagttgttctagaagcaattcctggggagatgcttaacaaaaaaaaactaagagagaaagctatcagtcttattgtcacagagtgcaaggaaatggaatacaatggtatcgtgttagagtcttggtcaaggtgggcagcttatggcgttttgcatgaccctgatttgcggaaaatggcactgaaattcgtaaaacaacttggagacgctcttcactcaacgagctcaccaagaaacaaccagcaacatatgcagttcatgtatgtcgttggtccgcctcgttcagagaagctccaaatgtacgattttgggccagaagatcttcaattcttgaaagattcggttgatgggttctctcttatgacctatgatttctcaaatccccagaaccctggccccaatgctcctgtcaagtggatagatttaactctcaagctcctgcttgggtcatccaacaacatagactcaaacatagccaggaaggttcttcttggtatcaacttttacggcaacgattttgtaatctctggagattcaggaggtggaggagcaatcaccggaagggattacctcgcattactccagaaacacaagccaactttccgttgggataaagagagcggcgaacatcttttcatgtatagagatgataagaacatcaagcatgctgttttctatcctacattgatgtcaatccttctacggcttgagaatgctcgtctctggggaatcggcatttcaatctgggaaatcggacaaggtttagattatttctttgatctattgtaa

SEQ ID NO: 43044 - protein, 434 aa, Arabidopsis thaliana
  peptide (1)..(434): Ceres Seq. ID no. 13647065
  misc_feature (217)..(426): Pfam Name: Glycosyl hydrolases family 18 Pfam Description: Glycosyl hydrolases family 18
  misc_feature (52)..(434): Homolog of NCBI NO: 13905168 NR Description: Similar to hypothetical protein MGC3234 [Mus
  misc_feature (271)..(434): Homolog of NCBI NO: 14585861 NR Description: hypothetical protein SB139 [Homo sapiens]
  misc_feature (69)..(247): Homolog of NCBI NO: 14585861 NR Description: hypothetical protein SB139 [Homo sapiens]
  misc_feature (271)..(434): Homolog of NCBI NO: 34861254 NR Description: similar to Cc1-9 [Rattus norvegicus]
  misc_feature (59)..(224): Homolog of NCBI NO: 34861254 NR Description: similar to Cc1-9 [Rattus norvegicus]
  misc_feature (68)..(434): Homolog of NCBI NO: 11034671 NR Description: P0407B12.10 [Oryza sativa (japonica
  misc_feature (95)..(434): Homolog of NCBI NO: 34912746 NR Description: B1040D09.22 [Oryza sativa (japonica
  misc_feature (5)..(272): Homolog of NCBI NO: 22135960 NR Description: unknown protein [Arabidopsis thaliana]
  misc_feature (1)..(430): Homolog of NCBI NO: 7485232 NR Description: hypothetical protein A_IG002N01.31 - Arabidopsis
  misc_feature (5)..(434): Homolog of NCBI NO: 15234049 NR Description: glycosyl hydrolase family 18 [Arabidopsis
VRNSMARRRRSSAAESLKRRNDGYESLCQVVQQDSDRRLITIFVIFFIVIPAVSIAVYKVKFADRVIQTESSIRQKGIVKTDINFQEILTEHSKASENSTRHYDYPVLAYITPWNSKGYDMAKIFNSKFTHLSPVWYDLKSQGSGLVLEGRHNADKGWIQELRSRGNALILPRVVLEAIPGEMLNKKKLREKAISLIVTECKEMEYNGIVLESWSRWAAYGVLHDPDLRKMALKFVKQLGDALHSTSSPRNNQQHMQFMYVVGPPRSEKLQMYDFGPEDLQFLKDSVDGFSLMTYDFSNPQNPGPNAPVKWIDLTLKLLLGSSNNIDSNIARKVLLGINFYGNDFVISGDSGGGGAITGRDYLALLQKHKPTFRWDKESGEHLFMYRDDKNIKHAVFYPTLMSILLRLENARLWGIGISIWEIGQGLDYFFDLL

SEQ ID NO: 43045 - protein, 430 aa, Arabidopsis thaliana
  peptide (1)..(430): Ceres Seq. ID no. 13647066
  misc_feature (213)..(422): Pfam Name: Glycosyl hydrolases family 18 Pfam Description: Glycosyl hydrolases family 18
  misc_feature (48)..(430): Homolog of NCBI NO: 13905168 NR Description: Similar to hypothetical protein MGC3234 [Mus
  misc_feature (267)..(430): Homolog of NCBI NO: 14585861 NR Description: hypothetical protein SB139 [Homo sapiens]
  misc_feature (65)..(243): Homolog of NCBI NO: 14585861 NR Description: hypothetical protein SB139 [Homo sapiens]
  misc_feature (267)..(430): Homolog of NCBI NO: 34861254 NR Description: similar to Cc1-9 [Rattus norvegicus]
  misc_feature (55)..(220): Homolog of NCBI NO: 34861254 NR Description: similar to Cc1-9 [Rattus norvegicus]
  misc_feature (64)..(430): Homolog of NCBI NO: 11034671 NR Description: P0407B12.10 [Oryza sativa (japonica
  misc_feature (91)..(430): Homolog of NCBI NO: 34912746 NR Description: B1040D09.22 [Oryza sativa (japonica
  misc_feature (1)..(268): Homolog of NCBI NO: 22135960 NR Description: unknown protein [Arabidopsis thaliana]
  misc_feature (1)..(426): Homolog of NCBI NO: 7485232 NR Description: hypothetical protein A_IG002N01.31 - Arabidopsis
  misc_feature (1)..(430): Homolog of NCBI NO: 15234049 NR Description: glycosyl hydrolase family 18 [Arabidopsis
MARRRRSSAAESLKRRNDGYESLCQVVQQDSDRRLITIFVIFFIVIPAVSIAVYKVKFADRVIQTESSIRQKGIVKTDINFQEILTEHSKASENSTRHYDYPVLAYITPWNSKGYDMAKIFNSKFTHLSPVWYDLKSQGSGLVLEGRHNADKGWIQELRSRGNALILPRVVLEAIPGEMLNKKKLREKAISLIVTECKEMEYNGIVLESWSRWAAYGVLHDPDLRKMALKFVKQLGDALHSTSSPRNNQQHMQFMYVVGPPRSEKLQMYDFGPEDLQFLKDSVDGFSLMTYDFSNPQNPGPNAPVKWIDLTLKLLLGSSNNIDSNIARKVLLGINFYGNDFVISGDSGGGGAITGRDYLALLQKHKPTFRWDKESGEHLFMYRDDKNIKHAVFYPTLMSILLRLENARLWGIGISIWEIGQGLDYFFDLL

SEQ ID NO: 43046 - protein, 314 aa, Arabidopsis thaliana
  peptide (1)..(314): Ceres Seq. ID no. 13647067
  misc_feature (97)..(306): Pfam Name: Glycosyl hydrolases family 18 Pfam Description: Glycosyl hydrolases family 18
  misc_feature (1)..(314): Homolog of NCBI NO: 13905168 NR Description: Similar to hypothetical protein MGC3234 [Mus
  misc_feature (151)..(314): Homolog of NCBI NO: 14585861 NR Description: hypothetical protein SB139 [Homo sapiens]
  misc_feature (1)..(127): Homolog of NCBI NO: 14585861 NR Description: hypothetical protein SB139 [Homo sapiens]
  misc_feature (151)..(314): Homolog of NCBI NO: 34861254 NR Description: similar to Cc1-9 [Rattus norvegicus]
  misc_feature (1)..(104): Homolog of NCBI NO: 34861254 NR Description: similar to Cc1-9 [Rattus norvegicus]
  misc_feature (1)..(314): Homolog of NCBI NO: 11034671 NR Description: P0407B12.10 [Oryza sativa (japonica
  misc_feature (1)..(314): Homolog of NCBI NO: 34912746 NR Description: B1040D09.22 [Oryza sativa (japonica
  misc_feature (1)..(152): Homolog of NCBI NO: 22135960 NR Description: unknown protein [Arabidopsis thaliana]
  misc_feature (1)..(310): Homolog of NCBI NO: 7485232 NR Description: hypothetical protein A_IG002N01.31 - Arabidopsis
  misc_feature (1)..(314): Homolog of NCBI NO: 15234049 NR Description: glycosyl hydrolase family 18 [Arabidopsis
MAKIFNSKFTHLSPVWYDLKSQGSGLVLEGRHNADKGWIQELRSRGNALILPRVVLEAIPGEMLNKKKLREKAISLIVTECKEMEYNGIVLESWSRWAAYGVLHDPDLRKMALKFVKQLGDALHSTSSPRNNQQHMQFMYVVGPPRSEKLQMYDFGPEDLQFLKDSVDGFSLMTYDFSNPQNPGPNAPVKWIDLTLKLLLGSSNNIDSNIARKVLLGINFYGNDFVISGDSGGGGAITGRDYLALLQKHKPTFRWDKESGEHLFMYRDDKNIKHAVFYPTLMSILLRLENARLWGIGISIWEIGQGLDYFFDLL

SEQ ID NO: 43047 - DNA, 1141 bp, Arabidopsis thaliana
  misc_feature (1)..(1141): Ceres Seq. ID no. 12395056
  misc_feature: MA Experiment ID: 108435 Result: Down-regulated in Transcription
  misc_feature: MA Experiment 108435 PARAMETER Experiment Name: At_stm_Mutants_cDNA_P Parameter: Plant Line Value: wt Landsburg vs stm
  misc_feature: MA Experiment 108435 PARAMETER Experiment Name: At_stm_Mutants_cDNA_P Parameter: Tissue Value: Shoot Apical Meristem Region
  misc_feature: MA Experiment ID: 108462 Result: Up-regulated in Transcription
  misc_feature: MA Experiment 108462 PARAMETER Experiment Name: At_Germinating_Seeds_cDNA_P Parameter: Age (day) Value: 2 vs. 0
  misc_feature: MA Experiment 108462 PARAMETER Experiment Name: At_Germinating_Seeds_cDNA_P Parameter: Tissue Value: Germinating Seeds
  misc_feature: MA Experiment ID: 108463 Result: Up-regulated in Transcription
  misc_feature: MA Experiment 108463 PARAMETER Experiment Name: At_Germinating_Seeds_cDNA_P Parameter: Age (day) Value: 3 vs. 0
  misc_feature: MA Experiment 108463 PARAMETER Experiment Name: At_Germinating_Seeds_cDNA_P Parameter: Tissue Value: Germinating Seeds
  misc_feature: MA Experiment ID: 108464 Result: Up-regulated in Transcription
  misc_feature: MA Experiment 108464 PARAMETER Experiment Name: At_Germinating_Seeds_cDNA_P Parameter: Age (day) Value: 4 vs. 0
  misc_feature: MA Experiment 108464 PARAMETER Experiment Name: At_Germinating_Seeds_cDNA_P Parameter: Tissue Value: Germinating Seeds
  misc_feature: MA Experiment ID: 108501 Result: Up-regulated in Transcription
  misc_feature: MA Experiment 108501 PARAMETER Experiment Name: At_ap2_floral_buds_cDNA_P Parameter: Plant Line Value: ap2 (Ler.)
  misc_feature: MA Experiment 108501 PARAMETER Experiment Name: At_ap2_floral_buds_cDNA_P Parameter: Tissue Value: Closed Flower
  misc_feature: MA Experiment ID: 108577 Result: Down-regulated in Transcription
  misc_feature: MA Experiment 108577 PARAMETER Experiment Name: At_42deg_Heat_cDNA_P Parameter: Temperature (deg C) Value: 42 vs. 22
  misc_feature: MA Experiment 108577 PARAMETER Experiment Name: At_42deg_Heat_cDNA_P Parameter: Timepoint (hr) Value: 6
  misc_feature: MA Experiment 108577 PARAMETER Experiment Name: At_42deg_Heat_cDNA_P Parameter: Tissue Value: Aerial
  misc_feature: MA Experiment ID: 20000089 Result: Down-regulated in Transcription
  misc_feature: MA Experiment ID: 20000111 Result: Down-regulated in Transcription
  misc_feature: MA Experiment 20000111 PARAMETER Experiment Name: At_42deg_Heat_cDNA_P Parameter: Temperature (deg C) Value: 42 vs. 22
  misc_feature: MA Experiment 20000111 PARAMETER Experiment Name: At_42deg_Heat_cDNA_P Parameter: Timepoint (hr) Value: 6
  misc_feature: MA Experiment 20000111 PARAMETER Experiment Name: At_42deg_Heat_cDNA_P Parameter: Tissue Value: Aerial
  misc_feature: MA Experiment ID: 20000112 Result: Down-regulated in Transcription
  misc_feature: MA Experiment 20000112 PARAMETER Experiment Name: At_42deg_Heat_cDNA_P Parameter: Temperature (deg C) Value: 42 vs. 22
  misc_feature: MA Experiment 20000112 PARAMETER Experiment Name: At_42deg_Heat_cDNA_P Parameter: Timepoint (hr) Value: 2
  misc_feature: MA Experiment 20000112 PARAMETER Experiment Name: At_42deg_Heat_cDNA_P Parameter: Tissue Value: Aerial
  misc_feature: MA Experiment ID: 20000113 Result: Down-regulated in Transcription
  misc_feature: MA Experiment 20000113 PARAMETER Experiment Name: At_42deg_Heat_cDNA_P Parameter: Temperature (deg C) Value: 42 vs. 22
  misc_feature: MA Experiment 20000113 PARAMETER Experiment Name: At_42deg_Heat_cDNA_P Parameter: Timepoint (hr) Value: 8
  misc_feature: MA Experiment 20000113 PARAMETER Experiment Name: At_42deg_Heat_cDNA_P Parameter: Tissue Value: Aerial
  misc_feature: MA Experiment ID: 20000144 Result: Down-regulated in Transcription
  misc_feature: MA Experiment 20000144 PARAMETER Experiment Name: At_42deg_Heat_cDNA_P Parameter: Temperature (deg C) Value: 42 vs. 22
  misc_feature: MA Experiment 20000144 PARAMETER Experiment Name: At_42deg_Heat_cDNA_P Parameter: Timepoint (hr) Value: 1
  misc_feature: MA Experiment 20000144 PARAMETER Experiment Name: At_42deg_Heat_cDNA_P Parameter: Tissue Value: Aerial
  misc_feature: MA Experiment ID: 20000171 Result: Down-regulated in Transcription
  misc_feature: MA Experiment 20000171 PARAMETER Experiment Name: At_42deg_Heat_P Parameter: Age (day) Value: 14
  misc_feature: MA Experiment 20000171 PARAMETER Experiment Name: At_42deg_Heat_P Parameter: Organism Value: A. thaliana
  misc_feature: MA Experiment 20000171 PARAMETER Experiment Name: At_42deg_Heat_P Parameter: Plant Line Value: WS
  misc_feature: MA Experiment 20000171 PARAMETER Experiment Name: At_42deg_Heat_P Parameter: Temperature (deg C) Value: 42 vs. 22
  misc_feature: MA Experiment 20000171 PARAMETER Experiment Name: At_42deg_Heat_P Parameter: Timepoint (hr) Value: 1
  misc_feature: MA Experiment 20000171 PARAMETER Experiment Name: At_42deg_Heat_P Parameter: Tissue Value: Aerial
  misc_feature: MA Experiment ID: 20000173 Result: Down-regulated in Transcription
  misc_feature: MA Experiment 20000173 PARAMETER Experiment Name: At_42deg_Heat_P Parameter: Age (day) Value: 14
  misc_feature: MA Experiment 20000173 PARAMETER Experiment Name: At_42deg_Heat_P Parameter: Organism Value: A. thaliana
  misc_feature: MA Experiment 20000173 PARAMETER Experiment Name: At_42deg_Heat_P Parameter: Plant Line Value: WS
  misc_feature: MA Experiment 20000173 PARAMETER Experiment Name: At_42deg_Heat_P Parameter: Temperature (deg C) Value: 42 vs. 22
  misc_feature: MA Experiment 20000173 PARAMETER Experiment Name: At_42deg_Heat_P Parameter: Timepoint (hr) Value: 6
  misc_feature: MA Experiment 20000173 PARAMETER Experiment Name: At_42deg_Heat_P Parameter: Tissue Value: Aerial
  misc_feature: MA Experiment ID: 20000184 Result: Up-regulated in Transcription
  misc_feature: MA Experiment 20000184 PARAMETER Experiment Name: At_Shoots__P Parameter: Age (day) Value: 7
  misc_feature: MA Experiment 20000184 PARAMETER Experiment Name: At_Shoots__P Parameter: Tissue Value: Shoots vs. Whole Plant
  misc_feature: MA Experiment ID: 20000438 Result: Up-regulated in Transcription
  misc_feature: MA Experiment 20000438 PARAMETER Experiment Name: At_Shoots__P Parameter: Age (day) Value: 14
  misc_feature: MA Experiment 20000438 PARAMETER Experiment Name: At_Shoots__P Parameter: Tissue Value: Shoots vs. Whole Plant
  misc_feature: MA Experiment ID: 20000439 Result: Down-regulated in Transcription
  misc_feature: MA Experiment 20000439 PARAMETER Experiment Name: At_Roots__P Parameter: Age (day) Value: 14 vs. 21
  misc_feature: MA Experiment 20000439 PARAMETER Experiment Name: At_Roots__P Parameter: Organism Value: A. thaliana
  misc_feature: MA Experiment 20000439 PARAMETER Experiment Name: At_Roots__P Parameter: Tissue Value: Roots vs. Whole Plant
  misc_feature: MA Experiment ID: 20000455 Result: Up-regulated in Transcription
  misc_feature: MA Experiment 20000455 PARAMETER Experiment Name: At_100uM_ABA_P Parameter: Age (day) Value: 16
  misc_feature: MA Experiment 20000455 PARAMETER Experiment Name: At_100uM_ABA_P Parameter: Organism Value: A. thaliana
  misc_feature: MA Experiment 20000455 PARAMETER Experiment Name: At_100uM_ABA_P Parameter: Plant Line Value: WS
  misc_feature: MA Experiment 20000455 PARAMETER Experiment Name: At_100uM_ABA_P Parameter: Timepoint (hr) Value: 48
  misc_feature: MA Experiment 20000455 PARAMETER Experiment Name: At_100uM_ABA_P Parameter: Tissue Value: Aerial
  misc_feature: MA Experiment 20000455 PARAMETER Experiment Name: At_100uM_ABA_P Parameter: Treatment Value: 100uM ABA vs. No Treatment
  misc_feature: MA Experiment ID: 20000496 Result: Up-regulated in Transcription
  misc_feature: MA Experiment 20000496 PARAMETER Experiment Name: At_Guard_Cells_P Parameter: Harvest Date Value: 7/19/2002
  misc_feature: MA Experiment 20000496 PARAMETER Experiment Name: At_Guard_Cells_P Parameter: Organism Value: Canola
  misc_feature: MA Experiment 20000496 PARAMETER Experiment Name: At_Guard_Cells_P Parameter: Tissue Value: Guard Cells vs. Leaves
  misc_feature: MA Experiment ID: 20001554 Result: Up-regulated in Transcription
  misc_feature: MA Experiment 20001554 PARAMETER Experiment Name: At_Drought_Soil_Dry_P Parameter: Age (day) Value: 21
  misc_feature: MA Experiment 20001554 PARAMETER Experiment Name: At_Drought_Soil_Dry_P Parameter: Organism Value: A. thaliana
  misc_feature: MA Experiment 20001554 PARAMETER Experiment Name: At_Drought_Soil_Dry_P Parameter: Plant Line Value: WS
  misc_feature: MA Experiment 20001554 PARAMETER Experiment Name: At_Drought_Soil_Dry_P Parameter: Post Timepoint (hr) Value: None
  misc_feature: MA Experiment 20001554 PARAMETER Experiment Name: At_Drought_Soil_Dry_P Parameter: Post-Treatment Value: None
  misc_feature: MA Experiment 20001554 PARAMETER Experiment Name: At_Drought_Soil_Dry_P Parameter: Timepoint (day) Value: 7
  misc_feature: MA Experiment 20001554 PARAMETER Experiment Name: At_Drought_Soil_Dry_P Parameter: Treatment Value: Drought vs. No Drought
  misc_feature: MA Experiment ID: 20001905 Result: Down-regulated in Transcription
  misc_feature: MA Experiment 20001905 PARAMETER Experiment Name: At_Drought_Reproduction_P Parameter: Age (day) Value: 40
  misc_feature: MA Experiment 20001905 PARAMETER Experiment Name: At_Drought_Reproduction_P Parameter: Organism Value: A. thaliana
  misc_feature: MA Experiment 20001905 PARAMETER Experiment Name: At_Drought_Reproduction_P Parameter: Plant Line Value: WS
  misc_feature: MA Experiment 20001905 PARAMETER Experiment Name: At_Drought_Reproduction_P Parameter: Timepoint (day) Value: 10
  misc_feature: MA Experiment 20001905 PARAMETER Experiment Name: At_Drought_Reproduction_P Parameter: Tissue Value: Rosettes
  misc_feature: MA Experiment 20001905 PARAMETER Experiment Name: At_Drought_Reproduction_P Parameter: Treatment Value: Drought vs. No Drought
aagtcatcttctctctctttttttagtgtgtgcaaagtcatcttctcttttaatatttacctaaaattccaaacaaaagagaacgttatgaaaccaaagagcaaagttgcagaatctacagctgcatcatgttttctcgtcatgagcttgttatgcagctgcattattggtgaccaaatggagactaataatgaaggcttgtcttacagttactacgagaaaacttgtcccaaagtcgaagagatagtgagatcttcactttcatcaatgtttatacttgatcctacttctcctgcagccttgctaaggcttatgtttcatgactgccaagttcagggatgtgacgcatctatcctactcgagccaattagagaccaacagttcaccgagcttgattcagccaagaacttcggaatcagaaagagggacctggttggctctatcaaaacctcactagagcttgagtgtcccaagcaagtctcatgctctgacgtcatcatcctcgccgccagagacgccgtggctctcacgggaggcccactcatctccgtgccattaggacgaaaagactccctctccactccaagcaaacacgtggcagactctgagcttcctccctccactgctgacgttgacactaccttaagcctattcgctaacaaaggcatgaccatcgaagagtccgtggccatcatgggtgcacatacgataggagtcacacattgcaacaacgtattatcgcgtttcgataacgcaaacgcgacaagcgagaacatggatccacgttttcaaacgttcttgcgtgttgcttgtccagagttttctccaacttctcaagctgccgaagccacatttgtccccaacgatcaaacttcggtgatcttcgatacagcttattacgatgatgccatcgcgggacgtggcaatcttaggattgactcggagattggagctgatccacgtacacgtccatttgtggaagcgtttgcagctgatcaagaccgtttcttcaacgccttctcttccgcgtttgtaaaattgtcgtcttacaaagtgttaaccgggaatgaaggagtaattagaagcgtgtgtgacaaggttgattgatgtatatttataattatcaaatgttaaaaatatt

SEQ ID NO: 43048 - protein, 368 aa, Arabidopsis thaliana
  peptide (1)..(368): Ceres Seq. ID no. 12395057
  misc_feature (46)..(368): Homolog of NCBI NO: 15242580 NR Description: peroxidase, putative; protein id: At5g40150.1
  misc_feature (35)..(368): Homolog of NCBI NO: 23821326 NR Description: peroxidase 1 [Marchantia polymorpha]
  misc_feature (48)..(368): Homolog of NCBI NO: 7670031 NR Description: peroxidase-like protein [Arabidopsis thaliana]
  misc_feature (30)..(368): Homolog of NCBI NO: 18401360 NR Description: peroxidase, putative
KSSSLSFFSVCKVIFSFNIYLKFQTKENVMKPKSKVAESTAASCFLVMSLLCSCIIGDQMETNNEGLSYSYYEKTCPKVEEIVRSSLSSMFILDPTSPAALLRLMFHDCQVQGCDASILLEPIRDQQFTELDSAKNFGIRKRDLVGSIKTSLELECPKQVSCSDVIILAARDAVALTGGPLISVPLGRKDSLSTPSKHVADSELPPSTADVDTTLSLFANKGMTIEESVAIMGAHTIGVTHCNNVLSRFDNANATSENMDPRFQTFLRVACPEFSPTSQAAEATFVPNDQTSVIFDTAYYDDAIAGRGNLRIDSEIGADPRTRPFVEAFAADQDRFFNAFSSAFVKLSSYKVLTGNEGVIRSVCDKVD

SEQ ID NO: 43049 - protein, 339 aa, Arabidopsis thaliana
  peptide (1)..(339): Ceres Seq. ID no. 12395058
  misc_feature (17)..(339): Homolog of NCBI NO: 15242580 NR Description: peroxidase, putative; protein id: At5g40150.1
  misc_feature (6)..(339): Homolog of NCBI NO: 23821326 NR Description: peroxidase 1 [Marchantia polymorpha]
  misc_feature (19)..(339): Homolog of NCBI NO: 7670031 NR Description: peroxidase-like protein [Arabidopsis thaliana]
  misc_feature (1)..(339): Homolog of NCBI NO: 18401360 NR Description: peroxidase, putative
MKPKSKVAESTAASCFLVMSLLCSCIIGDQMETNNEGLSYSYYEKTCPKVEEIVRSSLSSMFILDPTSPAALLRLMFHDCQVQGCDASILLEPIRDQQFTELDSAKNFGIRKRDLVGSIKTSLELECPKQVSCSDVIILAARDAVALTGGPLISVPLGRKDSLSTPSKHVADSELPPSTADVDTTLSLFANKGMTIEESVAIMGAHTIGVTHCNNVLSRFDNANATSENMDPRFQTFLRVACPEFSPTSQAAEATFVPNDQTSVIFDTAYYDDAIAGRGNLRIDSEIGADPRTRPFVEAFAADQDRFFNAFSSAFVKLSSYKVLTGNEGVIRSVCDKVD

SEQ ID NO: 43050 - protein, 321 aa, Arabidopsis thaliana
  peptide (1)..(321): Ceres Seq. ID no. 12395059
  misc_feature (1)..(321): Homolog of NCBI NO: 15242580 NR Description: peroxidase, putative; protein id: At5g40150.1
  misc_feature (1)..(321): Homolog of NCBI NO: 23821326 NR Description: peroxidase 1 [Marchantia polymorpha]
  misc_feature (1)..(321): Homolog of NCBI NO: 7670031 NR Description: peroxidase-like protein [Arabidopsis thaliana]
  misc_feature (1)..(321): Homolog of NCBI NO: 18401360 NR Description: peroxidase, putative
MSLLCSCIIGDQMETNNEGLSYSYYEKTCPKVEEIVRSSLSSMFILDPTSPAALLRLMFHDCQVQGCDASILLEPIRDQQFTELDSAKNFGIRKRDLVGSIKTSLELECPKQVSCSDVIILAARDAVALTGGPLISVPLGRKDSLSTPSKHVADSELPPSTADVDTTLSLFANKGMTIEESVAIMGAHTIGVTHCNNVLSRFDNANATSENMDPRFQTFLRVACPEFSPTSQAAEATFVPNDQTSVIFDTAYYDDAIAGRGNLRIDSEIGADPRTRPFVEAFAADQDRFFNAFSSAFVKLSSYKVLTGNEGVIRSVCDKVD

SEQ ID NO: 43051 - DNA, 1111 bp, Arabidopsis thaliana
  misc_feature (1)..(1111): Ceres Seq. ID no. 12370933
  misc_feature: MA Experiment ID: 20000030 Result: Up-regulated in Transcription
  misc_feature: MA Experiment 20000030 PARAMETER Experiment Name: At_CS6630_Roots_cDNA_P Parameter: Plant Line Value: CS6630 vs. WS
  misc_feature: MA Experiment 20000030 PARAMETER Experiment Name: At_CS6630_Roots_cDNA_P Parameter: Tissue Value: Roots
  misc_feature: MA Experiment ID: 20000068 Result: Up-regulated in Transcription
  misc_feature: MA Experiment ID: 20000306 Result: Up-regulated in Transcription
  misc_feature: MA Experiment 20000306 PARAMETER Experiment Name: At_Germinating_Seeds_Sub_P Parameter: Age (hr) Value: 6 vs. 0
  misc_feature: MA Experiment 20000306 PARAMETER Experiment Name: At_Germinating_Seeds_Sub_P Parameter: Organism Value: A. thaliana
  misc_feature: MA Experiment 20000306 PARAMETER Experiment Name: At_Germinating_Seeds_Sub_P Parameter: Plant Line Value: WS
  misc_feature: MA Experiment 20000306 PARAMETER Experiment Name: At_Germinating_Seeds_Sub_P Parameter: Tissue Value: Germinating Seeds
  misc_feature: MA Experiment ID: 20000307 Result: Up-regulated in Transcription
  misc_feature: MA Experiment 20000307 PARAMETER Experiment Name: At_Germinating_Seeds_Sub_P Parameter: Age (hr) Value: 24 vs. 0
  misc_feature: MA Experiment 20000307 PARAMETER Experiment Name: At_Germinating_Seeds_Sub_P Parameter: Organism Value: A. thaliana
  misc_feature: MA Experiment 20000307 PARAMETER Experiment Name: At_Germinating_Seeds_Sub_P Parameter: Plant Line Value: WS
  misc_feature: MA Experiment 20000307 PARAMETER Experiment Name: At_Germinating_Seeds_Sub_P Parameter: Tissue Value: Germinating Seeds
  misc_feature: MA Experiment ID: 20000314 Result: Up-regulated in Transcription
  misc_feature: MA Experiment 20000314 PARAMETER Experiment Name: At_14day_Shoots-Roots_Sub_P Parameter: Age (day) Value: 14
  misc_feature: MA Experiment 20000314 PARAMETER Experiment Name: At_14day_Shoots-Roots_Sub_P Parameter: Organism Value: A. thaliana
  misc_feature: MA Experiment 20000314 PARAMETER Experiment Name: At_14day_Shoots-Roots_Sub_P Parameter: Plant Line Value: WS
  misc_feature: MA Experiment 20000314 PARAMETER Experiment Name: At_14day_Shoots-Roots_Sub_P Parameter: Tissue Value: Roots vs. Whole Plant
  misc_feature: MA Experiment ID: 20000315 Result: Down-regulated in Transcription
  misc_feature: MA Experiment 20000315 PARAMETER Experiment Name: At_14day_Shoots-Roots_Sub_P Parameter: Age (day) Value: 14
  misc_feature: MA Experiment 20000315 PARAMETER Experiment Name: At_14day_Shoots-Roots_Sub_P Parameter: Organism Value: A. thaliana
  misc_feature: MA Experiment 20000315 PARAMETER Experiment Name: At_14day_Shoots-Roots_Sub_P Parameter: Plant Line Value: WS
  misc_feature: MA Experiment 20000315 PARAMETER Experiment Name: At_14day_Shoots-Roots_Sub_P Parameter: Tissue Value: Shoots vs. Whole Plant
gcttagaattattgattgcattgcaagaaacaagactaatgatgacccaaaaaccacgaactgtgatctgcgtcggagacatccatggaaacatatcaaagctcaataaactctggcttaatcttcaatccgatatccaaaactcagatttcagctcagctctcgtcatcttcctcggcgactactgcgatcgtggaccggagactcgaaaagtcatcgacttcttgatctctttgccggagaaacatcccgatcagacccatgtctttcttgccggaaaccacgactttgcttttgctggcttcttgggtttgttacctcgcccttcagatgggtctgagtttaaggaaacgtggaaagagtactcaaaaagtgaggaaagagaaggatggtataaaggtgaagggtttgagaatatgcatctccaaagcaggagatgggcgggaaagattagggttcagttcgattattccgcatatggagtgttgtataatggatcaatatacgatgcggcgtctacttttgaatcttatggcgttcctcatggatcttctgatttgataaaggcagtacctgagagtcacaagaaattcttgaccaatatggtttgggtacataaagaggatgatgtttgtatagaaacagaggaaggccttacgcattgtaagttgattgccgtacatgctggtctagagacaaagaataacgtagaagaacagcttaaactattgagagataaagacacaagcatcccaagaatacaacctctaactggtcggaaaaccgtttgggggatcccacaggaactggatgataaaaagactattgttgttagcggccaccatgggaaacttcacatcgatggcttgagattgatcatcgatgaaggtggtggatatactgatacacctttggctgcaattgttcttccttctaagaagattatccgcgacaccgataatttttccaattaagtatatcatgtcttcatattaaaattgaaacttctagtagtttttgtgattgttctgttgttactttttaattagtgtttcggtcttttccgctacttgtataacttgataatttttttccaaaattagaaaatggt

SEQ ID NO: 43052 - protein, 323 aa, Arabidopsis thaliana
  peptide (1)..(323): Ceres Seq. ID no. 12370934
  misc_feature (19)..(284): Pfam Name: Calcineurin-like phosphoesterase Pfam Description: Calcineurin-like phosphoesterase
  misc_feature (21)..(114): Homolog of NCBI NO: 27377467 NR Description: serine/threonine protein phosphatase I
  misc_feature (21)..(102): Homolog of NCBI NO: 29653830 NR Description: serine/threonine protein phosphatase [Coxiella
  misc_feature (24)..(108): Homolog of NCBI NO: 13475753 NR Description: serine/threonine protein phosphatase
  misc_feature (173)..(323): Homolog of NCBI NO: 19424085 NR Description: unknown protein [Arabidopsis thaliana]
  misc_feature (18)..(323): Homolog of NCBI NO: 38347604 NR Description: OSJNBa0042I15.17 [Oryza sativa (japonica
  misc_feature (14)..(323): Homolog of NCBI NO: 21618122 NR Description: unknown [Arabidopsis thaliana]
  misc_feature (14)..(323): Homolog of NCBI NO: 18398699 NR Description: expressed protein
  misc_feature (14)..(323): Homolog of NCBI NO: 6143880 NR Description: unknown protein [Arabidopsis thaliana]
  misc_feature (13)..(323): Homolog of NCBI NO: 18398696 NR Description: expressed protein
LELLIALQETRLMMTQKPRTVICVGDIHGNISKLNKLWLNLQSDIQNSDFSSALVIFLGDYCDRGPETRKVIDFLISLPEKHPDQTHVFLAGNHDFAFAGFLGLLPRPSDGSEFKETWKEYSKSEEREGWYKGEGFENMHLQSRRWAGKIRVQFDYSAYGVLYNGSIYDAASTFESYGVPHGSSDLIKAVPESHKKFLTNMVWVHKEDDVCIETEEGLTHCKLIAVHAGLETKNNVEEQLKLLRDKDTSIPRIQPLTGRKTVWGIPQELDDKKTIVVSGHHGKLHIDGLRLIIDEGGGYTDTPLAAIVLPSKKIIRDTDNFSN

SEQ ID NO: 43053 - protein, 311 aa, Arabidopsis thaliana
  peptide (1)..(311): Ceres Seq. ID no. 12370935
  misc_feature (7)..(272): Pfam Name: Calcineurin-like phosphoesterase Pfam Description: Calcineurin-like phosphoesterase
  misc_feature (9)..(102): Homolog of NCBI NO: 27377467 NR Description: serine/threonine protein phosphatase I
  misc_feature (9)..(90): Homolog of NCBI NO: 29653830 NR Description: serine/threonine protein phosphatase [Coxiella
  misc_feature (12)..(96): Homolog of NCBI NO: 13475753 NR Description: serine/threonine protein phosphatase
  misc_feature (161)..(311): Homolog of NCBI NO: 19424085 NR Description: unknown protein [Arabidopsis thaliana]
  misc_feature (6)..(311): Homolog of NCBI NO: 38347604 NR Description: OSJNBa0042I15.17 [Oryza sativa (japonica
  misc_feature (2)..(311): Homolog of NCBI NO: 21618122 NR Description: unknown [Arabidopsis thaliana]
  misc_feature (2)..(311): Homolog of NCBI NO: 18398699 NR Description: expressed protein
  misc_feature (2)..(311): Homolog of NCBI NO: 6143880 NR Description: unknown protein [Arabidopsis thaliana]
  misc_feature (1)..(311): Homolog of NCBI NO: 18398696 NR Description: expressed protein
MMTQKPRTVICVGDIHGNISKLNKLWLNLQSDIQNSDFSSALVIFLGDYCDRGPETRKVIDFLISLPEKHPDQTHVFLAGNHDFAFAGFLGLLPRPSDGSEFKETWKEYSKSEEREGWYKGEGFENMHLQSRRWAGKIRVQFDYSAYGVLYNGSIYDAASTFESYGVPHGSSDLIKAVPESHKKFLTNMVWVHKEDDVCIETEEGLTHCKLIAVHAGLETKNNVEEQLKLLRDKDTSIPRIQPLTGRKTVWGIPQELDDKKTIVVSGHHGKLHIDGLRLIIDEGGGYTDTPLAAIVLPSKKIIRDTDNFSN

SEQ ID NO: 43054 - protein, 310 aa, Arabidopsis thaliana
  peptide (1)..(310): Ceres Seq. ID no. 12370936
  misc_feature (6)..(271): Pfam Name: Calcineurin-like phosphoesterase Pfam Description: Calcineurin-like phosphoesterase
  misc_feature (8)..(101): Homolog of NCBI NO: 27377467 NR Description: serine/threonine protein phosphatase I
  misc_feature (8)..(89): Homolog of NCBI NO: 29653830 NR Description: serine/threonine protein phosphatase [Coxiella
  misc_feature (11)..(95): Homolog of NCBI NO: 13475753 NR Description: serine/threonine protein phosphatase
  misc_feature (160)..(310): Homolog of NCBI NO: 19424085 NR Description: unknown protein [Arabidopsis thaliana]
  misc_feature (5)..(310): Homolog of NCBI NO: 38347604 NR Description: OSJNBa0042I15.17 [Oryza sativa (japonica
  misc_feature (1)..(310): Homolog of NCBI NO: 21618122 NR Description: unknown [Arabidopsis thaliana]
  misc_feature (1)..(310): Homolog of NCBI NO: 18398699 NR Description: expressed protein
  misc_feature (1)..(310): Homolog of NCBI NO: 6143880 NR Description: unknown protein [Arabidopsis thaliana]
  misc_feature (1)..(310): Homolog of NCBI NO: 18398696 NR Description: expressed protein
MTQKPRTVICVGDIHGNISKLNKLWLNLQSDIQNSDFSSALVIFLGDYCDRGPETRKVIDFLISLPEKHPDQTHVFLAGNHDFAFAGFLGLLPRPSDGSEFKETWKEYSKSEEREGWYKGEGFENMHLQSRRWAGKIRVQFDYSAYGVLYNGSIYDAASTFESYGVPHGSSDLIKAVPESHKKFLTNMVWVHKEDDVCIETEEGLTHCKLIAVHAGLETKNNVEEQLKLLRDKDTSIPRIQPLTGRKTVWGIPQELDDKKTIVVSGHHGKLHIDGLRLIIDEGGGYTDTPLAAIVLPSKKIIRDTDNFSN

SEQ ID NO: 43055 - DNA, 1408 bp, Arabidopsis thaliana
  misc_feature (1)..(1408): Ceres Seq. ID no. 13646047
  misc_feature: MA Experiment ID: 108434 Result: Down-regulated in Transcription
  misc_feature: MA Experiment 108434 PARAMETER Experiment Name: At_Root_Tips_cDNA_P Parameter: Tissue Value: Root Tips
  misc_feature: MA Experiment ID: 108462 Result: Up-regulated in Transcription
  misc_feature: MA Experiment 108462 PARAMETER Experiment Name: At_Germinating_Seeds_cDNA_P Parameter: Age (day) Value: 2 vs. 0
  misc_feature: MA Experiment 108462 PARAMETER Experiment Name: At_Germinating_Seeds_cDNA_P Parameter: Tissue Value: Germinating Seeds
  misc_feature: MA Experiment ID: 108463 Result: Up-regulated in Transcription
  misc_feature: MA Experiment 108463 PARAMETER Experiment Name: At_Germinating_Seeds_cDNA_P Parameter: Age (day) Value: 3 vs. 0
  misc_feature: MA Experiment 108463 PARAMETER Experiment Name: At_Germinating_Seeds_cDNA_P Parameter: Tissue Value: Germinating Seeds
  misc_feature: MA Experiment ID: 108464 Result: Up-regulated in Transcription
  misc_feature: MA Experiment 108464 PARAMETER Experiment Name: At_Germinating_Seeds_cDNA_P Parameter: Age (day) Value: 4 vs. 0
  misc_feature: MA Experiment 108464 PARAMETER Experiment Name: At_Germinating_Seeds_cDNA_P Parameter: Tissue Value: Germinating Seeds
  misc_feature: MA Experiment ID: 108489 Result: Up-regulated in Transcription
  misc_feature: MA Experiment ID: 108573 Result: Up-regulated in Transcription
  misc_feature: MA Experiment 108573 PARAMETER Experiment Name: At_Drought_cDNA_P Parameter: Timepoint (hr) Value: 6
  misc_feature: MA Experiment 108573 PARAMETER Experiment Name: At_Drought_cDNA_P Parameter: Tissue Value: Aerial
  misc_feature: MA Experiment 108573 PARAMETER Experiment Name: At_Drought_cDNA_P Parameter: Treatment Value: Drought vs. No Drought
  misc_feature: MA Experiment ID: 108577 Result: Down-regulated in Transcription
  misc_feature: MA Experiment 108577 PARAMETER Experiment Name: At_42deg_Heat_cDNA_P Parameter: Temperature (deg C) Value: 42 vs. 22
  misc_feature: MA Experiment 108577 PARAMETER Experiment Name: At_42deg_Heat_cDNA_P Parameter: Timepoint (hr) Value: 6
  misc_feature: MA Experiment 108577 PARAMETER Experiment Name: At_42deg_Heat_cDNA_P Parameter: Tissue Value: Aerial
  misc_feature: MA Experiment ID: 108579 Result: Up-regulated in Transcription
  misc_feature: MA Experiment 108579 PARAMETER Experiment Name: At_4deg_Cold_cDNA_P Parameter: Temperature (deg C) Value: 4 vs. 22
  misc_feature: MA Experiment 108579 PARAMETER Experiment Name: At_4deg_Cold_cDNA_P Parameter: Timepoint (hr) Value: 6
  misc_feature: MA Experiment 108579 PARAMETER Experiment Name: At_4deg_Cold_cDNA_P Parameter: Tissue Value: Aerial
  misc_feature: MA Experiment ID: 108585 Result: Up-regulated in Transcription
  misc_feature: MA Experiment 108585 PARAMETER Experiment Name: At_5mM_NaNP_cDNA_P Parameter: Timepoint (hr) Value: 6
  misc_feature: MA Experiment 108585 PARAMETER Experiment Name: At_5mM_NaNP_cDNA_P Parameter: Tissue Value: Aerial
  misc_feature: MA Experiment 108585 PARAMETER Experiment Name: At_5mM_NaNP_cDNA_P Parameter: Treatment Value: null
  misc_feature: MA Experiment ID: 20000224 Result: Down-regulated in Transcription
  misc_feature: MA Experiment ID: 20000328 Result: Down-regulated in Transcription
  misc_feature: MA Experiment 20000328 PARAMETER Experiment Name: At_42deg_Heat_Sub_P Parameter: Age (day) Value: 14
  misc_feature: MA Experiment 20000328 PARAMETER Experiment Name: At_42deg_Heat_Sub_P Parameter: Organism Value: A. thaliana
  misc_feature: MA Experiment 20000328 PARAMETER Experiment Name: At_42deg_Heat_Sub_P Parameter: Plant Line Value: WS
  misc_feature: MA Experiment 20000328 PARAMETER Experiment Name: At_42deg_Heat_Sub_P Parameter: Temperature (deg C) Value: 42 vs. 22
  misc_feature: MA Experiment 20000328 PARAMETER Experiment Name: At_42deg_Heat_Sub_P Parameter: Timepoint (hr) Value: 6
  misc_feature: MA Experiment 20000328 PARAMETER Experiment Name: At_42deg_Heat_Sub_P Parameter: Tissue Value: Aerial
  misc_feature: MA Experiment ID: 20000440 Result: Down-regulated in Transcription
  misc_feature: MA Experiment 20000440 PARAMETER Experiment Name: At_Closed-Flower__Sub_P Parameter: Tissue Value: Closed Flower vs. Whole Plant
  misc_feature: MA Experiment ID: 20001560 Result: Down-regulated in Transcription
  misc_feature: MA Experiment 20001560 PARAMETER Experiment Name: At_Drought_Soil_Dry_P Parameter: Age (day) Value: 28
  misc_feature: MA Experiment 20001560 PARAMETER Experiment Name: At_Drought_Soil_Dry_P Parameter: Organism Value: A. thaliana
  misc_feature: MA Experiment 20001560 PARAMETER Experiment Name: At_Drought_Soil_Dry_P Parameter: Plant Line Value: WS
  misc_feature: MA Experiment 20001560 PARAMETER Experiment Name: At_Drought_Soil_Dry_P Parameter: Post Timepoint (hr) Value: None
  misc_feature: MA Experiment 20001560 PARAMETER Experiment Name: At_Drought_Soil_Dry_P Parameter: Post-Treatment Value: None
  misc_feature: MA Experiment 20001560 PARAMETER Experiment Name: At_Drought_Soil_Dry_P Parameter: Timepoint (day) Value: 14
  misc_feature: MA Experiment 20001560 PARAMETER Experiment Name: At_Drought_Soil_Dry_P Parameter: Treatment Value: Drought vs. No Drought
attgatctttgtcgcagtatttattaagattttatctctatcagacggctcttttgattaatatttttccgactcttatttcttatcttctttgctcagaaacttctctcaggcgaattcaagtttcatagttttggtctagtttttgtccaccgatctatctctttagttgaaacttatcagaatggctcgtccacaagaccctccacgtggtttcttcccttttggaaaccccttcaaaaatctatcttcgaagaactcggtactctcctcaaagcttctcccactcctgaacaattttgagaccaacttagcatcttctattagtaagcttgtccctaaggaaaagagcgatatcctgactgtctcatggatgaaacaagctatggaatctctttgcgagacacataatggtatcaagacccttataaccgatcttgagcttcctgtatcagattgggaggataaatgggttgatgtctatcttgacattagtgtgaagcttcttgatctctgcaatgcctttagctctgagcttacccgtctcaaccaaggtcatctcttactccagtttgctctgcataacttggaggccaactctcctcagaatctgtcgaaagctcagtcatcactagacagttggaagcaacacattgtctccaagaacccgagaatagaaaattgccgtgcaatcttgagcagccttgttcagaccttgaatctccccaaggtgaaaaactcggccaaagggaaagtcttgatgagagctctatatggtgtaaaggttaagaccttatacatctctggtgtttttgctgcagcgttctcaggttcatcgcagaatctgatgtaccttacagtctcaaacgagcttccatgggcacaatcattcatggaagtgcagaacaccatgaacgcagaaatcaagaacatatttttgtcagacgggttaacggttctgaaagagctagaggcagttgcttcaggtgtcaagaaactctaccctgcgatccaacaaggatcaatagatcccatatcgctgcagccactgaaggactcggtcacagaattatcgaatgggatagatcttgtttcgaaagaagtggattgtttcttcaagattctgttatcggggagagacacattactagagaacctaaggtcgatgggtgcatcaaccctacaggcaacatcgccaaaaaaggctgccggaaaaaattacagaggattctgataaactataaatgtttgtacagatggttttacttcaagtgttccatcttcttggtattgaatgtattattaggtttttgtgcaatcgtagtcgtttgtatgagatgctttgaaagtagtagttgtataagtaaaggttttaccaacttatctatatatattatgaatatctttg

SEQ ID NO: 43056 - protein, 349 aa, Arabidopsis thaliana; identical to SEQ ID NO: 23433
  peptide (1)..(349): Ceres Seq. ID no. 13646048
  misc_feature (68)..(325): Homolog of NCBI NO: 15233126 NR Description: hypothetical protein [Arabidopsis thaliana]
  misc_feature (1)..(313): Homolog of NCBI NO: 37536014 NR Description: unknown protein [Oryza sativa (japonica
  misc_feature (16)..(345): Homolog of NCBI NO: 28392962 NR Description: unknown protein [Arabidopsis thaliana]
  misc_feature (16)..(345): Homolog of NCBI NO: 30678866 NR Description: expressed protein [Arabidopsis thaliana]
  misc_feature (16)..(345): Homolog of NCBI NO: 7485228 NR Description: hypothetical protein A_IG002N01.26 - Arabidopsis
  misc_feature (1)..(327): Homolog of NCBI NO: 16604342 NR Description: At2g46080/T3F17.27 [Arabidopsis thaliana]
  misc_feature (1)..(327): Homolog of NCBI NO: 18406969 NR Description: expressed protein [Arabidopsis thaliana]
  misc_feature (1)..(349): Homolog of NCBI NO: 18378853 NR Description: expressed protein [Arabidopsis thaliana]

SEQ ID NO: 43057 - protein, 286 aa, Arabidopsis thaliana; identical to SEQ ID NO: 23434
  peptide (1)..(286): Ceres Seq. ID no. 13646049
  misc_feature (5)..(262): Homolog of NCBI NO: 15233126 NR Description: hypothetical protein [Arabidopsis thaliana]
  misc_feature (1)..(250): Homolog of NCBI NO: 37536014 NR Description: unknown protein [Oryza sativa (japonica
  misc_feature (1)..(282): Homolog of NCBI NO: 28392962 NR Description: unknown protein [Arabidopsis thaliana]
  misc_feature (1)..(282): Homolog of NCBI NO: 30678866 NR Description: expressed protein [Arabidopsis thaliana]
  misc_feature (1)..(282): Homolog of NCBI NO: 7485228 NR Description: hypothetical protein A_IG002N01.26 - Arabidopsis
  misc_feature (1)..(264): Homolog of NCBI NO: 16604342 NR Description: At2g46080/T3F17.27 [Arabidopsis thaliana]
  misc_feature (1)..(264): Homolog of NCBI NO: 18406969 NR Description: expressed protein [Arabidopsis thaliana]
  misc_feature (1)..(286): Homolog of NCBI NO: 18378853 NR Description: expressed protein [Arabidopsis thaliana]

SEQ ID NO: 43058 - protein, 282 aa, Arabidopsis thaliana; identical to SEQ ID NO: 23435
  peptide (1)..(282): Ceres Seq. ID no. 13646050
  misc_feature (1)..(258): Homolog of NCBI NO: 15233126 NR Description: hypothetical protein [Arabidopsis thaliana]
  misc_feature (1)..(246): Homolog of NCBI NO: 37536014 NR Description: unknown protein [Oryza sativa (japonica
  misc_feature (1)..(278): Homolog of NCBI NO: 28392962 NR Description: unknown protein [Arabidopsis thaliana]
  misc_feature (1)..(278): Homolog of NCBI NO: 30678866 NR Description: expressed protein [Arabidopsis thaliana]
  misc_feature (1)..(278): Homolog of NCBI NO: 7485228 NR Description: hypothetical protein A_IG002N01.26 - Arabidopsis
  misc_feature (1)..(260): Homolog of NCBI NO: 16604342 NR Description: At2g46080/T3F17.27 [Arabidopsis thaliana]
  misc_feature (1)..(260): Homolog of NCBI NO: 18406969 NR Description: expressed protein [Arabidopsis thaliana]
  misc_feature (1)..(282): Homolog of NCBI NO: 18378853 NR Description: expressed protein [Arabidopsis thaliana]

SEQ ID NO: 43059 - DNA, 1556 bp, Arabidopsis thaliana
  misc_feature (1)..(1556): Ceres Seq. ID no. 13592131
  misc_feature: MA Experiment ID: 108461 Result: Down-regulated in Transcription
  misc_feature: MA Experiment 108461 PARAMETER Experiment Name: At_Germinating_Seeds_cDNA_P Parameter: Age (day) Value: 1 vs. 0
  misc_feature: MA Experiment 108461 PARAMETER Experiment Name: At_Germinating_Seeds_cDNA_P Parameter: Tissue Value: Germinating Seeds
  misc_feature: MA Experiment ID: 108462 Result: Down-regulated in Transcription
  misc_feature: MA Experiment 108462 PARAMETER Experiment Name: At_Germinating_Seeds_cDNA_P Parameter: Age (day) Value: 2 vs. 0
  misc_feature: MA Experiment 108462 PARAMETER Experiment Name: At_Germinating_Seeds_cDNA_P Parameter: Tissue Value: Germinating Seeds
  misc_feature: MA Experiment ID: 108463 Result: Down-regulated in Transcription
  misc_feature: MA Experiment 108463 PARAMETER Experiment Name: At_Germinating_Seeds_cDNA_P Parameter: Age (day) Value: 3 vs. 0
  misc_feature: MA Experiment 108463 PARAMETER Experiment Name: At_Germinating_Seeds_cDNA_P Parameter: Tissue Value: Germinating Seeds
  misc_feature: MA Experiment ID: 108464 Result: Down-regulated in Transcription
  misc_feature: MA Experiment 108464 PARAMETER Experiment Name: At_Germinating_Seeds_cDNA_P Parameter: Age (day) Value: 4 vs. 0
  misc_feature: MA Experiment 108464 PARAMETER Experiment Name: At_Germinating_Seeds_cDNA_P Parameter: Tissue Value: Germinating Seeds
  misc_feature: MA Experiment ID: 108488 Result: Down-regulated in Transcription
  misc_feature: MA Experiment ID: 108573 Result: Up-regulated in Transcription
  misc_feature: MA Experiment 108573 PARAMETER Experiment Name: At_Drought_cDNA_P Parameter: Timepoint (hr) Value: 6
  misc_feature: MA Experiment 108573 PARAMETER Experiment Name: At_Drought_cDNA_P Parameter: Tissue Value: Aerial
  misc_feature: MA Experiment 108573 PARAMETER Experiment Name: At_Drought_cDNA_P Parameter: Treatment Value: Drought vs. No Drought
  misc_feature: MA Experiment ID: 108585 Result: Up-regulated in Transcription
  misc_feature: MA Experiment 108585 PARAMETER Experiment Name: At_5mM_NaNP_cDNA_P Parameter: Timepoint (hr) Value: 6
  misc_feature: MA Experiment 108585 PARAMETER Experiment Name: At_5mM_NaNP_cDNA_P Parameter: Tissue Value: Aerial
  misc_feature: MA Experiment 108585 PARAMETER Experiment Name: At_5mM_NaNP_cDNA_P Parameter: Treatment Value: null
  misc_feature: MA Experiment ID: 108595 Result: Down-regulated in Transcription
  misc_feature: MA Experiment 108595 PARAMETER Experiment Name: At_Ler-pi_Ovule_cDNA_P Parameter: Plant Line Value: null
  misc_feature: MA Experiment ID: 108605 Result: Up-regulated in Transcription
  misc_feature: MA Experiment 108605 PARAMETER Experiment Name: At_100uM_ABA_cDNA_P Parameter: Timepoint (hr) Value: 6
  misc_feature: MA Experiment 108605 PARAMETER Experiment Name: At_100uM_ABA_cDNA_P Parameter: Tissue Value: Aerial
  misc_feature: MA Experiment 108605 PARAMETER Experiment Name: At_100uM_ABA_cDNA_P Parameter: Treatment Value: 100uM ABA vs. No Treatment
  misc_feature: MA Experiment ID: 20000069 Result: Up-regulated in Transcription
  misc_feature: MA Experiment 20000069 PARAMETER Experiment Name: At_100uM_ABA_Mutants_cDNA_P Parameter: Plant Line Value: CS23
  misc_feature: MA Experiment 20000069 PARAMETER Experiment Name: At_100uM_ABA_Mutants_cDNA_P Parameter: Timepoint (hr) Value: 6
  misc_feature: MA Experiment 20000069 PARAMETER Experiment Name: At_100uM_ABA_Mutants_cDNA_P Parameter: Tissue Value: Aerial
  misc_feature: MA Experiment 20000069 PARAMETER Experiment Name: At_100uM_ABA_Mutants_cDNA_P Parameter: Treatment Value: 100uM ABA vs. No Treatment
  misc_feature: MA Experiment ID: 20000088 Result: Up-regulated in Transcription
  misc_feature: MA Experiment 20000088 PARAMETER Experiment Name: At_100uM_ABA_Mutants_cDNA_P Parameter: Plant Line Value: Landsberg
  misc_feature: MA Experiment 20000088 PARAMETER Experiment Name: At_100uM_ABA_Mutants_cDNA_P Parameter: Timepoint (hr) Value: 6
  misc_feature: MA Experiment 20000088 PARAMETER Experiment Name: At_100uM_ABA_Mutants_cDNA_P Parameter: Tissue Value: Aerial
  misc_feature: MA Experiment 20000088 PARAMETER Experiment Name: At_100uM_ABA_Mutants_cDNA_P Parameter: Treatment Value: 100uM ABA vs. No Treatment
  misc_feature: MA Experiment ID: 20000307 Result: Down-regulated in Transcription
  misc_feature: MA Experiment 20000307 PARAMETER Experiment Name: At_Germinating_Seeds_Sub_P Parameter: Age (hr) Value: 24 vs. 0
  misc_feature: MA Experiment 20000307 PARAMETER Experiment Name: At_Germinating_Seeds_Sub_P Parameter: Organism Value: A. thaliana
  misc_feature: MA Experiment 20000307 PARAMETER Experiment Name: At_Germinating_Seeds_Sub_P Parameter: Plant Line Value: WS
  misc_feature: MA Experiment 20000307 PARAMETER Experiment Name: At_Germinating_Seeds_Sub_P Parameter: Tissue Value: Germinating Seeds
aatttaggtgatatcatataatgcttcgcgtgagggtttctgagattctgatcgacgaaaactaatctctctcctttttcttctcatctccttactagagatctctgtcttcgataatttgtttcaatcactgagaaaatggcggccgtaggagtagattcgaggcgtcctgagacagcgatggaggaaacctgtaacgtgaaaggagcggcggcgaaacaaggggaagggcttaagcagtactatctccagcacatccatgagctccagcgccagcttcgacagaagactaataacctcaatcgccttgaagctcaaaggaatgaactcaattctcgagtgagaatgctcagagaagagttacagctccttcaagaacctgggtcctatgtgggagaagtggtaaaagttatgggaaagaacaaggtcttggttaaggttcatccagaggggaagtatgttgttgatattgacaaaagtatagacattacgaaaatcactccatcaacgagagttgctcttcgtaatgatagctatgttctccacctggttctgccaagtaaagtagatcccttggttaaccttatgaaagttgagaaggttccagactccacctatgacatgattggtggtcttgaccagcagattaaggaaataaaggaggtcattgagctgccaatcaagcatcctgaattgtttgagtctcttggaattgcgcagccaaagggtgtgttgttatacggtccacctggaactgggaagacactattggctcgggctgttgcacatcacactgactgtactttcataagagtttctggttccgagcttgtccagaaatacattggagaaggttctagaatggtcagagaactttttgtgatggcaagggagcatgcaccatcaatcatcttcatggatgaaatcgatagtattgggtctgctcgtatggaatctggaagtggaaatggtgacagtgaggtgcaacggaccatgctcgagcttctcaatcaacttgacggttttgaagcgtcaaacaaaatcaaggttttgatggctacaaatcgtattgatattctggatcaagctcttctcaggcctggaagaattgataggaaaattgaatttcctaatcctaatgaagagtcacgttttgacatcttgaagattcactcgaggaaaatgaatttgatgcgtggaatcgatctgaaaaagattgcagagaagatgaatggcgcttcaggtgctgagctgaaggctgtgtgcacggaggcgggaatgtttgctctgcgtgagaggagagtacacgtgacacaagaagactttgagatggcggtggccaaggtaatgaagaaagacacggagaagaacatgtctctgcgtaagctgtggaagtaggaatctctcatggaaagactttctttactttactgtttgttgtttgattctgaaaccttttttcggttgtctcatgaaaacattttagaacaaagtttttactatctagacacgagtttatctagtatgcgatttgaggtcaatggaaggaaattccc

SEQ ID NO: 43060 - protein, 419 aa, Arabidopsis thaliana
  peptide (1)..(419): Ceres Seq. ID no. 13592132
  misc_feature (197)..(385): Pfam Name: ATPase family associated with various cellular Pfam Description: ATPase family associated with various cellular
  misc_feature (26)..(419): Homolog of NCBI NO: 3041724 NR Description: 26S PROTEASE REGULATORY SUBUNIT 8 (SUG1 HOMOLOG)
  misc_feature (27)..(419): Homolog of NCBI NO: 1262435 NR Description: put. 26S protease subunit [Sus scrofa]
  misc_feature (4)..(419): Homolog of NCBI NO: 6599051 NR Description: 26S proteasome subunit 8; Tat binding protein
  misc_feature (1)..(419): Homolog of NCBI NO: 11993907 NR Description: 26S proteasome RPT6a subunit [Dactylis glomerata]
  misc_feature (27)..(419): Homolog of NCBI NO: 6752880 NR Description: 26S proteasome regulatory subunit 8 [Pinus taeda]
  misc_feature (17)..(419): Homolog of NCBI NO: 17385640 NR Description: TAT-binding protein homolog [Matricaria
  misc_feature (1)..(419): Homolog of NCBI NO: 11094194 NR Description: 26S proteasome regulatory particle triple-A
  misc_feature (1)..(419): Homolog of NCBI NO: 15241241 NR Description: 26S proteasome AAA-ATPase subunit RPT6a
  misc_feature (15)..(419): Homolog of NCBI NO: 6652888 NR Description: 26S proteasome AAA-ATPase subunit RPT6a
  misc_feature (1)..(419): Homolog of NCBI NO: 18420092 NR Description: 26S proteasome AAA-ATPase subunit RPT6a
MAAVGVDSRRPETAMEETCNVKGAAAKQGEGLKQYYLQHIHELQRQLRQKTNNLNRLEAQRNELNSRVRMLREELQLLQEPGSYVGEVVKVMGKNKVLVKVHPEGKYVVDIDKSIDITKITPSTRVALRNDSYVLHLVLPSKVDPLVNLMKVEKVPDSTYDMIGGLDQQIKEIKEVIELPIKHPELFESLGIAQPKGVLLYGPPGTGKTLLARAVAHHTDCTFIRVSGSELVQKYIGEGSRMVRELFVMAREHAPSIIFMDEIDSIGSARMESGSGNGDSEVQRTMLELLNQLDGFEASNKIKVLMATNRIDILDQALLRPGRIDRKIEFPNPNEESRFDILKIHSRKMNLMRGIDLKKIAEKMNGASGAELKAVCTEAGMFALRERRVHVTQEDFEMAVAKVMKKDTEKNMSLRKLWK

SEQ ID NO: 43061 - protein, 405 aa, Arabidopsis thaliana
  peptide (1)..(405): Ceres Seq. ID no. 13592133
  misc_feature (183)..(371): Pfam Name: ATPase family associated with various cellular Pfam Description: ATPase family associated with various cellular
  misc_feature (12)..(405): Homolog of NCBI NO: 3041724 NR Description: 26S PROTEASE REGULATORY SUBUNIT 8 (SUG1 HOMOLOG)
  misc_feature (13)..(405): Homolog of NCBI NO: 1262435 NR Description: put. 26S protease subunit [Sus scrofa]
  misc_feature (1)..(405): Homolog of NCBI NO: 6599051 NR Description: 26S proteasome subunit 8; Tat binding protein
  misc_feature (1)..(405): Homolog of NCBI NO: 11993907 NR Description: 26S proteasome RPT6a subunit [Dactylis glomerata]
  misc_feature (13)..(405): Homolog of NCBI NO: 6752880 NR Description: 26S proteasome regulatory subunit 8 [Pinus taeda]
  misc_feature (3)..(405): Homolog of NCBI NO: 17385640 NR Description: TAT-binding protein homolog [Matricaria
  misc_feature (1)..(405): Homolog of NCBI NO: 11094194 NR Description: 26S proteasome regulatory particle triple-A
  misc_feature (1)..(405): Homolog of NCBI NO: 15241241 NR Description: 26S proteasome AAA-ATPase subunit RPT6a
  misc_feature (1)..(405): Homolog of NCBI NO: 6652888 NR Description: 26S proteasome AAA-ATPase subunit RPT6a
  misc_feature (1)..(405): Homolog of NCBI NO: 18420092 NR Description: 26S proteasome AAA-ATPase subunit RPT6a
MEETCNVKGAAAKQGEGLKQYYLQHIHELQRQLRQKTNNLNRLEAQRNELNSRVRMLREELQLLQEPGSYVGEVVKVMGKNKVLVKVHPEGKYVVDIDKSIDITKITPSTRVALRNDSYVLHLVLPSKVDPLVNLMKVEKVPDSTYDMIGGLDQQIKEIKEVIELPIKHPELFESLGIAQPKGVLLYGPPGTGKTLLARAVAHHTDCTFIRVSGSELVQKYIGEGSRMVRELFVMAREHAPSIIFMDEIDSIGSARMESGSGNGDSEVQRTMLELLNQLDGFEASNKIKVLMATNRIDILDQALLRPGRIDRKIEFPNPNEESRFDILKIHSRKMNLMRGIDLKKIAEKMNGASGAELKAVCTEAGMFALRERRVHVTQEDFEMAVAKVMKKDTEKNMSLRKLWK

SEQ ID NO: 43062 - protein, 350 aa, Arabidopsis thaliana
  peptide (1)..(350): Ceres Seq. ID no. 13592134
  misc_feature (128)..(316): Pfam Name: ATPase family associated with various cellular Pfam Description: ATPase family associated with various cellular
  misc_feature (1)..(350): Homolog of NCBI NO: 3041724 NR Description: 26S PROTEASE REGULATORY SUBUNIT 8 (SUG1 HOMOLOG)
  misc_feature (1)..(350): Homolog of NCBI NO: 1262435 NR Description: put. 26S protease subunit [Sus scrofa]
  misc_feature (1)..(350): Homolog of NCBI NO: 6599051 NR Description: 26S proteasome subunit 8; Tat binding protein
  misc_feature (1)..(350): Homolog of NCBI NO: 11993907 NR Description: 26S proteasome RPT6a subunit [Dactylis glomerata]
  misc_feature (1)..(350): Homolog of NCBI NO: 6752880 NR Description: 26S proteasome regulatory subunit 8 [Pinus taeda]
  misc_feature (1)..(350): Homolog of NCBI NO: 17385640 NR Description: TAT-binding protein homolog [Matricaria
  misc_feature (1)..(350): Homolog of NCBI NO: 11094194 NR Description: 26S proteasome regulatory particle triple-A
  misc_feature (1)..(350): Homolog of NCBI NO: 15241241 NR Description: 26S proteasome AAA-ATPase subunit RPT6a
  misc_feature (1)..(350): Homolog of NCBI NO: 6652888 NR Description: 26S proteasome AAA-ATPase subunit RPT6a
  misc_feature (1)..(350): Homolog of NCBI NO: 18420092 NR Description: 26S proteasome AAA-ATPase subunit RPT6a
MLREELQLLQEPGSYVGEVVKVMGKNKVLVKVHPEGKYVVDIDKSIDITKITPSTRVALRNDSYVLHLVLPSKVDPLVNLMKVEKVPDSTYDMIGGLDQQIKEIKEVIELPIKHPELFESLGIAQPKGVLLYGPPGTGKTLLARAVAHHTDCTFIRVSGSELVQKYIGEGSRMVRELFVMAREHAPSIIFMDEIDSIGSARMESGSGNGDSEVQRTMLELLNQLDGFEASNKIKVLMATNRIDILDQALLRPGRIDRKIEFPNPNEESRFDILKIHSRKMNLMRGIDLKKIAEKMNGASGAELKAVCTEAGMFALRERRVHVTQEDFEMAVAKVMKKDTEKNMSLRKLWK

SEQ ID NO: 43063 - DNA, 1399 bp, Arabidopsis thaliana
  misc_feature (1)..(1399): Ceres Seq. ID no. 13490972
  misc_feature: MA Experiment ID: 20000182 Result: Down-regulated in Transcription
  misc_feature: MA Experiment 20000182 PARAMETER Experiment Name: At_2mM_SA_P Parameter: Age (day) Value: 14
  misc_feature: MA Experiment 20000182 PARAMETER Experiment Name: At_2mM_SA_P Parameter: Organism Value: A. thaliana
  misc_feature: MA Experiment 20000182 PARAMETER Experiment Name: At_2mM_SA_P Parameter: Plant Line Value: WS
  misc_feature: MA Experiment 20000182 PARAMETER Experiment Name: At_2mM_SA_P Parameter: Timepoint (hr) Value: 6
  misc_feature: MA Experiment 20000182 PARAMETER Experiment Name: At_2mM_SA_P Parameter: Tissue Value: Aerial
  misc_feature: MA Experiment 20000182 PARAMETER Experiment Name: At_2mM_SA_P Parameter: Treatment Value: 2mM SA vs. No Treatment
  misc_feature: MA Experiment ID: 20000185 Result: Down-regulated in Transcription
  misc_feature: MA Experiment 20000185 PARAMETER Experiment Name: At_Roots__P Parameter: Age (day) Value: 7 vs. 21
  misc_feature: MA Experiment 20000185 PARAMETER Experiment Name: At_Roots__P Parameter: Organism Value: A. thaliana
  misc_feature: MA Experiment 20000185 PARAMETER Experiment Name: At_Roots__P Parameter: Tissue Value: Roots vs. Whole Plant
  misc_feature: MA Experiment ID: 20001248 Result: Up-regulated in Transcription
  misc_feature: MA Experiment 20001248 PARAMETER Experiment Name: At_Far-red-induction_P Parameter: Age (day) Value: 7
  misc_feature: MA Experiment 20001248 PARAMETER Experiment Name: At_Far-red-induction_P Parameter: Light Value: Far-red vs. White
  misc_feature: MA Experiment 20001248 PARAMETER Experiment Name: At_Far-red-induction_P Parameter: Organism Value: A. thaliana
  misc_feature: MA Experiment 20001248 PARAMETER Experiment Name: At_Far-red-induction_P Parameter: Plant Line Value: Columbia
  misc_feature: MA Experiment 20001248 PARAMETER Experiment Name: At_Far-red-induction_P Parameter: Timepoint (hr) Value: 4
  misc_feature: MA Experiment 20001248 PARAMETER Experiment Name: At_Far-red-induction_P Parameter: Tissue Value: Whole Plant
  misc_feature: MA Experiment ID: 20001557 Result: Up-regulated in Transcription
  misc_feature: MA Experiment 20001557 PARAMETER Experiment Name: At_Drought_Soil_Dry_P Parameter: Age (day) Value: 27
  misc_feature: MA Experiment 20001557 PARAMETER Experiment Name: At_Drought_Soil_Dry_P Parameter: Organism Value: A. thaliana
  misc_feature: MA Experiment 20001557 PARAMETER Experiment Name: At_Drought_Soil_Dry_P Parameter: Plant Line Value: WS
  misc_feature: MA Experiment 20001557 PARAMETER Experiment Name: At_Drought_Soil_Dry_P Parameter: Post Timepoint (hr) Value: 3
  misc_feature: MA Experiment 20001557 PARAMETER Experiment Name: At_Drought_Soil_Dry_P Parameter: Post-Treatment Value: Re-Water vs. No Drought
  misc_feature: MA Experiment 20001557 PARAMETER Experiment Name: At_Drought_Soil_Dry_P Parameter: Timepoint (day) Value: 13
  misc_feature: MA Experiment 20001557 PARAMETER Experiment Name: At_Drought_Soil_Dry_P Parameter: Treatment Value: Drought vs. No Drought
  misc_feature: MA Experiment ID: 20001558 Result: Up-regulated in Transcription
  misc_feature: MA Experiment 20001558 PARAMETER Experiment Name: At_Drought_Soil_Dry_P Parameter: Age (day) Value: 27
  misc_feature: MA Experiment 20001558 PARAMETER Experiment Name: At_Drought_Soil_Dry_P Parameter: Organism Value: A. thaliana
  misc_feature: MA Experiment 20001558 PARAMETER Experiment Name: At_Drought_Soil_Dry_P Parameter: Plant Line Value: WS
  misc_feature: MA Experiment 20001558 PARAMETER Experiment Name: At_Drought_Soil_Dry_P Parameter: Post Timepoint (hr) Value: 6
  misc_feature: MA Experiment 20001558 PARAMETER Experiment Name: At_Drought_Soil_Dry_P Parameter: Post-Treatment Value: Re-Water vs. No Drought
  misc_feature: MA Experiment 20001558 PARAMETER Experiment Name: At_Drought_Soil_Dry_P Parameter: Timepoint (day) Value: 13
  misc_feature: MA Experiment 20001558 PARAMETER Experiment Name: At_Drought_Soil_Dry_P Parameter: Treatment Value: Drought vs. No Drought
  misc_feature: MA Experiment ID: 20001911 Result: Down-regulated in Transcription
  misc_feature: MA Experiment 20001911 PARAMETER Experiment Name: At_Drought_Reproduction_P Parameter: Age (day) Value: 40
  misc_feature: MA Experiment 20001911 PARAMETER Experiment Name: At_Drought_Reproduction_P Parameter: Organism Value: A. thaliana
  misc_feature: MA Experiment 20001911 PARAMETER Experiment Name: At_Drought_Reproduction_P Parameter: Plant Line Value: WS
  misc_feature: MA Experiment 20001911 PARAMETER Experiment Name: At_Drought_Reproduction_P Parameter: Timepoint (day) Value: 10
  misc_feature: MA Experiment 20001911 PARAMETER Experiment Name: At_Drought_Reproduction_P Parameter: Tissue Value: Flowers
  misc_feature: MA Experiment 20001911 PARAMETER Experiment Name: At_Drought_Reproduction_P Parameter: Treatment Value: Drought vs. No Drought
agcttccttttttgttttccacgaaaaagcaaaagaatgggttctcttcttcctcttcttggcatctcagtagtctccgccattttctttctgttgcttcaacaaccagaacaatcttcttcagccattatactgagcttgaagaaacgccatggaagctcctctggtagtagtggtaaccagtacagttcaagcagaccatcagctggtttccaagggaacaggagcacgtgctctctcttcctcggcacgtgggttcgtgataactcttatcctctctataaaccggcggattgtcccggcgtcgttgagcctgagttcgattgtcagatgtacggtcgtcctgactctgactacctcaagtatcgatggcaacctcagaattgcaatttgcccacgttcaatggtgctcagtttctgttgaaaatgaagggcaaaaccataatgtttgcgggtgattcattggggaagaatcaatgggagtctttgatctgccttattgtttcatctgcaccgtccactcggacagaaatgaccagaggcttgcctctctccaccttcagattcttggattatgggataacaatgtcattttacaaagctccgttcttggtggacatagatgctgttcaaggcaagcgtgtgttgaagctggatgagatctctggtaatgccaatgcttggcatgacgctgatctcctcatcttcaacactggtcactggtggagccacaccggatctatgcaaggatgggacttgattcaatcaggcaattcttattaccaagacatggaccgttttgtggcaatggagaaagcacttycgtacttgggcgtatttgggtcgaaactcacgttgatagatcccgaacacaagtcctcttcctctccatttctccaacacacgacaacccgagtgactgggcggcatcatcgtcttcaggatccaagaactgctacggagaaacagaaccgatcacaggaacagcttatccagtgagctcctacacagatcagctaagatcagtgatcgttgaagtgcttcacgggatgcacaaaccggcttttcttctcgacataacgctcctctcttcactcagaaaagacggtcacccgtcagtatacagcggtctcattagcggttcacaaaggtctagaccagaccagtctgcagattgtagccattggtgtttgcctggtctacctgatacatggaaccagttgttgtatacgcttctcatctattagcttctttttaattctcttccatcaaatttattcggttagtaatattttaacacattcgaagagagaatcttaagattaatcacggaatcagtcaattgtataaactttttggggaaattttctttttaatgattataatttttattccatgc

SEQ ID NO: 43064 - protein, 332 aa, Arabidopsis thaliana
  peptide (1)..(332): Ceres Seq. ID no. 15222863
  misc_feature (78)..(274): Homolog of NCBI NO: 21593142 NR Description: unknown [Arabidopsis thaliana]
  misc_feature (60)..(274): Homolog of NCBI NO: 18406003 NR Description: expressed protein [Arabidopsis thaliana]
  misc_feature (75)..(274): Homolog of NCBI NO: 30350855 NR Description: hypothetical protein At2g30900 [Arabidopsis
  misc_feature (75)..(274): Homolog of NCBI NO: 15224585 NR Description: expressed protein [Arabidopsis thaliana]
  misc_feature (13)..(278): Homolog of NCBI NO: 18403435 NR Description: expressed protein [Arabidopsis thaliana]
  misc_feature (17)..(274): Homolog of NCBI NO: 18396930 NR Description: expressed protein [Arabidopsis thaliana]
  misc_feature (7)..(274): Homolog of NCBI NO: 34911864 NR Description: OSJNBb0032K15.9 [Oryza sativa (japonica
  misc_feature (22)..(274): Homolog of NCBI NO: 18402220 NR Description: expressed protein [Arabidopsis thaliana]
  misc_feature (13)..(274): Homolog of NCBI NO: 15237711 NR Description: expressed protein [Arabidopsis thaliana]
  misc_feature (13)..(274): Homolog of NCBI NO: 21553643 NR Description: unknown [Arabidopsis thaliana]
  misc_feature (275)..(275): Xaa is any aa, unknown or other
SFLFCFPRKSKRMGSLLPLLGISVVSAIFFLLLQQPEQSSSAIILSLKKRHGSSSGSSGNQYSSSRPSAGFQGNRSTCSLFLGTWVRDNSYPLYKPADCPGVVEPEFDCQMYGRPDSDYLKYRWQPQNCNLPTFNGAQFLLKMKGKTIMFAGDSLGKNQWESLICLIVSSAPSTRTEMTRGLPLSTFRFLDYGITMSFYKAPFLVDIDAVQGKRVLKLDEISGNANAWHDADLLIFNTGHWWSHTGSMQGWDLIQSGNSYYQDMDRFVAMEKALXYLGVFGSKLTLIDPEHKSSSSPFLQHTTTRVTGRHHRLQDPRTATEKQNRSQEQLIQ

SEQ ID NO: 43065 - protein, 320 aa, Arabidopsis thaliana
  peptide (1)..(320): Ceres Seq. ID no. 15222864
  misc_feature (66)..(262): Homolog of NCBI NO: 21593142 NR Description: unknown [Arabidopsis thaliana]
  misc_feature (48)..(262): Homolog of NCBI NO: 18406003 NR Description: expressed protein [Arabidopsis thaliana]
  misc_feature (63)..(262): Homolog of NCBI NO: 30350855 NR Description: hypothetical protein At2g30900 [Arabidopsis
  misc_feature (63)..(262): Homolog of NCBI NO: 15224585 NR Description: expressed protein [Arabidopsis thaliana]
  misc_feature (1)..(266): Homolog of NCBI NO: 18403435 NR Description: expressed protein [Arabidopsis thaliana]
  misc_feature (5)..(262): Homolog of NCBI NO: 18396930 NR Description: expressed protein [Arabidopsis thaliana]
  misc_feature (1)..(262): Homolog of NCBI NO: 34911864 NR Description: OSJNBb0032K15.9 [Oryza sativa (japonica
  misc_feature (10)..(262): Homolog of NCBI NO: 18402220 NR Description: expressed protein [Arabidopsis thaliana]
  misc_feature (1)..(262): Homolog of NCBI NO: 15237711 NR Description: expressed protein [Arabidopsis thaliana]
  misc_feature (1)..(262): Homolog of NCBI NO: 21553643 NR Description: unknown [Arabidopsis thaliana]
  misc_feature (263)..(263): Xaa is any aa, unknown or other
MGSLLPLLGISVVSAIFFLLLQQPEQSSSAIILSLKKRHGSSSGSSGNQYSSSRPSAGFQGNRSTCSLFLGTWVRDNSYPLYKPADCPGVVEPEFDCQMYGRPDSDYLKYRWQPQNCNLPTFNGAQFLLKMKGKTIMFAGDSLGKNQWESLICLIVSSAPSTRTEMTRGLPLSTFRFLDYGITMSFYKAPFLVDIDAVQGKRVLKLDEISGNANAWHDADLLIFNTGHWWSHTGSMQGWDLIQSGNSYYQDMDRFVAMEKALXYLGVFGSKLTLIDPEHKSSSSPFLQHTTTRVTGRHHRLQDPRTATEKQNRSQEQLIQ

SEQ ID NO: 43066 - protein, 222 aa, Arabidopsis thaliana
  peptide (1)..(222): Ceres Seq. ID no. 15222865
  misc_feature (1)..(164): Homolog of NCBI NO: 21593142 NR Description: unknown [Arabidopsis thaliana]
  misc_feature (1)..(164): Homolog of NCBI NO: 18406003 NR Description: expressed protein [Arabidopsis thaliana]
  misc_feature (1)..(164): Homolog of NCBI NO: 30350855 NR Description: hypothetical protein At2g30900 [Arabidopsis
  misc_feature (1)..(164): Homolog of NCBI NO: 15224585 NR Description: expressed protein [Arabidopsis thaliana]
  misc_feature (1)..(168): Homolog of NCBI NO: 18403435 NR Description: expressed protein [Arabidopsis thaliana]
  misc_feature (1)..(164): Homolog of NCBI NO: 18396930 NR Description: expressed protein [Arabidopsis thaliana]
  misc_feature (1)..(164): Homolog of NCBI NO: 34911864 NR Description: OSJNBb0032K15.9 [Oryza sativa (japonica
  misc_feature (1)..(164): Homolog of NCBI NO: 18402220 NR Description: expressed protein [Arabidopsis thaliana]
  misc_feature (1)..(164): Homolog of NCBI NO: 15237711 NR Description: expressed protein [Arabidopsis thaliana]
  misc_feature (1)..(164): Homolog of NCBI NO: 21553643 NR Description: unknown [Arabidopsis thaliana]
  misc_feature (165)..(165): Xaa is any aa, unknown or other
MYGRPDSDYLKYRWQPQNCNLPTFNGAQFLLKMKGKTIMFAGDSLGKNQWESLICLIVSSAPSTRTEMTRGLPLSTFRFLDYGITMSFYKAPFLVDIDAVQGKRVLKLDEISGNANAWHDADLLIFNTGHWWSHTGSMQGWDLIQSGNSYYQDMDRFVAMEKALXYLGVFGSKLTLIDPEHKSSSSPFLQHTTTRVTGRHHRLQDPRTATEKQNRSQEQLIQ

SEQ ID NO: 43067 - DNA, 657 bp, Arabidopsis thaliana
  misc_feature (1)..(657): Ceres Seq. ID no. 12422265
  misc_feature: MA Experiment ID: 108434 Result: Up-regulated in Transcription
  misc_feature: MA Experiment 108434 PARAMETER Experiment Name: At_Root_Tips_cDNA_P Parameter: Tissue Value: Root Tips
  misc_feature: MA Experiment ID: 108462 Result: Down-regulated in Transcription
  misc_feature: MA Experiment 108462 PARAMETER Experiment Name: At_Germinating_Seeds_cDNA_P Parameter: Age (day) Value: 2 vs. 0
  misc_feature: MA Experiment 108462 PARAMETER Experiment Name: At_Germinating_Seeds_cDNA_P Parameter: Tissue Value: Germinating Seeds
  misc_feature: MA Experiment ID: 108463 Result: Down-regulated in Transcription
  misc_feature: MA Experiment 108463 PARAMETER Experiment Name: At_Germinating_Seeds_cDNA_P Parameter: Age (day) Value: 3 vs. 0
  misc_feature: MA Experiment 108463 PARAMETER Experiment Name: At_Germinating_Seeds_cDNA_P Parameter: Tissue Value: Germinating Seeds
  misc_feature: MA Experiment ID: 108464 Result: Down-regulated in Transcription
  misc_feature: MA Experiment 108464 PARAMETER Experiment Name: At_Germinating_Seeds_cDNA_P Parameter: Age (day) Value: 4 vs. 0
  misc_feature: MA Experiment 108464 PARAMETER Experiment Name: At_Germinating_Seeds_cDNA_P Parameter: Tissue Value: Germinating Seeds
  misc_feature: MA Experiment ID: 108573 Result: Down-regulated in Transcription
  misc_feature: MA Experiment 108573 PARAMETER Experiment Name: At_Drought_cDNA_P Parameter: Timepoint (hr) Value: 6
  misc_feature: MA Experiment 108573 PARAMETER Experiment Name: At_Drought_cDNA_P Parameter: Tissue Value: Aerial
  misc_feature: MA Experiment 108573 PARAMETER Experiment Name: At_Drought_cDNA_P Parameter: Treatment Value: Drought vs. No Drought
  misc_feature: MA Experiment ID: 20001451 Result: Down-regulated in Transcription
  misc_feature: MA Experiment 20001451 PARAMETER Experiment Name: At_Far-red-induction_P Parameter: Age (day) Value: 7
  misc_feature: MA Experiment 20001451 PARAMETER Experiment Name: At_Far-red-induction_P Parameter: Light Value: Far-red vs. White
  misc_feature: MA Experiment 20001451 PARAMETER Experiment Name: At_Far-red-induction_P Parameter: Organism Value: A. thaliana
  misc_feature: MA Experiment 20001451 PARAMETER Experiment Name: At_Far-red-induction_P Parameter: Plant Line Value: Columbia
  misc_feature: MA Experiment 20001451 PARAMETER Experiment Name: At_Far-red-induction_P Parameter: Timepoint (hr) Value: 24
  misc_feature: MA Experiment 20001451 PARAMETER Experiment Name: At_Far-red-induction_P Parameter: Tissue Value: Whole Plant
gaaccctaaaaaccccaggtgagaagaacggagagagagagagagatgtcgttcatgtatgagaagagcaatacatggagatggctagtgatgaagacgcgagattcgagatccttcttcttcacgttcgctgctttatgtggtgtcattcctggcgttattggctatggagttatgcaggtcaccaattccagtaaccctgagctcgaagcccgcctccgtaaatctgctcgcccagatactctcatgatgggtaaagtaaaccaagagaggctagctgaatatcttggtgagttgaaacagaagcaggatacaaacgacagatacgttgctgctcttaggggagagactcttaccaggaagccttatcaaagaatccaaccaatgccaaagccagatgacacggtgacaaccaaaactcagtaaggatgaattattttaagagtcaatgttagtgaatgcctctcactcgaatcttttgtcgatacaaaaatggcgtgtttcctggccgtaatatcttttgtttttgaaaccggcatctagcgacacaacttttgtgctatgcaaacggctacaatgtcaatcacttcaaaccttttgttatgatgaataaaatgtaaaacttatgttttgtacaatgcttcttcattcttgttt

SEQ ID NO: 43068 - protein, 126 aa, Arabidopsis thaliana
  peptide (1)..(126): Ceres Seq. ID no. 12422266
  misc_feature (1)..(126): Homolog of NCBI NO: 18412355 NR Description: expressed protein
MSFMYEKSNTWRWLVMKTRDSRSFFFTFAALCGVIPGVIGYGVMQVTNSSNPELEARLRKSARPDTLMMGKVNQERLAEYLGELKQKQDTNDRYVAALRGETLTRKPYQRIQPMPKPDDTVTTKTQ

SEQ ID NO: 43069 - protein, 123 aa, Arabidopsis thaliana
  peptide (1)..(123): Ceres Seq. ID no. 12422267
  misc_feature (1)..(123): Homolog of NCBI NO: 18412355 NR Description: expressed protein
MYEKSNTWRWLVMKTRDSRSFFFTFAALCGVIPGVIGYGVMQVTNSSNPELEARLRKSARPDTLMMGKVNQERLAEYLGELKQKQDTNDRYVAALRGETLTRKPYQRIQPMPKPDDTVTTKTQ

SEQ ID NO: 43070 - protein, 111 aa, Arabidopsis thaliana
  peptide (1)..(111): Ceres Seq. ID no. 12422268
  misc_feature (1)..(111): Homolog of NCBI NO: 18412355 NR Description: expressed protein
MKTRDSRSFFFTFAALCGVIPGVIGYGVMQVTNSSNPELEARLRKSARPDTLMMGKVNQERLAEYLGELKQKQDTNDRYVAALRGETLTRKPYQRIQPMPKPDDTVTTKTQ

SEQ ID NO: 43071 - DNA, 1347 bp, Arabidopsis thaliana
  misc_feature (1)..(1347): Ceres Seq. ID no. 12326484
  misc_feature: MA Experiment ID: 20000234 Result: Up-regulated in Transcription
  misc_feature: MA Experiment 20000234 PARAMETER Experiment Name: At_Siliques_P Parameter: Age (day) Value: 21
  misc_feature: MA Experiment 20000234 PARAMETER Experiment Name: At_Siliques_P Parameter: Organism Value: A. thaliana
  misc_feature: MA Experiment 20000234 PARAMETER Experiment Name: At_Siliques_P Parameter: Plant Line Value: WS
  misc_feature: MA Experiment 20000234 PARAMETER Experiment Name: At_Siliques_P Parameter: Tissue Value: Less Than 5mm Siliques vs. Whole Plant
  misc_feature: MA Experiment ID: 20000286 Result: Up-regulated in Transcription
  misc_feature: MA Experiment 20000286 PARAMETER Experiment Name: At_Open_Flower_P Parameter: Age (day) Value: 21
  misc_feature: MA Experiment 20000286 PARAMETER Experiment Name: At_Open_Flower_P Parameter: Plant Line Value: WS
  misc_feature: MA Experiment 20000286 PARAMETER Experiment Name: At_Open_Flower_P Parameter: Tissue Value: Half Open vs. Whole Plant
  misc_feature: MA Experiment ID: 20000794 Result: Up-regulated in Transcription
  misc_feature: MA Experiment 20000794 PARAMETER Experiment Name: At_Petals_P Parameter: Age (day) Value: 23-25 days
  misc_feature: MA Experiment 20000794 PARAMETER Experiment Name: At_Petals_P Parameter: Plant Line Value: WS
  misc_feature: MA Experiment 20000794 PARAMETER Experiment Name: At_Petals_P Parameter: Tissue Value: Petals vs. Whole plant
  misc_feature: MA Experiment ID: 20001757 Result: Down-regulated in Transcription
  misc_feature: MA Experiment 20001757 PARAMETER Experiment Name: At_50mM_NH4NO3_L-to-H_P Parameter: Timepoint (hr) Value: 6
  misc_feature: MA Experiment 20001757 PARAMETER Experiment Name: At_50mM_NH4NO3_L-to-H_P Parameter: Tissue Value: Leaf
  misc_feature: MA Experiment 20001757 PARAMETER Experiment Name: At_50mM_NH4NO3_L-to-H_P Parameter: Treatment Value: 50mM NH4NO3 vs 100mM Mannitol
  misc_feature: MA Experiment ID: 20001910 Result: Up-regulated in Transcription
  misc_feature: MA Experiment 20001910 PARAMETER Experiment Name: At_Drought_Reproduction_P Parameter: Age (day) Value: 37
  misc_feature: MA Experiment 20001910 PARAMETER Experiment Name: At_Drought_Reproduction_P Parameter: Organism Value: A. thaliana
  misc_feature: MA Experiment 20001910 PARAMETER Experiment Name: At_Drought_Reproduction_P Parameter: Plant Line Value: WS
  misc_feature: MA Experiment 20001910 PARAMETER Experiment Name: At_Drought_Reproduction_P Parameter: Timepoint (day) Value: 7
  misc_feature: MA Experiment 20001910 PARAMETER Experiment Name: At_Drought_Reproduction_P Parameter: Tissue Value: Flowers
  misc_feature: MA Experiment 20001910 PARAMETER Experiment Name: At_Drought_Reproduction_P Parameter: Treatment Value: Drought vs. No Drought
acgaataagaaaagaagagaaacatcaaacatctttggtttgcttccctcgtacccgttcttcatacaagtatgatcatctgctgtctctatatagacatacatacaaaaaaaacttgtataagatttgaaactaaaatattaaatttatcctctattttgcaggcacgcctttaattatggattgtcatagaaagtcgttcttgttgaagtttttgtgcgtggcatttctgttaaactacagcaatgttggctttgtagacgcagcaacaaacattggcttgaactacggcctccttggagacaacctcccgcctccatctgaagttatcaacctctacaagtccttaagtgttaccaatattcggatcttcgacacgactacggatgtccttaacgcctttcgagggaatcgcgatattggagttatggtaggcgtgaagaaccaagacttagaggctctttcggtcagcgaagacgctgttaacacctggttcgtgacaaacattgagccttacttagctgatgtcaacatcacgttcattgctgtcgggaacgaagtcatcccaggggaaatcggctcttatgtgctacccgtcatgaaatctctcaccaacattgtcaagtcgaggagtctcccgatcttgatcagcaccacggtggctatgaccaaccttggccagtcgtatccaccttcggccggagatttcatacctcaagcgcgtgaacaacttaccccggtgctgaagtttttgtctcaaacaaatacgcctatcctcgtcaacatctacccctacttcgcatatgctgctgatcctatcaacattcagcttgattatgccatcttcaacaccaacaaggttgtggtccaagttatacaaacatgttcgatgtgatatttgatgctttcgtatgggcaatggagaaagagggcgtgaaggatttaccaatggtggtaacagagaccggatggccatctgctggtaacggaaacttaacaactccagatatcgcatctatatacaataccaattttgttaaacatgtggaaagcggtaaagggacgccaaagagaccaaagagtggcattagtggatttctatttgcgacgttcaatgagaatcaaaagccagcgggaaccgaacaaaattttgggttatataatccaacagatatgaagcccatctacaagatgttttgatttttagattcttgattttatagacaatcccaaatcattagtaaattaatgatgctctaatagttgtaatagagcgggataaaatcaagatctacaacaacattcattttatatgttgtatgatcttcttaaataaaaaaacttaag

SEQ ID NO: 43072 - protein, 238 aa, Arabidopsis thaliana
  peptide (1)..(238): Ceres Seq. ID no. 12326485
  misc_feature (33)..(231): Pfam Name: Glycosyl hydrolases family 17 Pfam Description: Glycosyl hydrolases family 17
  misc_feature (32)..(231): Homolog of NCBI NO: 6448757 NR Description: beta-1,3-glucanase [Musa acuminata]
  misc_feature (33)..(222): Homolog of NCBI NO: 7447972 NR Description: glucan endo-1,3-beta-D-glucosidase (EC 3.2.1.39)
  misc_feature (27)..(222): Homolog of NCBI NO: 4097944 NR Description: beta-1,3-glucanase precursor [Oryza sativa]
  misc_feature (27)..(224): Homolog of NCBI NO: 34908958 NR Description: beta-1,3-glucanase precursor
  misc_feature (2)..(231): Homolog of NCBI NO: 15241384 NR Description: glycosyl hydrolase family 17 (beta-1,3-glucanase)
  misc_feature (5)..(231): Homolog of NCBI NO: 15217468 NR Description: glycosyl hydrolase family 17 (beta-1,3-glucanase)
  misc_feature (5)..(231): Homolog of NCBI NO: 15241326 NR Description: glycosyl hydrolase family 17 (beta-1,3-glucanase
  misc_feature (5)..(231): Homolog of NCBI NO: 21553380 NR Description: beta-1,3-glucanase bg4 [Arabidopsis thaliana]
  misc_feature (5)..(231): Homolog of NCBI NO: 15241325 NR Description: glycosyl hydrolase family 17 (beta-1,3-glucanase
  misc_feature (1)..(231): Homolog of NCBI NO: 15241345 NR Description: glycosyl hydrolase family 17 (beta-1,3-glucanase)
MDCHRKSFLLKFLCVAFLLNYSNVGFVDAATNIGLNYGLLGDNLPPPSEVINLYKSLSVTNIRIFDTTTDVLNAFRGNRDIGVMVGVKNQDLEALSVSEDAVNTWFVTNIEPYLADVNITFIAVGNEVIPGEIGSYVLPVMKSLTNIVKSRSLPILISTTVAMTNLGQSYPPSAGDFIPQAREQLTPVLKFLSQTNTPILVNIYPYFAYAADPINIQLDYAIFNTNKVVVQVIQTCSM

SEQ ID NO: 43073 - protein, 155 aa, Arabidopsis thaliana
  peptide (1)..(155): Ceres Seq. ID no. 12326486
  misc_feature (1)..(148): Pfam Name: Glycosyl hydrolases family 17 Pfam Description: Glycosyl hydrolases family 17
  misc_feature (1)..(148): Homolog of NCBI NO: 6448757 NR Description: beta-1,3-glucanase [Musa acuminata]
  misc_feature (1)..(139): Homolog of NCBI NO: 7447972 NR Description: glucan endo-1,3-beta-D-glucosidase (EC 3.2.1.39)
  misc_feature (1)..(139): Homolog of NCBI NO: 4097944 NR Description: beta-1,3-glucanase precursor [Oryza sativa]
  misc_feature (1)..(141): Homolog of NCBI NO: 34908958 NR Description: beta-1,3-glucanase precursor
  misc_feature (1)..(148): Homolog of NCBI NO: 15241384 NR Description: glycosyl hydrolase family 17 (beta-1,3-glucanase)
  misc_feature (1)..(148): Homolog of NCBI NO: 15217468 NR Description: glycosyl hydrolase family 17 (beta-1,3-glucanase)
  misc_feature (1)..(148): Homolog of NCBI NO: 15241326 NR Description: glycosyl hydrolase family 17 (beta-1,3-glucanase
  misc_feature (1)..(148): Homolog of NCBI NO: 21553380 NR Description: beta-1,3-glucanase bg4 [Arabidopsis thaliana]
  misc_feature (1)..(148): Homolog of NCBI NO: 15241325 NR Description: glycosyl hydrolase family 17 (beta-1,3-glucanase
  misc_feature (1)..(148): Homolog of NCBI NO: 15241345 NR Description: glycosyl hydrolase family 17 (beta-1,3-glucanase)
MVGVKNQDLEALSVSEDAVNTWFVTNIEPYLADVNITFIAVGNEVIPGEIGSYVLPVMKSLTNIVKSRSLPILISTTVAMTNLGQSYPPSAGDFIPQAREQLTPVLKFLSQTNTPILVNIYPYFAYAADPINIQLDYAIFNTNKVVVQVIQTCSM

SEQ ID NO: 43074 - DNA, 1107 bp, Arabidopsis thaliana
  misc_feature (1)..(1107): Ceres Seq. ID no. 12355533
  misc_feature: MA Experiment ID: 108488 Result: Down-regulated in Transcription
  misc_feature: MA Experiment ID: 108573 Result: Up-regulated in Transcription
  misc_feature: MA Experiment 108573 PARAMETER Experiment Name: At_Drought_cDNA_P Parameter: Timepoint (hr) Value: 6
  misc_feature: MA Experiment 108573 PARAMETER Experiment Name: At_Drought_cDNA_P Parameter: Tissue Value: Aerial
  misc_feature: MA Experiment 108573 PARAMETER Experiment Name: At_Drought_cDNA_P Parameter: Treatment Value: Drought vs. No Drought
  misc_feature: MA Experiment ID: 108577 Result: Down-regulated in Transcription
  misc_feature: MA Experiment 108577 PARAMETER Experiment Name: At_42deg_Heat_cDNA_P Parameter: Temperature (deg C) Value: 42 vs. 22
  misc_feature: MA Experiment 108577 PARAMETER Experiment Name: At_42deg_Heat_cDNA_P Parameter: Timepoint (hr) Value: 6
  misc_feature: MA Experiment 108577 PARAMETER Experiment Name: At_42deg_Heat_cDNA_P Parameter: Tissue Value: Aerial
  misc_feature: MA Experiment ID: 108595 Result: Down-regulated in Transcription
  misc_feature: MA Experiment 108595 PARAMETER Experiment Name: At_Ler-pi_Ovule_cDNA_P Parameter: Plant Line Value: null
atcgtaaactataatcggcgtctctccggactcacacctcatcgaaatttggccatctcatctggcttcttcccctccggcgttggataaccatcattacttctcgcgccggcttcgagtggaaaatatggatcctcgtcaattcgaacacaccgttgttgctgataatgatattcacagcattgttatgtcatatcttctgcacaactgcttcaacgaaactgcggactcacttgcttcttccactggagttaagcagcctgcaattgatcgtgataacatggagagaagaaaacaaataatacattttatactggagaggaaggcgttgaaggcttttgaactaactgaacaactagcacaagacttgcttgagaaaaacaaggatttgcaattcgatcttctatgccttcattttgtggagctaatctgtgctgggaactgcaccgaagctctcaaatttggtaagacaagattggctccttttgggaaggtcaaaaaatatgtagaaaagcttgaagacgtaatggcattgctcgcttatgaagaccctgagaaatccccaatgttccatcttttgagctctgaataccgccaacaagttgctgataatctgaaccgcacaattcttgaacacacaaaccacccgagctacacaccaatggaaaggatcatacaacaggtgacagttgtgagacaatacttgactgaggagaatggcaaagatgcgtttcctccattctctctgaaggattctctcaaaggctaagatcgcaggactactccaaagtttgctaggaggaggatatgctaagcattgtcatgtaaatacaaaaagaccttgctcctctctaaagtttgcaaggttagtcttccatggccacaggcggggtttcagtttgctgttacaggagatcaatattgtgaaggacagtttcggcttggtttggtttggtttggttcagttctctaccagaagattgtttcatcaactttgtgtgagtttagtcgataaatctgtaatccatatctttggaatacacatttctctttgtaactatcgtttatgttttgatagaatacttgcaaattcaaggttttattttc

SEQ ID NO: 43075 - protein, 213 aa, Arabidopsis thaliana
  peptide (1)..(213): Ceres Seq. ID no. 12355534
  misc_feature (15)..(196): Homolog of NCBI NO: 25404311 NR Description: hypothetical protein F11P17.12 [imported] -
  misc_feature (15)..(196): Homolog of NCBI NO: 15219873 NR Description: hypothetical protein; protein id: At1g61150.1
  misc_feature (15)..(178): Homolog of NCBI NO: 24643081 NR Description: CG6617-PA [Drosophila melanogaster]
  misc_feature (15)..(199): Homolog of NCBI NO: 37748055 NR Description: Unknown (protein for MGC:73100) [Danio rerio]
  misc_feature (15)..(213): Homolog of NCBI NO: 20863687 NR Description: RIKEN cDNA 2310003C23 [Mus musculus]
  misc_feature (15)..(213): Homolog of NCBI NO: 21594655 NR Description: chromosome 20 open reading frame 11 [Homo sapiens]
  misc_feature (15)..(213): Homolog of NCBI NO: 8923557 NR Description: chromosome 20 open reading frame 11
  misc_feature (51)..(208): Homolog of NCBI NO: 34910006 NR Description: P0413G02.3 [Oryza sativa (japonica
  misc_feature (1)..(166): Homolog of NCBI NO: 34910006 NR Description: P0413G02.3 [Oryza sativa (japonica
  misc_feature (1)..(213): Homolog of NCBI NO: 18390607 NR Description: expressed protein
MDPRQFEHTVVADNDIHSIVMSYLLHNCFNETADSLASSTGVKQPAIDRDNMERRKQIIHFILERKALKAFELTEQLAQDLLEKNKDLQFDLLCLHFVELICAGNCTEALKFGKTRLAPFGKVKKYVEKLEDVMALLAYEDPEKSPMFHLLSSEYRQQVADNLNRTILEHTNHPSYTPMERIIQQVTVVRQYLTEENGKDAFPPFSLKDSLKG

SEQ ID NO: 43076 - protein, 193 aa, Arabidopsis thaliana
  peptide (1)..(193): Ceres Seq. ID no. 12355535
  misc_feature (1)..(176): Homolog of NCBI NO: 25404311 NR Description: hypothetical protein F11P17.12 [imported] -
  misc_feature (1)..(176): Homolog of NCBI NO: 15219873 NR Description: hypothetical protein; protein id: At1g61150.1
  misc_feature (1)..(158): Homolog of NCBI NO: 24643081 NR Description: CG6617-PA [Drosophila melanogaster]
  misc_feature (1)..(179): Homolog of NCBI NO: 37748055 NR Description: Unknown (protein for MGC:73100) [Danio rerio]
  misc_feature (1)..(193): Homolog of NCBI NO: 20863687 NR Description: RIKEN cDNA 2310003C23 [Mus musculus]
  misc_feature (1)..(193): Homolog of NCBI NO: 21594655 NR Description: chromosome 20 open reading frame 11 [Homo sapiens]
  misc_feature (1)..(193): Homolog of NCBI NO: 8923557 NR Description: chromosome 20 open reading frame 11
  misc_feature (31)..(188): Homolog of NCBI NO: 34910006 NR Description: P0413G02.3 [Oryza sativa (japonica
  misc_feature (1)..(146): Homolog of NCBI NO: 34910006 NR Description: P0413G02.3 [Oryza sativa (japonica
  misc_feature (1)..(193): Homolog of NCBI NO: 18390607 NR Description: expressed protein
MSYLLHNCFNETADSLASSTGVKQPAIDRDNMERRKQIIHFILERKALKAFELTEQLAQDLLEKNKDLQFDLLCLHFVELICAGNCTEALKFGKTRLAPFGKVKKYVEKLEDVMALLAYEDPEKSPMFHLLSSEYRQQVADNLNRTILEHTNHPSYTPMERIIQQVTVVRQYLTEENGKDAFPPFSLKDSLKG

SEQ ID NO: 43077 - protein, 162 aa, Arabidopsis thaliana
  peptide (1)..(162): Ceres Seq. ID no. 12355536
  misc_feature (1)..(145): Homolog of NCBI NO: 25404311 NR Description: hypothetical protein F11P17.12 [imported] -
  misc_feature (1)..(145): Homolog of NCBI NO: 15219873 NR Description: hypothetical protein; protein id: At1g61150.1
  misc_feature (1)..(127): Homolog of NCBI NO: 24643081 NR Description: CG6617-PA [Drosophila melanogaster]
  misc_feature (1)..(148): Homolog of NCBI NO: 37748055 NR Description: Unknown (protein for MGC:73100) [Danio rerio]
  misc_feature (1)..(162): Homolog of NCBI NO: 20863687 NR Description: RIKEN cDNA 2310003C23 [Mus musculus]
  misc_feature (1)..(162): Homolog of NCBI NO: 21594655 NR Description: chromosome 20 open reading frame 11 [Homo sapiens]
  misc_feature (1)..(162): Homolog of NCBI NO: 8923557 NR Description: chromosome 20 open reading frame 11
  misc_feature (1)..(157): Homolog of NCBI NO: 34910006 NR Description: P0413G02.3 [Oryza sativa (japonica
  misc_feature (1)..(115): Homolog of NCBI NO: 34910006 NR Description: P0413G02.3 [Oryza sativa (japonica
  misc_feature (1)..(162): Homolog of NCBI NO: 18390607 NR Description: expressed protein
MERRKQIIHFILERKALKAFELTEQLAQDLLEKNKDLQFDLLCLHFVELICAGNCTEALKFGKTRLAPFGKVKKYVEKLEDVMALLAYEDPEKSPMFHLLSSEYRQQVADNLNRTILEHTNHPSYTPMERIIQQVTVVRQYLTEENGKDAFPPFSLKDSLKG

SEQ ID NO: 43078 - DNA, 1139 bp, Arabidopsis thaliana
  misc_feature (1)..(1139): Ceres Seq. ID no. 13491553
  misc_feature: MA Experiment ID: 108434 Result: Down-regulated in Transcription
  misc_feature: MA Experiment 108434 PARAMETER Experiment Name: At_Root_Tips_cDNA_P Parameter: Tissue Value: Root Tips
  misc_feature: MA Experiment ID: 108462 Result: Down-regulated in Transcription
  misc_feature: MA Experiment 108462 PARAMETER Experiment Name: At_Germinating_Seeds_cDNA_P Parameter: Age (day) Value: 2 vs. 0
  misc_feature: MA Experiment 108462 PARAMETER Experiment Name: At_Germinating_Seeds_cDNA_P Parameter: Tissue Value: Germinating Seeds
  misc_feature: MA Experiment ID: 108464 Result: Down-regulated in Transcription
  misc_feature: MA Experiment 108464 PARAMETER Experiment Name: At_Germinating_Seeds_cDNA_P Parameter: Age (day) Value: 4 vs. 0
  misc_feature: MA Experiment 108464 PARAMETER Experiment Name: At_Germinating_Seeds_cDNA_P Parameter: Tissue Value: Germinating Seeds
  misc_feature: MA Experiment ID: 108488 Result: Down-regulated in Transcription
  misc_feature: MA Experiment ID: 108569 Result: Down-regulated in Transcription
  misc_feature: MA Experiment 108569 PARAMETER Experiment Name: At_0.001%_MeJA__cDNA_P Parameter: Timepoint (hr) Value: 6
  misc_feature: MA Experiment 108569 PARAMETER Experiment Name: At_0.001%_MeJA__cDNA_P Parameter: Tissue Value: Aerial
  misc_feature: MA Experiment 108569 PARAMETER Experiment Name: At_0.001%_MeJA__cDNA_P Parameter: Treatment Value: 0.001% MeJA vs. No Treatment
  misc_feature: MA Experiment ID: 108594 Result: Up-regulated in Transcription
  misc_feature: MA Experiment 108594 PARAMETER Experiment Name: At_Ler-rhl_Root_cDNA_P Parameter: Plant Line Value: null
  misc_feature: MA Experiment ID: 20000087 Result: Up-regulated in Transcription
  misc_feature: MA Experiment 20000087 PARAMETER Experiment Name: At_100uM_ABA_Mutants_cDNA_P Parameter: Plant Line Value: WS
  misc_feature: MA Experiment 20000087 PARAMETER Experiment Name: At_100uM_ABA_Mutants_cDNA_P Parameter: Timepoint (hr) Value: 6
  misc_feature: MA Experiment 20000087 PARAMETER Experiment Name: At_100uM_ABA_Mutants_cDNA_P Parameter: Tissue Value: Aerial
  misc_feature: MA Experiment 20000087 PARAMETER Experiment Name: At_100uM_ABA_Mutants_cDNA_P Parameter: Treatment Value: 100uM ABA vs. No Treatment
  misc_feature: MA Experiment ID: 20000089 Result: Up-regulated in Transcription
  misc_feature: MA Experiment ID: 20000090 Result: Up-regulated in Transcription
  misc_feature: MA Experiment ID: 20000179 Result: Up-regulated in Transcription
  misc_feature: MA Experiment 20000179 PARAMETER Experiment Name: At_Germinating_Seeds_P Parameter: Age (hr) Value: 6 vs. 0
  misc_feature: MA Experiment 20000179 PARAMETER Experiment Name: At_Germinating_Seeds_P Parameter: Tissue Value: Germinating Seeds
  misc_feature: MA Experiment ID: 20000184 Result: Down-regulated in Transcription
  misc_feature: MA Experiment 20000184 PARAMETER Experiment Name: At_Shoots__P Parameter: Age (day) Value: 7
  misc_feature: MA Experiment 20000184 PARAMETER Experiment Name: At_Shoots__P Parameter: Tissue Value: Shoots vs. Whole Plant
  misc_feature: MA Experiment ID: 20000185 Result: Down-regulated in Transcription
  misc_feature: MA Experiment 20000185 PARAMETER Experiment Name: At_Roots__P Parameter: Age (day) Value: 7 vs. 21
  misc_feature: MA Experiment 20000185 PARAMETER Experiment Name: At_Roots__P Parameter: Organism Value: A. thaliana
  misc_feature: MA Experiment 20000185 PARAMETER Experiment Name: At_Roots__P Parameter: Tissue Value: Roots vs. Whole Plant
  misc_feature: MA Experiment ID: 20000224 Result: Down-regulated in Transcription
  misc_feature: MA Experiment ID: 20000234 Result: Down-regulated in Transcription
  misc_feature: MA Experiment 20000234 PARAMETER Experiment Name: At_Siliques_P Parameter: Age (day) Value: 21
  misc_feature: MA Experiment 20000234 PARAMETER Experiment Name: At_Siliques_P Parameter: Organism Value: A. thaliana
  misc_feature: MA Experiment 20000234 PARAMETER Experiment Name: At_Siliques_P Parameter: Plant Line Value: WS
  misc_feature: MA Experiment 20000234 PARAMETER Experiment Name: At_Siliques_P Parameter: Tissue Value: Less Than 5mm Siliques vs. Whole Plant
  misc_feature: MA Experiment ID: 20000265 Result: Down-regulated in Transcription
  misc_feature: MA Experiment 20000265 PARAMETER Experiment Name: At_Open_Flower_P Parameter: Age (day) Value: 21
  misc_feature: MA Experiment 20000265 PARAMETER Experiment Name: At_Open_Flower_P Parameter: Plant Line Value: WS
  misc_feature: MA Experiment 20000265 PARAMETER Experiment Name: At_Open_Flower_P Parameter: Tissue Value: Closed Flower vs. Whole Plant
  misc_feature: MA Experiment ID: 20000286 Result: Down-regulated in Transcription
  misc_feature: MA Experiment 20000286 PARAMETER Experiment Name: At_Open_Flower_P Parameter: Age (day) Value: 21
  misc_feature: MA Experiment 20000286 PARAMETER Experiment Name: At_Open_Flower_P Parameter: Plant Line Value: WS
  misc_feature: MA Experiment 20000286 PARAMETER Experiment Name: At_Open_Flower_P Parameter: Tissue Value: Half Open vs. Whole Plant
  misc_feature: MA Experiment ID: 20000438 Result: Down-regulated in Transcription
  misc_feature: MA Experiment 20000438 PARAMETER Experiment Name: At_Shoots__P Parameter: Age (day) Value: 14
  misc_feature: MA Experiment 20000438 PARAMETER Experiment Name: At_Shoots__P Parameter: Tissue Value: Shoots vs. Whole Plant
  misc_feature: MA Experiment ID: 20000439 Result: Down-regulated in Transcription
  misc_feature: MA Experiment 20000439 PARAMETER Experiment Name: At_Roots__P Parameter: Age (day) Value: 14 vs. 21
  misc_feature: MA Experiment 20000439 PARAMETER Experiment Name: At_Roots__P Parameter: Organism Value: A. thaliana
  misc_feature: MA Experiment 20000439 PARAMETER Experiment Name: At_Roots__P Parameter: Tissue Value: Roots vs. Whole Plant
  misc_feature: MA Experiment ID: 20001451 Result: Up-regulated in Transcription
  misc_feature: MA Experiment 20001451 PARAMETER Experiment Name: At_Far-red-induction_P Parameter: Age (day) Value: 7
  misc_feature: MA Experiment 20001451 PARAMETER Experiment Name: At_Far-red-induction_P Parameter: Light Value: Far-red vs. White
  misc_feature: MA Experiment 20001451 PARAMETER Experiment Name: At_Far-red-induction_P Parameter: Organism Value: A. thaliana
  misc_feature: MA Experiment 20001451 PARAMETER Experiment Name: At_Far-red-induction_P Parameter: Plant Line Value: Columbia
  misc_feature: MA Experiment 20001451 PARAMETER Experiment Name: At_Far-red-induction_P Parameter: Timepoint (hr) Value: 24
  misc_feature: MA Experiment 20001451 PARAMETER Experiment Name: At_Far-red-induction_P Parameter: Tissue Value: Whole Plant
  misc_feature: MA Experiment ID: 20001560 Result: Down-regulated in Transcription
  misc_feature: MA Experiment 20001560 PARAMETER Experiment Name: At_Drought_Soil_Dry_P Parameter: Age (day) Value: 28
  misc_feature: MA Experiment 20001560 PARAMETER Experiment Name: At_Drought_Soil_Dry_P Parameter: Organism Value: A. thaliana
  misc_feature: MA Experiment 20001560 PARAMETER Experiment Name: At_Drought_Soil_Dry_P Parameter: Plant Line Value: WS
  misc_feature: MA Experiment 20001560 PARAMETER Experiment Name: At_Drought_Soil_Dry_P Parameter: Post Timepoint (hr) Value: None
  misc_feature: MA Experiment 20001560 PARAMETER Experiment Name: At_Drought_Soil_Dry_P Parameter: Post-Treatment Value: None
  misc_feature: MA Experiment 20001560 PARAMETER Experiment Name: At_Drought_Soil_Dry_P Parameter: Timepoint (day) Value: 14
  misc_feature: MA Experiment 20001560 PARAMETER Experiment Name: At_Drought_Soil_Dry_P Parameter: Treatment Value: Drought vs. No Drought
aaaacgttactgtcactaaatgaaatctatttttctttcttaaattttgctctgacaaatatttttgattgcgtcattttctactttggaaatgtctttgatttagcatttcagttcgctcaaaacatcaaatcttaccttctttagctttcacattagattctggtaattattagcacaaaaaaaagataagccagaatacgaaacaaccaaaaaaagaggagaattctttttttttttttctttccgatgcctccgaccaataattaccgaatctccggcgaaccaccgtctactacgccgtctcatccaccgccaaaaccgaaaacaaggattctctctctattcctcgttggtgtaatcatgttttcaatcttctttctcttcctcgttcttatcggtatcgcctctgttcttatcctccctctcctcctctcttctctccatcgtcaccaccgacgtcgtcgtcgtaatcgccgacaagaatcctcagatgggttatcttcaagattcgtgaaaaagcttcctcaattcaaattctccgaacctagcacatacacacggtacgagagcgattgtgtggtttgttttgatggattcagacaaggacaatggtgtcggaatcttcctggttgtggacacgtgtttcatcgaaagtgtgtggacacttggttgctcaaagcctcgacgtgtcctatttgcagagctagggttagattgtgggaggaagatccacaagaaggagaattatggagatgttttggtcatagaagaagtagtttgctagatttgtaatattgtgtggttatgtagacgtggactcagtctaatggatgataagaatctccaaaactgaagctacgaagaggtacaatacaagccaaggactctttcctccatagagaagtagcgggtcgatcttatggtaatatataagcactaagcagatgggcgtttgatcatataaaccctcactaccattaccaaaaagcaatagccaagagctttttttttcattttctttttgaaagccatggatcggttttcgttcttgaatgttataatggaggttgcgggtattctaaatgaatcccgcaaactctcctcaagaacaaaaagttgatgttctcagtcttggt

SEQ ID NO: 43079 - protein, 181 aa, Arabidopsis thaliana
  peptide (1)..(181): Ceres Seq. ID no. 13491554
  misc_feature (110)..(151): Pfam Name: Zinc finger, C3HC4 type (RING finger) Pfam Description: Zinc finger, C3HC4 type (RING finger)
  misc_feature (8)..(162): Homolog of NCBI NO: 15228395 NR Description: RING zinc finger protein -related [Arabidopsis
  misc_feature (50)..(155): Homolog of NCBI NO: 34903920 NR Description: OSJNBa0038J17.5 [Oryza sativa (japonica
  misc_feature (47)..(165): Homolog of NCBI NO: 15227929 NR Description: RING zinc finger protein -related [Arabidopsis
  misc_feature (36)..(155): Homolog of NCBI NO: 21593762 NR Description: unknown [Arabidopsis thaliana]
  misc_feature (36)..(155): Homolog of NCBI NO: 15238323 NR Description: zinc finger (C3HC4-type RING finger) protein
  misc_feature (1)..(161): Homolog of NCBI NO: 15235482 NR Description: zinc finger (C3HC4-type RING finger) protein
  misc_feature (9)..(161): Homolog of NCBI NO: 15226289 NR Description: zinc finger (C3HC4-type RING finger) protein
  misc_feature (9)..(169): Homolog of NCBI NO: 15234713 NR Description: zinc finger (C3HC4-type RING finger) protein
  misc_feature (1)..(181): Homolog of NCBI NO: 21617980 NR Description: putative RING zinc finger protein [Arabidopsis
  misc_feature (1)..(181): Homolog of NCBI NO: 15224210 NR Description: zinc finger (C3HC4-type RING finger) protein
MPPTNNYRISGEPPSTTPSHPPPKPKTRILSLFLVGVIMFSIFFLFLVLIGIASVLILPLLLSSLHRHHRRRRRNRRQESSDGLSSRFVKKLPQFKFSEPSTYTRYESDCVVCFDGFRQGQWCRNLPGCGHVFHRKCVDTWLLKASTCPICRARVRLWEEDPQEGELWRCFGHRRSSLLDL

SEQ ID NO: 43080 - protein, 143 aa, Arabidopsis thaliana
  peptide (1)..(143): Ceres Seq. ID no. 13491555
  misc_feature (72)..(113): Pfam Name: Zinc finger, C3HC4 type (RING finger) Pfam Description: Zinc finger, C3HC4 type (RING finger)
  misc_feature (1)..(124): Homolog of NCBI NO: 15228395 NR Description: RING zinc finger protein -related [Arabidopsis
  misc_feature (12)..(117): Homolog of NCBI NO: 34903920 NR Description: OSJNBa0038J17.5 [Oryza sativa (japonica
  misc_feature (9)..(127): Homolog of NCBI NO: 15227929 NR Description: RING zinc finger protein -related [Arabidopsis
  misc_feature (1)..(117): Homolog of NCBI NO: 21593762 NR Description: unknown [Arabidopsis thaliana]
  misc_feature (1)..(117): Homolog of NCBI NO: 15238323 NR Description: zinc finger (C3HC4-type RING finger) protein
  misc_feature (1)..(123): Homolog of NCBI NO: 15235482 NR Description: zinc finger (C3HC4-type RING finger) protein
  misc_feature (1)..(123): Homolog of NCBI NO: 15226289 NR Description: zinc finger (C3HC4-type RING finger) protein
  misc_feature (1)..(131): Homolog of NCBI NO: 15234713 NR Description: zinc finger (C3HC4-type RING finger) protein
  misc_feature (1)..(143): Homolog of NCBI NO: 21617980 NR Description: putative RING zinc finger protein [Arabidopsis
  misc_feature (1)..(143): Homolog of NCBI NO: 15224210 NR Description: zinc finger (C3HC4-type RING finger) protein
MFSIFFLFLVLIGIASVLILPLLLSSLHRHHRRRRRNRRQESSDGLSSRFVKKLPQFKFSEPSTYTRYESDCVVCFDGFRQGQWCRNLPGCGHVFHRKCVDTWLLKASTCPICRARVRLWEEDPQEGELWRCFGHRRSSLLDL

SEQ ID NO: 43081 - DNA, 912 bp, Arabidopsis thaliana
  misc_feature (1)..(912): Ceres Seq. ID no. 12326948
  misc_feature: MA Experiment ID: 108573 Result: Down-regulated in Transcription
  misc_feature: MA Experiment 108573 PARAMETER Experiment Name: At_Drought_cDNA_P Parameter: Timepoint (hr) Value: 6
  misc_feature: MA Experiment 108573 PARAMETER Experiment Name: At_Drought_cDNA_P Parameter: Tissue Value: Aerial
  misc_feature: MA Experiment 108573 PARAMETER Experiment Name: At_Drought_cDNA_P Parameter: Treatment Value: Drought vs. No Drought
  misc_feature: MA Experiment ID: 108576 Result: Up-regulated in Transcription
  misc_feature: MA Experiment 108576 PARAMETER Experiment Name: At_42deg_Heat_cDNA_P Parameter: Temperature (deg C) Value: 42 vs. 22
  misc_feature: MA Experiment 108576 PARAMETER Experiment Name: At_42deg_Heat_cDNA_P Parameter: Timepoint (hr) Value: 1
  misc_feature: MA Experiment 108576 PARAMETER Experiment Name: At_42deg_Heat_cDNA_P Parameter: Tissue Value: Aerial
  misc_feature: MA Experiment ID: 20000180 Result: Down-regulated in Transcription
  misc_feature: MA Experiment 20000180 PARAMETER Experiment Name: At_Germinating_Seeds_P Parameter: Age (hr) Value: 24 vs. 0
  misc_feature: MA Experiment 20000180 PARAMETER Experiment Name: At_Germinating_Seeds_P Parameter: Tissue Value: Germinating Seeds
  misc_feature: MA Experiment ID: 20000495 Result: Down-regulated in Transcription
  misc_feature: MA Experiment 20000495 PARAMETER Experiment Name: At_Guard_Cells_P Parameter: Harvest Date Value: 8/2/2002
  misc_feature: MA Experiment 20000495 PARAMETER Experiment Name: At_Guard_Cells_P Parameter: Organism Value: A. thaliana
  misc_feature: MA Experiment 20000495 PARAMETER Experiment Name: At_Guard_Cells_P Parameter: Tissue Value: Guard Cells vs. Leaves
aacctaaaacgcagagtgtgttgaagacgacggagacggcgacggcgagaagcaatgacgactgaggaaaataaaacaagcagaaataggaagaggaagagacagagaaaccctaaaccttctaaagaagaacctatcgagacgacaccgaagaatcaaaacgagaaaaagaatcaaagagataccaaaaaccaacaacatggaggttcttcagctccatcgaaacgacctaaaccttccaatttcctcgatgcgcttagagagagattatctggtgggcaatttaggatgctcaatgagaaactctacacttgctctggaaaagaagctttagactactttaaagaagatccacaaatgtttgatatgtatcatacagggtatcaacaacaaatgtcaaattggcctgagcttcctgttaactccattattaattggctattgtctaatagctcttctttagttgtggctgattttggctgtggtgatgcaaggattgctaaaagtgtgaagaacaaagttttctcctttgatcttgtctcaaagaacccctctgttattgcctgcgatatgtcaaatacttcacttgagtcttcatcagtggatgttgcagttttctgtctttcattaatgggaacaaactattctagttatatcaaagaagcacatcgagttcttcgtccaagtggtatgcttcttatagcggaagtaaagagcaggtttgatccaaacaatggaggagcagacccaaaagactttgtgaaagccgtttgtgatcttggatttacttcggttttaaaggacttctccaataagatgttcatcttattccatttcaagaaaaaggttagtgaaacatacttcctttcaggagcagatgaattcaaatcagaagataataaagtggcctga

SEQ ID NO: 43082 - protein, 285 aa, Arabidopsis thaliana
  peptide (1)..(285): Ceres Seq. ID no. 12326949
  misc_feature (1)..(263): Homolog of NCBI NO: 17542244 NR Description: Rrp8p like [Caenorhabditis elegans]
  misc_feature (9)..(263): Homolog of NCBI NO: 12758125 NR Description: KIAA0409 protein [Homo sapiens]
  misc_feature (9)..(263): Homolog of NCBI NO: 2662099 NR Description: KIAA0409 [Homo sapiens]
  misc_feature (1)..(263): Homolog of NCBI NO: 34858882 NR Description: similar to RIKEN cDNA 1500003O22 [Rattus
  misc_feature (1)..(263): Homolog of NCBI NO: 26346719 NR Description: unnamed protein product [Mus musculus]
  misc_feature (1)..(263): Homolog of NCBI NO: 20270198 NR Description: RIKEN cDNA 1500003O22 [Mus musculus]
  misc_feature (1)..(263): Homolog of NCBI NO: 31200749 NR Description: ENSANGP00000018459 [Anopheles gambiae]
  misc_feature (249)..(264): Homolog of NCBI NO: 9758079 NR Description: contains similarity to unknown
  misc_feature (1)..(265): Homolog of NCBI NO: 9758079 NR Description: contains similarity to unknown
  misc_feature (1)..(264): Homolog of NCBI NO: 30693618 NR Description: expressed protein [Arabidopsis thaliana]
MTTEENKTSRNRKRKRQRNPKPSKEEPIETTPKNQNEKKNQRDTKNQQHGGSSAPSKRPKPSNFLDALRERLSGGQFRMLNEKLYTCSGKEALDYFKEDPQMFDMYHTGYQQQMSNWPELPVNSIINWLLSNSSSLVVADFGCGDARIAKSVKNKVFSFDLVSKNPSVIACDMSNTSLESSSVDVAVFCLSLMGTNYSSYIKEAHRVLRPSGMLLIAEVKSRFDPNNGGADPKDFVKAVCDLGFTSVLKDFSNKMFILFHFKKKVSETYFLSGADEFKSEDNKVA

SEQ ID NO: 43083 - protein, 207 aa, Arabidopsis thaliana
  peptide (1)..(207): Ceres Seq. ID no. 12326950
  misc_feature (1)..(185): Homolog of NCBI NO: 17542244 NR Description: Rrp8p like [Caenorhabditis elegans]
  misc_feature (1)..(185): Homolog of NCBI NO: 12758125 NR Description: KIAA0409 protein [Homo sapiens]
  misc_feature (1)..(185): Homolog of NCBI NO: 2662099 NR Description: KIAA0409 [Homo sapiens]
  misc_feature (1)..(185): Homolog of NCBI NO: 34858882 NR Description: similar to RIKEN cDNA 1500003O22 [Rattus
  misc_feature (1)..(185): Homolog of NCBI NO: 26346719 NR Description: unnamed protein product [Mus musculus]
  misc_feature (1)..(185): Homolog of NCBI NO: 20270198 NR Description: RIKEN cDNA 1500003O22 [Mus musculus]
  misc_feature (1)..(185): Homolog of NCBI NO: 31200749 NR Description: ENSANGP00000018459 [Anopheles gambiae]
  misc_feature (171)..(186): Homolog of NCBI NO: 9758079 NR Description: contains similarity to unknown
  misc_feature (1)..(187): Homolog of NCBI NO: 9758079 NR Description: contains similarity to unknown
  misc_feature (1)..(186): Homolog of NCBI NO: 30693618 NR Description: expressed protein [Arabidopsis thaliana]
MLNEKLYTCSGKEALDYFKEDPQMFDMYHTGYQQQMSNWPELPVNSIINWLLSNSSSLVVADFGCGDARIAKSVKNKVFSFDLVSKNPSVIACDMSNTSLESSSVDVAVFCLSLMGTNYSSYIKEAHRVLRPSGMLLIAEVKSRFDPNNGGADPKDFVKAVCDLGFTSVLKDFSNKMFILFHFKKKVSETYFLSGADEFKSEDNKVA

SEQ ID NO: 43084 - protein, 184 aa, Arabidopsis thaliana
  peptide (1)..(184): Ceres Seq. ID no. 12326951
  misc_feature (1)..(162): Homolog of NCBI NO: 17542244 NR Description: Rrp8p like [Caenorhabditis elegans]
  misc_feature (1)..(162): Homolog of NCBI NO: 12758125 NR Description: KIAA0409 protein [Homo sapiens]
  misc_feature (1)..(162): Homolog of NCBI NO: 2662099 NR Description: KIAA0409 [Homo sapiens]
  misc_feature (1)..(162): Homolog of NCBI NO: 34858882 NR Description: similar to RIKEN cDNA 1500003O22 [Rattus
  misc_feature (1)..(162): Homolog of NCBI NO: 26346719 NR Description: unnamed protein product [Mus musculus]
  misc_feature (1)..(162): Homolog of NCBI NO: 20270198 NR Description: RIKEN cDNA 1500003O22 [Mus musculus]
  misc_feature (1)..(162): Homolog of NCBI NO: 31200749 NR Description: ENSANGP00000018459 [Anopheles gambiae]
  misc_feature (148)..(163): Homolog of NCBI NO: 9758079 NR Description: contains similarity to unknown
  misc_feature (1)..(164): Homolog of NCBI NO: 9758079 NR Description: contains similarity to unknown
  misc_feature (1)..(163): Homolog of NCBI NO: 30693618 NR Description: expressed protein [Arabidopsis thaliana]
MFDMYHTGYQQQMSNWPELPVNSIINWLLSNSSSLVVADFGCGDARIAKSVKNKVFSFDLVSKNPSVIACDMSNTSLESSSVDVAVFCLSLMGTNYSSYIKEAHRVLRPSGMLLIAEVKSRFDPNNGGADPKDFVKAVCDLGFTSVLKDFSNKMFILFHFKKKVSETYFLSGADEFKSEDNKVA

SEQ ID NO: 43085 - DNA, 1476 bp, Arabidopsis thaliana
  misc_feature (1)..(1476): Ceres Seq. ID no. 13504920
  misc_feature: MA Experiment ID: 108464 Result: Down-regulated in Transcription
  misc_feature: MA Experiment 108464 PARAMETER Experiment Name: At_Germinating_Seeds_cDNA_P Parameter: Age (day) Value: 4 vs. 0
  misc_feature: MA Experiment 108464 PARAMETER Experiment Name: At_Germinating_Seeds_cDNA_P Parameter: Tissue Value: Germinating Seeds
  misc_feature: MA Experiment ID: 20000265 Result: Up-regulated in Transcription
  misc_feature: MA Experiment 20000265 PARAMETER Experiment Name: At_Open_Flower_P Parameter: Age (day) Value: 21
  misc_feature: MA Experiment 20000265 PARAMETER Experiment Name: At_Open_Flower_P Parameter: Plant Line Value: WS
  misc_feature: MA Experiment 20000265 PARAMETER Experiment Name: At_Open_Flower_P Parameter: Tissue Value: Closed Flower vs. Whole Plant
  misc_feature: MA Experiment ID: 20000495 Result: Up-regulated in Transcription
  misc_feature: MA Experiment 20000495 PARAMETER Experiment Name: At_Guard_Cells_P Parameter: Harvest Date Value: 8/2/2002
  misc_feature: MA Experiment 20000495 PARAMETER Experiment Name: At_Guard_Cells_P Parameter: Organism Value: A. thaliana
  misc_feature: MA Experiment 20000495 PARAMETER Experiment Name: At_Guard_Cells_P Parameter: Tissue Value: Guard Cells vs. Leaves
  misc_feature: MA Experiment ID: 20000794 Result: Up-regulated in Transcription
  misc_feature: MA Experiment 20000794 PARAMETER Experiment Name: At_Petals_P Parameter: Age (day) Value: 23-25 days
  misc_feature: MA Experiment 20000794 PARAMETER Experiment Name: At_Petals_P Parameter: Plant Line Value: WS
  misc_feature: MA Experiment 20000794 PARAMETER Experiment Name: At_Petals_P Parameter: Tissue Value: Petals vs. Whole plant
gtaatgatatgaactttacaaaagaaaattgtcaatttcgaaaaatgttgagcacaagctctgatcttcatggccgtcttctccgattatcagaaccaatagcagagattcttagacgtacacagtacacaccgcaagagagcagcaaagtatccaccaaagatatactcttgtccttgttaccaaacacttcgtcttctcgtctcgccaatgaagaatcgatcaaaagtctcgcgcttgcttgtgcccttctcgcttcttcacgttcatccactcacgaacttctctcatggattccagaaaacctctctgtcatgggggaatctacattttgggagatttcaagggattgtttcagtgatttttctagcaacagtaatgctgagaagcttgtggaattggtagaggatagtgagaagatcgaaatgttgccgatagttttgccggagttaaaagatggaatcgaaaagagttcacttggtaaaggcagtgatgcagaggatgtttcagctgcaatggctagaacacctgttggttatgctatacttgctgctcaccagctcaggtggtttgttactcaggttaaaaaaccgaatttggtgaaattttgtaacttggtggttccttgtgctttgacagcacttgatcattggtctcctgaagtcaaagggcagggtatgataacctttgttcatcttgctaaaaatgtgagttccggtgatcttggtttgtatggagatgtggttcttgatgcgtgttgccagaatatagcttccgatgatgagatttggatacatgtggtagagttatctgtgcttcttgttactaaaatccacccaaataatcctcgaagcccgtggtatgagaagatcatgaatgagatgctcgggcatttggaacgccaaccaagaaataaggagcgacgtatcacttggctaagatttgttgagccactcttgaactctctagggcttttcttacttgctcattttcgacgtatcttccctcttttctttcagtggatgcattcagacgacgccgaaacagttctgttggttcttgagagactggagacagttgtgaggttgacgtggattagacactcacctgtgttcccaagattggtggatgagcttgtttccttgtacaaagagtcatcgatgcgtaaggatcgcgatgatattagacctcttatcctccgtatcttgatgctactccgccagtgcaaaggtctacggtttgagtcagcgtggagtcaataccaggaggatccaaatctgagtactgttagtcaacatatatggactagttcaagttgatctcaagagcgtatgtttgactaaaacagccatttttttttctaattttcgatattagtttggtctaggcctagtgatgcaagtaattactggcgaatcctcgaatttttgtaagcatttggctcttgactcttcttaagctaatctgatttgatac

SEQ ID NO: 43086 - protein, 438 aa, Arabidopsis thaliana
  peptide (1)..(438): Ceres Seq. ID no. 13504921
  misc_feature (105)..(286): Homolog of NCBI NO: 25370807 NR Description: hypothetical protein At2g39910 [imported] -
  misc_feature (15)..(438): Homolog of NCBI NO: 20198306 NR Description: expressed protein [Arabidopsis thaliana]
  misc_feature (3)..(438): Homolog of NCBI NO: 26451294 NR Description: unknown protein [Arabidopsis thaliana]
  misc_feature (3)..(438): Homolog of NCBI NO: 30688076 NR Description: expressed protein [Arabidopsis thaliana]
NDMNFTKENCQFRKMLSTSSDLHGRLLRLSEPIAEILRRTQYTPQESSKVSTKDILLSLLPNTSSSRLANEESIKSLALACALLASSRSSTHELLSWIPENLSVMGESTFWEISRDCFSDFSSNSNAEKLVELVEDSEKIEMLPIVLPELKDGIEKSSLGKGSDAEDVSAAMARTPVGYAILAAHQLRWFVTQVKKPNLVKFCNLVVPCALTALDHWSPEVKGQGMITFVHLAKNVSSGDLGLYGDVVLDACCQNIASDDEIWIHVVELSVLLVTKIHPNNPRSPWYEKIMNEMLGHLERQPRNKERRITWLRFVEPLLNSLGLFLLAHFRRIFPLFFQWMHSDDAETVLLVLERLETVVRLTWIRHSPVFPRLVDELVSLYKESSMRKDRDDIRPLILRILMLLRQCKGLRFESAWSQYQEDPNLSTVSQHIWTSSS

SEQ ID NO: 43087 - protein, 436 aa, Arabidopsis thaliana
  peptide (1)..(436): Ceres Seq. ID no. 13504922
  misc_feature (103)..(284): Homolog of NCBI NO: 25370807 NR Description: hypothetical protein At2g39910 [imported] -
  misc_feature (13)..(436): Homolog of NCBI NO: 20198306 NR Description: expressed protein [Arabidopsis thaliana]
  misc_feature (1)..(436): Homolog of NCBI NO: 26451294 NR Description: unknown protein [Arabidopsis thaliana]
  misc_feature (1)..(436): Homolog of NCBI NO: 30688076 NR Description: expressed protein [Arabidopsis thaliana]
MNFTKENCQFRKMLSTSSDLHGRLLRLSEPIAEILRRTQYTPQESSKVSTKDILLSLLPNTSSSRLANEESIKSLALACALLASSRSSTHELLSWIPENLSVMGESTFWEISRDCFSDFSSNSNAEKLVELVEDSEKIEMLPIVLPELKDGIEKSSLGKGSDAEDVSAAMARTPVGYAILAAHQLRWFVTQVKKPNLVKFCNLVVPCALTALDHWSPEVKGQGMITFVHLAKNVSSGDLGLYGDVVLDACCQNIASDDEIWIHVVELSVLLVTKIHPNNPRSPWYEKIMNEMLGHLERQPRNKERRITWLRFVEPLLNSLGLFLLAHFRRIFPLFFQWMHSDDAETVLLVLERLETVVRLTWIRHSPVFPRLVDELVSLYKESSMRKDRDDIRPLILRILMLLRQCKGLRFESAWSQYQEDPNLSTVSQHIWTSSS

SEQ ID NO: 43088 - protein, 424 aa, Arabidopsis thaliana
  peptide (1)..(424): Ceres Seq. ID no. 13504923
  misc_feature (91)..(272): Homolog of NCBI NO: 25370807 NR Description: hypothetical protein At2g39910 [imported] -
  misc_feature (1)..(424): Homolog of NCBI NO: 20198306 NR Description: expressed protein [Arabidopsis thaliana]
  misc_feature (1)..(424): Homolog of NCBI NO: 26451294 NR Description: unknown protein [Arabidopsis thaliana]
  misc_feature (1)..(424): Homolog of NCBI NO: 30688076 NR Description: expressed protein [Arabidopsis thaliana]
MLSTSSDLHGRLLRLSEPIAEILRRTQYTPQESSKVSTKDILLSLLPNTSSSRLANEESIKSLALACALLASSRSSTHELLSWIPENLSVMGESTFWEISRDCFSDFSSNSNAEKLVELVEDSEKIEMLPIVLPELKDGIEKSSLGKGSDAEDVSAAMARTPVGYAILAAHQLRWFVTQVKKPNLVKFCNLVVPCALTALDHWSPEVKGQGMITFVHLAKNVSSGDLGLYGDVVLDACCQNIASDDEIWIHVVELSVLLVTKIHPNNPRSPWYEKIMNEMLGHLERQPRNKERRITWLRFVEPLLNSLGLFLLAHFRRIFPLFFQWMHSDDAETVLLVLERLETVVRLTWIRHSPVFPRLVDELVSLYKESSMRKDRDDIRPLILRILMLLRQCKGLRFESAWSQYQEDPNLSTVSQHIWTSSS

SEQ ID NO: 43089 - DNA, 1644 bp, Arabidopsis thaliana
  misc_feature (1)..(1644): Ceres Seq. ID no. 12337218
  misc_feature: MA Experiment ID: 108461 Result: Up-regulated in Transcription
  misc_feature: MA Experiment 108461 PARAMETER Experiment Name: At_Germinating_Seeds_cDNA_P Parameter: Age (day) Value: 1 vs. 0
  misc_feature: MA Experiment 108461 PARAMETER Experiment Name: At_Germinating_Seeds_cDNA_P Parameter: Tissue Value: Germinating Seeds
  misc_feature: MA Experiment ID: 108594 Result: Up-regulated in Transcription
  misc_feature: MA Experiment 108594 PARAMETER Experiment Name: At_Ler-rhl_Root_cDNA_P Parameter: Plant Line Value: null
  misc_feature: MA Experiment ID: 20000179 Result: Up-regulated in Transcription
  misc_feature: MA Experiment 20000179 PARAMETER Experiment Name: At_Germinating_Seeds_P Parameter: Age (hr) Value: 6 vs. 0
  misc_feature: MA Experiment 20000179 PARAMETER Experiment Name: At_Germinating_Seeds_P Parameter: Tissue Value: Germinating Seeds
  misc_feature: MA Experiment ID: 20000180 Result: Up-regulated in Transcription
  misc_feature: MA Experiment 20000180 PARAMETER Experiment Name: At_Germinating_Seeds_P Parameter: Age (hr) Value: 24 vs. 0
  misc_feature: MA Experiment 20000180 PARAMETER Experiment Name: At_Germinating_Seeds_P Parameter: Tissue Value: Germinating Seeds
  misc_feature: MA Experiment ID: 20000184 Result: Down-regulated in Transcription
  misc_feature: MA Experiment 20000184 PARAMETER Experiment Name: At_Shoots__P Parameter: Age (day) Value: 7
  misc_feature: MA Experiment 20000184 PARAMETER Experiment Name: At_Shoots__P Parameter: Tissue Value: Shoots vs. Whole Plant
  misc_feature: MA Experiment ID: 20001451 Result: Up-regulated in Transcription
  misc_feature: MA Experiment 20001451 PARAMETER Experiment Name: At_Far-red-induction_P Parameter: Age (day) Value: 7
  misc_feature: MA Experiment 20001451 PARAMETER Experiment Name: At_Far-red-induction_P Parameter: Light Value: Far-red vs. White
  misc_feature: MA Experiment 20001451 PARAMETER Experiment Name: At_Far-red-induction_P Parameter: Organism Value: A. thaliana
  misc_feature: MA Experiment 20001451 PARAMETER Experiment Name: At_Far-red-induction_P Parameter: Plant Line Value: Columbia
  misc_feature: MA Experiment 20001451 PARAMETER Experiment Name: At_Far-red-induction_P Parameter: Timepoint (hr) Value: 24
  misc_feature: MA Experiment 20001451 PARAMETER Experiment Name: At_Far-red-induction_P Parameter: Tissue Value: Whole Plant
ctggattttctagagatttgtgacaaatgtcaaatgggttgttgaatcttcacgtgtcctcttttctcctcttatctcatctaatttgtttctttagttttgttcaactcaagcacatccgagaaagtcatcgtctttgaacatcaaattgcgttttgtttgtcaaatgacttaagttcttgatctttttcttgtaggggttttttctctgcactccacggtcatggcttcgtctacggctcagagcaagaagcagtttaagaggtctatgactaagaaatcacattcatggtggtgggatagtcacaattgtcccaagaactcaaaatggcttgcagagaatctagaaaagatggatgatcgagtgaaccacatgttaaaactgattgaagaagacgcagactcttttgccaagaaagctcagatgtatttccagaagcgtcccgagttaattcagcttgtcgaggaattttaccgcatgtatcgtgcattggctgaacgttatgatcaagctagtggtgagctacagaagaaccatacatctgagatccagtcacagagctctcttgagttatcatctcctaccaaagagaagttgagtcgccgtcaatctggccataaagaagaggaagattcatcatctttgacagattccggttctgattctgatcattcctctgccaatgatgaagacggtgacgaggcattgatccgtagaatggctgaacttgagcttgagcttcaagagacgaaacagaagctccttctccagcaggaaagtgttgatggtgacaacaatgttgatctccttcacaaaattactacatatgagggagagcttaaagaagctaatgagaagatgcgaatgcacgaagacgagattgctaatctgaagaatcagcttcagagctgcatgtcctttgacgcagaggatcaacttggtactgcagaaaagagtcttgatttggataaagaggacactgaagcagatgcagaagctacaaaagtgctagccttggaggaagagctgagtatcgcgaaagagaagcttcagcactttgagaaagagacttattctctgaaaaatgagctcgagattagtaaagctgctgaggataagctgaagagcttacaacatgagctcgagttggccaagaaagacgttgagacccaacgaaacaagctcaacgcagagaagaaagaagtcttgaagttgcaggagagattggcaatggtgaaaactagtttacaggatagagataacgagataagggcattgaaaactgcggtttcagacgctgaacagaagatattccccgaaaaagcacagatcaagggagaaatgtcgaagatgcttgaagaacgaagccaacttggagagcaactgagagagctggaatcacatataaggctgatcaaggaagagaaagctgaaacagaggagaagcttagaggaggaactgagaaaatcagcgtaatgagagacgagagcaatgtgctaagagaagagattgggaagagagaagagacgataaaggaaacggaaaagcatatggaggagcttcatatggagcaagtgaggctgagaagacggtcgagtgagcttacggaagaagtggaaaggacgagagtgtctgcatcggg

SEQ ID NO: 43090 - protein, 473 aa, Arabidopsis thaliana
  peptide (1)..(473): Ceres Seq. ID no. 12337219
  misc_feature (32)..(468): Pfam Name: Myosin tail Pfam Description: Myosin tail
  misc_feature (132)..(457): Homolog of NCBI NO: 30697043 NR Description: contains similarity to unknown protein
  misc_feature (9)..(445): Homolog of NCBI NO: 34896152 NR Description: P0701D05.31 [Oryza sativa (japonica
  misc_feature (132)..(469): Homolog of NCBI NO: 30697046 NR Description: contains similarity to unknown protein
  misc_feature (132)..(469): Homolog of NCBI NO: 8777333 NR Description: contains similarity to unknown
  misc_feature (7)..(469): Homolog of NCBI NO: 30697043 NR Description: contains similarity to unknown protein
  misc_feature (7)..(469): Homolog of NCBI NO: 30697046 NR Description: contains similarity to unknown protein
  misc_feature (7)..(469): Homolog of NCBI NO: 8777333 NR Description: contains similarity to unknown
  misc_feature (10)..(451): Homolog of NCBI NO: 34896156 NR Description: P0701D05.33 [Oryza sativa (japonica
  misc_feature (4)..(472): Homolog of NCBI NO: 15224515 NR Description: unknown protein; protein id: At2g30500.1
  misc_feature (1)..(472): Homolog of NCBI NO: 28416683 NR Description: At2g30500 [Arabidopsis thaliana]
MASSTAQSKKQFKRSMTKKSHSWWWDSHNCPKNSKWLAENLEKMDDRVNHMLKLIEEDADSFAKKAQMYFQKRPELIQLVEEFYRMYRALAERYDQASGELQKNHTSEIQSQSSLELSSPTKEKLSRRQSGHKEEEDSSSLTDSGSDSDHSSANDEDGDEALIRRMAELELELQETKQKLLLQQESVDGDNNVDLLHKITTYEGELKEANEKMRMHEDEIANLKNQLQSCMSFDAEDQLGTAEKSLDLDKEDTEADAEATKVLALEEELSIAKEKLQHFEKETYSLKNELEISKAAEDKLKSLQHELELAKKDVETQRNKLNAEKKEVLKLQERLAMVKTSLQDRDNEIRALKTAVSDAEQKIFPEKAQIKGEMSKMLEERSQLGEQLRELESHIRLIKEEKAETEEKLRGGTEKISVMRDESNVLREEIGKREETIKETEKHMEELHMEQVRLRRRSSELTEEVERTRVSAS

SEQ ID NO: 43091 - protein, 458 aa, Arabidopsis thaliana
  peptide (1)..(458): Ceres Seq. ID no. 12337220
  misc_feature (17)..(453): Pfam Name: Myosin tail Pfam Description: Myosin tail
  misc_feature (117)..(442): Homolog of NCBI NO: 30697043 NR Description: contains similarity to unknown protein
  misc_feature (1)..(430): Homolog of NCBI NO: 34896152 NR Description: P0701D05.31 [Oryza sativa (japonica
  misc_feature (117)..(454): Homolog of NCBI NO: 30697046 NR Description: contains similarity to unknown protein
  misc_feature (117)..(454): Homolog of NCBI NO: 8777333 NR Description: contains similarity to unknown
  misc_feature (1)..(454): Homolog of NCBI NO: 30697043 NR Description: contains similarity to unknown protein
  misc_feature (1)..(454): Homolog of NCBI NO: 30697046 NR Description: contains similarity to unknown protein
  misc_feature (1)..(454): Homolog of NCBI NO: 8777333 NR Description: contains similarity to unknown
  misc_feature (1)..(436): Homolog of NCBI NO: 34896156 NR Description: P0701D05.33 [Oryza sativa (japonica
  misc_feature (1)..(457): Homolog of NCBI NO: 15224515 NR Description: unknown protein; protein id: At2g30500.1
  misc_feature (1)..(457): Homolog of NCBI NO: 28416683 NR Description: At2g30500 [Arabidopsis thaliana]
MTKKSHSWWWDSHNCPKNSKWLAENLEKMDDRVNHMLKLIEEDADSFAKKAQMYFQKRPELIQLVEEFYRMYRALAERYDQASGELQKNHTSEIQSQSSLELSSPTKEKLSRRQSGHKEEEDSSSLTDSGSDSDHSSANDEDGDEALIRRMAELELELQETKQKLLLQQESVDGDNNVDLLHKITTYEGELKEANEKMRMHEDEIANLKNQLQSCMSFDAEDQLGTAEKSLDLDKEDTEADAEATKVLALEEELSIAKEKLQHFEKETYSLKNELEISKAAEDKLKSLQHELELAKKDVETQRNKLNAEKKEVLKLQERLAMVKTSLQDRDNEIRALKTAVSDAEQKIFPEKAQIKGEMSKMLEERSQLGEQLRELESHIRLIKEEKAETEEKLRGGTEKISVMRDESNVLREEIGKREETIKETEKHMEELHMEQVRLRRRSSELTEEVERTRVSAS

SEQ ID NO: 43092 - protein, 430 aa, Arabidopsis thaliana
  peptide (1)..(430): Ceres Seq. ID no. 12337221
  misc_feature (1)..(425): Pfam Name: Myosin tail Pfam Description: Myosin tail
  misc_feature (89)..(414): Homolog of NCBI NO: 30697043 NR Description: contains similarity to unknown protein
  misc_feature (1)..(402): Homolog of NCBI NO: 34896152 NR Description: P0701D05.31 [Oryza sativa (japonica
  misc_feature (89)..(426): Homolog of NCBI NO: 30697046 NR Description: contains similarity to unknown protein
  misc_feature (89)..(426): Homolog of NCBI NO: 8777333 NR Description: contains similarity to unknown
  misc_feature (1)..(426): Homolog of NCBI NO: 30697046 NR Description: contains similarity to unknown protein
  misc_feature (1)..(426): Homolog of NCBI NO: 30697043 NR Description: contains similarity to unknown protein
  misc_feature (1)..(426): Homolog of NCBI NO: 8777333 NR Description: contains similarity to unknown
  misc_feature (1)..(408): Homolog of NCBI NO: 34896156 NR Description: P0701D05.33 [Oryza sativa (japonica
  misc_feature (1)..(429): Homolog of NCBI NO: 15224515 NR Description: unknown protein; protein id: At2g30500.1
  misc_feature (1)..(429): Homolog of NCBI NO: 28416683 NR Description: At2g30500 [Arabidopsis thaliana]
MDDRVNHMLKLIEEDADSFAKKAQMYFQKRPELIQLVEEFYRMYRALAERYDQASGELQKNHTSEIQSQSSLELSSPTKEKLSRRQSGHKEEEDSSSLTDSGSDSDHSSANDEDGDEALIRRMAELELELQETKQKLLLQQESVDGDNNVDLLHKITTYEGELKEANEKMRMHEDEIANLKNQLQSCMSFDAEDQLGTAEKSLDLDKEDTEADAEATKVLALEEELSIAKEKLQHFEKETYSLKNELEISKAAEDKLKSLQHELELAKKDVETQRNKLNAEKKEVLKLQERLAMVKTSLQDRDNEIRALKTAVSDAEQKIFPEKAQIKGEMSKMLEERSQLGEQLRELESHIRLIKEEKAETEEKLRGGTEKISVMRDESNVLREEIGKREETIKETEKHMEELHMEQVRLRRRSSELTEEVERTRVSAS

SEQ ID NO: 43093 - DNA, 1374 bp, Arabidopsis thaliana
  misc_feature (1)..(1374): Ceres Seq. ID no. 13576763
  misc_feature: MA Experiment ID: 108434 Result: Up-regulated in Transcription
  misc_feature: MA Experiment 108434 PARAMETER Experiment Name: At_Root_Tips_cDNA_P Parameter: Tissue Value: Root Tips
  misc_feature: MA Experiment ID: 108461 Result: Down-regulated in Transcription
  misc_feature: MA Experiment 108461 PARAMETER Experiment Name: At_Germinating_Seeds_cDNA_P Parameter: Age (day) Value: 1 vs. 0
  misc_feature: MA Experiment 108461 PARAMETER Experiment Name: At_Germinating_Seeds_cDNA_P Parameter: Tissue Value: Germinating Seeds
  misc_feature: MA Experiment ID: 108462 Result: Down-regulated in Transcription
  misc_feature: MA Experiment 108462 PARAMETER Experiment Name: At_Germinating_Seeds_cDNA_P Parameter: Age (day) Value: 2 vs. 0
  misc_feature: MA Experiment 108462 PARAMETER Experiment Name: At_Germinating_Seeds_cDNA_P Parameter: Tissue Value: Germinating Seeds
  misc_feature: MA Experiment ID: 108463 Result: Down-regulated in Transcription
  misc_feature: MA Experiment 108463 PARAMETER Experiment Name: At_Germinating_Seeds_cDNA_P Parameter: Age (day) Value: 3 vs. 0
  misc_feature: MA Experiment 108463 PARAMETER Experiment Name: At_Germinating_Seeds_cDNA_P Parameter: Tissue Value: Germinating Seeds
  misc_feature: MA Experiment ID: 108464 Result: Down-regulated in Transcription
  misc_feature: MA Experiment 108464 PARAMETER Experiment Name: At_Germinating_Seeds_cDNA_P Parameter: Age (day) Value: 4 vs. 0
  misc_feature: MA Experiment 108464 PARAMETER Experiment Name: At_Germinating_Seeds_cDNA_P Parameter: Tissue Value: Germinating Seeds
  misc_feature: MA Experiment ID: 108573 Result: Down-regulated in Transcription
  misc_feature: MA Experiment 108573 PARAMETER Experiment Name: At_Drought_cDNA_P Parameter: Timepoint (hr) Value: 6
  misc_feature: MA Experiment 108573 PARAMETER Experiment Name: At_Drought_cDNA_P Parameter: Tissue Value: Aerial
  misc_feature: MA Experiment 108573 PARAMETER Experiment Name: At_Drought_cDNA_P Parameter: Treatment Value: Drought vs. No Drought
  misc_feature: MA Experiment ID: 108576 Result: Up-regulated in Transcription
  misc_feature: MA Experiment 108576 PARAMETER Experiment Name: At_42deg_Heat_cDNA_P Parameter: Temperature (deg C) Value: 42 vs. 22
  misc_feature: MA Experiment 108576 PARAMETER Experiment Name: At_42deg_Heat_cDNA_P Parameter: Timepoint (hr) Value: 1
  misc_feature: MA Experiment 108576 PARAMETER Experiment Name: At_42deg_Heat_cDNA_P Parameter: Tissue Value: Aerial
  misc_feature: MA Experiment ID: 108577 Result: Up-regulated in Transcription
  misc_feature: MA Experiment 108577 PARAMETER Experiment Name: At_42deg_Heat_cDNA_P Parameter: Temperature (deg C) Value: 42 vs. 22
  misc_feature: MA Experiment 108577 PARAMETER Experiment Name: At_42deg_Heat_cDNA_P Parameter: Timepoint (hr) Value: 6
  misc_feature: MA Experiment 108577 PARAMETER Experiment Name: At_42deg_Heat_cDNA_P Parameter: Tissue Value: Aerial
  misc_feature: MA Experiment ID: 108668 Result: Down-regulated in Transcription
  misc_feature: MA Experiment 108668 PARAMETER Experiment Name: At_2mM_SA_cDNA_P Parameter: Plant Line Value: WS
  misc_feature: MA Experiment 108668 PARAMETER Experiment Name: At_2mM_SA_cDNA_P Parameter: Timepoint (hr) Value: 6
  misc_feature: MA Experiment 108668 PARAMETER Experiment Name: At_2mM_SA_cDNA_P Parameter: Treatment Value: 2mM SA vs. No Treatment
  misc_feature: MA Experiment ID: 20000086 Result: Down-regulated in Transcription
  misc_feature: MA Experiment 20000086 PARAMETER Experiment Name: At_100uM_ABA_Mutants_cDNA_P Parameter: Plant Line Value: CS22
  misc_feature: MA Experiment 20000086 PARAMETER Experiment Name: At_100uM_ABA_Mutants_cDNA_P Parameter: Timepoint (hr) Value: 6
  misc_feature: MA Experiment 20000086 PARAMETER Experiment Name: At_100uM_ABA_Mutants_cDNA_P Parameter: Tissue Value: Aerial
  misc_feature: MA Experiment 20000086 PARAMETER Experiment Name: At_100uM_ABA_Mutants_cDNA_P Parameter: Treatment Value: 100uM ABA vs. No Treatment
  misc_feature: MA Experiment ID: 20000087 Result: Down-regulated in Transcription
  misc_feature: MA Experiment 20000087 PARAMETER Experiment Name: At_100uM_ABA_Mutants_cDNA_P Parameter: Plant Line Value: WS
  misc_feature: MA Experiment 20000087 PARAMETER Experiment Name: At_100uM_ABA_Mutants_cDNA_P Parameter: Timepoint (hr) Value: 6
  misc_feature: MA Experiment 20000087 PARAMETER Experiment Name: At_100uM_ABA_Mutants_cDNA_P Parameter: Tissue Value: Aerial
  misc_feature: MA Experiment 20000087 PARAMETER Experiment Name: At_100uM_ABA_Mutants_cDNA_P Parameter: Treatment Value: 100uM ABA vs. No Treatment
  misc_feature: MA Experiment ID: 20000111 Result: Up-regulated in Transcription
  misc_feature: MA Experiment 20000111 PARAMETER Experiment Name: At_42deg_Heat_cDNA_P Parameter: Temperature (deg C) Value: 42 vs. 22
  misc_feature: MA Experiment 20000111 PARAMETER Experiment Name: At_42deg_Heat_cDNA_P Parameter: Timepoint (hr) Value: 6
  misc_feature: MA Experiment 20000111 PARAMETER Experiment Name: At_42deg_Heat_cDNA_P Parameter: Tissue Value: Aerial
  misc_feature: MA Experiment ID: 20000112 Result: Up-regulated in Transcription
  misc_feature: MA Experiment 20000112 PARAMETER Experiment Name: At_42deg_Heat_cDNA_P Parameter: Temperature (deg C) Value: 42 vs. 22
  misc_feature: MA Experiment 20000112 PARAMETER Experiment Name: At_42deg_Heat_cDNA_P Parameter: Timepoint (hr) Value: 2
  misc_feature: MA Experiment 20000112 PARAMETER Experiment Name: At_42deg_Heat_cDNA_P Parameter: Tissue Value: Aerial
  misc_feature: MA Experiment ID: 20000113 Result: Up-regulated in Transcription
  misc_feature: MA Experiment 20000113 PARAMETER Experiment Name: At_42deg_Heat_cDNA_P Parameter: Temperature (deg C) Value: 42 vs. 22
  misc_feature: MA Experiment 20000113 PARAMETER Experiment Name: At_42deg_Heat_cDNA_P Parameter: Timepoint (hr) Value: 8
  misc_feature: MA Experiment 20000113 PARAMETER Experiment Name: At_42deg_Heat_cDNA_P Parameter: Tissue Value: Aerial
  misc_feature: MA Experiment ID: 20000144 Result: Up-regulated in Transcription
  misc_feature: MA Experiment 20000144 PARAMETER Experiment Name: At_42deg_Heat_cDNA_P Parameter: Temperature (deg C) Value: 42 vs. 22
  misc_feature: MA Experiment 20000144 PARAMETER Experiment Name: At_42deg_Heat_cDNA_P Parameter: Timepoint (hr) Value: 1
  misc_feature: MA Experiment 20000144 PARAMETER Experiment Name: At_42deg_Heat_cDNA_P Parameter: Tissue Value: Aerial
  misc_feature: MA Experiment ID: 20000171 Result: Up-regulated in Transcription
  misc_feature: MA Experiment 20000171 PARAMETER Experiment Name: At_42deg_Heat_P Parameter: Age (day) Value: 14
  misc_feature: MA Experiment 20000171 PARAMETER Experiment Name: At_42deg_Heat_P Parameter: Organism Value: A. thaliana
  misc_feature: MA Experiment 20000171 PARAMETER Experiment Name: At_42deg_Heat_P Parameter: Plant Line Value: WS
  misc_feature: MA Experiment 20000171 PARAMETER Experiment Name: At_42deg_Heat_P Parameter: Temperature (deg C) Value: 42 vs. 22
  misc_feature: MA Experiment 20000171 PARAMETER Experiment Name: At_42deg_Heat_P Parameter: Timepoint (hr) Value: 1
  misc_feature: MA Experiment 20000171 PARAMETER Experiment Name: At_42deg_Heat_P Parameter: Tissue Value: Aerial
  misc_feature: MA Experiment ID: 20000173 Result: Up-regulated in Transcription
  misc_feature: MA Experiment 20000173 PARAMETER Experiment Name: At_42deg_Heat_P Parameter: Age (day) Value: 14
  misc_feature: MA Experiment 20000173 PARAMETER Experiment Name: At_42deg_Heat_P Parameter: Organism Value: A. thaliana
  misc_feature: MA Experiment 20000173 PARAMETER Experiment Name: At_42deg_Heat_P Parameter: Plant Line Value: WS
  misc_feature: MA Experiment 20000173 PARAMETER Experiment Name: At_42deg_Heat_P Parameter: Temperature (deg C) Value: 42 vs. 22
  misc_feature: MA Experiment 20000173 PARAMETER Experiment Name: At_42deg_Heat_P Parameter: Timepoint (hr) Value: 6
  misc_feature: MA Experiment 20000173 PARAMETER Experiment Name: At_42deg_Heat_P Parameter: Tissue Value: Aerial
  misc_feature: MA Experiment ID: 20000185 Result: Up-regulated in Transcription
  misc_feature: MA Experiment 20000185 PARAMETER Experiment Name: At_Roots__P Parameter: Age (day) Value: 7 vs. 21
  misc_feature: MA Experiment 20000185 PARAMETER Experiment Name: At_Roots__P Parameter: Organism Value: A. thaliana
  misc_feature: MA Experiment 20000185 PARAMETER Experiment Name: At_Roots__P Parameter: Tissue Value: Roots vs. Whole Plant
  misc_feature: MA Experiment ID: 20000227 Result: Up-regulated in Transcription
  misc_feature: MA Experiment 20000227 PARAMETER Experiment Name: At_Root-Tips-vs-Tops_P Parameter: Tissue Value: Root Tips vs. Root Tops
  misc_feature: MA Experiment ID: 20000234 Result: Up-regulated in Transcription
  misc_feature: MA Experiment 20000234 PARAMETER Experiment Name: At_Siliques_P Parameter: Age (day) Value: 21
  misc_feature: MA Experiment 20000234 PARAMETER Experiment Name: At_Siliques_P Parameter: Organism Value: A. thaliana
  misc_feature: MA Experiment 20000234 PARAMETER Experiment Name: At_Siliques_P Parameter: Plant Line Value: WS
  misc_feature: MA Experiment 20000234 PARAMETER Experiment Name: At_Siliques_P Parameter: Tissue Value: Less Than 5mm Siliques vs. Whole Plant
  misc_feature: MA Experiment ID: 20000264 Result: Up-regulated in Transcription
  misc_feature: MA Experiment 20000264 PARAMETER Experiment Name: At_Open_Flower_P Parameter: Age (day) Value: 21
  misc_feature: MA Experiment 20000264 PARAMETER Experiment Name: At_Open_Flower_P Parameter: Plant Line Value: WS
  misc_feature: MA Experiment 20000264 PARAMETER Experiment Name: At_Open_Flower_P Parameter: Tissue Value: Open Flower vs. Whole Plant
  misc_feature: MA Experiment ID: 20000265 Result: Up-regulated in Transcription
  misc_feature: MA Experiment 20000265 PARAMETER Experiment Name: At_Open_Flower_P Parameter: Age (day) Value: 21
  misc_feature: MA Experiment 20000265 PARAMETER Experiment Name: At_Open_Flower_P Parameter: Plant Line Value: WS
  misc_feature: MA Experiment 20000265 PARAMETER Experiment Name: At_Open_Flower_P Parameter: Tissue Value: Closed Flower vs. Whole Plant
  misc_feature: MA Experiment ID: 20000437 Result: Down-regulated in Transcription
  misc_feature: MA Experiment 20000437 PARAMETER Experiment Name: At_Drought_P Parameter: Age (day) Value: 8
  misc_feature: MA Experiment 20000437 PARAMETER Experiment Name: At_Drought_P Parameter: Organism Value: A. thaliana
  misc_feature: MA Experiment 20000437 PARAMETER Experiment Name: At_Drought_P Parameter: Plant Line Value: WS
  misc_feature: MA Experiment 20000437 PARAMETER Experiment Name: At_Drought_P Parameter: Timepoint (hr) Value: 24
  misc_feature: MA Experiment 20000437 PARAMETER Experiment Name: At_Drought_P Parameter: Tissue Value: Whole Plant
  misc_feature: MA Experiment 20000437 PARAMETER Experiment Name: At_Drought_P Parameter: Treatment Value: Drought vs. No Drought
  misc_feature: MA Experiment ID: 20001557 Result: Up-regulated in Transcription
  misc_feature: MA Experiment 20001557 PARAMETER Experiment Name: At_Drought_Soil_Dry_P Parameter: Age (day) Value: 27
  misc_feature: MA Experiment 20001557 PARAMETER Experiment Name: At_Drought_Soil_Dry_P Parameter: Organism Value: A. thaliana
  misc_feature: MA Experiment 20001557 PARAMETER Experiment Name: At_Drought_Soil_Dry_P Parameter: Plant Line Value: WS
  misc_feature: MA Experiment 20001557 PARAMETER Experiment Name: At_Drought_Soil_Dry_P Parameter: Post Timepoint (hr) Value: 3
  misc_feature: MA Experiment 20001557 PARAMETER Experiment Name: At_Drought_Soil_Dry_P Parameter: Post-Treatment Value: Re-Water vs. No Drought
  misc_feature: MA Experiment 20001557 PARAMETER Experiment Name: At_Drought_Soil_Dry_P Parameter: Timepoint (day) Value: 13
  misc_feature: MA Experiment 20001557 PARAMETER Experiment Name: At_Drought_Soil_Dry_P Parameter: Treatment Value: Drought vs. No Drought
  misc_feature: MA Experiment ID: 20001558 Result: Up-regulated in Transcription
  misc_feature: MA Experiment 20001558 PARAMETER Experiment Name: At_Drought_Soil_Dry_P Parameter: Age (day) Value: 27
  misc_feature: MA Experiment 20001558 PARAMETER Experiment Name: At_Drought_Soil_Dry_P Parameter: Organism Value: A. thaliana
  misc_feature: MA Experiment 20001558 PARAMETER Experiment Name: At_Drought_Soil_Dry_P Parameter: Plant Line Value: WS
  misc_feature: MA Experiment 20001558 PARAMETER Experiment Name: At_Drought_Soil_Dry_P Parameter: Post Timepoint (hr) Value: 6
  misc_feature: MA Experiment 20001558 PARAMETER Experiment Name: At_Drought_Soil_Dry_P Parameter: Post-Treatment Value: Re-Water vs. No Drought
  misc_feature: MA Experiment 20001558 PARAMETER Experiment Name: At_Drought_Soil_Dry_P Parameter: Timepoint (day) Value: 13
  misc_feature: MA Experiment 20001558 PARAMETER Experiment Name: At_Drought_Soil_Dry_P Parameter: Treatment Value: Drought vs. No Drought
agggcagttcactggtgcatgggtttgtggaagagaagttgtgcggctgttatatatatcagagaagcgccttcaacaaccgcctcttagggcgtataaaatcagaaacagaaacgagacaagaattaattctctcgtccaaatttcttctgggcagaaaccaacatttatccttatccgattcttctagggtttcggaagatctaaccagaaccttcgcaacaagatggataagtatcagagagttgagaagccgaaggcggatacgccgattgctgagaatgagattcgtatcaccagtatgggtagggcacggaactacatcacctatgcgatggctcttcttcaggaaaacaaatcgaatgaagttatcttcaaggctatgggaagagctatcaacaagagtgtgaccatagttgagctgattaagagaaggattcctggtcttcatcagatcacatctattggatcaacggacattacagatacctgggaacctacagaggaaggccttcaaacaattgagaccacgaggcatgtgtcgatgataaccataacactttccaaggagcagttgaacacatcctcagttgggtaccagtgtccgattcctattgagatggtgaagccattggctgagattgactacgaagggcaagacggatctcctagaggcagaggaggaagaagaggtagaggaggaagaggaaggggaaggggaagaggtggtagaggaaatggacctgcgaatgttgagtatgatgatggaggaaggggaagaggtggcagaggaaacggatatgtgaacaatgagtatgatgatggaggaaggggaagaggcggcagaggaagtggatatgggaatgtgaacaatgagtataatgatggaggtatggagcaggaccggtcatatggcagaggacgcgggcgtgggagaggaggtggacgtggtggtcgaggaagaggaggttacaatggccccccaccaccttactatgaagctcaacaagatggaggagactatggatacaacaatgttgctcctccagcagaccatggatatgatggtcctccgcctcagggacgtggacgtggccgtggaaggggaggtcgtggaagaggaggaggccgtggtggattcaacagatcaaatggagcacctatccaggctgctgcatgagcgaccagggtcattgaatgaagttggatctttcttacattctcatgtttttgtctctgttcttcaaagcaacttgttgccgtagaataatctttcgttcatgtcgctttaggttatatatatcctcatttattttatcatggatcttggattttcaagtttttattccttcaagagttttctagttttgtcat

SEQ ID NO: 43094 - protein, 317 aa, Arabidopsis thaliana
  peptide (1)..(317): Ceres Seq. ID no. 13576764
  misc_feature (150)..(312): Pfam Name: Herpesvirus latent membrane protein 1 (LMP1) Pfam Description: Herpesvirus latent membrane protein 1 (LMP1)
  misc_feature (1)..(146): Homolog of NCBI NO: 15231369 NR Description: hypothetical protein [Arabidopsis thaliana]
  misc_feature (137)..(317): Homolog of NCBI NO: 25404999 NR Description: protein T4O12.22 [imported] - Arabidopsis
  misc_feature (177)..(312): Homolog of NCBI NO: 25404999 NR Description: protein T4O12.22 [imported] - Arabidopsis
  misc_feature (1)..(48): Homolog of NCBI NO: 25404999 NR Description: protein T4O12.22 [imported] - Arabidopsis
  misc_feature (41)..(306): Homolog of NCBI NO: 25404999 NR Description: protein T4O12.22 [imported] - Arabidopsis
  misc_feature (1)..(258): Homolog of NCBI NO: 34897552 NR Description: OSJNBa0042L16.13 [Oryza sativa (japonica
  misc_feature (1)..(306): Homolog of NCBI NO: 18410994 NR Description: expressed protein [Arabidopsis thaliana]
  misc_feature (1)..(277): Homolog of NCBI NO: 24417384 NR Description: unknown [Arabidopsis thaliana]
  misc_feature (1)..(317): Homolog of NCBI NO: 18394837 NR Description: glycine-rich protein [Arabidopsis thaliana]
  misc_feature (1)..(317): Homolog of NCBI NO: 25518088 NR Description: T20H2.2 protein - Arabidopsis thaliana
MDKYQRVEKPKADTPIAENEIRITSMGRARNYITYAMALLQENKSNEVIFKAMGRAINKSVTIVELIKRRIPGLHQITSIGSTDITDTWEPTEEGLQTIETTRHVSMITITLSKEQLNTSSVGYQCPIPIEMVKPLAEIDYEGQDGSPRGRGGRRGRGGRGRGRGRGGRGNGPANVEYDDGGRGRGGRGNGYVNNEYDDGGRGRGGRGSGYGNVNNEYNDGGMEQDRSYGRGRGRGRGGGRGGRGRGGYNGPPPPYYEAQQDGGDYGYNNVAPPADHGYDGPPPQGRGRGRGRGGRGRGGGRGGFNRSNGAPIQAAA

SEQ ID NO: 43095 - protein, 292 aa, Arabidopsis thaliana
  peptide (1)..(292): Ceres Seq. ID no. 13576765
  misc_feature (125)..(287): Pfam Name: Herpesvirus latent membrane protein 1 (LMP1) Pfam Description: Herpesvirus latent membrane protein 1 (LMP1)
  misc_feature (1)..(121): Homolog of NCBI NO: 15231369 NR Description: hypothetical protein [Arabidopsis thaliana]
  misc_feature (112)..(292): Homolog of NCBI NO: 25404999 NR Description: protein T4O12.22 [imported] - Arabidopsis
  misc_feature (152)..(287): Homolog of NCBI NO: 25404999 NR Description: protein T4O12.22 [imported] - Arabidopsis
  misc_feature (1)..(23): Homolog of NCBI NO: 25404999 NR Description: protein T4O12.22 [imported] - Arabidopsis
  misc_feature (16)..(281): Homolog of NCBI NO: 25404999 NR Description: protein T4O12.22 [imported] - Arabidopsis
  misc_feature (1)..(233): Homolog of NCBI NO: 34897552 NR Description: OSJNBa0042L16.13 [Oryza sativa (japonica
  misc_feature (1)..(281): Homolog of NCBI NO: 18410994 NR Description: expressed protein [Arabidopsis thaliana]
  misc_feature (1)..(252): Homolog of NCBI NO: 24417384 NR Description: unknown [Arabidopsis thaliana]
  misc_feature (1)..(292): Homolog of NCBI NO: 18394837 NR Description: glycine-rich protein [Arabidopsis thaliana]
  misc_feature (1)..(292): Homolog of NCBI NO: 25518088 NR Description: T20H2.2 protein - Arabidopsis thaliana
MGRARNYITYAMALLQENKSNEVIFKAMGRAINKSVTIVELIKRRIPGLHQITSIGSTDITDTWEPTEEGLQTIETTRHVSMITITLSKEQLNTSSVGYQCPIPIEMVKPLAEIDYEGQDGSPRGRGGRRGRGGRGRGRGRGGRGNGPANVEYDDGGRGRGGRGNGYVNNEYDDGGRGRGGRGSGYGNVNNEYNDGGMEQDRSYGRGRGRGRGGGRGGRGRGGYNGPPPPYYEAQQDGGDYGYNNVAPPADHGYDGPPPQGRGRGRGRGGRGRGGGRGGFNRSNGAPIQAAA

SEQ ID NO: 43096 - protein, 281 aa, Arabidopsis thaliana
  peptide (1)..(281): Ceres Seq. ID no. 13576766
  misc_feature (114)..(276): Pfam Name: Herpesvirus latent membrane protein 1 (LMP1) Pfam Description: Herpesvirus latent membrane protein 1 (LMP1)
  misc_feature (1)..(110): Homolog of NCBI NO: 15231369 NR Description: hypothetical protein [Arabidopsis thaliana]
  misc_feature (101)..(281): Homolog of NCBI NO: 25404999 NR Description: protein T4O12.22 [imported] - Arabidopsis
  misc_feature (141)..(276): Homolog of NCBI NO: 25404999 NR Description: protein T4O12.22 [imported] - Arabidopsis
  misc_feature (1)..(12): Homolog of NCBI NO: 25404999 NR Description: protein T4O12.22 [imported] - Arabidopsis
  misc_feature (5)..(270): Homolog of NCBI NO: 25404999 NR Description: protein T4O12.22 [imported] - Arabidopsis
  misc_feature (1)..(222): Homolog of NCBI NO: 34897552 NR Description: OSJNBa0042L16.13 [Oryza sativa (japonica
  misc_feature (1)..(270): Homolog of NCBI NO: 18410994 NR Description: expressed protein [Arabidopsis thaliana]
  misc_feature (1)..(241): Homolog of NCBI NO: 24417384 NR Description: unknown [Arabidopsis thaliana]
  misc_feature (1)..(281): Homolog of NCBI NO: 18394837 NR Description: glycine-rich protein [Arabidopsis thaliana]
  misc_feature (1)..(281): Homolog of NCBI NO: 25518088 NR Description: T20H2.2 protein - Arabidopsis thaliana
MALLQENKSNEVIFKAMGRAINKSVTIVELIKRRIPGLHQITSIGSTDITDTWEPTEEGLQTIETTRHVSMITITLSKEQLNTSSVGYQCPIPIEMVKPLAEIDYEGQDGSPRGRGGRRGRGGRGRGRGRGGRGNGPANVEYDDGGRGRGGRGNGYVNNEYDDGGRGRGGRGSGYGNVNNEYNDGGMEQDRSYGRGRGRGRGGGRGGRGRGGYNGPPPPYYEAQQDGGDYGYNNVAPPADHGYDGPPPQGRGRGRGRGGRGRGGGRGGFNRSNGAPIQAAA

SEQ ID NO: 43097 - DNA, 1106 bp, Arabidopsis thaliana
  misc_feature (1)..(1106): Ceres Seq. ID no. 13489460
  misc_feature: MA Experiment ID: 108434 Result: Up-regulated in Transcription
  misc_feature: MA Experiment 108434 PARAMETER Experiment Name: At_Root_Tips_cDNA_P Parameter: Tissue Value: Root Tips
  misc_feature: MA Experiment ID: 108462 Result: Down-regulated in Transcription
  misc_feature: MA Experiment 108462 PARAMETER Experiment Name: At_Germinating_Seeds_cDNA_P Parameter: Age (day) Value: 2 vs. 0
  misc_feature: MA Experiment 108462 PARAMETER Experiment Name: At_Germinating_Seeds_cDNA_P Parameter: Tissue Value: Germinating Seeds
  misc_feature: MA Experiment ID: 108463 Result: Down-regulated in Transcription
  misc_feature: MA Experiment 108463 PARAMETER Experiment Name: At_Germinating_Seeds_cDNA_P Parameter: Age (day) Value: 3 vs. 0
  misc_feature: MA Experiment 108463 PARAMETER Experiment Name: At_Germinating_Seeds_cDNA_P Parameter: Tissue Value: Germinating Seeds
  misc_feature: MA Experiment ID: 108464 Result: Down-regulated in Transcription
  misc_feature: MA Experiment 108464 PARAMETER Experiment Name: At_Germinating_Seeds_cDNA_P Parameter: Age (day) Value: 4 vs. 0
  misc_feature: MA Experiment 108464 PARAMETER Experiment Name: At_Germinating_Seeds_cDNA_P Parameter: Tissue Value: Germinating Seeds
  misc_feature: MA Experiment ID: 20000089 Result: Up-regulated in Transcription
  misc_feature: MA Experiment ID: 20000111 Result: Up-regulated in Transcription
  misc_feature: MA Experiment 20000111 PARAMETER Experiment Name: At_42deg_Heat_cDNA_P Parameter: Temperature (deg C) Value: 42 vs. 22
  misc_feature: MA Experiment 20000111 PARAMETER Experiment Name: At_42deg_Heat_cDNA_P Parameter: Timepoint (hr) Value: 6
  misc_feature: MA Experiment 20000111 PARAMETER Experiment Name: At_42deg_Heat_cDNA_P Parameter: Tissue Value: Aerial
  misc_feature: MA Experiment ID: 20000113 Result: Up-regulated in Transcription
  misc_feature: MA Experiment 20000113 PARAMETER Experiment Name: At_42deg_Heat_cDNA_P Parameter: Temperature (deg C) Value: 42 vs. 22
  misc_feature: MA Experiment 20000113 PARAMETER Experiment Name: At_42deg_Heat_cDNA_P Parameter: Timepoint (hr) Value: 8
  misc_feature: MA Experiment 20000113 PARAMETER Experiment Name: At_42deg_Heat_cDNA_P Parameter: Tissue Value: Aerial
  misc_feature: MA Experiment ID: 20000173 Result: Up-regulated in Transcription
  misc_feature: MA Experiment 20000173 PARAMETER Experiment Name: At_42deg_Heat_P Parameter: Age (day) Value: 14
  misc_feature: MA Experiment 20000173 PARAMETER Experiment Name: At_42deg_Heat_P Parameter: Organism Value: A. thaliana
  misc_feature: MA Experiment 20000173 PARAMETER Experiment Name: At_42deg_Heat_P Parameter: Plant Line Value: WS
  misc_feature: MA Experiment 20000173 PARAMETER Experiment Name: At_42deg_Heat_P Parameter: Temperature (deg C) Value: 42 vs. 22
  misc_feature: MA Experiment 20000173 PARAMETER Experiment Name: At_42deg_Heat_P Parameter: Timepoint (hr) Value: 6
  misc_feature: MA Experiment 20000173 PARAMETER Experiment Name: At_42deg_Heat_P Parameter: Tissue Value: Aerial
  misc_feature: MA Experiment ID: 20000234 Result: Down-regulated in Transcription
  misc_feature: MA Experiment 20000234 PARAMETER Experiment Name: At_Siliques_P Parameter: Age (day) Value: 21
  misc_feature: MA Experiment 20000234 PARAMETER Experiment Name: At_Siliques_P Parameter: Organism Value: A. thaliana
  misc_feature: MA Experiment 20000234 PARAMETER Experiment Name: At_Siliques_P Parameter: Plant Line Value: WS
  misc_feature: MA Experiment 20000234 PARAMETER Experiment Name: At_Siliques_P Parameter: Tissue Value: Less Than 5mm Siliques vs. Whole Plant
  misc_feature: MA Experiment ID: 20000235 Result: Down-regulated in Transcription
  misc_feature: MA Experiment 20000235 PARAMETER Experiment Name: At_Siliques_P Parameter: Age (day) Value: 21
  misc_feature: MA Experiment 20000235 PARAMETER Experiment Name: At_Siliques_P Parameter: Organism Value: A. thaliana
  misc_feature: MA Experiment 20000235 PARAMETER Experiment Name: At_Siliques_P Parameter: Plant Line Value: WS
  misc_feature: MA Experiment 20000235 PARAMETER Experiment Name: At_Siliques_P Parameter: Tissue Value: 5-10mm Siliques vs. Whole Plant
  misc_feature: MA Experiment ID: 20000264 Result: Down-regulated in Transcription
  misc_feature: MA Experiment 20000264 PARAMETER Experiment Name: At_Open_Flower_P Parameter: Age (day) Value: 21
  misc_feature: MA Experiment 20000264 PARAMETER Experiment Name: At_Open_Flower_P Parameter: Plant Line Value: WS
  misc_feature: MA Experiment 20000264 PARAMETER Experiment Name: At_Open_Flower_P Parameter: Tissue Value: Open Flower vs. Whole Plant
  misc_feature: MA Experiment ID: 20000265 Result: Down-regulated in Transcription
  misc_feature: MA Experiment 20000265 PARAMETER Experiment Name: At_Open_Flower_P Parameter: Age (day) Value: 21
  misc_feature: MA Experiment 20000265 PARAMETER Experiment Name: At_Open_Flower_P Parameter: Plant Line Value: WS
  misc_feature: MA Experiment 20000265 PARAMETER Experiment Name: At_Open_Flower_P Parameter: Tissue Value: Closed Flower vs. Whole Plant
  misc_feature: MA Experiment ID: 20000794 Result: Down-regulated in Transcription
  misc_feature: MA Experiment 20000794 PARAMETER Experiment Name: At_Petals_P Parameter: Age (day) Value: 23-25 days
  misc_feature: MA Experiment 20000794 PARAMETER Experiment Name: At_Petals_P Parameter: Plant Line Value: WS
  misc_feature: MA Experiment 20000794 PARAMETER Experiment Name: At_Petals_P Parameter: Tissue Value: Petals vs. Whole plant
  misc_feature: MA Experiment ID: 20001451 Result: Up-regulated in Transcription
  misc_feature: MA Experiment 20001451 PARAMETER Experiment Name: At_Far-red-induction_P Parameter: Age (day) Value: 7
  misc_feature: MA Experiment 20001451 PARAMETER Experiment Name: At_Far-red-induction_P Parameter: Light Value: Far-red vs. White
  misc_feature: MA Experiment 20001451 PARAMETER Experiment Name: At_Far-red-induction_P Parameter: Organism Value: A. thaliana
  misc_feature: MA Experiment 20001451 PARAMETER Experiment Name: At_Far-red-induction_P Parameter: Plant Line Value: Columbia
  misc_feature: MA Experiment 20001451 PARAMETER Experiment Name: At_Far-red-induction_P Parameter: Timepoint (hr) Value: 24
  misc_feature: MA Experiment 20001451 PARAMETER Experiment Name: At_Far-red-induction_P Parameter: Tissue Value: Whole Plant
tctttttgtcgactgcttcttcacgccgtcgaggaattcttctccaccaacgaatccggcgacgtcttatcaccaccttgtcgaatctttagttgatgttgtttaaaggttttagctaataagggcatgaaacggatctgctcggtttcaagtgttcaacttttttccagaagtttcagagctttagcatcgccacgttccttgaactatcccctgcagtgtatcaagcgttcatcagttcggatggagagtagcaactgttcttctggtgtcagaaccgagagtagtgtgaagccaagaggagcattgatagttctagaaggtcttgatcgcagcgggaaatcaacacagtgtgctaagctactctctttcttgaatggtttaggacatccgaccgagctctggagattccccgatagagagacgagtgtcggtcagatgatatccgcgtatctttctaataagtcgcagttagatgatcacacaattcatctccttttcagcgccaatcgttgggagaaaaggtcgttgatggaggaaaagctaaaaacaggaactacgcttatcgtggatcgttattcgtattctggtgttgcattctcatcagctaaaggtctcgatatcgaatggtgcaaggctcccgaaatcgggttactggctccagattctgtactttacctggacatttcacctgaaagagctgctgagagaggtggatatggagatgagaggtatgagcgagtggagtttcagaagaaagttgcagacttttatcaaacccttggcgattctttcatggaagataatcaatgccagtgatgccatggaggaagtagagaagaagattcaacaagtggtattagatcaagtcaaagaatgtactgaaggaaagcctctgtctctcctatggtcgtcatagaacgttttcgagtcatagcacttgcaagtttagtgattttgaaggaacttttgttgaagtttatactatgttgtgccatctaagcccattaacaggcccaaaagtttagtttatgtcgtcactcatgacatcttaatcgattattttggtgtaaactaattgagcgtcattaagtaaaggacaaatc

SEQ ID NO: 43098 - protein, 230 aa, Arabidopsis thaliana
  peptide (1)..(230): Ceres Seq. ID no. 13489461
  misc_feature (66)..(230): Pfam Name: Thymidylate kinase Pfam Description: Thymidylate kinase
  misc_feature (54)..(226): Homolog of NCBI NO: 19076042 NR Description: thymidylate kinase [Schizosaccharomyces pombe]
  misc_feature (54)..(219): Homolog of NCBI NO: 28573735 NR Description: CG5757-PA [Drosophila melanogaster]
  misc_feature (49)..(219): Homolog of NCBI NO: 40215537 NR Description: RE69454p [Drosophila melanogaster]
  misc_feature (58)..(221): Homolog of NCBI NO: 31210425 NR Description: ENSANGP00000015825 [Anopheles gambiae]
  misc_feature (53)..(222): Homolog of NCBI NO: 27261100 NR Description: putative thymidylate kinase
  misc_feature (65)..(230): Homolog of NCBI NO: 25288285 NR Description: dTMP kinase (EC 2.7.4.9)
  misc_feature (40)..(222): Homolog of NCBI NO: 15912289 NR Description: AT5g59440/f2o15_100 [Arabidopsis thaliana]
  misc_feature (40)..(222): Homolog of NCBI NO: 30697228 NR Description: thymidylate kinase - like protein [Arabidopsis
  misc_feature (1)..(222): Homolog of NCBI NO: 30697225 NR Description: thymidylate kinase - like protein [Arabidopsis
  misc_feature (1)..(222): Homolog of NCBI NO: 21553651 NR Description: thymidylate kinase-like protein [Arabidopsis
MKRICSVSSVQLFSRSFRALASPRSLNYPLQCIKRSSVRMESSNCSSGVRTESSVKPRGALIVLEGLDRSGKSTQCAKLLSFLNGLGHPTELWRFPDRETSVGQMISAYLSNKSQLDDHTIHLLFSANRWEKRSLMEEKLKTGTTLIVDRYSYSGVAFSSAKGLDIEWCKAPEIGLLAPDSVLYLDISPERAAERGGYGDERYERVEFQKKVADFYQTLGDSFMEDNQCQ

SEQ ID NO: 43099 - protein, 191 aa, Arabidopsis thaliana
  peptide (1)..(191): Ceres Seq. ID no. 13489462
  misc_feature (27)..(191): Pfam Name: Thymidylate kinase Pfam Description: Thymidylate kinase
  misc_feature (15)..(187): Homolog of NCBI NO: 19076042 NR Description: thymidylate kinase [Schizosaccharomyces pombe]
  misc_feature (15)..(180): Homolog of NCBI NO: 28573735 NR Description: CG5757-PA [Drosophila melanogaster]
  misc_feature (10)..(180): Homolog of NCBI NO: 40215537 NR Description: RE69454p [Drosophila melanogaster]
  misc_feature (19)..(182): Homolog of NCBI NO: 31210425 NR Description: ENSANGP00000015825 [Anopheles gambiae]
  misc_feature (14)..(183): Homolog of NCBI NO: 27261100 NR Description: putative thymidylate kinase
  misc_feature (26)..(191): Homolog of NCBI NO: 25288285 NR Description: dTMP kinase (EC 2.7.4.9)
  misc_feature (1)..(183): Homolog of NCBI NO: 15912289 NR Description: AT5g59440/f2o15_100 [Arabidopsis thaliana]
  misc_feature (1)..(183): Homolog of NCBI NO: 30697228 NR Description: thymidylate kinase - like protein [Arabidopsis
  misc_feature (1)..(183): Homolog of NCBI NO: 30697225 NR Description: thymidylate kinase - like protein [Arabidopsis
  misc_feature (1)..(183): Homolog of NCBI NO: 21553651 NR Description: thymidylate kinase-like protein [Arabidopsis
MESSNCSSGVRTESSVKPRGALIVLEGLDRSGKSTQCAKLLSFLNGLGHPTELWRFPDRETSVGQMISAYLSNKSQLDDHTIHLLFSANRWEKRSLMEEKLKTGTTLIVDRYSYSGVAFSSAKGLDIEWCKAPEIGLLAPDSVLYLDISPERAAERGGYGDERYERVEFQKKVADFYQTLGDSFMEDNQCQ

SEQ ID NO: 43100 - protein, 126 aa, Arabidopsis thaliana
  peptide (1)..(126): Ceres Seq. ID no. 13489463
  misc_feature (1)..(126): Pfam Name: Thymidylate kinase Pfam Description: Thymidylate kinase
  misc_feature (1)..(122): Homolog of NCBI NO: 19076042 NR Description: thymidylate kinase [Schizosaccharomyces pombe]
  misc_feature (1)..(115): Homolog of NCBI NO: 28573735 NR Description: CG5757-PA [Drosophila melanogaster]
  misc_feature (1)..(115): Homolog of NCBI NO: 40215537 NR Description: RE69454p [Drosophila melanogaster]
  misc_feature (1)..(117): Homolog of NCBI NO: 31210425 NR Description: ENSANGP00000015825 [Anopheles gambiae]
  misc_feature (1)..(118): Homolog of NCBI NO: 27261100 NR Description: putative thymidylate kinase
  misc_feature (1)..(126): Homolog of NCBI NO: 25288285 NR Description: dTMP kinase (EC 2.7.4.9)
  misc_feature (1)..(118): Homolog of NCBI NO: 15912289 NR Description: AT5g59440/f2o15_100 [Arabidopsis thaliana]
  misc_feature (1)..(118): Homolog of NCBI NO: 30697228 NR Description: thymidylate kinase - like protein [Arabidopsis
  misc_feature (1)..(118): Homolog of NCBI NO: 30697225 NR Description: thymidylate kinase - like protein [Arabidopsis
  misc_feature (1)..(118): Homolog of NCBI NO: 21553651 NR Description: thymidylate kinase-like protein [Arabidopsis
MISAYLSNKSQLDDHTIHLLFSANRWEKRSLMEEKLKTGTTLIVDRYSYSGVAFSSAKGLDIEWCKAPEIGLLAPDSVLYLDISPERAAERGGYGDERYERVEFQKKVADFYQTLGDSFMEDNQCQ

SEQ ID NO: 43101 - DNA, 1299 bp, Arabidopsis thaliana
  misc_feature (1)..(1299): Ceres Seq. ID no. 13592877
  misc_feature: MA Experiment ID: 20000234 Result: Up-regulated in Transcription
  misc_feature: MA Experiment 20000234 PARAMETER Experiment Name: At_Siliques_P Parameter: Age (day) Value: 21
  misc_feature: MA Experiment 20000234 PARAMETER Experiment Name: At_Siliques_P Parameter: Organism Value: A. thaliana
  misc_feature: MA Experiment 20000234 PARAMETER Experiment Name: At_Siliques_P Parameter: Plant Line Value: WS
  misc_feature: MA Experiment 20000234 PARAMETER Experiment Name: At_Siliques_P Parameter: Tissue Value: Less Than 5mm Siliques vs. Whole Plant
  misc_feature: MA Experiment ID: 20000235 Result: Up-regulated in Transcription
  misc_feature: MA Experiment 20000235 PARAMETER Experiment Name: At_Siliques_P Parameter: Age (day) Value: 21
  misc_feature: MA Experiment 20000235 PARAMETER Experiment Name: At_Siliques_P Parameter: Organism Value: A. thaliana
  misc_feature: MA Experiment 20000235 PARAMETER Experiment Name: At_Siliques_P Parameter: Plant Line Value: WS
  misc_feature: MA Experiment 20000235 PARAMETER Experiment Name: At_Siliques_P Parameter: Tissue Value: 5-10mm Siliques vs. Whole Plant
  misc_feature: MA Experiment ID: 20000437 Result: Down-regulated in Transcription
  misc_feature: MA Experiment 20000437 PARAMETER Experiment Name: At_Drought_P Parameter: Age (day) Value: 8
  misc_feature: MA Experiment 20000437 PARAMETER Experiment Name: At_Drought_P Parameter: Organism Value: A. thaliana
  misc_feature: MA Experiment 20000437 PARAMETER Experiment Name: At_Drought_P Parameter: Plant Line Value: WS
  misc_feature: MA Experiment 20000437 PARAMETER Experiment Name: At_Drought_P Parameter: Timepoint (hr) Value: 24
  misc_feature: MA Experiment 20000437 PARAMETER Experiment Name: At_Drought_P Parameter: Tissue Value: Whole Plant
  misc_feature: MA Experiment 20000437 PARAMETER Experiment Name: At_Drought_P Parameter: Treatment Value: Drought vs. No Drought
  misc_feature: MA Experiment ID: 20000794 Result: Up-regulated in Transcription
  misc_feature: MA Experiment 20000794 PARAMETER Experiment Name: At_Petals_P Parameter: Age (day) Value: 23-25 days
  misc_feature: MA Experiment 20000794 PARAMETER Experiment Name: At_Petals_P Parameter: Plant Line Value: WS
  misc_feature: MA Experiment 20000794 PARAMETER Experiment Name: At_Petals_P Parameter: Tissue Value: Petals vs. Whole plant
  misc_feature: MA Experiment ID: 20001905 Result: Down-regulated in Transcription
  misc_feature: MA Experiment 20001905 PARAMETER Experiment Name: At_Drought_Reproduction_P Parameter: Age (day) Value: 40
  misc_feature: MA Experiment 20001905 PARAMETER Experiment Name: At_Drought_Reproduction_P Parameter: Organism Value: A. thaliana
  misc_feature: MA Experiment 20001905 PARAMETER Experiment Name: At_Drought_Reproduction_P Parameter: Plant Line Value: WS
  misc_feature: MA Experiment 20001905 PARAMETER Experiment Name: At_Drought_Reproduction_P Parameter: Timepoint (day) Value: 10
  misc_feature: MA Experiment 20001905 PARAMETER Experiment Name: At_Drought_Reproduction_P Parameter: Tissue Value: Rosettes
  misc_feature: MA Experiment 20001905 PARAMETER Experiment Name: At_Drought_Reproduction_P Parameter: Treatment Value: Drought vs. No Drought
attacctagaacatcctaatcgaaaagagtgagagaagaagattagaaacgacgatatatacggagaatctcaggatttcgatcctgtttttgttttttctacttttggtactctccatggcgacggagcgtcatcattttgagcttgctaaaggcatcaatggccttgataagatcgttctccgcgagtctcgcggccgctctgcagaggtatacttgtatggaagtcatgtaacttcttggaagaatgagaacggagaggagttacttcacctcagtagcaaggccatattcaagcccccgaaaccaatacgtggagggattcccctatgttttccacaattcagtaactttggtacactcgaatcacatggctttgctagaaataggatctgggaagtcgaggctaacccacctccgttgccattaaattcttgttctagtgcttttgttgacctgatcctaaggccaactgaagacgatctgaaaatctggcctaacaattttgagttcaggctgaggatagccttggggaccgaaggagaattaactctgacatctcgtatcaggaacaccaactctgatggaaagccgtttacattcacatttgcttatcacacctatttctctgtctcagacatcagtgaagtacgggttgaaggattggaaacgttggattatcttgacaacttgaaggacagagaacgttttaccgaacaaggcgatgcgataacttttgaatccgaagttgacaagatttatctaagcacgccaacaaagattgctattttggatcacgagaaaaagaggactttcgttattcgcaaggacgggcttgctgatgctgtggtgtggaatccttgggataagaaatcaaagacgatctctgacttgggagatgaagactataagcatatgctttgtgtggaagctgcggctatcgagagaccgatcacattgaaacccggtgaagaatggaaaggaagactcgaactctctgcagttccttctagttactccagtggacagcttgaccccaagaaagtccttgagtgactctttcaaactccaaaaacagcatctttctcccctctttaattgcagtactataaagaaacgagtgaaggagagcttaaagatcatcggatatactatttaaagaaactgagatattgaataaaaattgttgcttcttagttctcttttgtaaccacagacaataacgatttgcgaactgcgaaccaagcatgcctggtctagcatttgtctggtcagagtccaaaaggaattacaactttt

SEQ ID NO: 43102 - protein, 312 aa, Arabidopsis thaliana
  peptide (1)..(312): Ceres Seq. ID no. 15221176
  misc_feature (18)..(294): Pfam Name: Aldose 1-epimerase Pfam Description: Aldose 1-epimerase
  misc_feature (4)..(299): Homolog of NCBI NO: 15236591 NR Description: aldose 1-epimerase family [Arabidopsis thaliana]
  misc_feature (15)..(311): Homolog of NCBI NO: 18395868 NR Description: aldose 1-epimerase family [Arabidopsis thaliana]
  misc_feature (1)..(299): Homolog of NCBI NO: 18416643 NR Description: aldose 1-epimerase family [Arabidopsis thaliana]
  misc_feature (1)..(299): Homolog of NCBI NO: 21593295 NR Description: possible apospory-associated like protein
  misc_feature (9)..(306): Homolog of NCBI NO: 15233165 NR Description: aldose 1-epimerase family [Arabidopsis thaliana]
  misc_feature (9)..(311): Homolog of NCBI NO: 2501555 NR Description: POSSIBLE APOSPORY-ASSOCIATED PROTEIN C
  misc_feature (9)..(312): Homolog of NCBI NO: 38344152 NR Description: OSJNBa0041A02.19 [Oryza sativa (japonica
  misc_feature (8)..(312): Homolog of NCBI NO: 40253263 NR Description: putative Aldose 1-epimerase
  misc_feature (12)..(312): Homolog of NCBI NO: 19387263 NR Description: putative apospory-associated protein C
  misc_feature (1)..(312): Homolog of NCBI NO: 15242099 NR Description: aldose 1-epimerase family [Arabidopsis thaliana]
MATERHHFELAKGINGLDKIVLRESRGRSAEVYLYGSHVTSWKNENGEELLHLSSKAIFKPPKPIRGGIPLCFPQFSNFGTLESHGFARNRIWEVEANPPPLPLNSCSSAFVDLILRPTEDDLKIWPNNFEFRLRIALGTEGELTLTSRIRNTNSDGKPFTFTFAYHTYFSVSDISEVRVEGLETLDYLDNLKDRERFTEQGDAITFESEVDKIYLSTPTKIAILDHEKKRTFVIRKDGLADAVVWNPWDKKSKTISDLGDEDYKHMLCVEAAAIERPITLKPGEEWKGRLELSAVPSSYSSGQLDPKKVLE

SEQ ID NO: 43103 - DNA, 1239 bp, Arabidopsis thaliana
  misc_feature (1)..(1239): Ceres Seq. ID no. 12481861
  misc_feature: MA Experiment ID: 20000171 Result: Up-regulated in Transcription
  misc_feature: MA Experiment 20000171 PARAMETER Experiment Name: At_42deg_Heat_P Parameter: Age (day) Value: 14
  misc_feature: MA Experiment 20000171 PARAMETER Experiment Name: At_42deg_Heat_P Parameter: Organism Value: A. thaliana
  misc_feature: MA Experiment 20000171 PARAMETER Experiment Name: At_42deg_Heat_P Parameter: Plant Line Value: WS
  misc_feature: MA Experiment 20000171 PARAMETER Experiment Name: At_42deg_Heat_P Parameter: Temperature (deg C) Value: 42 vs. 22
  misc_feature: MA Experiment 20000171 PARAMETER Experiment Name: At_42deg_Heat_P Parameter: Timepoint (hr) Value: 1
  misc_feature: MA Experiment 20000171 PARAMETER Experiment Name: At_42deg_Heat_P Parameter: Tissue Value: Aerial
  misc_feature: MA Experiment ID: 20000173 Result: Up-regulated in Transcription
  misc_feature: MA Experiment 20000173 PARAMETER Experiment Name: At_42deg_Heat_P Parameter: Age (day) Value: 14
  misc_feature: MA Experiment 20000173 PARAMETER Experiment Name: At_42deg_Heat_P Parameter: Organism Value: A. thaliana
  misc_feature: MA Experiment 20000173 PARAMETER Experiment Name: At_42deg_Heat_P Parameter: Plant Line Value: WS
  misc_feature: MA Experiment 20000173 PARAMETER Experiment Name: At_42deg_Heat_P Parameter: Temperature (deg C) Value: 42 vs. 22
  misc_feature: MA Experiment 20000173 PARAMETER Experiment Name: At_42deg_Heat_P Parameter: Timepoint (hr) Value: 6
  misc_feature: MA Experiment 20000173 PARAMETER Experiment Name: At_42deg_Heat_P Parameter: Tissue Value: Aerial
  misc_feature: MA Experiment ID: 20000180 Result: Up-regulated in Transcription
  misc_feature: MA Experiment 20000180 PARAMETER Experiment Name: At_Germinating_Seeds_P Parameter: Age (hr) Value: 24 vs. 0
  misc_feature: MA Experiment 20000180 PARAMETER Experiment Name: At_Germinating_Seeds_P Parameter: Tissue Value: Germinating Seeds
  misc_feature: MA Experiment ID: 20000184 Result: Down-regulated in Transcription
  misc_feature: MA Experiment 20000184 PARAMETER Experiment Name: At_Shoots__P Parameter: Age (day) Value: 7
  misc_feature: MA Experiment 20000184 PARAMETER Experiment Name: At_Shoots__P Parameter: Tissue Value: Shoots vs. Whole Plant
  misc_feature: MA Experiment ID: 20000185 Result: Down-regulated in Transcription
  misc_feature: MA Experiment 20000185 PARAMETER Experiment Name: At_Roots__P Parameter: Age (day) Value: 7 vs. 21
  misc_feature: MA Experiment 20000185 PARAMETER Experiment Name: At_Roots__P Parameter: Organism Value: A. thaliana
  misc_feature: MA Experiment 20000185 PARAMETER Experiment Name: At_Roots__P Parameter: Tissue Value: Roots vs. Whole Plant
  misc_feature: MA Experiment ID: 20000264 Result: Down-regulated in Transcription
  misc_feature: MA Experiment 20000264 PARAMETER Experiment Name: At_Open_Flower_P Parameter: Age (day) Value: 21
  misc_feature: MA Experiment 20000264 PARAMETER Experiment Name: At_Open_Flower_P Parameter: Plant Line Value: WS
  misc_feature: MA Experiment 20000264 PARAMETER Experiment Name: At_Open_Flower_P Parameter: Tissue Value: Open Flower vs. Whole Plant
  misc_feature: MA Experiment ID: 20000268 Result: Down-regulated in Transcription
  misc_feature: MA Experiment 20000268 PARAMETER Experiment Name: At_100mM_NaCl__P Parameter: Age (day) Value: 14
  misc_feature: MA Experiment 20000268 PARAMETER Experiment Name: At_100mM_NaCl__P Parameter: Organism Value: A. thaliana
  misc_feature: MA Experiment 20000268 PARAMETER Experiment Name: At_100mM_NaCl__P Parameter: Plant Line Value: WS
  misc_feature: MA Experiment 20000268 PARAMETER Experiment Name: At_100mM_NaCl__P Parameter: Timepoint (hr) Value: 6
  misc_feature: MA Experiment 20000268 PARAMETER Experiment Name: At_100mM_NaCl__P Parameter: Tissue Value: Whole Plant
  misc_feature: MA Experiment 20000268 PARAMETER Experiment Name: At_100mM_NaCl__P Parameter: Treatment Value: 100mM NaCl vs. No Treatment
  misc_feature: MA Experiment ID: 20000436 Result: Down-regulated in Transcription
  misc_feature: MA Experiment 20000436 PARAMETER Experiment Name: At_Drought_P Parameter: Age (day) Value: 7
  misc_feature: MA Experiment 20000436 PARAMETER Experiment Name: At_Drought_P Parameter: Organism Value: A. thaliana
  misc_feature: MA Experiment 20000436 PARAMETER Experiment Name: At_Drought_P Parameter: Plant Line Value: WS
  misc_feature: MA Experiment 20000436 PARAMETER Experiment Name: At_Drought_P Parameter: Timepoint (hr) Value: 12
  misc_feature: MA Experiment 20000436 PARAMETER Experiment Name: At_Drought_P Parameter: Tissue Value: Whole Plant
  misc_feature: MA Experiment 20000436 PARAMETER Experiment Name: At_Drought_P Parameter: Treatment Value: Drought vs. No Drought
  misc_feature: MA Experiment ID: 20000438 Result: Down-regulated in Transcription
  misc_feature: MA Experiment 20000438 PARAMETER Experiment Name: At_Shoots__P Parameter: Age (day) Value: 14
  misc_feature: MA Experiment 20000438 PARAMETER Experiment Name: At_Shoots__P Parameter: Tissue Value: Shoots vs. Whole Plant
  misc_feature: MA Experiment ID: 20000439 Result: Down-regulated in Transcription
  misc_feature: MA Experiment 20000439 PARAMETER Experiment Name: At_Roots__P Parameter: Age (day) Value: 14 vs. 21
  misc_feature: MA Experiment 20000439 PARAMETER Experiment Name: At_Roots__P Parameter: Organism Value: A. thaliana
  misc_feature: MA Experiment 20000439 PARAMETER Experiment Name: At_Roots__P Parameter: Tissue Value: Roots vs. Whole Plant
  misc_feature: MA Experiment ID: 20000573 Result: Up-regulated in Transcription
  misc_feature: MA Experiment 20000573 PARAMETER Experiment Name: At_100uM_ABA_Mutants__P Parameter: Organism Value: A. thaliana
  misc_feature: MA Experiment 20000573 PARAMETER Experiment Name: At_100uM_ABA_Mutants__P Parameter: Plant Line Value: CS22 vs. Ler wt
  misc_feature: MA Experiment 20000573 PARAMETER Experiment Name: At_100uM_ABA_Mutants__P Parameter: Timepoint (hr) Value: N/A
  misc_feature: MA Experiment 20000573 PARAMETER Experiment Name: At_100uM_ABA_Mutants__P Parameter: Tissue Value: Whole Plant
  misc_feature: MA Experiment 20000573 PARAMETER Experiment Name: At_100uM_ABA_Mutants__P Parameter: Treatment Value: None
  misc_feature: MA Experiment ID: 20000606 Result: Up-regulated in Transcription
  misc_feature: MA Experiment 20000606 PARAMETER Experiment Name: At_CS8548_Mutant_P Parameter: Age (day) Value: 14
  misc_feature: MA Experiment 20000606 PARAMETER Experiment Name: At_CS8548_Mutant_P Parameter: Plant Line Value: CS8548 vs. wt
  misc_feature: MA Experiment 20000606 PARAMETER Experiment Name: At_CS8548_Mutant_P Parameter: Tissue Value: Whole Plant
  misc_feature: MA Experiment ID: 20000794 Result: Down-regulated in Transcription
  misc_feature: MA Experiment 20000794 PARAMETER Experiment Name: At_Petals_P Parameter: Age (day) Value: 23-25 days
  misc_feature: MA Experiment 20000794 PARAMETER Experiment Name: At_Petals_P Parameter: Plant Line Value: WS
  misc_feature: MA Experiment 20000794 PARAMETER Experiment Name: At_Petals_P Parameter: Tissue Value: Petals vs. Whole plant
  misc_feature: MA Experiment ID: 20001248 Result: Up-regulated in Transcription
  misc_feature: MA Experiment 20001248 PARAMETER Experiment Name: At_Far-red-induction_P Parameter: Age (day) Value: 7
  misc_feature: MA Experiment 20001248 PARAMETER Experiment Name: At_Far-red-induction_P Parameter: Light Value: Far-red vs. White
  misc_feature: MA Experiment 20001248 PARAMETER Experiment Name: At_Far-red-induction_P Parameter: Organism Value: A. thaliana
  misc_feature: MA Experiment 20001248 PARAMETER Experiment Name: At_Far-red-induction_P Parameter: Plant Line Value: Columbia
  misc_feature: MA Experiment 20001248 PARAMETER Experiment Name: At_Far-red-induction_P Parameter: Timepoint (hr) Value: 4
  misc_feature: MA Experiment 20001248 PARAMETER Experiment Name: At_Far-red-induction_P Parameter: Tissue Value: Whole Plant
  misc_feature: MA Experiment ID: 20001556 Result: Down-regulated in Transcription
  misc_feature: MA Experiment 20001556 PARAMETER Experiment Name: At_Drought_Soil_Dry_P Parameter: Age (day) Value: 26
  misc_feature: MA Experiment 20001556 PARAMETER Experiment Name: At_Drought_Soil_Dry_P Parameter: Organism Value: A. thaliana
  misc_feature: MA Experiment 20001556 PARAMETER Experiment Name: At_Drought_Soil_Dry_P Parameter: Plant Line Value: WS
  misc_feature: MA Experiment 20001556 PARAMETER Experiment Name: At_Drought_Soil_Dry_P Parameter: Post Timepoint (hr) Value: None
  misc_feature: MA Experiment 20001556 PARAMETER Experiment Name: At_Drought_Soil_Dry_P Parameter: Post-Treatment Value: None
  misc_feature: MA Experiment 20001556 PARAMETER Experiment Name: At_Drought_Soil_Dry_P Parameter: Timepoint (day) Value: 12
  misc_feature: MA Experiment 20001556 PARAMETER Experiment Name: At_Drought_Soil_Dry_P Parameter: Treatment Value: Drought vs. No Drought
  misc_feature: MA Experiment ID: 20001904 Result: Down-regulated in Transcription
  misc_feature: MA Experiment 20001904 PARAMETER Experiment Name: At_Drought_Reproduction_P Parameter: Age (day) Value: 37
  misc_feature: MA Experiment 20001904 PARAMETER Experiment Name: At_Drought_Reproduction_P Parameter: Organism Value: A. thaliana
  misc_feature: MA Experiment 20001904 PARAMETER Experiment Name: At_Drought_Reproduction_P Parameter: Plant Line Value: WS
  misc_feature: MA Experiment 20001904 PARAMETER Experiment Name: At_Drought_Reproduction_P Parameter: Timepoint (day) Value: 7
  misc_feature: MA Experiment 20001904 PARAMETER Experiment Name: At_Drought_Reproduction_P Parameter: Tissue Value: Rosettes
  misc_feature: MA Experiment 20001904 PARAMETER Experiment Name: At_Drought_Reproduction_P Parameter: Treatment Value: Drought vs. No Drought
  misc_feature: MA Experiment ID: 20001911 Result: Down-regulated in Transcription
  misc_feature: MA Experiment 20001911 PARAMETER Experiment Name: At_Drought_Reproduction_P Parameter: Age (day) Value: 40
  misc_feature: MA Experiment 20001911 PARAMETER Experiment Name: At_Drought_Reproduction_P Parameter: Organism Value: A. thaliana
  misc_feature: MA Experiment 20001911 PARAMETER Experiment Name: At_Drought_Reproduction_P Parameter: Plant Line Value: WS
  misc_feature: MA Experiment 20001911 PARAMETER Experiment Name: At_Drought_Reproduction_P Parameter: Timepoint (day) Value: 10
  misc_feature: MA Experiment 20001911 PARAMETER Experiment Name: At_Drought_Reproduction_P Parameter: Tissue Value: Flowers
  misc_feature: MA Experiment 20001911 PARAMETER Experiment Name: At_Drought_Reproduction_P Parameter: Treatment Value: Drought vs. No Drought
atgagcccaaaaaaagatgctgtttctaaaccaactccaatttcagtacccgtttcgagacgatccgatatacccgggtctctctacgtcgacactgacatgggtttctctgggtcaccacttcccatgccactagacatcttacaagggaatccaattccaccttttttatccaagacttttgatttggttgatgacccgactcttgacccggtcatctcttggggactgaccggagctagcttcgtagtttgggatcctctagagtttgccagaatcatacttccaaggaatttcaaacacaacaatttctccagcttcgtcagacagcttaacacttatggatttcgaaagattgatactgacaagtgggaattcgctaacgaggctttccttagaggcaagaagcatcttctgaagaacattcatcgtcgtcgatcaccacaatccaaccaaacttgctgcagtagcactagccaaagccaagggtcacctactgaggttggaggagagattgagaagctgaggaaagagcggcgtgcattgatggaggaaatggttgagcttcagcagcaaagcagaggcacagctcgacatgtggacactgtaaaccagaggctgaaagctgcagagcaacgtcagaagcaattgctctctttcttggctaagttgtttcagaaccggggtttcttggaacgcctgaagaacttcaaaggaaaagaaaaaggaggagctcttggattggaaaaggcgagaaagaagttcatcaagcaccaccagcagcctcaagattctccaacaggaggggaggtggtgaagtatgaagctgatgattgggagagattgctaatgtatgacgaagagactgagaacaccaagggtttaggagggatgacttcaagcgatccaaaaggcaagaacttgatgtatccatcagaagaagagatgagcaaaccagattacttgatgtccttcccatctcctgaaggacttattaaacaagaagagacgacatggagcatgggtttcgatactacaataccgagtttcagcaacaccgatgcatggggaaacacaatggactataatgatgtctcagagtttggttttgctgcagaaacaacaagtgatggtttgcctgatgtctgctgggaacaatttgctgcaggaatcacagagactggattcaactggccaactggtgatgatgatgataatacgccaatgaatgatccttag

SEQ ID NO: 43104 - protein, 412 aa, Arabidopsis thaliana
  peptide (1)..(412): Ceres Seq. ID no. 12481862
  misc_feature (54)..(221): Pfam Name: HSF-type DNA-binding Pfam Description: HSF-type DNA-binding
  misc_feature (37)..(275): Homolog of NCBI NO: 27261140 NR Description: HSF3 DNA-binding domain/VP16 activation domain
  misc_feature (37)..(275): Homolog of NCBI NO: 25296101 NR Description: heat shock transcription factor HSF3
  misc_feature (42)..(320): Homolog of NCBI NO: 429155 NR Description: heat shock factor [Arabidopsis thaliana]
  misc_feature (38)..(254): Homolog of NCBI NO: 37534406 NR Description: putative auxin-induced protein
  misc_feature (42)..(320): Homolog of NCBI NO: 15236631 NR Description: heat shock transcription factor HSF1; protein id:
  misc_feature (39)..(275): Homolog of NCBI NO: 15223168 NR Description: heat shock transcription factor HSF8, putative
  misc_feature (38)..(277): Homolog of NCBI NO: 8347238 NR Description: heat stress transcription factor A3 [Lycopersicon
  misc_feature (68)..(412): Homolog of NCBI NO: 26449731 NR Description: putative heat shock transcription factor
  misc_feature (3)..(412): Homolog of NCBI NO: 11357326 NR Description: heat shock transcription factor-like protein -
  misc_feature (1)..(412): Homolog of NCBI NO: 22326589 NR Description: heat shock transcription factor -like protein
MSPKKDAVSKPTPISVPVSRRSDIPGSLYVDTDMGFSGSPLPMPLDILQGNPIPPFLSKTFDLVDDPTLDPVISWGLTGASFVVWDPLEFARIILPRNFKHNNFSSFVRQLNTYGFRKIDTDKWEFANEAFLRGKKHLLKNIHRRRSPQSNQTCCSSTSQSQGSPTEVGGEIEKLRKERRALMEEMVELQQQSRGTARHVDTVNQRLKAAEQRQKQLLSFLAKLFQNRGFLERLKNFKGKEKGGALGLEKARKKFIKHHQQPQDSPTGGEVVKYEADDWERLLMYDEETENTKGLGGMTSSDPKGKNLMYPSEEEMSKPDYLMSFPSPEGLIKQEETTWSMGFDTTIPSFSNTDAWGNTMDYNDVSEFGFAAETTSDGLPDVCWEQFAAGITETGFNWPTGDDDDNTPMNDP

SEQ ID NO: 43105 - protein, 379 aa, Arabidopsis thaliana
  peptide (1)..(379): Ceres Seq. ID no. 12481863
  misc_feature (21)..(188): Pfam Name: HSF-type DNA-binding Pfam Description: HSF-type DNA-binding
  misc_feature (4)..(242): Homolog of NCBI NO: 27261140 NR Description: HSF3 DNA-binding domain/VP16 activation domain
  misc_feature (4)..(242): Homolog of NCBI NO: 25296101 NR Description: heat shock transcription factor HSF3
  misc_feature (9)..(287): Homolog of NCBI NO: 429155 NR Description: heat shock factor [Arabidopsis thaliana]
  misc_feature (5)..(221): Homolog of NCBI NO: 37534406 NR Description: putative auxin-induced protein
  misc_feature (9)..(287): Homolog of NCBI NO: 15236631 NR Description: heat shock transcription factor HSF1; protein id:
  misc_feature (6)..(242): Homolog of NCBI NO: 15223168 NR Description: heat shock transcription factor HSF8, putative
  misc_feature (5)..(244): Homolog of NCBI NO: 8347238 NR Description: heat stress transcription factor A3 [Lycopersicon
  misc_feature (35)..(379): Homolog of NCBI NO: 26449731 NR Description: putative heat shock transcription factor
  misc_feature (1)..(379): Homolog of NCBI NO: 11357326 NR Description: heat shock transcription factor-like protein -
  misc_feature (1)..(379): Homolog of NCBI NO: 22326589 NR Description: heat shock transcription factor -like protein
MGFSGSPLPMPLDILQGNPIPPFLSKTFDLVDDPTLDPVISWGLTGASFVVWDPLEFARIILPRNFKHNNFSSFVRQLNTYGFRKIDTDKWEFANEAFLRGKKHLLKNIHRRRSPQSNQTCCSSTSQSQGSPTEVGGEIEKLRKERRALMEEMVELQQQSRGTARHVDTVNQRLKAAEQRQKQLLSFLAKLFQNRGFLERLKNFKGKEKGGALGLEKARKKFIKHHQQPQDSPTGGEVVKYEADDWERLLMYDEETENTKGLGGMTSSDPKGKNLMYPSEEEMSKPDYLMSFPSPEGLIKQEETTWSMGFDTTIPSFSNTDAWGNTMDYNDVSEFGFAAETTSDGLPDVCWEQFAAGITETGFNWPTGDDDDNTPMNDP

SEQ ID NO: 43106 - protein, 370 aa, Arabidopsis thaliana
  peptide (1)..(370): Ceres Seq. ID no. 12481864
  misc_feature (12)..(179): Pfam Name: HSF-type DNA-binding Pfam Description: HSF-type DNA-binding
  misc_feature (1)..(233): Homolog of NCBI NO: 27261140 NR Description: HSF3 DNA-binding domain/VP16 activation domain
  misc_feature (1)..(233): Homolog of NCBI NO: 25296101 NR Description: heat shock transcription factor HSF3
  misc_feature (1)..(278): Homolog of NCBI NO: 429155 NR Description: heat shock factor [Arabidopsis thaliana]
  misc_feature (1)..(212): Homolog of NCBI NO: 37534406 NR Description: putative auxin-induced protein
  misc_feature (1)..(278): Homolog of NCBI NO: 15236631 NR Description: heat shock transcription factor HSF1; protein id:
  misc_feature (1)..(233): Homolog of NCBI NO: 15223168 NR Description: heat shock transcription factor HSF8, putative
  misc_feature (1)..(235): Homolog of NCBI NO: 8347238 NR Description: heat stress transcription factor A3 [Lycopersicon
  misc_feature (26)..(370): Homolog of NCBI NO: 26449731 NR Description: putative heat shock transcription factor
  misc_feature (1)..(370): Homolog of NCBI NO: 11357326 NR Description: heat shock transcription factor-like protein -
  misc_feature (1)..(370): Homolog of NCBI NO: 22326589 NR Description: heat shock transcription factor -like protein
MPLDILQGNPIPPFLSKTFDLVDDPTLDPVISWGLTGASFVVWDPLEFARIILPRNFKHNNFSSFVRQLNTYGFRKIDTDKWEFANEAFLRGKKHLLKNIHRRRSPQSNQTCCSSTSQSQGSPTEVGGEIEKLRKERRALMEEMVELQQQSRGTARHVDTVNQRLKAAEQRQKQLLSFLAKLFQNRGFLERLKNFKGKEKGGALGLEKARKKFIKHHQQPQDSPTGGEVVKYEADDWERLLMYDEETENTKGLGGMTSSDPKGKNLMYPSEEEMSKPDYLMSFPSPEGLIKQEETTWSMGFDTTIPSFSNTDAWGNTMDYNDVSEFGFAAETTSDGLPDVCWEQFAAGITETGFNWPTGDDDDNTPMNDP

SEQ ID NO: 43107 - DNA, 1523 bp, Arabidopsis thaliana
  misc_feature (1)..(1523): Ceres Seq. ID no. 13489464
  misc_feature: MA Experiment ID: 108433 Result: Up-regulated in Transcription
  misc_feature: MA Experiment 108433 PARAMETER Experiment Name: At_rhl_Mutant2_cDNA_P Parameter: Age (day) Value: 7
  misc_feature: MA Experiment 108433 PARAMETER Experiment Name: At_rhl_Mutant2_cDNA_P Parameter: Organism Value: A. thaliana
  misc_feature: MA Experiment 108433 PARAMETER Experiment Name: At_rhl_Mutant2_cDNA_P Parameter: Plant Line Value: rhl Mutant vs. wt landsburg
  misc_feature: MA Experiment 108433 PARAMETER Experiment Name: At_rhl_Mutant2_cDNA_P Parameter: Tissue Value: Roots
  misc_feature: MA Experiment ID: 108434 Result: Down-regulated in Transcription
  misc_feature: MA Experiment 108434 PARAMETER Experiment Name: At_Root_Tips_cDNA_P Parameter: Tissue Value: Root Tips
  misc_feature: MA Experiment ID: 108462 Result: Up-regulated in Transcription
  misc_feature: MA Experiment 108462 PARAMETER Experiment Name: At_Germinating_Seeds_cDNA_P Parameter: Age (day) Value: 2 vs. 0
  misc_feature: MA Experiment 108462 PARAMETER Experiment Name: At_Germinating_Seeds_cDNA_P Parameter: Tissue Value: Germinating Seeds
  misc_feature: MA Experiment ID: 20000070 Result: Down-regulated in Transcription
  misc_feature: MA Experiment 20000070 PARAMETER Experiment Name: At_100uM_ABA_Mutants_cDNA_P Parameter: Plant Line Value: CS24
  misc_feature: MA Experiment 20000070 PARAMETER Experiment Name: At_100uM_ABA_Mutants_cDNA_P Parameter: Timepoint (hr) Value: 6
  misc_feature: MA Experiment 20000070 PARAMETER Experiment Name: At_100uM_ABA_Mutants_cDNA_P Parameter: Tissue Value: Aerial
  misc_feature: MA Experiment 20000070 PARAMETER Experiment Name: At_100uM_ABA_Mutants_cDNA_P Parameter: Treatment Value: 100uM ABA vs. No Treatment
  misc_feature: MA Experiment ID: 20000179 Result: Up-regulated in Transcription
  misc_feature: MA Experiment 20000179 PARAMETER Experiment Name: At_Germinating_Seeds_P Parameter: Age (hr) Value: 6 vs. 0
  misc_feature: MA Experiment 20000179 PARAMETER Experiment Name: At_Germinating_Seeds_P Parameter: Tissue Value: Germinating Seeds
  misc_feature: MA Experiment ID: 20000180 Result: Up-regulated in Transcription
  misc_feature: MA Experiment 20000180 PARAMETER Experiment Name: At_Germinating_Seeds_P Parameter: Age (hr) Value: 24 vs. 0
  misc_feature: MA Experiment 20000180 PARAMETER Experiment Name: At_Germinating_Seeds_P Parameter: Tissue Value: Germinating Seeds
  misc_feature: MA Experiment ID: 20000184 Result: Down-regulated in Transcription
  misc_feature: MA Experiment 20000184 PARAMETER Experiment Name: At_Shoots__P Parameter: Age (day) Value: 7
  misc_feature: MA Experiment 20000184 PARAMETER Experiment Name: At_Shoots__P Parameter: Tissue Value: Shoots vs. Whole Plant
  misc_feature: MA Experiment ID: 20000794 Result: Down-regulated in Transcription
  misc_feature: MA Experiment 20000794 PARAMETER Experiment Name: At_Petals_P Parameter: Age (day) Value: 23-25 days
  misc_feature: MA Experiment 20000794 PARAMETER Experiment Name: At_Petals_P Parameter: Plant Line Value: WS
  misc_feature: MA Experiment 20000794 PARAMETER Experiment Name: At_Petals_P Parameter: Tissue Value: Petals vs. Whole plant
  misc_feature: MA Experiment ID: 20001450 Result: Down-regulated in Transcription
  misc_feature: MA Experiment 20001450 PARAMETER Experiment Name: At_Far-red-induction_P Parameter: Age (day) Value: 7
  misc_feature: MA Experiment 20001450 PARAMETER Experiment Name: At_Far-red-induction_P Parameter: Light Value: Far-red vs. White
  misc_feature: MA Experiment 20001450 PARAMETER Experiment Name: At_Far-red-induction_P Parameter: Organism Value: A. thaliana
  misc_feature: MA Experiment 20001450 PARAMETER Experiment Name: At_Far-red-induction_P Parameter: Plant Line Value: Columbia
  misc_feature: MA Experiment 20001450 PARAMETER Experiment Name: At_Far-red-induction_P Parameter: Timepoint (hr) Value: 8
  misc_feature: MA Experiment 20001450 PARAMETER Experiment Name: At_Far-red-induction_P Parameter: Tissue Value: Whole Plant
  misc_feature: MA Experiment ID: 20001911 Result: Down-regulated in Transcription
  misc_feature: MA Experiment 20001911 PARAMETER Experiment Name: At_Drought_Reproduction_P Parameter: Age (day) Value: 40
  misc_feature: MA Experiment 20001911 PARAMETER Experiment Name: At_Drought_Reproduction_P Parameter: Organism Value: A. thaliana
  misc_feature: MA Experiment 20001911 PARAMETER Experiment Name: At_Drought_Reproduction_P Parameter: Plant Line Value: WS
  misc_feature: MA Experiment 20001911 PARAMETER Experiment Name: At_Drought_Reproduction_P Parameter: Timepoint (day) Value: 10
  misc_feature: MA Experiment 20001911 PARAMETER Experiment Name: At_Drought_Reproduction_P Parameter: Tissue Value: Flowers
  misc_feature: MA Experiment 20001911 PARAMETER Experiment Name: At_Drought_Reproduction_P Parameter: Treatment Value: Drought vs. No Drought
gaagaacctctgtttcttcctcttcttcttcagggtcggtgttaggtgatgaagctccgtttttttcgttttcgtcttcttcttcttcaaggtctcttcgttttgtgcttgaagtaagaaaatttgggagaacaatgtcggcttcttcttcctcctttgaacaacctcaagtcataacctgcaacgcggcggtggcatggcgtgctggtgagccattggttatggaggaagttgaagtgagtccacctcaaccacttgagatcagaattaaagttgtatgtacatctctctgtcgtagtgatctctctgcttgggaatctcagtctcttttgcctcgaatatttggccatgaagctgcaggtatagtggagagcattggagaaggtgtaactgagtttgaaaaaggagatcatgtgcttgctgtattcactggagaatgtgggtcatgtcggcattgcatatctgggaaaagtaacatgtgtcaggttcttggaatggagaggaaaggtttgatgcatagtgatcagaagacacgcttctccatcaaaggcaaacctgtttaccattactgcgcggtttctagtttcagcgagtacactgtggttcactctggctgtgctgtcaaagtcgatccactggcacctctgcataaaatttgtcttctaagctgtggagtagctgcaggtcttggtgcagcatggaatgttgctgatgtacaaaaaggttcaagtgttgtgatatttggtcttggaactgtcggtctttctgttgctcaaggtgccaaacttagaggagcagctcaaatacttggggttgatataaatcctgctaaggctgaacaagcaaagacatttggtgtcacggatttcatcaattcaaatgacctctctgaacctataccccaggtgatcaaaagaatgacaggaggaggtgcagatttctcatttgaatgtgttggtgatacaggaatagctacaactgctttacaatcgtgctcggatggatggggaatgacggttactctaggtgtaccgaaagctaagcctgaagtttcagctcattacggacttttcctttctgggaaatctttaaaagggactctttttggtggttggaagcctaaatctgatcttccttcactcattgacaagtacatgaacaaggagattatgatcgatgaatttattacgcataacctgtcatttgatgaaatcaacaaagcttttgttcttatgagagaaggaaaatgtttgcgttgtgttcttcacatgccaaagtaatgtctcggaaaacacatgtcacagattcaagaaagattaacgagagctctgtatattctacagctgagttgttgtataaaacaaaagtgatggttttctatagggttatgagacttttttttttcttttggtttgttgtgaagtgatcgttcatacattataaagatggattctcacatgatgaatcaaacgagttcctagaaccaaggacattgatcttaaattgataacagtgtttcaagt

SEQ ID NO: 43108 - protein, 425 aa, Arabidopsis thaliana
  peptide (1)..(425): Ceres Seq. ID no. 13489465
  misc_feature (56)..(423): Homolog of NCBI NO: 113365 NR Description: Alcohol dehydrogenase 1
  misc_feature (56)..(423): Homolog of NCBI NO: 7427629 NR Description: alcohol dehydrogenase (EC 1.1.1.1) - potato
  misc_feature (56)..(423): Homolog of NCBI NO: 1840425 NR Description: alcohol dehydrogenase
  misc_feature (56)..(423): Homolog of NCBI NO: 9885274 NR Description: alcohol dehydrogenase 2 [Vitis vinifera]
  misc_feature (56)..(423): Homolog of NCBI NO: 113386 NR Description: ALCOHOL DEHYDROGENASE 3
  misc_feature (56)..(423): Homolog of NCBI NO: 113379 NR Description: ALCOHOL DEHYDROGENASE 2
  misc_feature (56)..(423): Homolog of NCBI NO: 7264740 NR Description: alcohol dehydrogenase 6 [Vitis vinifera]
  misc_feature (45)..(425): Homolog of NCBI NO: 10129655 NR Description: alcohol dehydrogenase-like protein [Arabidopsis
  misc_feature (45)..(425): Homolog of NCBI NO: 21553654 NR Description: alcohol dehydrogenase-like protein [Arabidopsis
  misc_feature (45)..(425): Homolog of NCBI NO: 18420834 NR Description: alcohol dehydrogenase (ADH), putative
RTSVSSSSSSGSVLGDEAPFFSFSSSSSSRSLRFVLEVRKFGRTMSASSSSFEQPQVITCNAAVAWRAGEPLVMEEVEVSPPQPLEIRIKVVCTSLCRSDLSAWESQSLLPRIFGHEAAGIVESIGEGVTEFEKGDHVLAVFTGECGSCRHCISGKSNMCQVLGMERKGLMHSDQKTRFSIKGKPVYHYCAVSSFSEYTVVHSGCAVKVDPLAPLHKICLLSCGVAAGLGAAWNVADVQKGSSVVIFGLGTVGLSVAQGAKLRGAAQILGVDINPAKAEQAKTFGVTDFINSNDLSEPIPQVIKRMTGGGADFSFECVGDTGIATTALQSCSDGWGMTVTLGVPKAKPEVSAHYGLFLSGKSLKGTLFGGWKPKSDLPSLIDKYMNKEIMIDEFITHNLSFDEINKAFVLMREGKCLRCVLHMPK

SEQ ID NO: 43109 - protein, 381 aa, Arabidopsis thaliana
  peptide (1)..(381): Ceres Seq. ID no. 13489466
  misc_feature (12)..(379): Homolog of NCBI NO: 113365 NR Description: Alcohol dehydrogenase 1
  misc_feature (12)..(379): Homolog of NCBI NO: 7427629 NR Description: alcohol dehydrogenase (EC 1.1.1.1) - potato
  misc_feature (12)..(379): Homolog of NCBI NO: 1840425 NR Description: alcohol dehydrogenase
  misc_feature (12)..(379): Homolog of NCBI NO: 9885274 NR Description: alcohol dehydrogenase 2 [Vitis vinifera]
  misc_feature (12)..(379): Homolog of NCBI NO: 113386 NR Description: ALCOHOL DEHYDROGENASE 3
  misc_feature (12)..(379): Homolog of NCBI NO: 113379 NR Description: ALCOHOL DEHYDROGENASE 2
  misc_feature (12)..(379): Homolog of NCBI NO: 7264740 NR Description: alcohol dehydrogenase 6 [Vitis vinifera]
  misc_feature (1)..(381): Homolog of NCBI NO: 10129655 NR Description: alcohol dehydrogenase-like protein [Arabidopsis
  misc_feature (1)..(381): Homolog of NCBI NO: 21553654 NR Description: alcohol dehydrogenase-like protein [Arabidopsis
  misc_feature (1)..(381): Homolog of NCBI NO: 18420834 NR Description: alcohol dehydrogenase (ADH), putative
MSASSSSFEQPQVITCNAAVAWRAGEPLVMEEVEVSPPQPLEIRIKVVCTSLCRSDLSAWESQSLLPRIFGHEAAGIVESIGEGVTEFEKGDHVLAVFTGECGSCRHCISGKSNMCQVLGMERKGLMHSDQKTRFSIKGKPVYHYCAVSSFSEYTVVHSGCAVKVDPLAPLHKICLLSCGVAAGLGAAWNVADVQKGSSVVIFGLGTVGLSVAQGAKLRGAAQILGVDINPAKAEQAKTFGVTDFINSNDLSEPIPQVIKRMTGGGADFSFECVGDTGIATTALQSCSDGWGMTVTLGVPKAKPEVSAHYGLFLSGKSLKGTLFGGWKPKSDLPSLIDKYMNKEIMIDEFITHNLSFDEINKAFVLMREGKCLRCVLHMPK

SEQ ID NO: 43110 - protein, 352 aa, Arabidopsis thaliana; identical to SEQ ID NO: 36865
  peptide (1)..(352): Ceres Seq. ID no. 13489467
  misc_feature (1)..(350): Homolog of NCBI NO: 113365 NR Description: Alcohol dehydrogenase 1
  misc_feature (1)..(350): Homolog of NCBI NO: 7427629 NR Description: alcohol dehydrogenase (EC 1.1.1.1) - potato
  misc_feature (1)..(350): Homolog of NCBI NO: 1840425 NR Description: alcohol dehydrogenase
  misc_feature (1)..(350): Homolog of NCBI NO: 9885274 NR Description: alcohol dehydrogenase 2 [Vitis vinifera]
  misc_feature (1)..(350): Homolog of NCBI NO: 113386 NR Description: ALCOHOL DEHYDROGENASE 3
  misc_feature (1)..(350): Homolog of NCBI NO: 113379 NR Description: ALCOHOL DEHYDROGENASE 2
  misc_feature (1)..(350): Homolog of NCBI NO: 7264740 NR Description: alcohol dehydrogenase 6 [Vitis vinifera]
  misc_feature (1)..(352): Homolog of NCBI NO: 10129655 NR Description: alcohol dehydrogenase-like protein [Arabidopsis
  misc_feature (1)..(352): Homolog of NCBI NO: 21553654 NR Description: alcohol dehydrogenase-like protein [Arabidopsis
  misc_feature (1)..(352): Homolog of NCBI NO: 18420834 NR Description: alcohol dehydrogenase (ADH), putative

SEQ ID NO: 43111 - DNA, 2188 bp, Arabidopsis thaliana
  misc_feature (1)..(2188): Ceres Seq. ID no. 12574396
  misc_feature: MA Experiment ID: 20000185 Result: Up-regulated in Transcription
  misc_feature: MA Experiment 20000185 PARAMETER Experiment Name: At_Roots__P Parameter: Age (day) Value: 7 vs. 21
  misc_feature: MA Experiment 20000185 PARAMETER Experiment Name: At_Roots__P Parameter: Organism Value: A. thaliana
  misc_feature: MA Experiment 20000185 PARAMETER Experiment Name: At_Roots__P Parameter: Tissue Value: Roots vs. Whole Plant
  misc_feature: MA Experiment ID: 20000264 Result: Up-regulated in Transcription
  misc_feature: MA Experiment 20000264 PARAMETER Experiment Name: At_Open_Flower_P Parameter: Age (day) Value: 21
  misc_feature: MA Experiment 20000264 PARAMETER Experiment Name: At_Open_Flower_P Parameter: Plant Line Value: WS
  misc_feature: MA Experiment 20000264 PARAMETER Experiment Name: At_Open_Flower_P Parameter: Tissue Value: Open Flower vs. Whole Plant
  misc_feature: MA Experiment ID: 20000265 Result: Up-regulated in Transcription
  misc_feature: MA Experiment 20000265 PARAMETER Experiment Name: At_Open_Flower_P Parameter: Age (day) Value: 21
  misc_feature: MA Experiment 20000265 PARAMETER Experiment Name: At_Open_Flower_P Parameter: Plant Line Value: WS
  misc_feature: MA Experiment 20000265 PARAMETER Experiment Name: At_Open_Flower_P Parameter: Tissue Value: Closed Flower vs. Whole Plant
  misc_feature: MA Experiment ID: 20000438 Result: Up-regulated in Transcription
  misc_feature: MA Experiment 20000438 PARAMETER Experiment Name: At_Shoots__P Parameter: Age (day) Value: 14
  misc_feature: MA Experiment 20000438 PARAMETER Experiment Name: At_Shoots__P Parameter: Tissue Value: Shoots vs. Whole Plant
  misc_feature: MA Experiment ID: 20000439 Result: Up-regulated in Transcription
  misc_feature: MA Experiment 20000439 PARAMETER Experiment Name: At_Roots__P Parameter: Age (day) Value: 14 vs. 21
  misc_feature: MA Experiment 20000439 PARAMETER Experiment Name: At_Roots__P Parameter: Organism Value: A. thaliana
  misc_feature: MA Experiment 20000439 PARAMETER Experiment Name: At_Roots__P Parameter: Tissue Value: Roots vs. Whole Plant
  misc_feature: MA Experiment ID: 20001451 Result: Down-regulated in Transcription
  misc_feature: MA Experiment 20001451 PARAMETER Experiment Name: At_Far-red-induction_P Parameter: Age (day) Value: 7
  misc_feature: MA Experiment 20001451 PARAMETER Experiment Name: At_Far-red-induction_P Parameter: Light Value: Far-red vs. White
  misc_feature: MA Experiment 20001451 PARAMETER Experiment Name: At_Far-red-induction_P Parameter: Organism Value: A. thaliana
  misc_feature: MA Experiment 20001451 PARAMETER Experiment Name: At_Far-red-induction_P Parameter: Plant Line Value: Columbia
  misc_feature: MA Experiment 20001451 PARAMETER Experiment Name: At_Far-red-induction_P Parameter: Timepoint (hr) Value: 24
  misc_feature: MA Experiment 20001451 PARAMETER Experiment Name: At_Far-red-induction_P Parameter: Tissue Value: Whole Plant
agggccgctcgctcccaccaaaggacaaatctctctcccgcactcatctctgttcattggttcctcccaaaaaatatcaatcaaatcggaataaactatacgaatcctccaatataaagctccaccctttctctttctatctctctctctccattgttgactgtctctcttccctcgtaaacatcgctgtctctaaagatggcctctctctcaggcctatactcttcttctccatctctcaaacctgccaaaaaccattcctttaaagcattgccggcgcaatctcgagattccttctctttcccacatacctccaaacccaccaatctaccgttgactctctcctcggctcgttctgtggcacgcgacatttctcatgcggattcgaagaaagagcttcttaaggatccggatgcgttgtggaagcgatacctcgattggttttatcagcagaaagagcttgggttgtatctggatattagtcgggtcggatttaccgatgagtttgtggctgaaatggagccaaggtttcaagctgcgtttaaggctatggaggatcttgaaaaagggtctatagcgaatcctgatgaaggaagaatggttggacattactggcttaggaactctaagctcgcacctaagcctactttaaagaccttgatcgagaacacacttgattctatttgcgctttctccgacgacataatctctggaaagccaccatcttctcctgagggtcgttttactcagatactttctgttggcattggaggctcggctcttggacctcaatttgtcgctgaggccttggctcctgataatcctccattgaagataagattcattgacaacaccgaccctgctggaattgatcatcagattgcacaacttgggccagagctggcctcgactttagtagttgtcatctcaaagagtggaggtactcctgaaactagaaatggactactggaagtgcagaaagcattccgtgaagctggtctgaatttcgcaaaacagggtgttgcaataacccaagagaactcattactggataatacggcaagaattgaaggttggctagctagatttcctatgtacgactgggtgggtggaagaacatcaataatgtctgcagttggtctgcttccagcagcactacaggggattaatgttagggagatgcttactggtgctgctttaatggatgaggctactaggacaacttcgatcaagaataaccctgcagcgctcttagctatgtgttggtactgggcttccaatggcgttggttccaaggatatggttgtccttccttacaaggatagcttattgctatttagtcggtatctgcagcagctggtcatggaatcactaggaaaggagtttgatcttgacggtaacactgttaatcaagggttaactgtgtatggaaataagggaagcacagatcagcacgcctacattcaacagctgagagatggtgtgcacaatttctttgcaaccttcatagaagtgttacgggacagaccccctggtcacgattgggagcttgagccaggtgtcacttgtggagactatctctttgggatgctacagggaactagatctgctttatatgcaaacggtagagaatccatcagtgttacaatccaggaagtgacaccaacatctgttggggctattatagctctttatgaaagagctgttggtttatatgcctcaattgtgaacataaatgcttaccaccaacccggtgtggaagctgggaaaaaggcagcagcagaagttctcgccctgcaaaagcgggtattgtcagttcttaatgaagccacttgtaaagatccggtagagccattgacactggaagagatagctgatcgttgtcatgctcctgaggaaatagaaatgatatacaagatcatagcgcacatgtctgcaaacgacagagttctgatagcagaaggaaactgtggatcgccacgaagtatcaaagtgtatttgggcgagtgcaatgtggatgacctgtacgcataacaaaacccaacactttctcaaactccaaactctcattctctccattccttatttctttctgccatgtctatgattttgaaaaagaaaaagattgcaataagagccaggaaacacttgtgtacttgttttgaaataaagataatttcagaatgct

SEQ ID NO: 43112 - protein, 611 aa, Arabidopsis thaliana
  peptide (1)..(611): Ceres Seq. ID no. 12574397
  misc_feature (93)..(539): Pfam Name: Phosphoglucose isomerase Pfam Description: Phosphoglucose isomerase
  misc_feature (93)..(539): Pfam Name: Phosphoglucose isomerase Pfam Description: Phosphoglucose isomerase
  misc_feature (112)..(437): Homolog of NCBI NO: 18645083 NR Description: glucose-6-phosphate isomerase [uncultured
  misc_feature (101)..(543): Homolog of NCBI NO: 18030022 NR Description: glucose-6-phosphate isomerase [Trichomonas
  misc_feature (70)..(581): Homolog of NCBI NO: 23053592 NR Description: hypothetical protein [Geobacter metallireducens]
  misc_feature (74)..(599): Homolog of NCBI NO: 16330760 NR Description: glucose-6-phosphate isomerase [Synechocystis sp.
  misc_feature (70)..(598): Homolog of NCBI NO: 22298259 NR Description: glucose-6-phosphate isomerase
  misc_feature (112)..(437): Homolog of NCBI NO: 18645083 NR Description: glucose-6-phosphate isomerase [uncultured
  misc_feature (70)..(581): Homolog of NCBI NO: 23053592 NR Description: hypothetical protein [Geobacter metallireducens]
  misc_feature (70)..(598): Homolog of NCBI NO: 22298259 NR Description: glucose-6-phosphate isomerase
  misc_feature (1)..(611): Homolog of NCBI NO: 6690395 NR Description: phosphoglucose isomerase precursor [Arabidopsis
  misc_feature (2)..(611): Homolog of NCBI NO: 7484671 NR Description: glucose-6-phosphate isomerase (EC 5.3.1.9)
  misc_feature (70)..(599): Homolog of NCBI NO: 23125809 NR Description: hypothetical protein [Nostoc punctiforme]
  misc_feature (70)..(601): Homolog of NCBI NO: 17228545 NR Description: glucose-6-phosphate isomerase [Nostoc sp. PCC
  misc_feature (73)..(599): Homolog of NCBI NO: 23040343 NR Description: hypothetical protein [Trichodesmium erythraeum
  misc_feature (74)..(599): Homolog of NCBI NO: 16330760 NR Description: glucose-6-phosphate isomerase [Synechocystis sp.
  misc_feature (101)..(543): Homolog of NCBI NO: 18030022 NR Description: glucose-6-phosphate isomerase [Trichomonas
  misc_feature (73)..(599): Homolog of NCBI NO: 23040343 NR Description: hypothetical protein [Trichodesmium erythraeum
  misc_feature (70)..(601): Homolog of NCBI NO: 17228545 NR Description: glucose-6-phosphate isomerase [Nostoc sp. PCC
  misc_feature (70)..(599): Homolog of NCBI NO: 23125809 NR Description: hypothetical protein [Nostoc punctiforme]
  misc_feature (2)..(611): Homolog of NCBI NO: 7484671 NR Description: glucose-6-phosphate isomerase (EC 5.3.1.9)
  misc_feature (1)..(611): Homolog of NCBI NO: 6690395 NR Description: phosphoglucose isomerase precursor [Arabidopsis
MASLSGLYSSSPSLKPAKNHSFKALPAQSRDSFSFPHTSKPTNLPLTLSSARSVARDISHADSKKELLKDPDALWKRYLDWFYQQKELGLYLDISRVGFTDEFVAEMEPRFQAAFKAMEDLEKGSIANPDEGRMVGHYWLRNSKLAPKPTLKTLIENTLDSICAFSDDIISGKPPSSPEGRFTQILSVGIGGSALGPQFVAEALAPDNPPLKIRFIDNTDPAGIDHQIAQLGPELASTLVVVISKSGGTPETRNGLLEVQKAFREAGLNFAKQGVAITQENSLLDNTARIEGWLARFPMYDWVGGRTSIMSAVGLLPAALQGINVREMLTGAALMDEATRTTSIKNNPAALLAMCWYWASNGVGSKDMVVLPYKDSLLLFSRYLQQLVMESLGKEFDLDGNTVNQGLTVYGNKGSTDQHAYIQQLRDGVHNFFATFIEVLRDRPPGHDWELEPGVTCGDYLFGMLQGTRSALYANGRESISVTIQEVTPTSVGAIIALYERAVGLYASIVNINAYHQPGVEAGKKAAAEVLALQKRVLSVLNEATCKDPVEPLTLEEIADRCHAPEEIEMIYKIIAHMSANDRVLIAEGNCGSPRSIKVYLGECNVDDLYA

SEQ ID NO: 43113 - protein, 505 aa, Arabidopsis thaliana
  peptide (1)..(505): Ceres Seq. ID no. 12574398
  misc_feature (1)..(433): Pfam Name: Phosphoglucose isomerase Pfam Description: Phosphoglucose isomerase
  misc_feature (1)..(433): Pfam Name: Phosphoglucose isomerase Pfam Description: Phosphoglucose isomerase
  misc_feature (6)..(331): Homolog of NCBI NO: 18645083 NR Description: glucose-6-phosphate isomerase [uncultured
  misc_feature (1)..(437): Homolog of NCBI NO: 18030022 NR Description: glucose-6-phosphate isomerase [Trichomonas
  misc_feature (1)..(475): Homolog of NCBI NO: 23053592 NR Description: hypothetical protein [Geobacter metallireducens]
  misc_feature (1)..(493): Homolog of NCBI NO: 16330760 NR Description: glucose-6-phosphate isomerase [Synechocystis sp.
  misc_feature (1)..(492): Homolog of NCBI NO: 22298259 NR Description: glucose-6-phosphate isomerase
  misc_feature (6)..(331): Homolog of NCBI NO: 18645083 NR Description: glucose-6-phosphate isomerase [uncultured
  misc_feature (1)..(475): Homolog of NCBI NO: 23053592 NR Description: hypothetical protein [Geobacter metallireducens]
  misc_feature (1)..(492): Homolog of NCBI NO: 22298259 NR Description: glucose-6-phosphate isomerase
  misc_feature (1)..(505): Homolog of NCBI NO: 6690395 NR Description: phosphoglucose isomerase precursor [Arabidopsis
  misc_feature (1)..(505): Homolog of NCBI NO: 7484671 NR Description: glucose-6-phosphate isomerase (EC 5.3.1.9)
  misc_feature (1)..(493): Homolog of NCBI NO: 23125809 NR Description: hypothetical protein [Nostoc punctiforme]
  misc_feature (1)..(495): Homolog of NCBI NO: 17228545 NR Description: glucose-6-phosphate isomerase [Nostoc sp. PCC
  misc_feature (1)..(493): Homolog of NCBI NO: 23040343 NR Description: hypothetical protein [Trichodesmium erythraeum
  misc_feature (1)..(493): Homolog of NCBI NO: 16330760 NR Description: glucose-6-phosphate isomerase [Synechocystis sp.
  misc_feature (1)..(437): Homolog of NCBI NO: 18030022 NR Description: glucose-6-phosphate isomerase [Trichomonas
  misc_feature (1)..(493): Homolog of NCBI NO: 23040343 NR Description: hypothetical protein [Trichodesmium erythraeum
  misc_feature (1)..(495): Homolog of NCBI NO: 17228545 NR Description: glucose-6-phosphate isomerase [Nostoc sp. PCC
  misc_feature (1)..(493): Homolog of NCBI NO: 23125809 NR Description: hypothetical protein [Nostoc punctiforme]
  misc_feature (1)..(505): Homolog of NCBI NO: 7484671 NR Description: glucose-6-phosphate isomerase (EC 5.3.1.9)
  misc_feature (1)..(505): Homolog of NCBI NO: 6690395 NR Description: phosphoglucose isomerase precursor [Arabidopsis
MEPRFQAAFKAMEDLEKGSIANPDEGRMVGHYWLRNSKLAPKPTLKTLIENTLDSICAFSDDIISGKPPSSPEGRFTQILSVGIGGSALGPQFVAEALAPDNPPLKIRFIDNTDPAGIDHQIAQLGPELASTLVVVISKSGGTPETRNGLLEVQKAFREAGLNFAKQGVAITQENSLLDNTARIEGWLARFPMYDWVGGRTSIMSAVGLLPAALQGINVREMLTGAALMDEATRTTSIKNNPAALLAMCWYWASNGVGSKDMVVLPYKDSLLLFSRYLQQLVMESLGKEFDLDGNTVNQGLTVYGNKGSTDQHAYIQQLRDGVHNFFATFIEVLRDRPPGHDWELEPGVTCGDYLFGMLQGTRSALYANGRESISVTIQEVTPTSVGAIIALYERAVGLYASIVNINAYHQPGVEAGKKAAAEVLALQKRVLSVLNEATCKDPVEPLTLEEIADRCHAPEEIEMIYKIIAHMSANDRVLIAEGNCGSPRSIKVYLGECNVDDLYA

SEQ ID NO: 43114 - protein, 494 aa, Arabidopsis thaliana
  peptide (1)..(494): Ceres Seq. ID no. 12574399
  misc_feature (1)..(422): Pfam Name: Phosphoglucose isomerase Pfam Description: Phosphoglucose isomerase
  misc_feature (1)..(422): Pfam Name: Phosphoglucose isomerase Pfam Description: Phosphoglucose isomerase
  misc_feature (1)..(320): Homolog of NCBI NO: 18645083 NR Description: glucose-6-phosphate isomerase [uncultured
  misc_feature (1)..(426): Homolog of NCBI NO: 18030022 NR Description: glucose-6-phosphate isomerase [Trichomonas
  misc_feature (1)..(464): Homolog of NCBI NO: 23053592 NR Description: hypothetical protein [Geobacter metallireducens]
  misc_feature (1)..(482): Homolog of NCBI NO: 16330760 NR Description: glucose-6-phosphate isomerase [Synechocystis sp.
  misc_feature (1)..(481): Homolog of NCBI NO: 22298259 NR Description: glucose-6-phosphate isomerase
  misc_feature (1)..(320): Homolog of NCBI NO: 18645083 NR Description: glucose-6-phosphate isomerase [uncultured
  misc_feature (1)..(464): Homolog of NCBI NO: 23053592 NR Description: hypothetical protein [Geobacter metallireducens]
  misc_feature (1)..(481): Homolog of NCBI NO: 22298259 NR Description: glucose-6-phosphate isomerase
  misc_feature (1)..(494): Homolog of NCBI NO: 6690395 NR Description: phosphoglucose isomerase precursor [Arabidopsis
  misc_feature (1)..(494): Homolog of NCBI NO: 7484671 NR Description: glucose-6-phosphate isomerase (EC 5.3.1.9)
  misc_feature (1)..(482): Homolog of NCBI NO: 23125809 NR Description: hypothetical protein [Nostoc punctiforme]
  misc_feature (1)..(484): Homolog of NCBI NO: 17228545 NR Description: glucose-6-phosphate isomerase [Nostoc sp. PCC
  misc_feature (1)..(482): Homolog of NCBI NO: 23040343 NR Description: hypothetical protein [Trichodesmium erythraeum
  misc_feature (1)..(482): Homolog of NCBI NO: 16330760 NR Description: glucose-6-phosphate isomerase [Synechocystis sp.
  misc_feature (1)..(426): Homolog of NCBI NO: 18030022 NR Description: glucose-6-phosphate isomerase [Trichomonas
  misc_feature (1)..(482): Homolog of NCBI NO: 23040343 NR Description: hypothetical protein [Trichodesmium erythraeum
  misc_feature (1)..(484): Homolog of NCBI NO: 17228545 NR Description: glucose-6-phosphate isomerase [Nostoc sp. PCC
  misc_feature (1)..(482): Homolog of NCBI NO: 23125809 NR Description: hypothetical protein [Nostoc punctiforme]
  misc_feature (1)..(494): Homolog of NCBI NO: 7484671 NR Description: glucose-6-phosphate isomerase (EC 5.3.1.9)
  misc_feature (1)..(494): Homolog of NCBI NO: 6690395 NR Description: phosphoglucose isomerase precursor [Arabidopsis
MEDLEKGSIANPDEGRMVGHYWLRNSKLAPKPTLKTLIENTLDSICAFSDDIISGKPPSSPEGRFTQILSVGIGGSALGPQFVAEALAPDNPPLKIRFIDNTDPAGIDHQIAQLGPELASTLVVVISKSGGTPETRNGLLEVQKAFREAGLNFAKQGVAITQENSLLDNTARIEGWLARFPMYDWVGGRTSIMSAVGLLPAALQGINVREMLTGAALMDEATRTTSIKNNPAALLAMCWYWASNGVGSKDMVVLPYKDSLLLFSRYLQQLVMESLGKEFDLDGNTVNQGLTVYGNKGSTDQHAYIQQLRDGVHNFFATFIEVLRDRPPGHDWELEPGVTCGDYLFGMLQGTRSALYANGRESISVTIQEVTPTSVGAIIALYERAVGLYASIVNINAYHQPGVEAGKKAAAEVLALQKRVLSVLNEATCKDPVEPLTLEEIADRCHAPEEIEMIYKIIAHMSANDRVLIAEGNCGSPRSIKVYLGECNVDDLYA

SEQ ID NO: 43115 - DNA, 1881 bp, Arabidopsis thaliana
  misc_feature (1)..(1881): Ceres Seq. ID no. 13593398
  misc_feature: MA Experiment ID: 20000179 Result: Down-regulated in Transcription
  misc_feature: MA Experiment 20000179 PARAMETER Experiment Name: At_Germinating_Seeds_P Parameter: Age (hr) Value: 6 vs. 0
  misc_feature: MA Experiment 20000179 PARAMETER Experiment Name: At_Germinating_Seeds_P Parameter: Tissue Value: Germinating Seeds
  misc_feature: MA Experiment ID: 20000180 Result: Down-regulated in Transcription
  misc_feature: MA Experiment 20000180 PARAMETER Experiment Name: At_Germinating_Seeds_P Parameter: Age (hr) Value: 24 vs. 0
  misc_feature: MA Experiment 20000180 PARAMETER Experiment Name: At_Germinating_Seeds_P Parameter: Tissue Value: Germinating Seeds
  misc_feature: MA Experiment ID: 20000184 Result: Down-regulated in Transcription
  misc_feature: MA Experiment 20000184 PARAMETER Experiment Name: At_Shoots__P Parameter: Age (day) Value: 7
  misc_feature: MA Experiment 20000184 PARAMETER Experiment Name: At_Shoots__P Parameter: Tissue Value: Shoots vs. Whole Plant
  misc_feature: MA Experiment ID: 20000495 Result: Down-regulated in Transcription
  misc_feature: MA Experiment 20000495 PARAMETER Experiment Name: At_Guard_Cells_P Parameter: Harvest Date Value: 8/2/2002
  misc_feature: MA Experiment 20000495 PARAMETER Experiment Name: At_Guard_Cells_P Parameter: Organism Value: A. thaliana
  misc_feature: MA Experiment 20000495 PARAMETER Experiment Name: At_Guard_Cells_P Parameter: Tissue Value: Guard Cells vs. Leaves
  misc_feature: MA Experiment ID: 20001458 Result: Up-regulated in Transcription
  misc_feature: MA Experiment 20001458 PARAMETER Experiment Name: At_50mM_NH4NO3_L-to-H_P Parameter: Age (day) Value: Undefined
  misc_feature: MA Experiment 20001458 PARAMETER Experiment Name: At_50mM_NH4NO3_L-to-H_P Parameter: Organism Value: Undefined
  misc_feature: MA Experiment 20001458 PARAMETER Experiment Name: At_50mM_NH4NO3_L-to-H_P Parameter: Plant Line Value: Undefined
  misc_feature: MA Experiment 20001458 PARAMETER Experiment Name: At_50mM_NH4NO3_L-to-H_P Parameter: Timepoint (hr) Value: 2
  misc_feature: MA Experiment 20001458 PARAMETER Experiment Name: At_50mM_NH4NO3_L-to-H_P Parameter: Tissue Value: Siliques
  misc_feature: MA Experiment 20001458 PARAMETER Experiment Name: At_50mM_NH4NO3_L-to-H_P Parameter: Treatment Value: 50mM NH4NO3 vs. 100mM Manitol
  misc_feature: MA Experiment ID: 20001558 Result: Up-regulated in Transcription
  misc_feature: MA Experiment 20001558 PARAMETER Experiment Name: At_Drought_Soil_Dry_P Parameter: Age (day) Value: 27
  misc_feature: MA Experiment 20001558 PARAMETER Experiment Name: At_Drought_Soil_Dry_P Parameter: Organism Value: A. thaliana
  misc_feature: MA Experiment 20001558 PARAMETER Experiment Name: At_Drought_Soil_Dry_P Parameter: Plant Line Value: WS
  misc_feature: MA Experiment 20001558 PARAMETER Experiment Name: At_Drought_Soil_Dry_P Parameter: Post Timepoint (hr) Value: 6
  misc_feature: MA Experiment 20001558 PARAMETER Experiment Name: At_Drought_Soil_Dry_P Parameter: Post-Treatment Value: Re-Water vs. No Drought
  misc_feature: MA Experiment 20001558 PARAMETER Experiment Name: At_Drought_Soil_Dry_P Parameter: Timepoint (day) Value: 13
  misc_feature: MA Experiment 20001558 PARAMETER Experiment Name: At_Drought_Soil_Dry_P Parameter: Treatment Value: Drought vs. No Drought
  misc_feature: MA Experiment ID: 20001757 Result: Up-regulated in Transcription
  misc_feature: MA Experiment 20001757 PARAMETER Experiment Name: At_50mM_NH4NO3_L-to-H_P Parameter: Timepoint (hr) Value: 6
  misc_feature: MA Experiment 20001757 PARAMETER Experiment Name: At_50mM_NH4NO3_L-to-H_P Parameter: Tissue Value: Leaf
  misc_feature: MA Experiment 20001757 PARAMETER Experiment Name: At_50mM_NH4NO3_L-to-H_P Parameter: Treatment Value: 50mM NH4NO3 vs 100mM Mannitol
aagtgattgtccgtctccgtcttcatcttcttcctctctctcacgcagctgctttgattaactcttcaggtccagcttaagagttttgtgaagatggtcttagtgctatacgagacagcggcggggtttgccctctttaaagttaaagatgaaggaaagatggctaacgtcgaggatttgtgtaaagagttcgacactccagactcagcacgaaagatggttaagctaaaagcttttgagaagtttgacaatacatctgaagctctcgaagctgtggctaaattgctggagggagctccaagcaaaggtctgcgcaagtttttgaaagctaattgtcaaggtgaaaccttggctgtggctgattcaaagcttgggaatgttatcaaggagaaactgaaaattgattgcattcacaacaatgctgttatggagcttctacgtggtgttagaagtcagtttactgaactcatatctgggttgggtgatcaagacttggctcctatgagcttgggtctgtctcacagtctcgccagatataagctaaagtttagttctgacaaggtggataccatgattatccaagctattggtctgcttgatgatcttgacaaagagctgaacacatacgccatgagggttagagaatggtatggatggcattttcccgagcttgctaagatcatatcagacaatatcctatatgccaaatctgttaaattgatgggaaaccgagttaatgctgctaagctagacttctccgagatcttagcagatgaaattgaggcagatcttaaggacgcagctgtgatatccatgggaacagaagtcagtgacttagacttgttgcacatccgtgaactctgtgaccaggttctctctctttctgagtacagagctcagctttacgattacctaaagagcagaatgaacactattgctcccaatctgactgccctggtaggagagcttgttggtgctcgtcttatttcccatggaggtagtttattgaacctctccaagcaacctgggagcacggttcagatactcggagccgaaaaagctctctttagagctcttaagacaaaacacgccacacccaagtacggtttgatttttcacgcatctctggttggtcaagcagcaccaaagcacaagggaaagatctcgcggtctttagctgctaaaactgttcttgctattagggttgatgctcttggtgatagccaagataacactatgggccttgaaaaccgagctaagcttgaagcgcggttgagaaatcttgaaggaaaagatttaggtcgtctgtctggttcatctaaaggcaaacctaagattgaagtctataacaaggataaaaagatgggatcaggcggtcttatcactcctgctaagacttacaacactgctgcagattctcttcttggggaaacctcagctaaatctgaggagccatcaaagaagaaagataagaaaaagaagaagaaggtagaagaagagaaacccgaagaggaagagccatcagagaaaaagaagaagaagaaagctgaagcagaaactgaagccgtagtagaggttgcaaaggaggagaagaagaagaataagaagaagagaaagcatgaggaagaagaaacaacggagacaccagccaagaagaaggataagaaagagaagaaaaagaagagtaaggactgagggagagaaaccgattttgagaaatctcttgagtgtaagattaataactgtttttgttgaattgcattttatctagaggaataggtgttttaagatgaaacttaaattttctgaaatcgtcattttgaatgatggattcatatttaaatccttttcacccgaactttatttttgttctagccttcc

SEQ ID NO: 43116 - protein, 533 aa, Arabidopsis thaliana
  peptide (1)..(533): Ceres Seq. ID no. 13593399
  misc_feature (252)..(400): Pfam Name: Putative snoRNA binding domain Pfam Description: Putative snoRNA binding domain
  misc_feature (2)..(533): Homolog of NCBI NO: 26336274 NR Description: unnamed protein product [Mus musculus]
  misc_feature (2)..(532): Homolog of NCBI NO: 27881868 NR Description: Unknown (protein for IMAGE:2639288) [Danio rerio]
  misc_feature (2)..(475): Homolog of NCBI NO: 3288883 NR Description: SAR DNA binding protein [Oryza sativa]
  misc_feature (2)..(423): Homolog of NCBI NO: 25083410 NR Description: SAR DNA-binding protein - like [Arabidopsis
  misc_feature (2)..(533): Homolog of NCBI NO: 7451352 NR Description: SAR DNA-binding protein 2 - garden pea
  misc_feature (2)..(434): Homolog of NCBI NO: 2811028 NR Description: Hypothetical protein At5g27120
  misc_feature (2)..(533): Homolog of NCBI NO: 7451353 NR Description: SAR DNA-binding protein-1 - garden pea
  misc_feature (2)..(533): Homolog of NCBI NO: 13623892 NR Description: MAR-binding protein [Nicotiana tabacum]
  misc_feature (2)..(532): Homolog of NCBI NO: 15240445 NR Description: SAR DNA-binding protein, putative [Arabidopsis
  misc_feature (1)..(533): Homolog of NCBI NO: 15229884 NR Description: SAR DNA-binding protein, putative [Arabidopsis
MVLVLYETAAGFALFKVKDEGKMANVEDLCKEFDTPDSARKMVKLKAFEKFDNTSEALEAVAKLLEGAPSKGLRKFLKANCQGETLAVADSKLGNVIKEKLKIDCIHNNAVMELLRGVRSQFTELISGLGDQDLAPMSLGLSHSLARYKLKFSSDKVDTMIIQAIGLLDDLDKELNTYAMRVREWYGWHFPELAKIISDNILYAKSVKLMGNRVNAAKLDFSEILADEIEADLKDAAVISMGTEVSDLDLLHIRELCDQVLSLSEYRAQLYDYLKSRMNTIAPNLTALVGELVGARLISHGGSLLNLSKQPGSTVQILGAEKALFRALKTKHATPKYGLIFHASLVGQAAPKHKGKISRSLAAKTVLAIRVDALGDSQDNTMGLENRAKLEARLRNLEGKDLGRLSGSSKGKPKIEVYNKDKKMGSGGLITPAKTYNTAADSLLGETSAKSEEPSKKKDKKKKKKVEEEKPEEEEPSEKKKKKKAEAETEAVVEVAKEEKKKNKKKRKHEEEETTETPAKKKDKKEKKKKSKD

SEQ ID NO: 43117 - protein, 511 aa, Arabidopsis thaliana
  peptide (1)..(511): Ceres Seq. ID no. 13593400
  misc_feature (230)..(378): Pfam Name: Putative snoRNA binding domain Pfam Description: Putative snoRNA binding domain
  misc_feature (1)..(511): Homolog of NCBI NO: 26336274 NR Description: unnamed protein product [Mus musculus]
  misc_feature (1)..(510): Homolog of NCBI NO: 27881868 NR Description: Unknown (protein for IMAGE:2639288) [Danio rerio]
  misc_feature (1)..(453): Homolog of NCBI NO: 3288883 NR Description: SAR DNA binding protein [Oryza sativa]
  misc_feature (1)..(401): Homolog of NCBI NO: 25083410 NR Description: SAR DNA-binding protein - like [Arabidopsis
  misc_feature (1)..(511): Homolog of NCBI NO: 7451352 NR Description: SAR DNA-binding protein 2 - garden pea
  misc_feature (1)..(412): Homolog of NCBI NO: 2811028 NR Description: Hypothetical protein At5g27120
  misc_feature (1)..(511): Homolog of NCBI NO: 7451353 NR Description: SAR DNA-binding protein-1 - garden pea
  misc_feature (1)..(511): Homolog of NCBI NO: 13623892 NR Description: MAR-binding protein [Nicotiana tabacum]
  misc_feature (1)..(510): Homolog of NCBI NO: 15240445 NR Description: SAR DNA-binding protein, putative [Arabidopsis
  misc_feature (1)..(511): Homolog of NCBI NO: 15229884 NR Description: SAR DNA-binding protein, putative [Arabidopsis
MANVEDLCKEFDTPDSARKMVKLKAFEKFDNTSEALEAVAKLLEGAPSKGLRKFLKANCQGETLAVADSKLGNVIKEKLKIDCIHNNAVMELLRGVRSQFTELISGLGDQDLAPMSLGLSHSLARYKLKFSSDKVDTMIIQAIGLLDDLDKELNTYAMRVREWYGWHFPELAKIISDNILYAKSVKLMGNRVNAAKLDFSEILADEIEADLKDAAVISMGTEVSDLDLLHIRELCDQVLSLSEYRAQLYDYLKSRMNTIAPNLTALVGELVGARLISHGGSLLNLSKQPGSTVQILGAEKALFRALKTKHATPKYGLIFHASLVGQAAPKHKGKISRSLAAKTVLAIRVDALGDSQDNTMGLENRAKLEARLRNLEGKDLGRLSGSSKGKPKIEVYNKDKKMGSGGLITPAKTYNTAADSLLGETSAKSEEPSKKKDKKKKKKVEEEKPEEEEPSEKKKKKKAEAETEAVVEVAKEEKKKNKKKRKHEEEETTETPAKKKDKKEKKKKSKD

SEQ ID NO: 43118 - protein, 492 aa, Arabidopsis thaliana
  peptide (1)..(492): Ceres Seq. ID no. 13593401
  misc_feature (211)..(359): Pfam Name: Putative snoRNA binding domain Pfam Description: Putative snoRNA binding domain
  misc_feature (1)..(492): Homolog of NCBI NO: 26336274 NR Description: unnamed protein product [Mus musculus]
  misc_feature (1)..(491): Homolog of NCBI NO: 27881868 NR Description: Unknown (protein for IMAGE:2639288) [Danio rerio]
  misc_feature (1)..(434): Homolog of NCBI NO: 3288883 NR Description: SAR DNA binding protein [Oryza sativa]
  misc_feature (1)..(382): Homolog of NCBI NO: 25083410 NR Description: SAR DNA-binding protein - like [Arabidopsis
  misc_feature (1)..(492): Homolog of NCBI NO: 7451352 NR Description: SAR DNA-binding protein 2 - garden pea
  misc_feature (1)..(393): Homolog of NCBI NO: 2811028 NR Description: Hypothetical protein At5g27120
  misc_feature (1)..(492): Homolog of NCBI NO: 7451353 NR Description: SAR DNA-binding protein-1 - garden pea
  misc_feature (1)..(492): Homolog of NCBI NO: 13623892 NR Description: MAR-binding protein [Nicotiana tabacum]
  misc_feature (1)..(491): Homolog of NCBI NO: 15240445 NR Description: SAR DNA-binding protein, putative [Arabidopsis
  misc_feature (1)..(492): Homolog of NCBI NO: 15229884 NR Description: SAR DNA-binding protein, putative [Arabidopsis
MVKLKAFEKFDNTSEALEAVAKLLEGAPSKGLRKFLKANCQGETLAVADSKLGNVIKEKLKIDCIHNNAVMELLRGVRSQFTELISGLGDQDLAPMSLGLSHSLARYKLKFSSDKVDTMIIQAIGLLDDLDKELNTYAMRVREWYGWHFPELAKIISDNILYAKSVKLMGNRVNAAKLDFSEILADEIEADLKDAAVISMGTEVSDLDLLHIRELCDQVLSLSEYRAQLYDYLKSRMNTIAPNLTALVGELVGARLISHGGSLLNLSKQPGSTVQILGAEKALFRALKTKHATPKYGLIFHASLVGQAAPKHKGKISRSLAAKTVLAIRVDALGDSQDNTMGLENRAKLEARLRNLEGKDLGRLSGSSKGKPKIEVYNKDKKMGSGGLITPAKTYNTAADSLLGETSAKSEEPSKKKDKKKKKKVEEEKPEEEEPSEKKKKKKAEAETEAVVEVAKEEKKKNKKKRKHEEEETTETPAKKKDKKEKKKKSKD

SEQ ID NO: 43119 - DNA, 1262 bp, Arabidopsis thaliana
  misc_feature (1)..(1262): Ceres Seq. ID no. 12331049
  misc_feature: MA Experiment ID: 108461 Result: Up-regulated in Transcription
  misc_feature: MA Experiment 108461 PARAMETER Experiment Name: At_Germinating_Seeds_cDNA_P Parameter: Age (day) Value: 1 vs. 0
  misc_feature: MA Experiment 108461 PARAMETER Experiment Name: At_Germinating_Seeds_cDNA_P Parameter: Tissue Value: Germinating Seeds
  misc_feature: MA Experiment ID: 108462 Result: Up-regulated in Transcription
  misc_feature: MA Experiment 108462 PARAMETER Experiment Name: At_Germinating_Seeds_cDNA_P Parameter: Age (day) Value: 2 vs. 0
  misc_feature: MA Experiment 108462 PARAMETER Experiment Name: At_Germinating_Seeds_cDNA_P Parameter: Tissue Value: Germinating Seeds
  misc_feature: MA Experiment ID: 108463 Result: Up-regulated in Transcription
  misc_feature: MA Experiment 108463 PARAMETER Experiment Name: At_Germinating_Seeds_cDNA_P Parameter: Age (day) Value: 3 vs. 0
  misc_feature: MA Experiment 108463 PARAMETER Experiment Name: At_Germinating_Seeds_cDNA_P Parameter: Tissue Value: Germinating Seeds
  misc_feature: MA Experiment ID: 108464 Result: Up-regulated in Transcription
  misc_feature: MA Experiment 108464 PARAMETER Experiment Name: At_Germinating_Seeds_cDNA_P Parameter: Age (day) Value: 4 vs. 0
  misc_feature: MA Experiment 108464 PARAMETER Experiment Name: At_Germinating_Seeds_cDNA_P Parameter: Tissue Value: Germinating Seeds
  misc_feature: MA Experiment ID: 108595 Result: Down-regulated in Transcription
  misc_feature: MA Experiment 108595 PARAMETER Experiment Name: At_Ler-pi_Ovule_cDNA_P Parameter: Plant Line Value: null
  misc_feature: MA Experiment ID: 20000173 Result: Down-regulated in Transcription
  misc_feature: MA Experiment 20000173 PARAMETER Experiment Name: At_42deg_Heat_P Parameter: Age (day) Value: 14
  misc_feature: MA Experiment 20000173 PARAMETER Experiment Name: At_42deg_Heat_P Parameter: Organism Value: A. thaliana
  misc_feature: MA Experiment 20000173 PARAMETER Experiment Name: At_42deg_Heat_P Parameter: Plant Line Value: WS
  misc_feature: MA Experiment 20000173 PARAMETER Experiment Name: At_42deg_Heat_P Parameter: Temperature (deg C) Value: 42 vs. 22
  misc_feature: MA Experiment 20000173 PARAMETER Experiment Name: At_42deg_Heat_P Parameter: Timepoint (hr) Value: 6
  misc_feature: MA Experiment 20000173 PARAMETER Experiment Name: At_42deg_Heat_P Parameter: Tissue Value: Aerial
  misc_feature: MA Experiment ID: 20000180 Result: Up-regulated in Transcription
  misc_feature: MA Experiment 20000180 PARAMETER Experiment Name: At_Germinating_Seeds_P Parameter: Age (hr) Value: 24 vs. 0
  misc_feature: MA Experiment 20000180 PARAMETER Experiment Name: At_Germinating_Seeds_P Parameter: Tissue Value: Germinating Seeds
  misc_feature: MA Experiment ID: 20001558 Result: Down-regulated in Transcription
  misc_feature: MA Experiment 20001558 PARAMETER Experiment Name: At_Drought_Soil_Dry_P Parameter: Age (day) Value: 27
  misc_feature: MA Experiment 20001558 PARAMETER Experiment Name: At_Drought_Soil_Dry_P Parameter: Organism Value: A. thaliana
  misc_feature: MA Experiment 20001558 PARAMETER Experiment Name: At_Drought_Soil_Dry_P Parameter: Plant Line Value: WS
  misc_feature: MA Experiment 20001558 PARAMETER Experiment Name: At_Drought_Soil_Dry_P Parameter: Post Timepoint (hr) Value: 6
  misc_feature: MA Experiment 20001558 PARAMETER Experiment Name: At_Drought_Soil_Dry_P Parameter: Post-Treatment Value: Re-Water vs. No Drought
  misc_feature: MA Experiment 20001558 PARAMETER Experiment Name: At_Drought_Soil_Dry_P Parameter: Timepoint (day) Value: 13
  misc_feature: MA Experiment 20001558 PARAMETER Experiment Name: At_Drought_Soil_Dry_P Parameter: Treatment Value: Drought vs. No Drought
aaaaaccttttgacaaaaaccagatattctctcccatttccctcaatcatccaaaccacgcgccgcctctaatctctcacgcgccgcggtccgatttcaatttctccatcccctcttctcgtttattcatcaagatctcacaaaatccaaacttaactatagggtttcaattacttcgatcaaaaggtatctaatttatgaattagtattcatcatcatgggaggtgttacatcatcgatcgctgctaaatttgctttctttccaccaacgccaccgtcgtatgaggttatagccgacgatagctgcggtggacgtttatacataccggagattcctcgccgtgatgatgttgatatattgaagcttcgtactcgttgtggtaatgagatcgttgctgtttatgtgaaacattcaaaagctaatggcacgcttttgtattctcatggtaacgctgctgatttgggtcaaatgtttgagcttttcgttgagcttagcaatcgccttcgcgtcaatcttatggggtatgattactctggttatggtcagtctactggacaggctagcgagtgtaatacatatgctgatatagaggcatcatataaatgcctcaaggaaaagtacggtgtaaaagacgatcaactgatagtatatggtcaatctgttggtagtggacctacggttgatctagcttcacgcacacctaacttaagaggcgtggttttacagtgtcctatcctgtctgggatgagggttttgtatcctgtgaaatgtacatattggtttgacatttacaagaatattgacaagatcggctcagttacctgtcctgtattagtaatccatggtactgcggatgaagtagttgattggtctcacggaaaacggctctgggaactcagcaaagagaagtatgaacctttgtggataagtggaggtggacactgtgaccttgaactctatccagatttcatcagacatctgaagaaatttgttgtatcacttggcaacaaacaagcagagcaagctcccacatagcgagatagctgatatgtttgaaatgggttattttcagagaaggctagacagttggctacagaaagttcaaaagaaagtaataagcctgagagattcaagatgagagtggtaataggtttagtcattaaaagataaaaaaaggtctagtctggtgacacaatgggtcaatctggaatgtaaacagtatagtacatttcgtgaataaatgtattttctgctttcatgc

SEQ ID NO: 43120 - protein, 272 aa, Arabidopsis thaliana
  peptide (1)..(272): Ceres Seq. ID no. 12331050
  misc_feature (101)..(169): Pfam Name: alpha/beta hydrolase fold Pfam Description: alpha/beta hydrolase fold
  misc_feature (1)..(262): Homolog of NCBI NO: 15230760 NR Description: unknown protein; protein id: At3g30380.1
  misc_feature (1)..(269): Homolog of NCBI NO: 15233975 NR Description: putative protein
  misc_feature (1)..(262): Homolog of NCBI NO: 15232168 NR Description: unknown protein; protein id: At3g01690.1
  misc_feature (1)..(272): Homolog of NCBI NO: 15241394 NR Description: putative protein
  misc_feature (1)..(41): Homolog of NCBI NO: 34911338 NR Description: P0519D04.38 [Oryza sativa (japonica
  misc_feature (43)..(272): Homolog of NCBI NO: 34911338 NR Description: P0519D04.38 [Oryza sativa (japonica
  misc_feature (1)..(262): Homolog of NCBI NO: 15240861 NR Description: putative protein; protein id: At5g38220.1
  misc_feature (1)..(262): Homolog of NCBI NO: 10177798 NR Description: emb|CAB87778.1~gene_id:MXA21.9~strong similarity
  misc_feature (1)..(272): Homolog of NCBI NO: 25404647 NR Description: hypothetical protein T4O24.3 [imported] -
  misc_feature (1)..(272): Homolog of NCBI NO: 22330474 NR Description: hypothetical protein
MGGVTSSIAAKFAFFPPTPPSYEVIADDSCGGRLYIPEIPRRDDVDILKLRTRCGNEIVAVYVKHSKANGTLLYSHGNAADLGQMFELFVELSNRLRVNLMGYDYSGYGQSTGQASECNTYADIEASYKCLKEKYGVKDDQLIVYGQSVGSGPTVDLASRTPNLRGVVLQCPILSGMRVLYPVKCTYWFDIYKNIDKIGSVTCPVLVIHGTADEVVDWSHGKRLWELSKEKYEPLWISGGGHCDLELYPDFIRHLKKFVVSLGNKQAEQAPT

SEQ ID NO: 43121 - protein, 188 aa, Arabidopsis thaliana
  peptide (1)..(188): Ceres Seq. ID no. 12331051
  misc_feature (17)..(85): Pfam Name: alpha/beta hydrolase fold Pfam Description: alpha/beta hydrolase fold
  misc_feature (1)..(175): Homolog of NCBI NO: 28393521 NR Description: unknown protein [Arabidopsis thaliana]
  misc_feature (1)..(178): Homolog of NCBI NO: 15230760 NR Description: unknown protein; protein id: At3g30380.1
  misc_feature (1)..(185): Homolog of NCBI NO: 15233975 NR Description: putative protein
  misc_feature (1)..(178): Homolog of NCBI NO: 15232168 NR Description: unknown protein; protein id: At3g01690.1
  misc_feature (1)..(188): Homolog of NCBI NO: 15241394 NR Description: putative protein
  misc_feature (1)..(188): Homolog of NCBI NO: 34911338 NR Description: P0519D04.38 [Oryza sativa (japonica
  misc_feature (1)..(178): Homolog of NCBI NO: 15240861 NR Description: putative protein; protein id: At5g38220.1
  misc_feature (1)..(178): Homolog of NCBI NO: 10177798 NR Description: emb|CAB87778.1~gene_id:MXA21.9~strong similarity
  misc_feature (1)..(188): Homolog of NCBI NO: 25404647 NR Description: hypothetical protein T4O24.3 [imported] -
  misc_feature (1)..(188): Homolog of NCBI NO: 22330474 NR Description: hypothetical protein
MFELFVELSNRLRVNLMGYDYSGYGQSTGQASECNTYADIEASYKCLKEKYGVKDDQLIVYGQSVGSGPTVDLASRTPNLRGVVLQCPILSGMRVLYPVKCTYWFDIYKNIDKIGSVTCPVLVIHGTADEVVDWSHGKRLWELSKEKYEPLWISGGGHCDLELYPDFIRHLKKFVVSLGNKQAEQAPT

SEQ ID NO: 43122 - protein, 172 aa, Arabidopsis thaliana
  peptide (1)..(172): Ceres Seq. ID no. 12331052
  misc_feature (1)..(69): Pfam Name: alpha/beta hydrolase fold Pfam Description: alpha/beta hydrolase fold
  misc_feature (1)..(159): Homolog of NCBI NO: 28393521 NR Description: unknown protein [Arabidopsis thaliana]
  misc_feature (1)..(162): Homolog of NCBI NO: 15230760 NR Description: unknown protein; protein id: At3g30380.1
  misc_feature (1)..(169): Homolog of NCBI NO: 15233975 NR Description: putative protein
  misc_feature (1)..(162): Homolog of NCBI NO: 15232168 NR Description: unknown protein; protein id: At3g01690.1
  misc_feature (1)..(172): Homolog of NCBI NO: 15241394 NR Description: putative protein
  misc_feature (1)..(172): Homolog of NCBI NO: 34911338 NR Description: P0519D04.38 [Oryza sativa (japonica
  misc_feature (1)..(162): Homolog of NCBI NO: 15240861 NR Description: putative protein; protein id: At5g38220.1
  misc_feature (1)..(162): Homolog of NCBI NO: 10177798 NR Description: emb|CAB87778.1~gene_id:MXA21.9~strong similarity
  misc_feature (1)..(172): Homolog of NCBI NO: 25404647 NR Description: hypothetical protein T4O24.3 [imported] -
  misc_feature (1)..(172): Homolog of NCBI NO: 22330474 NR Description: hypothetical protein
MGYDYSGYGQSTGQASECNTYADIEASYKCLKEKYGVKDDQLIVYGQSVGSGPTVDLASRTPNLRGVVLQCPILSGMRVLYPVKCTYWFDIYKNIDKIGSVTCPVLVIHGTADEVVDWSHGKRLWELSKEKYEPLWISGGGHCDLELYPDFIRHLKKFVVSLGNKQAEQAPT

SEQ ID NO: 43123 - DNA, 1075 bp, Arabidopsis thaliana; identical to SEQ ID NO: 30168
  misc_feature (1)..(1075): Ceres Seq. ID no. 12605070
  misc_feature: MA Experiment ID: 20000166 Result: Up-regulated in Transcription
  misc_feature: MA Experiment 20000166 PARAMETER Experiment Name: At_100uM_ABA_P Parameter: Age (day) Value: 14
  misc_feature: MA Experiment 20000166 PARAMETER Experiment Name: At_100uM_ABA_P Parameter: Organism Value: A. thaliana
  misc_feature: MA Experiment 20000166 PARAMETER Experiment Name: At_100uM_ABA_P Parameter: Plant Line Value: WS
  misc_feature: MA Experiment 20000166 PARAMETER Experiment Name: At_100uM_ABA_P Parameter: Timepoint (hr) Value: 1
  misc_feature: MA Experiment 20000166 PARAMETER Experiment Name: At_100uM_ABA_P Parameter: Tissue Value: Aerial
  misc_feature: MA Experiment 20000166 PARAMETER Experiment Name: At_100uM_ABA_P Parameter: Treatment Value: 100uM ABA vs. No Treatment
  misc_feature: MA Experiment ID: 20000171 Result: Up-regulated in Transcription
  misc_feature: MA Experiment 20000171 PARAMETER Experiment Name: At_42deg_Heat_P Parameter: Age (day) Value: 14
  misc_feature: MA Experiment 20000171 PARAMETER Experiment Name: At_42deg_Heat_P Parameter: Organism Value: A. thaliana
  misc_feature: MA Experiment 20000171 PARAMETER Experiment Name: At_42deg_Heat_P Parameter: Plant Line Value: WS
  misc_feature: MA Experiment 20000171 PARAMETER Experiment Name: At_42deg_Heat_P Parameter: Temperature (deg C) Value: 42 vs. 22
  misc_feature: MA Experiment 20000171 PARAMETER Experiment Name: At_42deg_Heat_P Parameter: Timepoint (hr) Value: 1
  misc_feature: MA Experiment 20000171 PARAMETER Experiment Name: At_42deg_Heat_P Parameter: Tissue Value: Aerial
  misc_feature: MA Experiment ID: 20000173 Result: Up-regulated in Transcription
  misc_feature: MA Experiment 20000173 PARAMETER Experiment Name: At_42deg_Heat_P Parameter: Age (day) Value: 14
  misc_feature: MA Experiment 20000173 PARAMETER Experiment Name: At_42deg_Heat_P Parameter: Organism Value: A. thaliana
  misc_feature: MA Experiment 20000173 PARAMETER Experiment Name: At_42deg_Heat_P Parameter: Plant Line Value: WS
  misc_feature: MA Experiment 20000173 PARAMETER Experiment Name: At_42deg_Heat_P Parameter: Temperature (deg C) Value: 42 vs. 22
  misc_feature: MA Experiment 20000173 PARAMETER Experiment Name: At_42deg_Heat_P Parameter: Timepoint (hr) Value: 6
  misc_feature: MA Experiment 20000173 PARAMETER Experiment Name: At_42deg_Heat_P Parameter: Tissue Value: Aerial
  misc_feature: MA Experiment ID: 20000182 Result: Up-regulated in Transcription
  misc_feature: MA Experiment 20000182 PARAMETER Experiment Name: At_2mM_SA_P Parameter: Age (day) Value: 14
  misc_feature: MA Experiment 20000182 PARAMETER Experiment Name: At_2mM_SA_P Parameter: Organism Value: A. thaliana
  misc_feature: MA Experiment 20000182 PARAMETER Experiment Name: At_2mM_SA_P Parameter: Plant Line Value: WS
  misc_feature: MA Experiment 20000182 PARAMETER Experiment Name: At_2mM_SA_P Parameter: Timepoint (hr) Value: 6
  misc_feature: MA Experiment 20000182 PARAMETER Experiment Name: At_2mM_SA_P Parameter: Tissue Value: Aerial
  misc_feature: MA Experiment 20000182 PARAMETER Experiment Name: At_2mM_SA_P Parameter: Treatment Value: 2mM SA vs. No Treatment
  misc_feature: MA Experiment ID: 20000213 Result: Up-regulated in Transcription
  misc_feature: MA Experiment 20000213 PARAMETER Experiment Name: At_4deg_Cold_P Parameter: Timepoint (hr) Value: 2
  misc_feature: MA Experiment ID: 20000214 Result: Up-regulated in Transcription
  misc_feature: MA Experiment 20000214 PARAMETER Experiment Name: At_4deg_Cold_P Parameter: Timepoint (hr) Value: 6
  misc_feature: MA Experiment ID: 20000234 Result: Down-regulated in Transcription
  misc_feature: MA Experiment 20000234 PARAMETER Experiment Name: At_Siliques_P Parameter: Age (day) Value: 21
  misc_feature: MA Experiment 20000234 PARAMETER Experiment Name: At_Siliques_P Parameter: Organism Value: A. thaliana
  misc_feature: MA Experiment 20000234 PARAMETER Experiment Name: At_Siliques_P Parameter: Plant Line Value: WS
  misc_feature: MA Experiment 20000234 PARAMETER Experiment Name: At_Siliques_P Parameter: Tissue Value: Less Than 5mm Siliques vs. Whole Plant
  misc_feature: MA Experiment ID: 20000265 Result: Down-regulated in Transcription
  misc_feature: MA Experiment 20000265 PARAMETER Experiment Name: At_Open_Flower_P Parameter: Age (day) Value: 21
  misc_feature: MA Experiment 20000265 PARAMETER Experiment Name: At_Open_Flower_P Parameter: Plant Line Value: WS
  misc_feature: MA Experiment 20000265 PARAMETER Experiment Name: At_Open_Flower_P Parameter: Tissue Value: Closed Flower vs. Whole Plant
  misc_feature: MA Experiment ID: 20000267 Result: Up-regulated in Transcription
  misc_feature: MA Experiment 20000267 PARAMETER Experiment Name: At_Drought_P Parameter: Age (day) Value: 7
  misc_feature: MA Experiment 20000267 PARAMETER Experiment Name: At_Drought_P Parameter: Organism Value: A. thaliana
  misc_feature: MA Experiment 20000267 PARAMETER Experiment Name: At_Drought_P Parameter: Plant Line Value: WS
  misc_feature: MA Experiment 20000267 PARAMETER Experiment Name: At_Drought_P Parameter: Timepoint (hr) Value: 6
  misc_feature: MA Experiment 20000267 PARAMETER Experiment Name: At_Drought_P Parameter: Tissue Value: Whole Plant
  misc_feature: MA Experiment 20000267 PARAMETER Experiment Name: At_Drought_P Parameter: Treatment Value: Drought vs. No Drought
  misc_feature: MA Experiment ID: 20000268 Result: Up-regulated in Transcription
  misc_feature: MA Experiment 20000268 PARAMETER Experiment Name: At_100mM_NaCl__P Parameter: Age (day) Value: 14
  misc_feature: MA Experiment 20000268 PARAMETER Experiment Name: At_100mM_NaCl__P Parameter: Organism Value: A. thaliana
  misc_feature: MA Experiment 20000268 PARAMETER Experiment Name: At_100mM_NaCl__P Parameter: Plant Line Value: WS
  misc_feature: MA Experiment 20000268 PARAMETER Experiment Name: At_100mM_NaCl__P Parameter: Timepoint (hr) Value: 6
  misc_feature: MA Experiment 20000268 PARAMETER Experiment Name: At_100mM_NaCl__P Parameter: Tissue Value: Whole Plant
  misc_feature: MA Experiment 20000268 PARAMETER Experiment Name: At_100mM_NaCl__P Parameter: Treatment Value: 100mM NaCl vs. No Treatment
  misc_feature: MA Experiment ID: 20000436 Result: Up-regulated in Transcription
  misc_feature: MA Experiment 20000436 PARAMETER Experiment Name: At_Drought_P Parameter: Age (day) Value: 7
  misc_feature: MA Experiment 20000436 PARAMETER Experiment Name: At_Drought_P Parameter: Organism Value: A. thaliana
  misc_feature: MA Experiment 20000436 PARAMETER Experiment Name: At_Drought_P Parameter: Plant Line Value: WS
  misc_feature: MA Experiment 20000436 PARAMETER Experiment Name: At_Drought_P Parameter: Timepoint (hr) Value: 12
  misc_feature: MA Experiment 20000436 PARAMETER Experiment Name: At_Drought_P Parameter: Tissue Value: Whole Plant
  misc_feature: MA Experiment 20000436 PARAMETER Experiment Name: At_Drought_P Parameter: Treatment Value: Drought vs. No Drought
  misc_feature: MA Experiment ID: 20000437 Result: Up-regulated in Transcription
  misc_feature: MA Experiment 20000437 PARAMETER Experiment Name: At_Drought_P Parameter: Age (day) Value: 8
  misc_feature: MA Experiment 20000437 PARAMETER Experiment Name: At_Drought_P Parameter: Organism Value: A. thaliana
  misc_feature: MA Experiment 20000437 PARAMETER Experiment Name: At_Drought_P Parameter: Plant Line Value: WS
  misc_feature: MA Experiment 20000437 PARAMETER Experiment Name: At_Drought_P Parameter: Timepoint (hr) Value: 24
  misc_feature: MA Experiment 20000437 PARAMETER Experiment Name: At_Drought_P Parameter: Tissue Value: Whole Plant
  misc_feature: MA Experiment 20000437 PARAMETER Experiment Name: At_Drought_P Parameter: Treatment Value: Drought vs. No Drought
  misc_feature: MA Experiment ID: 20000438 Result: Down-regulated in Transcription
  misc_feature: MA Experiment 20000438 PARAMETER Experiment Name: At_Shoots__P Parameter: Age (day) Value: 14
  misc_feature: MA Experiment 20000438 PARAMETER Experiment Name: At_Shoots__P Parameter: Tissue Value: Shoots vs. Whole Plant
  misc_feature: MA Experiment ID: 20000453 Result: Up-regulated in Transcription
  misc_feature: MA Experiment 20000453 PARAMETER Experiment Name: At_100uM_ABA_P Parameter: Age (day) Value: 15
  misc_feature: MA Experiment 20000453 PARAMETER Experiment Name: At_100uM_ABA_P Parameter: Organism Value: A. thaliana
  misc_feature: MA Experiment 20000453 PARAMETER Experiment Name: At_100uM_ABA_P Parameter: Plant Line Value: WS
  misc_feature: MA Experiment 20000453 PARAMETER Experiment Name: At_100uM_ABA_P Parameter: Timepoint (hr) Value: 24
  misc_feature: MA Experiment 20000453 PARAMETER Experiment Name: At_100uM_ABA_P Parameter: Tissue Value: Aerial
  misc_feature: MA Experiment 20000453 PARAMETER Experiment Name: At_100uM_ABA_P Parameter: Treatment Value: 100uM ABA vs. No Treatment
  misc_feature: MA Experiment ID: 20000495 Result: Down-regulated in Transcription
  misc_feature: MA Experiment 20000495 PARAMETER Experiment Name: At_Guard_Cells_P Parameter: Harvest Date Value: 8/2/2002
  misc_feature: MA Experiment 20000495 PARAMETER Experiment Name: At_Guard_Cells_P Parameter: Organism Value: A. thaliana
  misc_feature: MA Experiment 20000495 PARAMETER Experiment Name: At_Guard_Cells_P Parameter: Tissue Value: Guard Cells vs. Leaves
  misc_feature: MA Experiment ID: 20000794 Result: Up-regulated in Transcription
  misc_feature: MA Experiment 20000794 PARAMETER Experiment Name: At_Petals_P Parameter: Age (day) Value: 23-25 days
  misc_feature: MA Experiment 20000794 PARAMETER Experiment Name: At_Petals_P Parameter: Plant Line Value: WS
  misc_feature: MA Experiment 20000794 PARAMETER Experiment Name: At_Petals_P Parameter: Tissue Value: Petals vs. Whole plant
  misc_feature: MA Experiment ID: 20001248 Result: Up-regulated in Transcription
  misc_feature: MA Experiment 20001248 PARAMETER Experiment Name: At_Far-red-induction_P Parameter: Age (day) Value: 7
  misc_feature: MA Experiment 20001248 PARAMETER Experiment Name: At_Far-red-induction_P Parameter: Light Value: Far-red vs. White
  misc_feature: MA Experiment 20001248 PARAMETER Experiment Name: At_Far-red-induction_P Parameter: Organism Value: A. thaliana
  misc_feature: MA Experiment 20001248 PARAMETER Experiment Name: At_Far-red-induction_P Parameter: Plant Line Value: Columbia
  misc_feature: MA Experiment 20001248 PARAMETER Experiment Name: At_Far-red-induction_P Parameter: Timepoint (hr) Value: 4
  misc_feature: MA Experiment 20001248 PARAMETER Experiment Name: At_Far-red-induction_P Parameter: Tissue Value: Whole Plant
  misc_feature: MA Experiment ID: 20001450 Result: Up-regulated in Transcription
  misc_feature: MA Experiment 20001450 PARAMETER Experiment Name: At_Far-red-induction_P Parameter: Age (day) Value: 7
  misc_feature: MA Experiment 20001450 PARAMETER Experiment Name: At_Far-red-induction_P Parameter: Light Value: Far-red vs. White
  misc_feature: MA Experiment 20001450 PARAMETER Experiment Name: At_Far-red-induction_P Parameter: Organism Value: A. thaliana
  misc_feature: MA Experiment 20001450 PARAMETER Experiment Name: At_Far-red-induction_P Parameter: Plant Line Value: Columbia
  misc_feature: MA Experiment 20001450 PARAMETER Experiment Name: At_Far-red-induction_P Parameter: Timepoint (hr) Value: 8
  misc_feature: MA Experiment 20001450 PARAMETER Experiment Name: At_Far-red-induction_P Parameter: Tissue Value: Whole Plant
  misc_feature: MA Experiment ID: 20001451 Result: Up-regulated in Transcription
  misc_feature: MA Experiment 20001451 PARAMETER Experiment Name: At_Far-red-induction_P Parameter: Age (day) Value: 7
  misc_feature: MA Experiment 20001451 PARAMETER Experiment Name: At_Far-red-induction_P Parameter: Light Value: Far-red vs. White
  misc_feature: MA Experiment 20001451 PARAMETER Experiment Name: At_Far-red-induction_P Parameter: Organism Value: A. thaliana
  misc_feature: MA Experiment 20001451 PARAMETER Experiment Name: At_Far-red-induction_P Parameter: Plant Line Value: Columbia
  misc_feature: MA Experiment 20001451 PARAMETER Experiment Name: At_Far-red-induction_P Parameter: Timepoint (hr) Value: 24
  misc_feature: MA Experiment 20001451 PARAMETER Experiment Name: At_Far-red-induction_P Parameter: Tissue Value: Whole Plant
  misc_feature: MA Experiment ID: 20001556 Result: Down-regulated in Transcription
  misc_feature: MA Experiment 20001556 PARAMETER Experiment Name: At_Drought_Soil_Dry_P Parameter: Age (day) Value: 26
  misc_feature: MA Experiment 20001556 PARAMETER Experiment Name: At_Drought_Soil_Dry_P Parameter: Organism Value: A. thaliana
  misc_feature: MA Experiment 20001556 PARAMETER Experiment Name: At_Drought_Soil_Dry_P Parameter: Plant Line Value: WS
  misc_feature: MA Experiment 20001556 PARAMETER Experiment Name: At_Drought_Soil_Dry_P Parameter: Post Timepoint (hr) Value: None
  misc_feature: MA Experiment 20001556 PARAMETER Experiment Name: At_Drought_Soil_Dry_P Parameter: Post-Treatment Value: None
  misc_feature: MA Experiment 20001556 PARAMETER Experiment Name: At_Drought_Soil_Dry_P Parameter: Timepoint (day) Value: 12
  misc_feature: MA Experiment 20001556 PARAMETER Experiment Name: At_Drought_Soil_Dry_P Parameter: Treatment Value: Drought vs. No Drought
  misc_feature: MA Experiment ID: 20001558 Result: Down-regulated in Transcription
  misc_feature: MA Experiment 20001558 PARAMETER Experiment Name: At_Drought_Soil_Dry_P Parameter: Age (day) Value: 27
  misc_feature: MA Experiment 20001558 PARAMETER Experiment Name: At_Drought_Soil_Dry_P Parameter: Organism Value: A. thaliana
  misc_feature: MA Experiment 20001558 PARAMETER Experiment Name: At_Drought_Soil_Dry_P Parameter: Plant Line Value: WS
  misc_feature: MA Experiment 20001558 PARAMETER Experiment Name: At_Drought_Soil_Dry_P Parameter: Post Timepoint (hr) Value: 6
  misc_feature: MA Experiment 20001558 PARAMETER Experiment Name: At_Drought_Soil_Dry_P Parameter: Post-Treatment Value: Re-Water vs. No Drought
  misc_feature: MA Experiment 20001558 PARAMETER Experiment Name: At_Drought_Soil_Dry_P Parameter: Timepoint (day) Value: 13
  misc_feature: MA Experiment 20001558 PARAMETER Experiment Name: At_Drought_Soil_Dry_P Parameter: Treatment Value: Drought vs. No Drought
  misc_feature: MA Experiment ID: 20001560 Result: Down-regulated in Transcription
  misc_feature: MA Experiment 20001560 PARAMETER Experiment Name: At_Drought_Soil_Dry_P Parameter: Age (day) Value: 28
  misc_feature: MA Experiment 20001560 PARAMETER Experiment Name: At_Drought_Soil_Dry_P Parameter: Organism Value: A. thaliana
  misc_feature: MA Experiment 20001560 PARAMETER Experiment Name: At_Drought_Soil_Dry_P Parameter: Plant Line Value: WS
  misc_feature: MA Experiment 20001560 PARAMETER Experiment Name: At_Drought_Soil_Dry_P Parameter: Post Timepoint (hr) Value: None
  misc_feature: MA Experiment 20001560 PARAMETER Experiment Name: At_Drought_Soil_Dry_P Parameter: Post-Treatment Value: None
  misc_feature: MA Experiment 20001560 PARAMETER Experiment Name: At_Drought_Soil_Dry_P Parameter: Timepoint (day) Value: 14
  misc_feature: MA Experiment 20001560 PARAMETER Experiment Name: At_Drought_Soil_Dry_P Parameter: Treatment Value: Drought vs. No Drought

SEQ ID NO: 43124 - protein, 300 aa, Arabidopsis thaliana; identical to SEQ ID NO: 30169
  peptide (1)..(300): Ceres Seq. ID no. 12605071
  misc_feature (76)..(295): Pfam Name: Dehydrin Pfam Description: Dehydrin
  misc_feature (76)..(295): Pfam Name: Dehydrin Pfam Description: Dehydrin
  misc_feature (63)..(298): Homolog of NCBI NO: 26418686 NR Description: dehydrin [Citrus x paradisi]
  misc_feature (36)..(215): Homolog of NCBI NO: 24417358 NR Description: unknown [Arabidopsis thaliana]
  misc_feature (95)..(299): Homolog of NCBI NO: 509262 NR Description: lti45 [Arabidopsis thaliana]
  misc_feature (36)..(239): Homolog of NCBI NO: 33410861 NR Description: cold-regulated protein Cor25 [Brassica rapa
  misc_feature (36)..(299): Homolog of NCBI NO: 30686836 NR Description: dehydrin (ERD10) [Arabidopsis thaliana]
  misc_feature (63)..(298): Homolog of NCBI NO: 26418686 NR Description: dehydrin [Citrus x paradisi]
  misc_feature (95)..(299): Homolog of NCBI NO: 509262 NR Description: lti45 [Arabidopsis thaliana]
  misc_feature (36)..(299): Homolog of NCBI NO: 30686836 NR Description: dehydrin (ERD10) [Arabidopsis thaliana]
  misc_feature (7)..(300): Homolog of NCBI NO: 99681 NR Description: cold-regulated protein cor47 - Arabidopsis
  misc_feature (36)..(300): Homolog of NCBI NO: 15217937 NR Description: hypothetical protein
  misc_feature (36)..(300): Homolog of NCBI NO: 975646 NR Description: dehydrin [Arabidopsis thaliana]
  misc_feature (36)..(299): Homolog of NCBI NO: 30686832 NR Description: dehydrin (ERD10) [Arabidopsis thaliana]
  misc_feature (36)..(298): Homolog of NCBI NO: 13751875 NR Description: unknown protein [Arabidopsis thaliana]
  misc_feature (36)..(239): Homolog of NCBI NO: 33410861 NR Description: cold-regulated protein Cor25 [Brassica rapa
  misc_feature (36)..(215): Homolog of NCBI NO: 24417358 NR Description: unknown [Arabidopsis thaliana]
  misc_feature (36)..(298): Homolog of NCBI NO: 13751875 NR Description: unknown protein [Arabidopsis thaliana]
  misc_feature (36)..(299): Homolog of NCBI NO: 30686832 NR Description: dehydrin (ERD10) [Arabidopsis thaliana]
  misc_feature (36)..(300): Homolog of NCBI NO: 975646 NR Description: dehydrin [Arabidopsis thaliana]
  misc_feature (36)..(300): Homolog of NCBI NO: 15217937 NR Description: hypothetical protein
  misc_feature (7)..(300): Homolog of NCBI NO: 99681 NR Description: cold-regulated protein cor47 - Arabidopsis

SEQ ID NO: 43125 - protein, 265 aa, Arabidopsis thaliana; identical to SEQ ID NO: 30170
  peptide (1)..(265): Ceres Seq. ID no. 12605072
  misc_feature (41)..(260): Pfam Name: Dehydrin Pfam Description: Dehydrin
  misc_feature (41)..(260): Pfam Name: Dehydrin Pfam Description: Dehydrin
  misc_feature (28)..(263): Homolog of NCBI NO: 26418686 NR Description: dehydrin [Citrus x paradisi]
  misc_feature (1)..(180): Homolog of NCBI NO: 24417358 NR Description: unknown [Arabidopsis thaliana]
  misc_feature (60)..(264): Homolog of NCBI NO: 509262 NR Description: lti45 [Arabidopsis thaliana]
  misc_feature (1)..(204): Homolog of NCBI NO: 33410861 NR Description: cold-regulated protein Cor25 [Brassica rapa
  misc_feature (1)..(264): Homolog of NCBI NO: 30686836 NR Description: dehydrin (ERD10) [Arabidopsis thaliana]
  misc_feature (28)..(263): Homolog of NCBI NO: 26418686 NR Description: dehydrin [Citrus x paradisi]
  misc_feature (60)..(264): Homolog of NCBI NO: 509262 NR Description: lti45 [Arabidopsis thaliana]
  misc_feature (1)..(264): Homolog of NCBI NO: 30686836 NR Description: dehydrin (ERD10) [Arabidopsis thaliana]
  misc_feature (1)..(265): Homolog of NCBI NO: 99681 NR Description: cold-regulated protein cor47 - Arabidopsis
  misc_feature (1)..(265): Homolog of NCBI NO: 15217937 NR Description: hypothetical protein
  misc_feature (1)..(265): Homolog of NCBI NO: 975646 NR Description: dehydrin [Arabidopsis thaliana]
  misc_feature (1)..(264): Homolog of NCBI NO: 30686832 NR Description: dehydrin (ERD10) [Arabidopsis thaliana]
  misc_feature (1)..(263): Homolog of NCBI NO: 13751875 NR Description: unknown protein [Arabidopsis thaliana]
  misc_feature (1)..(204): Homolog of NCBI NO: 33410861 NR Description: cold-regulated protein Cor25 [Brassica rapa
  misc_feature (1)..(180): Homolog of NCBI NO: 24417358 NR Description: unknown [Arabidopsis thaliana]
  misc_feature (1)..(263): Homolog of NCBI NO: 13751875 NR Description: unknown protein [Arabidopsis thaliana]
  misc_feature (1)..(264): Homolog of NCBI NO: 30686832 NR Description: dehydrin (ERD10) [Arabidopsis thaliana]
  misc_feature (1)..(265): Homolog of NCBI NO: 975646 NR Description: dehydrin [Arabidopsis thaliana]
  misc_feature (1)..(265): Homolog of NCBI NO: 15217937 NR Description: hypothetical protein
  misc_feature (1)..(265): Homolog of NCBI NO: 99681 NR Description: cold-regulated protein cor47 - Arabidopsis

SEQ ID NO: 43126 - DNA, 1710 bp, Arabidopsis thaliana
  misc_feature (1)..(1710): Ceres Seq. ID no. 12603017
  misc_feature: MA Experiment ID: 20000180 Result: Up-regulated in Transcription
  misc_feature: MA Experiment 20000180 PARAMETER Experiment Name: At_Germinating_Seeds_P Parameter: Age (hr) Value: 24 vs. 0
  misc_feature: MA Experiment 20000180 PARAMETER Experiment Name: At_Germinating_Seeds_P Parameter: Tissue Value: Germinating Seeds
  misc_feature: MA Experiment ID: 20000184 Result: Up-regulated in Transcription
  misc_feature: MA Experiment 20000184 PARAMETER Experiment Name: At_Shoots__P Parameter: Age (day) Value: 7
  misc_feature: MA Experiment 20000184 PARAMETER Experiment Name: At_Shoots__P Parameter: Tissue Value: Shoots vs. Whole Plant
aacgctgtgcataagcattctctttctgtggacgaaactaaacctgagagaaaaagccagaagaaccaaactcagaccgagagatagagattgagggagagctctagctctgtagaaaagaaggattcattcatcatatccagaaatggctctaaagtttaaccctttggtggcatctcagccttacaaattcccttcctcgactcgtccgccaactccttctttcagatctcccaagttcctctgcctcgcttcttcttctccggctctcagctccggccccaaggaggttgagagtttgaagaaaccatttacgccacccagggaagtgcatgttcaagtcttgcactccatgccacctcaaaagatcgagatcttcaaatctatggaaaactgggccgaggagaaccttctgattcacctcaaggatgtggagaagtcttggcaaccccaggatttcttgcctgaccctgcatcagatgggtttgaagatcaggtaagagagttaagagagagggctagagagctccctgatgattactttgttgttttggtgggggacatgatcacagaagaagcacttccgacctatcaaactatgttgaacactttggatggagttagggatgaaacaggtgctagtcctacttcatgggctatttggaccagagcttggactgcagaagaaaaccgacatggcgatcttctgaataaatacctttacttgtctggtcgtgttgacatgaggcagatcgaaaagaccattcagtacttgattggatctggaatggatccgcggacagagaataacccctaccttggcttcatctatacgtcattccaagaaagagcgacattcatctctcacggaaacacagcccgccaagccaaagagcacggggacatcaaactagcccaaatatgtggcacaatagctgcagacgagaagcgtcatgaaacagcatacaccaagatagttgaaaagctctttgagattgatcctgatggtactgtcatggcttttgcagacatgatgagaaagaaaatctcaatgcctgctcacttgatgtatgatgggcgcaacgacaacctctttgacaacttctcttccgtggctcagaggctcggtgtttacaccgccaaagactatgcagacattcttgagtttctggttggtaggtggaaaatccaggacttaaccgggctttcaggtgaaggaaacaaagcacaagactatttatgcgggttggctccaaggatcaagagattggatgagagagctcaagcaagagccaagaaaggacccaagattcctttcagttggatacacgacagagaagtgcagctctaaaaggacaaagacaaaaacaaaaacctatcctcccggttcctcatttcatctgtctgctcttaaaattggtgtagattactatggttttctgataatgttggtgggtctagttacaaagttgagatgcagtgatttagtagctttgtttttcccagtcactatatgtttggtctttggtccgttagcacacttgtagtagttaaaacagtttaagtatggtctgtactcagtcttcctcttctctgtggagttttgtttaagttcaggttagttttgttttgtctctctgttttttcccctgtttctcgacaaacaactcatgtggctttttagcaattttgatggatgatcatgatgaa

SEQ ID NO: 43127 - protein, 401 aa, Arabidopsis thaliana
  peptide (1)..(401): Ceres Seq. ID no. 12603018
  misc_feature (1)..(401): Homolog of NCBI NO: 951427 NR Description: stearoyl-acyl-carrier protein desaturase
  misc_feature (1)..(401): Homolog of NCBI NO: 134945 NR Description: Acyl-
  misc_feature (1)..(401): Homolog of NCBI NO: 267037 NR Description: Acyl-
  misc_feature (1)..(401): Homolog of NCBI NO: 512398 NR Description: Stearoyl-acyl carrier protein desaturase
  misc_feature (1)..(401): Homolog of NCBI NO: 5114269 NR Description: delta-9-stearoyl-acyl-acyl carrier protein
  misc_feature (1)..(401): Homolog of NCBI NO: 134943 NR Description: Acyl-
  misc_feature (1)..(388): Homolog of NCBI NO: 2129532 NR Description: acyl-
  misc_feature (1)..(401): Homolog of NCBI NO: 30689469 NR Description: acyl-
  misc_feature (1)..(401): Homolog of NCBI NO: 15081682 NR Description: At2g43710/F18O19.18 [Arabidopsis thaliana]
  misc_feature (1)..(401): Homolog of NCBI NO: 15224342 NR Description: stearoyl-ACP desaturase
MALKFNPLVASQPYKFPSSTRPPTPSFRSPKFLCLASSSPALSSGPKEVESLKKPFTPPREVHVQVLHSMPPQKIEIFKSMENWAEENLLIHLKDVEKSWQPQDFLPDPASDGFEDQVRELRERARELPDDYFVVLVGDMITEEALPTYQTMLNTLDGVRDETGASPTSWAIWTRAWTAEENRHGDLLNKYLYLSGRVDMRQIEKTIQYLIGSGMDPRTENNPYLGFIYTSFQERATFISHGNTARQAKEHGDIKLAQICGTIAADEKRHETAYTKIVEKLFEIDPDGTVMAFADMMRKKISMPAHLMYDGRNDNLFDNFSSVAQRLGVYTAKDYADILEFLVGRWKIQDLTGLSGEGNKAQDYLCGLAPRIKRLDERAQARAKKGPKIPFSWIHDREVQL

SEQ ID NO: 43128 - protein, 332 aa, Arabidopsis thaliana
  peptide (1)..(332): Ceres Seq. ID no. 12603019
  misc_feature (1)..(332): Homolog of NCBI NO: 951427 NR Description: stearoyl-acyl-carrier protein desaturase
  misc_feature (1)..(332): Homolog of NCBI NO: 134945 NR Description: Acyl-
  misc_feature (1)..(332): Homolog of NCBI NO: 267037 NR Description: Acyl-
  misc_feature (1)..(332): Homolog of NCBI NO: 512398 NR Description: Stearoyl-acyl carrier protein desaturase
  misc_feature (1)..(332): Homolog of NCBI NO: 5114269 NR Description: delta-9-stearoyl-acyl-acyl carrier protein
  misc_feature (1)..(332): Homolog of NCBI NO: 134943 NR Description: Acyl-
  misc_feature (1)..(319): Homolog of NCBI NO: 2129532 NR Description: acyl-
  misc_feature (1)..(332): Homolog of NCBI NO: 30689469 NR Description: acyl-
  misc_feature (1)..(332): Homolog of NCBI NO: 15081682 NR Description: At2g43710/F18O19.18 [Arabidopsis thaliana]
  misc_feature (1)..(332): Homolog of NCBI NO: 15224342 NR Description: stearoyl-ACP desaturase
MPPQKIEIFKSMENWAEENLLIHLKDVEKSWQPQDFLPDPASDGFEDQVRELRERARELPDDYFVVLVGDMITEEALPTYQTMLNTLDGVRDETGASPTSWAIWTRAWTAEENRHGDLLNKYLYLSGRVDMRQIEKTIQYLIGSGMDPRTENNPYLGFIYTSFQERATFISHGNTARQAKEHGDIKLAQICGTIAADEKRHETAYTKIVEKLFEIDPDGTVMAFADMMRKKISMPAHLMYDGRNDNLFDNFSSVAQRLGVYTAKDYADILEFLVGRWKIQDLTGLSGEGNKAQDYLCGLAPRIKRLDERAQARAKKGPKIPFSWIHDREVQL

SEQ ID NO: 43129 - protein, 321 aa, Arabidopsis thaliana
  peptide (1)..(321): Ceres Seq. ID no. 12603020
  misc_feature (1)..(321): Homolog of NCBI NO: 951427 NR Description: stearoyl-acyl-carrier protein desaturase
  misc_feature (1)..(321): Homolog of NCBI NO: 134945 NR Description: Acyl-
  misc_feature (1)..(321): Homolog of NCBI NO: 267037 NR Description: Acyl-
  misc_feature (1)..(321): Homolog of NCBI NO: 512398 NR Description: Stearoyl-acyl carrier protein desaturase
  misc_feature (1)..(321): Homolog of NCBI NO: 5114269 NR Description: delta-9-stearoyl-acyl-acyl carrier protein
  misc_feature (1)..(321): Homolog of NCBI NO: 134943 NR Description: Acyl-
  misc_feature (1)..(308): Homolog of NCBI NO: 2129532 NR Description: acyl-
  misc_feature (1)..(321): Homolog of NCBI NO: 30689469 NR Description: acyl-
  misc_feature (1)..(321): Homolog of NCBI NO: 15081682 NR Description: At2g43710/F18O19.18 [Arabidopsis thaliana]
  misc_feature (1)..(321): Homolog of NCBI NO: 15224342 NR Description: stearoyl-ACP desaturase
MENWAEENLLIHLKDVEKSWQPQDFLPDPASDGFEDQVRELRERARELPDDYFVVLVGDMITEEALPTYQTMLNTLDGVRDETGASPTSWAIWTRAWTAEENRHGDLLNKYLYLSGRVDMRQIEKTIQYLIGSGMDPRTENNPYLGFIYTSFQERATFISHGNTARQAKEHGDIKLAQICGTIAADEKRHETAYTKIVEKLFEIDPDGTVMAFADMMRKKISMPAHLMYDGRNDNLFDNFSSVAQRLGVYTAKDYADILEFLVGRWKIQDLTGLSGEGNKAQDYLCGLAPRIKRLDERAQARAKKGPKIPFSWIHDREVQL

SEQ ID NO: 43130 - DNA, 621 bp, Arabidopsis thaliana
  misc_feature (1)..(621): Ceres Seq. ID no. 13488277
  misc_feature: MA Experiment ID: 108434 Result: Up-regulated in Transcription
  misc_feature: MA Experiment 108434 PARAMETER Experiment Name: At_Root_Tips_cDNA_P Parameter: Tissue Value: Root Tips
  misc_feature: MA Experiment ID: 108462 Result: Up-regulated in Transcription
  misc_feature: MA Experiment 108462 PARAMETER Experiment Name: At_Germinating_Seeds_cDNA_P Parameter: Age (day) Value: 2 vs. 0
  misc_feature: MA Experiment 108462 PARAMETER Experiment Name: At_Germinating_Seeds_cDNA_P Parameter: Tissue Value: Germinating Seeds
  misc_feature: MA Experiment ID: 108463 Result: Up-regulated in Transcription
  misc_feature: MA Experiment 108463 PARAMETER Experiment Name: At_Germinating_Seeds_cDNA_P Parameter: Age (day) Value: 3 vs. 0
  misc_feature: MA Experiment 108463 PARAMETER Experiment Name: At_Germinating_Seeds_cDNA_P Parameter: Tissue Value: Germinating Seeds
  misc_feature: MA Experiment ID: 108569 Result: Down-regulated in Transcription
  misc_feature: MA Experiment 108569 PARAMETER Experiment Name: At_0.001%_MeJA__cDNA_P Parameter: Timepoint (hr) Value: 6
  misc_feature: MA Experiment 108569 PARAMETER Experiment Name: At_0.001%_MeJA__cDNA_P Parameter: Tissue Value: Aerial
  misc_feature: MA Experiment 108569 PARAMETER Experiment Name: At_0.001%_MeJA__cDNA_P Parameter: Treatment Value: 0.001% MeJA vs. No Treatment
  misc_feature: MA Experiment ID: 108594 Result: Down-regulated in Transcription
  misc_feature: MA Experiment 108594 PARAMETER Experiment Name: At_Ler-rhl_Root_cDNA_P Parameter: Plant Line Value: null
  misc_feature: MA Experiment ID: 20000185 Result: Up-regulated in Transcription
  misc_feature: MA Experiment 20000185 PARAMETER Experiment Name: At_Roots__P Parameter: Age (day) Value: 7 vs. 21
  misc_feature: MA Experiment 20000185 PARAMETER Experiment Name: At_Roots__P Parameter: Organism Value: A. thaliana
  misc_feature: MA Experiment 20000185 PARAMETER Experiment Name: At_Roots__P Parameter: Tissue Value: Roots vs. Whole Plant
  misc_feature: MA Experiment ID: 20000224 Result: Down-regulated in Transcription
  misc_feature: MA Experiment ID: 20000439 Result: Up-regulated in Transcription
  misc_feature: MA Experiment 20000439 PARAMETER Experiment Name: At_Roots__P Parameter: Age (day) Value: 14 vs. 21
  misc_feature: MA Experiment 20000439 PARAMETER Experiment Name: At_Roots__P Parameter: Organism Value: A. thaliana
  misc_feature: MA Experiment 20000439 PARAMETER Experiment Name: At_Roots__P Parameter: Tissue Value: Roots vs. Whole Plant
acacaacacatcaaaagcttgataaagagagagtttttagggttttcttgtacctattataagaaatactctaactgaaactttacttcttcatcaatggcttattctaaggttgcccttctcctcgtcttcaatgtcatcttcttcactttcgtcagctcgacttcggtcccttgtccaccaccaccgcccaagagctaccacaagaagcccgcaacgccatctcttaaacccacttgtaaagacgctcttaaacttaaggtatgtgctaacgtgttggatgtggttaaggtttctctaccaccaacgtccaactgttgcgctcttatcaaaggtctagttgatcttgaagccgcggtctgtctttgcactgccctaaaggctaatgttcttggtatcaaccttaatgttcccatttctttgaacgttgtcctaaaccattgtggtaagaaggttccatctggtttcaaatgtgcctagagattacacattttaaattgaggttctatataccatatttcattcttgtttttcaaattccgcgtttgatgatatctttatctattgttgtaatttgttatatgtttcatatatcaatgaaataaagtgtttcctttttcg

SEQ ID NO: 43131 - protein, 127 aa, Arabidopsis thaliana
  peptide (1)..(127): Ceres Seq. ID no. 13488278
  misc_feature (48)..(126): Pfam Name: Protease inhibitor/seed storage/LTP family Pfam Description: Protease inhibitor/seed storage/LTP family
  misc_feature (1)..(127): Homolog of NCBI NO: 7484770 NR Description: extensin like protein - black poplar
  misc_feature (1)..(127): Homolog of NCBI NO: 481236 NR Description: hypothetical protein - Madagascar periwinkle
  misc_feature (1)..(127): Homolog of NCBI NO: 4454097 NR Description: hybrid proline-rich protein [Catharanthus roseus]
  misc_feature (4)..(126): Homolog of NCBI NO: 38345485 NR Description: OSJNBa0010H02.23 [Oryza sativa (japonica
  misc_feature (13)..(126): Homolog of NCBI NO: 2129871 NR Description: proline-rich protein, 14K - kidney bean
  misc_feature (4)..(126): Homolog of NCBI NO: 38345484 NR Description: OSJNBa0010H02.22 [Oryza sativa (japonica
  misc_feature (1)..(127): Homolog of NCBI NO: 18406723 NR Description: protease inhibitor/seed storage/lipid transfer
  misc_feature (1)..(127): Homolog of NCBI NO: 15237975 NR Description: protease inhibitor/seed storage/lipid transfer
  misc_feature (1)..(127): Homolog of NCBI NO: 21553657 NR Description: extA [Arabidopsis thaliana]
  misc_feature (1)..(127): Homolog of NCBI NO: 15237964 NR Description: protease inhibitor/seed storage/lipid transfer
MAYSKVALLLVFNVIFFTFVSSTSVPCPPPPPKSYHKKPATPSLKPTCKDALKLKVCANVLDVVKVSLPPTSNCCALIKGLVDLEAAVCLCTALKANVLGINLNVPISLNVVLNHCGKKVPSGFKCA

SEQ ID NO: 43132 - protein, 68 aa, Arabidopsis thaliana
  peptide (1)..(68): Ceres Seq. ID no. 13488279
MSSSSLSSARLRSLVHHHRPRATTRSPQRHLLNPLVKTLLNLRYVLTCWMWLRFLYHQRPTVALLSKV

SEQ ID NO: 43133 - DNA, 1167 bp, Arabidopsis thaliana
  misc_feature (1)..(1167): Ceres Seq. ID no. 12394595
  misc_feature: MA Experiment ID: 108434 Result: Down-regulated in Transcription
  misc_feature: MA Experiment 108434 PARAMETER Experiment Name: At_Root_Tips_cDNA_P Parameter: Tissue Value: Root Tips
  misc_feature: MA Experiment ID: 108435 Result: Down-regulated in Transcription
  misc_feature: MA Experiment 108435 PARAMETER Experiment Name: At_stm_Mutants_cDNA_P Parameter: Plant Line Value: wt Landsburg vs stm
  misc_feature: MA Experiment 108435 PARAMETER Experiment Name: At_stm_Mutants_cDNA_P Parameter: Tissue Value: Shoot Apical Meristem Region
  misc_feature: MA Experiment ID: 108461 Result: Up-regulated in Transcription
  misc_feature: MA Experiment 108461 PARAMETER Experiment Name: At_Germinating_Seeds_cDNA_P Parameter: Age (day) Value: 1 vs. 0
  misc_feature: MA Experiment 108461 PARAMETER Experiment Name: At_Germinating_Seeds_cDNA_P Parameter: Tissue Value: Germinating Seeds
  misc_feature: MA Experiment ID: 108462 Result: Up-regulated in Transcription
  misc_feature: MA Experiment 108462 PARAMETER Experiment Name: At_Germinating_Seeds_cDNA_P Parameter: Age (day) Value: 2 vs. 0
  misc_feature: MA Experiment 108462 PARAMETER Experiment Name: At_Germinating_Seeds_cDNA_P Parameter: Tissue Value: Germinating Seeds
  misc_feature: MA Experiment ID: 108463 Result: Up-regulated in Transcription
  misc_feature: MA Experiment 108463 PARAMETER Experiment Name: At_Germinating_Seeds_cDNA_P Parameter: Age (day) Value: 3 vs. 0
  misc_feature: MA Experiment 108463 PARAMETER Experiment Name: At_Germinating_Seeds_cDNA_P Parameter: Tissue Value: Germinating Seeds
  misc_feature: MA Experiment ID: 108464 Result: Up-regulated in Transcription
  misc_feature: MA Experiment 108464 PARAMETER Experiment Name: At_Germinating_Seeds_cDNA_P Parameter: Age (day) Value: 4 vs. 0
  misc_feature: MA Experiment 108464 PARAMETER Experiment Name: At_Germinating_Seeds_cDNA_P Parameter: Tissue Value: Germinating Seeds
  misc_feature: MA Experiment ID: 108595 Result: Down-regulated in Transcription
  misc_feature: MA Experiment 108595 PARAMETER Experiment Name: At_Ler-pi_Ovule_cDNA_P Parameter: Plant Line Value: null
  misc_feature: MA Experiment ID: 20000180 Result: Up-regulated in Transcription
  misc_feature: MA Experiment 20000180 PARAMETER Experiment Name: At_Germinating_Seeds_P Parameter: Age (hr) Value: 24 vs. 0
  misc_feature: MA Experiment 20000180 PARAMETER Experiment Name: At_Germinating_Seeds_P Parameter: Tissue Value: Germinating Seeds
  misc_feature: MA Experiment ID: 20000185 Result: Down-regulated in Transcription
  misc_feature: MA Experiment 20000185 PARAMETER Experiment Name: At_Roots__P Parameter: Age (day) Value: 7 vs. 21
  misc_feature: MA Experiment 20000185 PARAMETER Experiment Name: At_Roots__P Parameter: Organism Value: A. thaliana
  misc_feature: MA Experiment 20000185 PARAMETER Experiment Name: At_Roots__P Parameter: Tissue Value: Roots vs. Whole Plant
  misc_feature: MA Experiment ID: 20000227 Result: Down-regulated in Transcription
  misc_feature: MA Experiment 20000227 PARAMETER Experiment Name: At_Root-Tips-vs-Tops_P Parameter: Tissue Value: Root Tips vs. Root Tops
  misc_feature: MA Experiment ID: 20000439 Result: Down-regulated in Transcription
  misc_feature: MA Experiment 20000439 PARAMETER Experiment Name: At_Roots__P Parameter: Age (day) Value: 14 vs. 21
  misc_feature: MA Experiment 20000439 PARAMETER Experiment Name: At_Roots__P Parameter: Organism Value: A. thaliana
  misc_feature: MA Experiment 20000439 PARAMETER Experiment Name: At_Roots__P Parameter: Tissue Value: Roots vs. Whole Plant
  misc_feature: MA Experiment ID: 20001248 Result: Down-regulated in Transcription
  misc_feature: MA Experiment 20001248 PARAMETER Experiment Name: At_Far-red-induction_P Parameter: Age (day) Value: 7
  misc_feature: MA Experiment 20001248 PARAMETER Experiment Name: At_Far-red-induction_P Parameter: Light Value: Far-red vs. White
  misc_feature: MA Experiment 20001248 PARAMETER Experiment Name: At_Far-red-induction_P Parameter: Organism Value: A. thaliana
  misc_feature: MA Experiment 20001248 PARAMETER Experiment Name: At_Far-red-induction_P Parameter: Plant Line Value: Columbia
  misc_feature: MA Experiment 20001248 PARAMETER Experiment Name: At_Far-red-induction_P Parameter: Timepoint (hr) Value: 4
  misc_feature: MA Experiment 20001248 PARAMETER Experiment Name: At_Far-red-induction_P Parameter: Tissue Value: Whole Plant
  misc_feature: MA Experiment ID: 20001451 Result: Down-regulated in Transcription
  misc_feature: MA Experiment 20001451 PARAMETER Experiment Name: At_Far-red-induction_P Parameter: Age (day) Value: 7
  misc_feature: MA Experiment 20001451 PARAMETER Experiment Name: At_Far-red-induction_P Parameter: Light Value: Far-red vs. White
  misc_feature: MA Experiment 20001451 PARAMETER Experiment Name: At_Far-red-induction_P Parameter: Organism Value: A. thaliana
  misc_feature: MA Experiment 20001451 PARAMETER Experiment Name: At_Far-red-induction_P Parameter: Plant Line Value: Columbia
  misc_feature: MA Experiment 20001451 PARAMETER Experiment Name: At_Far-red-induction_P Parameter: Timepoint (hr) Value: 24
  misc_feature: MA Experiment 20001451 PARAMETER Experiment Name: At_Far-red-induction_P Parameter: Tissue Value: Whole Plant
  misc_feature: MA Experiment ID: 20001557 Result: Down-regulated in Transcription
  misc_feature: MA Experiment 20001557 PARAMETER Experiment Name: At_Drought_Soil_Dry_P Parameter: Age (day) Value: 27
  misc_feature: MA Experiment 20001557 PARAMETER Experiment Name: At_Drought_Soil_Dry_P Parameter: Organism Value: A. thaliana
  misc_feature: MA Experiment 20001557 PARAMETER Experiment Name: At_Drought_Soil_Dry_P Parameter: Plant Line Value: WS
  misc_feature: MA Experiment 20001557 PARAMETER Experiment Name: At_Drought_Soil_Dry_P Parameter: Post Timepoint (hr) Value: 3
  misc_feature: MA Experiment 20001557 PARAMETER Experiment Name: At_Drought_Soil_Dry_P Parameter: Post-Treatment Value: Re-Water vs. No Drought
  misc_feature: MA Experiment 20001557 PARAMETER Experiment Name: At_Drought_Soil_Dry_P Parameter: Timepoint (day) Value: 13
  misc_feature: MA Experiment 20001557 PARAMETER Experiment Name: At_Drought_Soil_Dry_P Parameter: Treatment Value: Drought vs. No Drought
  misc_feature: MA Experiment ID: 20001558 Result: Down-regulated in Transcription
  misc_feature: MA Experiment 20001558 PARAMETER Experiment Name: At_Drought_Soil_Dry_P Parameter: Age (day) Value: 27
  misc_feature: MA Experiment 20001558 PARAMETER Experiment Name: At_Drought_Soil_Dry_P Parameter: Organism Value: A. thaliana
  misc_feature: MA Experiment 20001558 PARAMETER Experiment Name: At_Drought_Soil_Dry_P Parameter: Plant Line Value: WS
  misc_feature: MA Experiment 20001558 PARAMETER Experiment Name: At_Drought_Soil_Dry_P Parameter: Post Timepoint (hr) Value: 6
  misc_feature: MA Experiment 20001558 PARAMETER Experiment Name: At_Drought_Soil_Dry_P Parameter: Post-Treatment Value: Re-Water vs. No Drought
  misc_feature: MA Experiment 20001558 PARAMETER Experiment Name: At_Drought_Soil_Dry_P Parameter: Timepoint (day) Value: 13
  misc_feature: MA Experiment 20001558 PARAMETER Experiment Name: At_Drought_Soil_Dry_P Parameter: Treatment Value: Drought vs. No Drought
  misc_feature: MA Experiment ID: 20001560 Result: Down-regulated in Transcription
  misc_feature: MA Experiment 20001560 PARAMETER Experiment Name: At_Drought_Soil_Dry_P Parameter: Age (day) Value: 28
  misc_feature: MA Experiment 20001560 PARAMETER Experiment Name: At_Drought_Soil_Dry_P Parameter: Organism Value: A. thaliana
  misc_feature: MA Experiment 20001560 PARAMETER Experiment Name: At_Drought_Soil_Dry_P Parameter: Plant Line Value: WS
  misc_feature: MA Experiment 20001560 PARAMETER Experiment Name: At_Drought_Soil_Dry_P Parameter: Post Timepoint (hr) Value: None
  misc_feature: MA Experiment 20001560 PARAMETER Experiment Name: At_Drought_Soil_Dry_P Parameter: Post-Treatment Value: None
  misc_feature: MA Experiment 20001560 PARAMETER Experiment Name: At_Drought_Soil_Dry_P Parameter: Timepoint (day) Value: 14
  misc_feature: MA Experiment 20001560 PARAMETER Experiment Name: At_Drought_Soil_Dry_P Parameter: Treatment Value: Drought vs. No Drought
acagaatcagatctttgtatcgtcaatggctccttcttttatgtaaggatctatgttcttatccggaatttagagtctttattgagtttgatcgattttgggattataagtttcgcaaaattcatgttttttacattaagtctattcgatttcagctgtattgggaatttaagtttttctgtggcttgattctattgagacagttttgtagaagatcgtccagctccgcttgatgctacttctgatccaccgtctctcttcgacggaaccacaaggttgtacacaagctacgtttgcccatttgctcaacgagtttggatcactcgtaacttcaagggtttgcaagaaaagattaaacttgttcctttggatcttgggaataggcctgcttggtacaaggagaaagtatatctagagaacaaggtgccagcgcttgagcacaatggaaaaatcattggggagagtctggatttgattaaatatcttgataacacttttgaagggccttctctttaccccgaggatcatgcaaaaagagagtttggcgacgagttgctcaagtatactgatactttcgttaaaactatgtatgtgtctctcaaaggagacccctctaaagaaaccgcacctgtgttagattatctggaaaatgctctgtataagttcgatgacgggccgttcttcctcggtcagttaagcttggttgatatcgcttatatcccgttcattgaaaggttccaaactgtactcgatgaattatttaagtgcgacattactgccgaacgtcccaaactatcggcatggattgaggaaattaacaagagcgatggctatgcacagacgaaaatggatcctaaggagattgtggaggttttcaagaaaaaattcatgtaactgtaagcaagcacgaagcagtaaagtgtatgagaccaaaccaccttgtacgaacaggtggtctttggatatgaagaaataagatgtgtacttgaacctgatgatgcaataagatttgtactttacatgatgcagcaacagcttaatctgtattctagtgttgatcaaattatcaaccattgacattgttaatatattactgtatgatagtaatactatcaaaatctcacacattaagaaccagatgatgcaataaggataaggtgtatagtc

SEQ ID NO: 43134 - protein, 102 aa, Arabidopsis thaliana
  peptide (1)..(102): Ceres Seq. ID no. 12394596
  misc_feature (11)..(81): Pfam Name: Glutathione S-transferase, C-terminal domain Pfam Description: Glutathione S-transferase, C-terminal domain
  misc_feature (1)..(102): Homolog of NCBI NO: 30679765 NR Description: In2-1 protein, putative [Arabidopsis thaliana]
  misc_feature (1)..(102): Homolog of NCBI NO: 11357919 NR Description: hypothetical protein F9G14.90 - Arabidopsis
  misc_feature (1)..(102): Homolog of NCBI NO: 15241956 NR Description: In2-1 protein, putative
  misc_feature (1)..(102): Homolog of NCBI NO: 21537338 NR Description: In2-1 protein [Arabidopsis thaliana]
MYVSLKGDPSKETAPVLDYLENALYKFDDGPFFLGQLSLVDIAYIPFIERFQTVLDELFKCDITAERPKLSAWIEEINKSDGYAQTKMDPKEIVEVFKKKFM

SEQ ID NO: 43135 - protein, 76 aa, Arabidopsis thaliana
  peptide (1)..(76): Ceres Seq. ID no. 12394597
RIRSLYRQWLLLLCKDLCSYPEFRVFIEFDRFWDYKFRKIHVFYIKSIRFQLYWEFKFFCGLILLRQFCRRSSSSA

SEQ ID NO: 43136 - protein, 74 aa, Arabidopsis thaliana
  peptide (1)..(74): Ceres Seq. ID no. 12394598
MNYLSATLLPNVPNYRHGLRKLTRAMAMHRRKWILRRLWRFSRKNSCNCKQARSSKVYETKPPCTNRWSLDMKK

SEQ ID NO: 43137 - DNA, 811 bp, Arabidopsis thaliana; identical to SEQ ID NO: 36378
  misc_feature (1)..(811): Ceres Seq. ID no. 12579903
  misc_feature: MA Experiment ID: 108434 Result: Up-regulated in Transcription
  misc_feature: MA Experiment 108434 PARAMETER Experiment Name: At_Root_Tips_cDNA_P Parameter: Tissue Value: Root Tips
  misc_feature: MA Experiment ID: 108489 Result: Down-regulated in Transcription
  misc_feature: MA Experiment ID: 108576 Result: Up-regulated in Transcription
  misc_feature: MA Experiment 108576 PARAMETER Experiment Name: At_42deg_Heat_cDNA_P Parameter: Temperature (deg C) Value: 42 vs. 22
  misc_feature: MA Experiment 108576 PARAMETER Experiment Name: At_42deg_Heat_cDNA_P Parameter: Timepoint (hr) Value: 1
  misc_feature: MA Experiment 108576 PARAMETER Experiment Name: At_42deg_Heat_cDNA_P Parameter: Tissue Value: Aerial
  misc_feature: MA Experiment ID: 108577 Result: Up-regulated in Transcription
  misc_feature: MA Experiment 108577 PARAMETER Experiment Name: At_42deg_Heat_cDNA_P Parameter: Temperature (deg C) Value: 42 vs. 22
  misc_feature: MA Experiment 108577 PARAMETER Experiment Name: At_42deg_Heat_cDNA_P Parameter: Timepoint (hr) Value: 6
  misc_feature: MA Experiment 108577 PARAMETER Experiment Name: At_42deg_Heat_cDNA_P Parameter: Tissue Value: Aerial
  misc_feature: MA Experiment ID: 108595 Result: Up-regulated in Transcription
  misc_feature: MA Experiment 108595 PARAMETER Experiment Name: At_Ler-pi_Ovule_cDNA_P Parameter: Plant Line Value: null
  misc_feature: MA Experiment ID: 20000093 Result: Up-regulated in Transcription
  misc_feature: MA Experiment 20000093 PARAMETER Experiment Name: At_42deg_Heat_cDNA_P Parameter: Temperature (deg C) Value: 42 vs. 22
  misc_feature: MA Experiment 20000093 PARAMETER Experiment Name: At_42deg_Heat_cDNA_P Parameter: Timepoint (hr) Value: 0.5
  misc_feature: MA Experiment 20000093 PARAMETER Experiment Name: At_42deg_Heat_cDNA_P Parameter: Tissue Value: Aerial
  misc_feature: MA Experiment ID: 20000111 Result: Up-regulated in Transcription
  misc_feature: MA Experiment 20000111 PARAMETER Experiment Name: At_42deg_Heat_cDNA_P Parameter: Temperature (deg C) Value: 42 vs. 22
  misc_feature: MA Experiment 20000111 PARAMETER Experiment Name: At_42deg_Heat_cDNA_P Parameter: Timepoint (hr) Value: 6
  misc_feature: MA Experiment 20000111 PARAMETER Experiment Name: At_42deg_Heat_cDNA_P Parameter: Tissue Value: Aerial
  misc_feature: MA Experiment ID: 20000112 Result: Up-regulated in Transcription
  misc_feature: MA Experiment 20000112 PARAMETER Experiment Name: At_42deg_Heat_cDNA_P Parameter: Temperature (deg C) Value: 42 vs. 22
  misc_feature: MA Experiment 20000112 PARAMETER Experiment Name: At_42deg_Heat_cDNA_P Parameter: Timepoint (hr) Value: 2
  misc_feature: MA Experiment 20000112 PARAMETER Experiment Name: At_42deg_Heat_cDNA_P Parameter: Tissue Value: Aerial
  misc_feature: MA Experiment ID: 20000113 Result: Up-regulated in Transcription
  misc_feature: MA Experiment 20000113 PARAMETER Experiment Name: At_42deg_Heat_cDNA_P Parameter: Temperature (deg C) Value: 42 vs. 22
  misc_feature: MA Experiment 20000113 PARAMETER Experiment Name: At_42deg_Heat_cDNA_P Parameter: Timepoint (hr) Value: 8
  misc_feature: MA Experiment 20000113 PARAMETER Experiment Name: At_42deg_Heat_cDNA_P Parameter: Tissue Value: Aerial
  misc_feature: MA Experiment ID: 20000144 Result: Up-regulated in Transcription
  misc_feature: MA Experiment 20000144 PARAMETER Experiment Name: At_42deg_Heat_cDNA_P Parameter: Temperature (deg C) Value: 42 vs. 22
  misc_feature: MA Experiment 20000144 PARAMETER Experiment Name: At_42deg_Heat_cDNA_P Parameter: Timepoint (hr) Value: 1
  misc_feature: MA Experiment 20000144 PARAMETER Experiment Name: At_42deg_Heat_cDNA_P Parameter: Tissue Value: Aerial
  misc_feature: MA Experiment ID: 20000171 Result: Up-regulated in Transcription
  misc_feature: MA Experiment 20000171 PARAMETER Experiment Name: At_42deg_Heat_P Parameter: Age (day) Value: 14
  misc_feature: MA Experiment 20000171 PARAMETER Experiment Name: At_42deg_Heat_P Parameter: Organism Value: A. thaliana
  misc_feature: MA Experiment 20000171 PARAMETER Experiment Name: At_42deg_Heat_P Parameter: Plant Line Value: WS
  misc_feature: MA Experiment 20000171 PARAMETER Experiment Name: At_42deg_Heat_P Parameter: Temperature (deg C) Value: 42 vs. 22
  misc_feature: MA Experiment 20000171 PARAMETER Experiment Name: At_42deg_Heat_P Parameter: Timepoint (hr) Value: 1
  misc_feature: MA Experiment 20000171 PARAMETER Experiment Name: At_42deg_Heat_P Parameter: Tissue Value: Aerial
  misc_feature: MA Experiment ID: 20000173 Result: Up-regulated in Transcription
  misc_feature: MA Experiment 20000173 PARAMETER Experiment Name: At_42deg_Heat_P Parameter: Age (day) Value: 14
  misc_feature: MA Experiment 20000173 PARAMETER Experiment Name: At_42deg_Heat_P Parameter: Organism Value: A. thaliana
  misc_feature: MA Experiment 20000173 PARAMETER Experiment Name: At_42deg_Heat_P Parameter: Plant Line Value: WS
  misc_feature: MA Experiment 20000173 PARAMETER Experiment Name: At_42deg_Heat_P Parameter: Temperature (deg C) Value: 42 vs. 22
  misc_feature: MA Experiment 20000173 PARAMETER Experiment Name: At_42deg_Heat_P Parameter: Timepoint (hr) Value: 6
  misc_feature: MA Experiment 20000173 PARAMETER Experiment Name: At_42deg_Heat_P Parameter: Tissue Value: Aerial
  misc_feature: MA Experiment ID: 20000182 Result: Up-regulated in Transcription
  misc_feature: MA Experiment 20000182 PARAMETER Experiment Name: At_2mM_SA_P Parameter: Age (day) Value: 14
  misc_feature: MA Experiment 20000182 PARAMETER Experiment Name: At_2mM_SA_P Parameter: Organism Value: A. thaliana
  misc_feature: MA Experiment 20000182 PARAMETER Experiment Name: At_2mM_SA_P Parameter: Plant Line Value: WS
  misc_feature: MA Experiment 20000182 PARAMETER Experiment Name: At_2mM_SA_P Parameter: Timepoint (hr) Value: 6
  misc_feature: MA Experiment 20000182 PARAMETER Experiment Name: At_2mM_SA_P Parameter: Tissue Value: Aerial
  misc_feature: MA Experiment 20000182 PARAMETER Experiment Name: At_2mM_SA_P Parameter: Treatment Value: 2mM SA vs. No Treatment
  misc_feature: MA Experiment ID: 20001247 Result: Down-regulated in Transcription
  misc_feature: MA Experiment 20001247 PARAMETER Experiment Name: At_Far-red-induction_P Parameter: Age (day) Value: 7
  misc_feature: MA Experiment 20001247 PARAMETER Experiment Name: At_Far-red-induction_P Parameter: Light Value: Far-red vs. White
  misc_feature: MA Experiment 20001247 PARAMETER Experiment Name: At_Far-red-induction_P Parameter: Organism Value: A. thaliana
  misc_feature: MA Experiment 20001247 PARAMETER Experiment Name: At_Far-red-induction_P Parameter: Plant Line Value: Columbia
  misc_feature: MA Experiment 20001247 PARAMETER Experiment Name: At_Far-red-induction_P Parameter: Timepoint (hr) Value: 1
  misc_feature: MA Experiment 20001247 PARAMETER Experiment Name: At_Far-red-induction_P Parameter: Tissue Value: Whole Plant
  misc_feature: MA Experiment ID: 20001248 Result: Down-regulated in Transcription
  misc_feature: MA Experiment 20001248 PARAMETER Experiment Name: At_Far-red-induction_P Parameter: Age (day) Value: 7
  misc_feature: MA Experiment 20001248 PARAMETER Experiment Name: At_Far-red-induction_P Parameter: Light Value: Far-red vs. White
  misc_feature: MA Experiment 20001248 PARAMETER Experiment Name: At_Far-red-induction_P Parameter: Organism Value: A. thaliana
  misc_feature: MA Experiment 20001248 PARAMETER Experiment Name: At_Far-red-induction_P Parameter: Plant Line Value: Columbia
  misc_feature: MA Experiment 20001248 PARAMETER Experiment Name: At_Far-red-induction_P Parameter: Timepoint (hr) Value: 4
  misc_feature: MA Experiment 20001248 PARAMETER Experiment Name: At_Far-red-induction_P Parameter: Tissue Value: Whole Plant
  misc_feature: MA Experiment ID: 20001450 Result: Down-regulated in Transcription
  misc_feature: MA Experiment 20001450 PARAMETER Experiment Name: At_Far-red-induction_P Parameter: Age (day) Value: 7
  misc_feature: MA Experiment 20001450 PARAMETER Experiment Name: At_Far-red-induction_P Parameter: Light Value: Far-red vs. White
  misc_feature: MA Experiment 20001450 PARAMETER Experiment Name: At_Far-red-induction_P Parameter: Organism Value: A. thaliana
  misc_feature: MA Experiment 20001450 PARAMETER Experiment Name: At_Far-red-induction_P Parameter: Plant Line Value: Columbia
  misc_feature: MA Experiment 20001450 PARAMETER Experiment Name: At_Far-red-induction_P Parameter: Timepoint (hr) Value: 8
  misc_feature: MA Experiment 20001450 PARAMETER Experiment Name: At_Far-red-induction_P Parameter: Tissue Value: Whole Plant
  misc_feature: MA Experiment ID: 20001451 Result: Down-regulated in Transcription
  misc_feature: MA Experiment 20001451 PARAMETER Experiment Name: At_Far-red-induction_P Parameter: Age (day) Value: 7
  misc_feature: MA Experiment 20001451 PARAMETER Experiment Name: At_Far-red-induction_P Parameter: Light Value: Far-red vs. White
  misc_feature: MA Experiment 20001451 PARAMETER Experiment Name: At_Far-red-induction_P Parameter: Organism Value: A. thaliana
  misc_feature: MA Experiment 20001451 PARAMETER Experiment Name: At_Far-red-induction_P Parameter: Plant Line Value: Columbia
  misc_feature: MA Experiment 20001451 PARAMETER Experiment Name: At_Far-red-induction_P Parameter: Timepoint (hr) Value: 24
  misc_feature: MA Experiment 20001451 PARAMETER Experiment Name: At_Far-red-induction_P Parameter: Tissue Value: Whole Plant

SEQ ID NO: 43138 - protein, 213 aa, Arabidopsis thaliana; identical to SEQ ID NO: 36379
  peptide (1)..(213): Ceres Seq. ID no. 12579904
  misc_feature (24)..(210): Pfam Name: Protein of unknown function (DUF775) Pfam Description: Protein of unknown function (DUF775)
  misc_feature (24)..(210): Pfam Name: Protein of unknown function (DUF775) Pfam Description: Protein of unknown function (DUF775)
  misc_feature (24)..(211): Homolog of NCBI NO: 27357983 NR Description: Hypothetical protein [Oryza sativa (japonica
  misc_feature (24)..(211): Homolog of NCBI NO: 27357983 NR Description: Hypothetical protein [Oryza sativa (japonica
  misc_feature (24)..(213): Homolog of NCBI NO: 15218916 NR Description: hypothetical protein; protein id: At1g66080.1
  misc_feature (24)..(213): Homolog of NCBI NO: 15218916 NR Description: hypothetical protein; protein id: At1g66080.1

SEQ ID NO: 43139 - protein, 190 aa, Arabidopsis thaliana; identical to SEQ ID NO: 36380
  peptide (1)..(190): Ceres Seq. ID no. 12579905
  misc_feature (1)..(187): Pfam Name: Protein of unknown function (DUF775) Pfam Description: Protein of unknown function (DUF775)
  misc_feature (1)..(187): Pfam Name: Protein of unknown function (DUF775) Pfam Description: Protein of unknown function (DUF775)
  misc_feature (1)..(188): Homolog of NCBI NO: 27357983 NR Description: Hypothetical protein [Oryza sativa (japonica
  misc_feature (1)..(188): Homolog of NCBI NO: 27357983 NR Description: Hypothetical protein [Oryza sativa (japonica
  misc_feature (1)..(190): Homolog of NCBI NO: 15218916 NR Description: hypothetical protein; protein id: At1g66080.1
  misc_feature (1)..(190): Homolog of NCBI NO: 15218916 NR Description: hypothetical protein; protein id: At1g66080.1

SEQ ID NO: 43140 - protein, 161 aa, Arabidopsis thaliana; identical to SEQ ID NO: 36381
  peptide (1)..(161): Ceres Seq. ID no. 12579906
  misc_feature (1)..(158): Pfam Name: Protein of unknown function (DUF775) Pfam Description: Protein of unknown function (DUF775)
  misc_feature (1)..(158): Pfam Name: Protein of unknown function (DUF775) Pfam Description: Protein of unknown function (DUF775)
  misc_feature (1)..(159): Homolog of NCBI NO: 27357983 NR Description: Hypothetical protein [Oryza sativa (japonica
  misc_feature (1)..(159): Homolog of NCBI NO: 27357983 NR Description: Hypothetical protein [Oryza sativa (japonica
  misc_feature (1)..(161): Homolog of NCBI NO: 15218916 NR Description: hypothetical protein; protein id: At1g66080.1
  misc_feature (1)..(161): Homolog of NCBI NO: 15218916 NR Description: hypothetical protein; protein id: At1g66080.1

SEQ ID NO: 43141 - DNA, 1945 bp, Arabidopsis thaliana
  misc_feature (1)..(1945): Ceres Seq. ID no. 12370319
  misc_feature: MA Experiment ID: 108435 Result: Up-regulated in Transcription
  misc_feature: MA Experiment 108435 PARAMETER Experiment Name: At_stm_Mutants_cDNA_P Parameter: Plant Line Value: wt Landsburg vs stm
  misc_feature: MA Experiment 108435 PARAMETER Experiment Name: At_stm_Mutants_cDNA_P Parameter: Tissue Value: Shoot Apical Meristem Region
  misc_feature: MA Experiment ID: 108461 Result: Up-regulated in Transcription
  misc_feature: MA Experiment 108461 PARAMETER Experiment Name: At_Germinating_Seeds_cDNA_P Parameter: Age (day) Value: 1 vs. 0
  misc_feature: MA Experiment 108461 PARAMETER Experiment Name: At_Germinating_Seeds_cDNA_P Parameter: Tissue Value: Germinating Seeds
  misc_feature: MA Experiment ID: 108579 Result: Up-regulated in Transcription
  misc_feature: MA Experiment 108579 PARAMETER Experiment Name: At_4deg_Cold_cDNA_P Parameter: Temperature (deg C) Value: 4 vs. 22
  misc_feature: MA Experiment 108579 PARAMETER Experiment Name: At_4deg_Cold_cDNA_P Parameter: Timepoint (hr) Value: 6
  misc_feature: MA Experiment 108579 PARAMETER Experiment Name: At_4deg_Cold_cDNA_P Parameter: Tissue Value: Aerial
  misc_feature: MA Experiment ID: 20000180 Result: Up-regulated in Transcription
  misc_feature: MA Experiment 20000180 PARAMETER Experiment Name: At_Germinating_Seeds_P Parameter: Age (hr) Value: 24 vs. 0
  misc_feature: MA Experiment 20000180 PARAMETER Experiment Name: At_Germinating_Seeds_P Parameter: Tissue Value: Germinating Seeds
  misc_feature: MA Experiment ID: 20000234 Result: Up-regulated in Transcription
  misc_feature: MA Experiment 20000234 PARAMETER Experiment Name: At_Siliques_P Parameter: Age (day) Value: 21
  misc_feature: MA Experiment 20000234 PARAMETER Experiment Name: At_Siliques_P Parameter: Organism Value: A. thaliana
  misc_feature: MA Experiment 20000234 PARAMETER Experiment Name: At_Siliques_P Parameter: Plant Line Value: WS
  misc_feature: MA Experiment 20000234 PARAMETER Experiment Name: At_Siliques_P Parameter: Tissue Value: Less Than 5mm Siliques vs. Whole Plant
  misc_feature: MA Experiment ID: 20000235 Result: Up-regulated in Transcription
  misc_feature: MA Experiment 20000235 PARAMETER Experiment Name: At_Siliques_P Parameter: Age (day) Value: 21
  misc_feature: MA Experiment 20000235 PARAMETER Experiment Name: At_Siliques_P Parameter: Organism Value: A. thaliana
  misc_feature: MA Experiment 20000235 PARAMETER Experiment Name: At_Siliques_P Parameter: Plant Line Value: WS
  misc_feature: MA Experiment 20000235 PARAMETER Experiment Name: At_Siliques_P Parameter: Tissue Value: 5-10mm Siliques vs. Whole Plant
  misc_feature: MA Experiment ID: 20000264 Result: Up-regulated in Transcription
  misc_feature: MA Experiment 20000264 PARAMETER Experiment Name: At_Open_Flower_P Parameter: Age (day) Value: 21
  misc_feature: MA Experiment 20000264 PARAMETER Experiment Name: At_Open_Flower_P Parameter: Plant Line Value: WS
  misc_feature: MA Experiment 20000264 PARAMETER Experiment Name: At_Open_Flower_P Parameter: Tissue Value: Open Flower vs. Whole Plant
  misc_feature: MA Experiment ID: 20000265 Result: Up-regulated in Transcription
  misc_feature: MA Experiment 20000265 PARAMETER Experiment Name: At_Open_Flower_P Parameter: Age (day) Value: 21
  misc_feature: MA Experiment 20000265 PARAMETER Experiment Name: At_Open_Flower_P Parameter: Plant Line Value: WS
  misc_feature: MA Experiment 20000265 PARAMETER Experiment Name: At_Open_Flower_P Parameter: Tissue Value: Closed Flower vs. Whole Plant
  misc_feature: MA Experiment ID: 20001560 Result: Up-regulated in Transcription
  misc_feature: MA Experiment 20001560 PARAMETER Experiment Name: At_Drought_Soil_Dry_P Parameter: Age (day) Value: 28
  misc_feature: MA Experiment 20001560 PARAMETER Experiment Name: At_Drought_Soil_Dry_P Parameter: Organism Value: A. thaliana
  misc_feature: MA Experiment 20001560 PARAMETER Experiment Name: At_Drought_Soil_Dry_P Parameter: Plant Line Value: WS
  misc_feature: MA Experiment 20001560 PARAMETER Experiment Name: At_Drought_Soil_Dry_P Parameter: Post Timepoint (hr) Value: None
  misc_feature: MA Experiment 20001560 PARAMETER Experiment Name: At_Drought_Soil_Dry_P Parameter: Post-Treatment Value: None
  misc_feature: MA Experiment 20001560 PARAMETER Experiment Name: At_Drought_Soil_Dry_P Parameter: Timepoint (day) Value: 14
  misc_feature: MA Experiment 20001560 PARAMETER Experiment Name: At_Drought_Soil_Dry_P Parameter: Treatment Value: Drought vs. No Drought
  misc_feature: MA Experiment ID: 20001911 Result: Down-regulated in Transcription
  misc_feature: MA Experiment 20001911 PARAMETER Experiment Name: At_Drought_Reproduction_P Parameter: Age (day) Value: 40
  misc_feature: MA Experiment 20001911 PARAMETER Experiment Name: At_Drought_Reproduction_P Parameter: Organism Value: A. thaliana
  misc_feature: MA Experiment 20001911 PARAMETER Experiment Name: At_Drought_Reproduction_P Parameter: Plant Line Value: WS
  misc_feature: MA Experiment 20001911 PARAMETER Experiment Name: At_Drought_Reproduction_P Parameter: Timepoint (day) Value: 10
  misc_feature: MA Experiment 20001911 PARAMETER Experiment Name: At_Drought_Reproduction_P Parameter: Tissue Value: Flowers
  misc_feature: MA Experiment 20001911 PARAMETER Experiment Name: At_Drought_Reproduction_P Parameter: Treatment Value: Drought vs. No Drought
tttttttccccattttcttactctcttgccctttcttctctcactctccggcgactgttacgagtttttaacacttccgtcgtcttctcagttgttgttgttgtttatgacaagatcttgttctatccattaaaaccaaagaaatggaggaaggtcataaagaaccattggtgctaagagttgaaggatcacattgttctttatcagagatggatgattttgatctaactcgggctttagagaagccgaggcagctaaagatcgaacggaagagatcgtttgacgaaaggtcgatgagcgagttatcgactggctatgtaagacaagatagcattttagaaatggctcattctccgaagtaggtcaatggtggacactcctctctctgttaggaactctttcgagcctcatccgatggttgctgaggcttgggaagctttgagaaggtcaatggtgttctttcgtgggtcaacccgttggtaccattgcagcttatgaccatgcctccgaggaggtcttgaactatgatcaggtgtttgtacgtgactttgtaccaagtgcattggcgtttctgatgaatggagagcccgatatagtgaaaaacttcttgctcaagacacttcagcttcaaggttgggagaaacgggttgaccggttcaagcttggggaaggcgttatgccagcgagtttcaaggtgcttcatgatccagttcgtaaaaccgacacaattattgcggattttggagaaagcgctataggaagagtagcaccggtggattcaggattctggtggatcatacttctccgtgcttacacgaaatctacgggagatttgactttatctgagacaccagagtgtcagaggggaatgaggcttatactctctctttgcttatccgaaggttttgatactttccctacgcttctttgtgctgacggttgttctatggttgataggagaatgggtgtttatggatatccaatagagattcaagctctgtttttcatggcattgagatgcgccttgtcgatgcttaaaccagacgaggaaggtcgagatttcatagaaaggattgtgaagagacttcacgcgctgagtttccatatgcgcagttacttttggcttgactttcaacaactcaacgatatctataggtacaagacagaggagtactcacacaccgcggtgaacaagttcaacgtgatgccggactcgataccagactgggttttcgactttatgcctctccgtggaggatattttgtcggcaatgtaagcccggcccgtatggatttcaggtggttttccttaggaaattgtgtctccatcctttcttccttggcaactccggatcagtcaatggctattatggacctcctcgagcaccgttgggaggagctagtaggcgagatgccgctcaagatatgttacccttgcatcgaaagccacgagtggcggattgttaccggttgtgatcctaaaaacacgaggtggagttaccacaacggtggatcttggccagtattgctgtggacgctgacggaggcatgcatcaagactggacggcctcaaatagcgagacgtgcgattgatctaattgaatcacggctacaccgagattgctggccggaatactatgatggtaagcaaggaaggtacgttggaaaacaagcaaggaagtaccagacttggtcaatcgcgggttacttggttgcgaaaatgatgcttgaagatccttcacatattggaatgatctctcttgaagaagacaaacagatgaaacctgttatcaagagatctgcttcatggacttgctgaattttgtttcttgttttgtattataatgtcatttgattaagcattcaaaagacctttaatcagcgagagagtagttctgtttgtatttctctttgatccaactatggtttattttcacttgaggct

SEQ ID NO: 43142 - protein, 414 aa, Arabidopsis thaliana
  peptide (1)..(414): Ceres Seq. ID no. 12370320
  misc_feature (1)..(407): Pfam Name: Plant neutral invertase Pfam Description: Plant neutral invertase
  misc_feature (1)..(281): Homolog of NCBI NO: 431164 NR Description: ORF [Lilium longiflorum]
  misc_feature (1)..(413): Homolog of NCBI NO: 38344939 NR Description: OSJNBa0084A10.15 [Oryza sativa (japonica
  misc_feature (1)..(413): Homolog of NCBI NO: 15218303 NR Description: neutral invertase, putative; protein id:
  misc_feature (1)..(413): Homolog of NCBI NO: 7487359 NR Description: hypothetical protein T22J18.18 - Arabidopsis
  misc_feature (1)..(414): Homolog of NCBI NO: 15236209 NR Description: invertase - like protein
  misc_feature (1)..(413): Homolog of NCBI NO: 21594008 NR Description: putative invertase [Arabidopsis thaliana]
  misc_feature (1)..(413): Homolog of NCBI NO: 18395144 NR Description: putative invertase
  misc_feature (1)..(412): Homolog of NCBI NO: 30693221 NR Description: invertase -related [Arabidopsis thaliana]
  misc_feature (1)..(414): Homolog of NCBI NO: 25354737 NR Description: neutral invertase like protein [imported] -
  misc_feature (1)..(414): Homolog of NCBI NO: 18413234 NR Description: neutral invertase like protein
MNGEPDIVKNFLLKTLQLQGWEKRVDRFKLGEGVMPASFKVLHDPVRKTDTIIADFGESAIGRVAPVDSGFWWIILLRAYTKSTGDLTLSETPECQRGMRLILSLCLSEGFDTFPTLLCADGCSMVDRRMGVYGYPIEIQALFFMALRCALSMLKPDEEGRDFIERIVKRLHALSFHMRSYFWLDFQQLNDIYRYKTEEYSHTAVNKFNVMPDSIPDWVFDFMPLRGGYFVGNVSPARMDFRWFSLGNCVSILSSLATPDQSMAIMDLLEHRWEELVGEMPLKICYPCIESHEWRIVTGCDPKNTRWSYHNGGSWPVLLWTLTEACIKTGRPQIARRAIDLIESRLHRDCWPEYYDGKQGRYVGKQARKYQTWSIAGYLVAKMMLEDPSHIGMISLEEDKQMKPVIKRSASWTC

SEQ ID NO: 43143 - protein, 380 aa, Arabidopsis thaliana
  peptide (1)..(380): Ceres Seq. ID no. 12370321
  misc_feature (1)..(373): Pfam Name: Plant neutral invertase Pfam Description: Plant neutral invertase
  misc_feature (1)..(247): Homolog of NCBI NO: 431164 NR Description: ORF [Lilium longiflorum]
  misc_feature (1)..(379): Homolog of NCBI NO: 38344939 NR Description: OSJNBa0084A10.15 [Oryza sativa (japonica
  misc_feature (1)..(379): Homolog of NCBI NO: 15218303 NR Description: neutral invertase, putative; protein id:
  misc_feature (1)..(379): Homolog of NCBI NO: 7487359 NR Description: hypothetical protein T22J18.18 - Arabidopsis
  misc_feature (1)..(380): Homolog of NCBI NO: 15236209 NR Description: invertase - like protein
  misc_feature (1)..(379): Homolog of NCBI NO: 21594008 NR Description: putative invertase [Arabidopsis thaliana]
  misc_feature (1)..(379): Homolog of NCBI NO: 18395144 NR Description: putative invertase
  misc_feature (1)..(378): Homolog of NCBI NO: 30693221 NR Description: invertase -related [Arabidopsis thaliana]
  misc_feature (1)..(380): Homolog of NCBI NO: 25354737 NR Description: neutral invertase like protein [imported] -
  misc_feature (1)..(380): Homolog of NCBI NO: 18413234 NR Description: neutral invertase like protein
MPASFKVLHDPVRKTDTIIADFGESAIGRVAPVDSGFWWIILLRAYTKSTGDLTLSETPECQRGMRLILSLCLSEGFDTFPTLLCADGCSMVDRRMGVYGYPIEIQALFFMALRCALSMLKPDEEGRDFIERIVKRLHALSFHMRSYFWLDFQQLNDIYRYKTEEYSHTAVNKFNVMPDSIPDWVFDFMPLRGGYFVGNVSPARMDFRWFSLGNCVSILSSLATPDQSMAIMDLLEHRWEELVGEMPLKICYPCIESHEWRIVTGCDPKNTRWSYHNGGSWPVLLWTLTEACIKTGRPQIARRAIDLIESRLHRDCWPEYYDGKQGRYVGKQARKYQTWSIAGYLVAKMMLEDPSHIGMISLEEDKQMKPVIKRSASWTC

SEQ ID NO: 43144 - protein, 316 aa, Arabidopsis thaliana
  peptide (1)..(316): Ceres Seq. ID no. 12370322
  misc_feature (1)..(309): Pfam Name: Plant neutral invertase Pfam Description: Plant neutral invertase
  misc_feature (1)..(183): Homolog of NCBI NO: 431164 NR Description: ORF [Lilium longiflorum]
  misc_feature (1)..(315): Homolog of NCBI NO: 38344939 NR Description: OSJNBa0084A10.15 [Oryza sativa (japonica
  misc_feature (1)..(315): Homolog of NCBI NO: 15218303 NR Description: neutral invertase, putative; protein id:
  misc_feature (1)..(315): Homolog of NCBI NO: 7487359 NR Description: hypothetical protein T22J18.18 - Arabidopsis
  misc_feature (1)..(316): Homolog of NCBI NO: 15236209 NR Description: invertase - like protein
  misc_feature (1)..(315): Homolog of NCBI NO: 21594008 NR Description: putative invertase [Arabidopsis thaliana]
  misc_feature (1)..(315): Homolog of NCBI NO: 18395144 NR Description: putative invertase
  misc_feature (1)..(314): Homolog of NCBI NO: 30693221 NR Description: invertase -related [Arabidopsis thaliana]
  misc_feature (1)..(316): Homolog of NCBI NO: 25354737 NR Description: neutral invertase like protein [imported] -
  misc_feature (1)..(316): Homolog of NCBI NO: 18413234 NR Description: neutral invertase like protein
MRLILSLCLSEGFDTFPTLLCADGCSMVDRRMGVYGYPIEIQALFFMALRCALSMLKPDEEGRDFIERIVKRLHALSFHMRSYFWLDFQQLNDIYRYKTEEYSHTAVNKFNVMPDSIPDWVFDFMPLRGGYFVGNVSPARMDFRWFSLGNCVSILSSLATPDQSMAIMDLLEHRWEELVGEMPLKICYPCIESHEWRIVTGCDPKNTRWSYHNGGSWPVLLWTLTEACIKTGRPQIARRAIDLIESRLHRDCWPEYYDGKQGRYVGKQARKYQTWSIAGYLVAKMMLEDPSHIGMISLEEDKQMKPVIKRSASWTC

SEQ ID NO: 43145 - DNA, 1216 bp, Arabidopsis thaliana
  misc_feature (1)..(1216): Ceres Seq. ID no. 12330754
  misc_feature: MA Experiment ID: 108573 Result: Up-regulated in Transcription
  misc_feature: MA Experiment 108573 PARAMETER Experiment Name: At_Drought_cDNA_P Parameter: Timepoint (hr) Value: 6
  misc_feature: MA Experiment 108573 PARAMETER Experiment Name: At_Drought_cDNA_P Parameter: Tissue Value: Aerial
  misc_feature: MA Experiment 108573 PARAMETER Experiment Name: At_Drought_cDNA_P Parameter: Treatment Value: Drought vs. No Drought
  misc_feature: MA Experiment ID: 20000113 Result: Up-regulated in Transcription
  misc_feature: MA Experiment 20000113 PARAMETER Experiment Name: At_42deg_Heat_cDNA_P Parameter: Temperature (deg C) Value: 42 vs. 22
  misc_feature: MA Experiment 20000113 PARAMETER Experiment Name: At_42deg_Heat_cDNA_P Parameter: Timepoint (hr) Value: 8
  misc_feature: MA Experiment 20000113 PARAMETER Experiment Name: At_42deg_Heat_cDNA_P Parameter: Tissue Value: Aerial
atcaccggcgatataggtttacgcgtcggagagatggttgagagagaggaccgagtttctttggaactcagcgaagaaattatacagagcatggaacctggcgccgttttcagagactataattgcaggatcagctcaattgactttcacaaaacttcgacttgtatggtgacagctagcgacgatgactcaattcgtctctatgatgttgccagcgccacatgtctgaagacaattaatagcaaaaagtatggtgttgatcttgtttgcttcacttctcatcctactactgtcatctactcttccagaaacggatgggacgactctctgaggcttctctctttgcacgataataagtacttgcgctacttcaaaggacatcatgacagagttgtttcgcttagcttgtgttctggtggggaatgcttcatctccggttcccttgatcgtactgttttgctttgggatcaaagggtcgagaaatgccagggtctcttacgagtccaaggaaggcctgctgcagcatatgatgatcaagggttaatttttgcaattgcctttggtggctacataagaatgtttgatgcccgtatgtacgaaaagggtccttttgaaatattttccgttggtggtgatctttctgaggcaaacgttgtgaaatttagtaatgatggaaggctcatgctgcttacaaccatggatggttttattcatgtgcttgactcgtttcgtggaactcttctgtccacatttagtgtgaaaccagtagctggagaatctacattggatgcagcctttagtcctgaagggatgtttgttgtttcaggttcaggtgatggtagtacccatgcatggggtgtaaggagcggaaaacaggtacatagttggatgggtttagggagtgagcccccagtcattaaatggggtccaggaagtcccatgtttgtgacaggctcttccgaacttgcttttgttatacccgacttatcgaaattgccagcttatgccattcggaaataggacgactatcacgtctgtgccatgtaaatgaggcctcatttggccttttggtttcagactttgttgtgggttatgccggtaacttatcccttgcactctgattaatatatatttgggtcttgtaacatgaagataaaccccaagtctttctaatgttgtaattcgtgtaatttacaagtttgactgtttctgactg

SEQ ID NO: 43146 - protein, 339 aa, Arabidopsis thaliana
  peptide (1)..(339): Ceres Seq. ID no. 12330755
  misc_feature (20)..(273): Homolog of NCBI NO: 19112522 NR Description: trp-ast repeats containing protein
  misc_feature (56)..(329): Homolog of NCBI NO: 34877546 NR Description: similar to CG17293-PA [Rattus norvegicus]
  misc_feature (19)..(327): Homolog of NCBI NO: 19920938 NR Description: CG17293-PA [Drosophila melanogaster]
  misc_feature (28)..(329): Homolog of NCBI NO: 21618713 NR Description: RIKEN cDNA 9430077D24 gene [Mus musculus]
  misc_feature (21)..(329): Homolog of NCBI NO: 28277563 NR Description: Similar to RIKEN cDNA 9430077D24 gene [Danio
  misc_feature (22)..(336): Homolog of NCBI NO: 15241434 NR Description: putative protein
  misc_feature (19)..(339): Homolog of NCBI NO: 28564824 NR Description: OSJNBb0005G07.13 [Oryza sativa (japonica
  misc_feature (11)..(339): Homolog of NCBI NO: 21536827 NR Description: WD repeat protein-like [Arabidopsis thaliana]
  misc_feature (11)..(339): Homolog of NCBI NO: 18425050 NR Description: WD repeat protein-like
  misc_feature (12)..(339): Homolog of NCBI NO: 30698206 NR Description: transducin / WD-40 repeat protein family
ITGDIGLRVGEMVEREDRVSLELSEEIIQSMEPGAVFRDYNCRISSIDFHKTSTCMVTASDDDSIRLYDVASATCLKTINSKKYGVDLVCFTSHPTTVIYSSRNGWDDSLRLLSLHDNKYLRYFKGHHDRVVSLSLCSGGECFISGSLDRTVLLWDQRVEKCQGLLRVQGRPAAAYDDQGLIFAIAFGGYIRMFDARMYEKGPFEIFSVGGDLSEANVVKFSNDGRLMLLTTMDGFIHVLDSFRGTLLSTFSVKPVAGESTLDAAFSPEGMFVVSGSGDGSTHAWGVRSGKQVHSWMGLGSEPPVIKWGPGSPMFVTGSSELAFVIPDLSKLPAYAIRK

SEQ ID NO: 43147 - protein, 328 aa, Arabidopsis thaliana
  peptide (1)..(328): Ceres Seq. ID no. 12330756
  misc_feature (9)..(262): Homolog of NCBI NO: 19112522 NR Description: trp-ast repeats containing protein
  misc_feature (45)..(318): Homolog of NCBI NO: 34877546 NR Description: similar to CG17293-PA [Rattus norvegicus]
  misc_feature (8)..(316): Homolog of NCBI NO: 19920938 NR Description: CG17293-PA [Drosophila melanogaster]
  misc_feature (17)..(318): Homolog of NCBI NO: 21618713 NR Description: RIKEN cDNA 9430077D24 gene [Mus musculus]
  misc_feature (10)..(318): Homolog of NCBI NO: 28277563 NR Description: Similar to RIKEN cDNA 9430077D24 gene [Danio
  misc_feature (11)..(325): Homolog of NCBI NO: 15241434 NR Description: putative protein
  misc_feature (8)..(328): Homolog of NCBI NO: 28564824 NR Description: OSJNBb0005G07.13 [Oryza sativa (japonica
  misc_feature (1)..(328): Homolog of NCBI NO: 21536827 NR Description: WD repeat protein-like [Arabidopsis thaliana]
  misc_feature (1)..(328): Homolog of NCBI NO: 18425050 NR Description: WD repeat protein-like
  misc_feature (1)..(328): Homolog of NCBI NO: 30698206 NR Description: transducin / WD-40 repeat protein family
MVEREDRVSLELSEEIIQSMEPGAVFRDYNCRISSIDFHKTSTCMVTASDDDSIRLYDVASATCLKTINSKKYGVDLVCFTSHPTTVIYSSRNGWDDSLRLLSLHDNKYLRYFKGHHDRVVSLSLCSGGECFISGSLDRTVLLWDQRVEKCQGLLRVQGRPAAAYDDQGLIFAIAFGGYIRMFDARMYEKGPFEIFSVGGDLSEANVVKFSNDGRLMLLTTMDGFIHVLDSFRGTLLSTFSVKPVAGESTLDAAFSPEGMFVVSGSGDGSTHAWGVRSGKQVHSWMGLGSEPPVIKWGPGSPMFVTGSSELAFVIPDLSKLPAYAIRK

SEQ ID NO: 43148 - protein, 309 aa, Arabidopsis thaliana; identical to SEQ ID NO: 28628
  peptide (1)..(309): Ceres Seq. ID no. 12330757
  misc_feature (1)..(243): Homolog of NCBI NO: 19112522 NR Description: trp-ast repeats containing protein
  misc_feature (26)..(299): Homolog of NCBI NO: 34877546 NR Description: similar to CG17293-PA [Rattus norvegicus]
  misc_feature (1)..(297): Homolog of NCBI NO: 19920938 NR Description: CG17293-PA [Drosophila melanogaster]
  misc_feature (1)..(299): Homolog of NCBI NO: 21618713 NR Description: RIKEN cDNA 9430077D24 gene [Mus musculus]
  misc_feature (1)..(299): Homolog of NCBI NO: 28277563 NR Description: Similar to RIKEN cDNA 9430077D24 gene [Danio
  misc_feature (1)..(306): Homolog of NCBI NO: 15241434 NR Description: putative protein
  misc_feature (1)..(309): Homolog of NCBI NO: 28564824 NR Description: OSJNBb0005G07.13 [Oryza sativa (japonica
  misc_feature (1)..(309): Homolog of NCBI NO: 21536827 NR Description: WD repeat protein-like [Arabidopsis thaliana]
  misc_feature (1)..(309): Homolog of NCBI NO: 18425050 NR Description: WD repeat protein-like
  misc_feature (1)..(309): Homolog of NCBI NO: 30698206 NR Description: transducin / WD-40 repeat protein family

SEQ ID NO: 43149 - DNA, 1299 bp, Arabidopsis thaliana
  misc_feature (1)..(1299): Ceres Seq. ID no. 13497229
  misc_feature: MA Experiment ID: 108579 Result: Down-regulated in Transcription
  misc_feature: MA Experiment 108579 PARAMETER Experiment Name: At_4deg_Cold_cDNA_P Parameter: Temperature (deg C) Value: 4 vs. 22
  misc_feature: MA Experiment 108579 PARAMETER Experiment Name: At_4deg_Cold_cDNA_P Parameter: Timepoint (hr) Value: 6
  misc_feature: MA Experiment 108579 PARAMETER Experiment Name: At_4deg_Cold_cDNA_P Parameter: Tissue Value: Aerial
  misc_feature: MA Experiment ID: 108595 Result: Down-regulated in Transcription
  misc_feature: MA Experiment 108595 PARAMETER Experiment Name: At_Ler-pi_Ovule_cDNA_P Parameter: Plant Line Value: null
  misc_feature: MA Experiment ID: 20000224 Result: Down-regulated in Transcription
  misc_feature: MA Experiment ID: 20001247 Result: Up-regulated in Transcription
  misc_feature: MA Experiment 20001247 PARAMETER Experiment Name: At_Far-red-induction_P Parameter: Age (day) Value: 7
  misc_feature: MA Experiment 20001247 PARAMETER Experiment Name: At_Far-red-induction_P Parameter: Light Value: Far-red vs. White
  misc_feature: MA Experiment 20001247 PARAMETER Experiment Name: At_Far-red-induction_P Parameter: Organism Value: A. thaliana
  misc_feature: MA Experiment 20001247 PARAMETER Experiment Name: At_Far-red-induction_P Parameter: Plant Line Value: Columbia
  misc_feature: MA Experiment 20001247 PARAMETER Experiment Name: At_Far-red-induction_P Parameter: Timepoint (hr) Value: 1
  misc_feature: MA Experiment 20001247 PARAMETER Experiment Name: At_Far-red-induction_P Parameter: Tissue Value: Whole Plant
acgcgtaccggacccataacagtataagtgaatttggataagaaaggagccgcctagagagaagaaggcgatccatggcggaatctgtcttctcttgtataccagaagacgtagtcttcaacatcttcttcaagctccaagatgatccaagaaactgggctcgtctcgcttgcgtctgcaccaaattctcctcaattgttcgaaacgtttgttgtaaaactcagtgctactccgctatccccaccgtcatctccgatctcctccctcttcctccctccgccgccgcatccgcttcttcatccaccgcggcggattcgtctcttactcctcccggtggttgggcttctttatacaaactcgctgtttgttgtcctggtctcttccacgctggaattctcctcgaaaactccgatttcggtttagaacgtgagctaggtcccgatcaaaacctcgatccgaaacctactacgacggatctagctcttaacgacgaagaagtttcgaaaccagttggatctggtttagaaacgacttcgttttggtctctatatgatgatctctacacagatactattcccgctcctcctcccgaagattcaatcgacgatcaagaagaagaaatcgaaacgagtgagatcagacctggacgagatcttccggtaaggaaacgaaggaagatttgtcgatctctaggatctcatttagcttccggtggctggaaccttagccgtgaacaaggcaacaagcttctcgcgagtagattccgaggtgattgtctctacatttgcaattggcctgggtgtattcacgtagaagagaaacgaaattacatgttgtttagaggagtcttcaaggatttcaaaaggtctagagtttggagaacgataaacgacggtaatcggagtaagacctcgggtttgaaatgcgcgttttgtttgtgcgatgagacttgggatttgcattcatcgttttgtttgagaagagtgtttgggtttcatgatgatggtgaaccagttgtgagagcttatgtttgtgagaatggtcatgtctctggtgcttggactgctttacctctctacacttgatagctcactagagaggacaggtctttcattcttcttccacggtctcaagtctcaatcttgtttgatgtatttgtaggaatagtgtcattgtgtttcaaattctggttaatgtttaagtaatggttgaagaaaattggctcaacatattgtggttgttttgtttcaatgttgacaacatattagacttcgattcaaatgcataaactcttacgtc

SEQ ID NO: 43150 - protein, 336 aa, Arabidopsis thaliana
  peptide (1)..(336): Ceres Seq. ID no. 13497230
  misc_feature (11)..(107): Homolog of NCBI NO: 15242296 NR Description: expressed protein [Arabidopsis thaliana]
  misc_feature (218)..(334): Homolog of NCBI NO: 15242296 NR Description: expressed protein [Arabidopsis thaliana]
  misc_feature (1)..(336): Homolog of NCBI NO: 21553661 NR Description: unknown [Arabidopsis thaliana]
  misc_feature (1)..(336): Homolog of NCBI NO: 15235367 NR Description: F-box protein family [Arabidopsis thaliana]
MAESVFSCIPEDVVFNIFFKLQDDPRNWARLACVCTKFSSIVRNVCCKTQCYSAIPTVISDLLPLPPSAAASASSSTAADSSLTPPGGWASLYKLAVCCPGLFHAGILLENSDFGLERELGPDQNLDPKPTTTDLALNDEEVSKPVGSGLETTSFWSLYDDLYTDTIPAPPPEDSIDDQEEEIETSEIRPGRDLPVRKRRKICRSLGSHLASGGWNLSREQGNKLLASRFRGDCLYICNWPGCIHVEEKRNYMLFRGVFKDFKRSRVWRTINDGNRSKTSGLKCAFCLCDETWDLHSSFCLRRVFGFHDDGEPVVRAYVCENGHVSGAWTALPLYT

SEQ ID NO: 43151 - DNA, 1511 bp, Arabidopsis thaliana
  misc_feature (1)..(1511): Ceres Seq. ID no. 13593318
  misc_feature: MA Experiment ID: 20000173 Result: Down-regulated in Transcription
  misc_feature: MA Experiment 20000173 PARAMETER Experiment Name: At_42deg_Heat_P Parameter: Age (day) Value: 14
  misc_feature: MA Experiment 20000173 PARAMETER Experiment Name: At_42deg_Heat_P Parameter: Organism Value: A. thaliana
  misc_feature: MA Experiment 20000173 PARAMETER Experiment Name: At_42deg_Heat_P Parameter: Plant Line Value: WS
  misc_feature: MA Experiment 20000173 PARAMETER Experiment Name: At_42deg_Heat_P Parameter: Temperature (deg C) Value: 42 vs. 22
  misc_feature: MA Experiment 20000173 PARAMETER Experiment Name: At_42deg_Heat_P Parameter: Timepoint (hr) Value: 6
  misc_feature: MA Experiment 20000173 PARAMETER Experiment Name: At_42deg_Heat_P Parameter: Tissue Value: Aerial
  misc_feature: MA Experiment ID: 20000180 Result: Up-regulated in Transcription
  misc_feature: MA Experiment 20000180 PARAMETER Experiment Name: At_Germinating_Seeds_P Parameter: Age (hr) Value: 24 vs. 0
  misc_feature: MA Experiment 20000180 PARAMETER Experiment Name: At_Germinating_Seeds_P Parameter: Tissue Value: Germinating Seeds
  misc_feature: MA Experiment ID: 20000185 Result: Up-regulated in Transcription
  misc_feature: MA Experiment 20000185 PARAMETER Experiment Name: At_Roots__P Parameter: Age (day) Value: 7 vs. 21
  misc_feature: MA Experiment 20000185 PARAMETER Experiment Name: At_Roots__P Parameter: Organism Value: A. thaliana
  misc_feature: MA Experiment 20000185 PARAMETER Experiment Name: At_Roots__P Parameter: Tissue Value: Roots vs. Whole Plant
  misc_feature: MA Experiment ID: 20000265 Result: Up-regulated in Transcription
  misc_feature: MA Experiment 20000265 PARAMETER Experiment Name: At_Open_Flower_P Parameter: Age (day) Value: 21
  misc_feature: MA Experiment 20000265 PARAMETER Experiment Name: At_Open_Flower_P Parameter: Plant Line Value: WS
  misc_feature: MA Experiment 20000265 PARAMETER Experiment Name: At_Open_Flower_P Parameter: Tissue Value: Closed Flower vs. Whole Plant
  misc_feature: MA Experiment ID: 20000439 Result: Up-regulated in Transcription
  misc_feature: MA Experiment 20000439 PARAMETER Experiment Name: At_Roots__P Parameter: Age (day) Value: 14 vs. 21
  misc_feature: MA Experiment 20000439 PARAMETER Experiment Name: At_Roots__P Parameter: Organism Value: A. thaliana
  misc_feature: MA Experiment 20000439 PARAMETER Experiment Name: At_Roots__P Parameter: Tissue Value: Roots vs. Whole Plant
aactttagttcaaaaaacttgagaatatccgactacaaagatacgacctttcaatacaaaatcagatcatcgtcgtgtgtttaactttaacgaatctaggttttattgaatctcgacatgtcggaggagaaagtcgtcgctgtgatcatggttggtggtccgaccaaaggaactcgatttcgcccgttatcgttcaatacaccgaaaccattgattcctttggctggtcaacctatgattcatcatcctatctctgcttgtaaaaagatatcaaatctggctcagatttttctgattggattttacgaggaacgagaatttgctttgtatgtgtcttcaatatctaacgagctgaaaattccagtgcgatacttgaaagaagataaaccccatggttcagctggtgctctttattactttcgtgatagaattatggaagagaaaccgtcacatgttttcctcctcaactgtgatgtttgctgttctttccctcttcaaggcatacttgatgcacatcgaagatatggtggtattggaactatgctagtcatcaaggtttctgcagaagcagctagccaatttggagaattgatagctgatcctgatactaaagaactcctgcattatacagagaagcccgagactttcgtcagtgacttgataaactgtggtgtctatgtgcttacctcagatatcttcaatgccattgaagaagtatatagccaaataagagacacatctagcaactaccaatccgctacaaggtctgttcctgcagattttgtgagattagatcaagatatattgtcacctcttgctggaaagaagcaactatacacatatgagaacaaggatttctgggaacagatcaagactccggggaaatctttgaaatgctcggctttatatctctcccaattccgcgaaacatcgcctcatattttagcttcaggagatggtactaataggaaaccgaatataattggtgatgtttatattcacccatccgtaaaactgcatccaactgcaaagatcggtccaaatgtgtcgatatcagcaaatgttcgtgttggacctggtgtaaggcttattagctgcataatcttagacgatgttgaaatcaaggagaatgctgttgttataaactcaatcatcggatggaaatcatctataggtagatggtcaagagttcaagctagtggagattacaatgacaggcttgggattaccattcttggtgaggctgtaactgtggaagatgaagttgcagtcataggaagcattgttctccagaataagactcttaatgttagtgttcaagatgatatcatcttgtgatttatcacaatgattatcgtttggatatttctctttttaaccgaaacagaaaaagaattacagaattgtgtctttcatgaattgagttcacaggattagattttgagttagtggaactatggaagatttgtaaactctcattgtactttttttttagatactagaaatatttt

SEQ ID NO: 43152 - protein, 406 aa, Arabidopsis thaliana
  peptide (1)..(406): Ceres Seq. ID no. 13593319
  misc_feature (7)..(236): Pfam Name: Nucleotidyl transferase Pfam Description: Nucleotidyl transferase
  misc_feature (8)..(366): Homolog of NCBI NO: 19526884 NR Description: RIKEN cDNA 1810012N01 [Mus musculus]
  misc_feature (8)..(406): Homolog of NCBI NO: 33416563 NR Description: Unknown (protein for MGC:66135) [Danio rerio]
  misc_feature (1)..(406): Homolog of NCBI NO: 28830182 NR Description: similar to Homo sapiens (Human). GDP-mannose
  misc_feature (2)..(335): Homolog of NCBI NO: 26006499 NR Description: Putative GDP-mannose pyrophosphorylase
  misc_feature (3)..(360): Homolog of NCBI NO: 30699056 NR Description: ADP-glucose pyrophosphorylase family [Arabidopsis
  misc_feature (3)..(406): Homolog of NCBI NO: 15222037 NR Description: ADP-glucose pyrophosphorylase family [Arabidopsis
  misc_feature (3)..(406): Homolog of NCBI NO: 5882732 NR Description: Similar to gb|AF135422 GDP-mannose A (GMPPA) from Homo sapiens. ESTs gb|AA712990, gb|N65247, gb|T04179, gb|Z38092, gb|T76473, gb|N96403, gb|AA394551 and
  misc_feature (1)..(383): Homolog of NCBI NO: 25411099 NR Description: probable GDP-mannose pyrophosphorylase
  misc_feature (1)..(406): Homolog of NCBI NO: 17064890 NR Description: putative GDP-mannose pyrophosphorylase
  misc_feature (1)..(406): Homolog of NCBI NO: 22325477 NR Description: ADP-glucose pyrophosphorylase family [Arabidopsis
MSEEKVVAVIMVGGPTKGTRFRPLSFNTPKPLIPLAGQPMIHHPISACKKISNLAQIFLIGFYEEREFALYVSSISNELKIPVRYLKEDKPHGSAGALYYFRDRIMEEKPSHVFLLNCDVCCSFPLQGILDAHRRYGGIGTMLVIKVSAEAASQFGELIADPDTKELLHYTEKPETFVSDLINCGVYVLTSDIFNAIEEVYSQIRDTSSNYQSATRSVPADFVRLDQDILSPLAGKKQLYTYENKDFWEQIKTPGKSLKCSALYLSQFRETSPHILASGDGTNRKPNIIGDVYIHPSVKLHPTAKIGPNVSISANVRVGPGVRLISCIILDDVEIKENAVVINSIIGWKSSIGRWSRVQASGDYNDRLGITILGEAVTVEDEVAVIGSIVLQNKTLNVSVQDDIIL

SEQ ID NO: 43153 - protein, 396 aa, Arabidopsis thaliana
  peptide (1)..(396): Ceres Seq. ID no. 13593320
  misc_feature (1)..(226): Pfam Name: Nucleotidyl transferase Pfam Description: Nucleotidyl transferase
  misc_feature (1)..(356): Homolog of NCBI NO: 19526884 NR Description: RIKEN cDNA 1810012N01 [Mus musculus]
  misc_feature (1)..(396): Homolog of NCBI NO: 33416563 NR Description: Unknown (protein for MGC:66135) [Danio rerio]
  misc_feature (1)..(396): Homolog of NCBI NO: 28830182 NR Description: similar to Homo sapiens (Human). GDP-mannose
  misc_feature (1)..(325): Homolog of NCBI NO: 26006499 NR Description: Putative GDP-mannose pyrophosphorylase
  misc_feature (1)..(350): Homolog of NCBI NO: 30699056 NR Description: ADP-glucose pyrophosphorylase family [Arabidopsis
  misc_feature (1)..(396): Homolog of NCBI NO: 15222037 NR Description: ADP-glucose pyrophosphorylase family [Arabidopsis
  misc_feature (1)..(396): Homolog of NCBI NO: 5882732 NR Description: Similar to gb|AF135422 GDP-mannose A (GMPPA) from Homo sapiens. ESTs gb|AA712990, gb|N65247, gb|T04179, gb|Z38092, gb|T76473, gb|N96403, gb|AA394551 and
  misc_feature (1)..(373): Homolog of NCBI NO: 25411099 NR Description: probable GDP-mannose pyrophosphorylase
  misc_feature (1)..(396): Homolog of NCBI NO: 17064890 NR Description: putative GDP-mannose pyrophosphorylase
  misc_feature (1)..(396): Homolog of NCBI NO: 22325477 NR Description: ADP-glucose pyrophosphorylase family [Arabidopsis
MVGGPTKGTRFRPLSFNTPKPLIPLAGQPMIHHPISACKKISNLAQIFLIGFYEEREFALYVSSISNELKIPVRYLKEDKPHGSAGALYYFRDRIMEEKPSHVFLLNCDVCCSFPLQGILDAHRRYGGIGTMLVIKVSAEAASQFGELIADPDTKELLHYTEKPETFVSDLINCGVYVLTSDIFNAIEEVYSQIRDTSSNYQSATRSVPADFVRLDQDILSPLAGKKQLYTYENKDFWEQIKTPGKSLKCSALYLSQFRETSPHILASGDGTNRKPNIIGDVYIHPSVKLHPTAKIGPNVSISANVRVGPGVRLISCIILDDVEIKENAVVINSIIGWKSSIGRWSRVQASGDYNDRLGITILGEAVTVEDEVAVIGSIVLQNKTLNVSVQDDIIL

SEQ ID NO: 43154 - protein, 367 aa, Arabidopsis thaliana
  peptide (1)..(367): Ceres Seq. ID no. 13593321
  misc_feature (1)..(197): Pfam Name: Nucleotidyl transferase Pfam Description: Nucleotidyl transferase
  misc_feature (1)..(327): Homolog of NCBI NO: 19526884 NR Description: RIKEN cDNA 1810012N01 [Mus musculus]
  misc_feature (1)..(367): Homolog of NCBI NO: 33416563 NR Description: Unknown (protein for MGC:66135) [Danio rerio]
  misc_feature (1)..(367): Homolog of NCBI NO: 28830182 NR Description: similar to Homo sapiens (Human). GDP-mannose
  misc_feature (1)..(296): Homolog of NCBI NO: 26006499 NR Description: Putative GDP-mannose pyrophosphorylase
  misc_feature (1)..(321): Homolog of NCBI NO: 30699056 NR Description: ADP-glucose pyrophosphorylase family [Arabidopsis
  misc_feature (1)..(367): Homolog of NCBI NO: 15222037 NR Description: ADP-glucose pyrophosphorylase family [Arabidopsis
  misc_feature (1)..(367): Homolog of NCBI NO: 5882732 NR Description: Similar to gb|AF135422 GDP-mannose A (GMPPA) from Homo sapiens. ESTs gb|AA712990, gb|N65247, gb|T04179, gb|Z38092, gb|T76473, gb|N96403, gb|AA394551 and
  misc_feature (1)..(344): Homolog of NCBI NO: 25411099 NR Description: probable GDP-mannose pyrophosphorylase
  misc_feature (1)..(367): Homolog of NCBI NO: 17064890 NR Description: putative GDP-mannose pyrophosphorylase
  misc_feature (1)..(367): Homolog of NCBI NO: 22325477 NR Description: ADP-glucose pyrophosphorylase family [Arabidopsis
MIHHPISACKKISNLAQIFLIGFYEEREFALYVSSISNELKIPVRYLKEDKPHGSAGALYYFRDRIMEEKPSHVFLLNCDVCCSFPLQGILDAHRRYGGIGTMLVIKVSAEAASQFGELIADPDTKELLHYTEKPETFVSDLINCGVYVLTSDIFNAIEEVYSQIRDTSSNYQSATRSVPADFVRLDQDILSPLAGKKQLYTYENKDFWEQIKTPGKSLKCSALYLSQFRETSPHILASGDGTNRKPNIIGDVYIHPSVKLHPTAKIGPNVSISANVRVGPGVRLISCIILDDVEIKENAVVINSIIGWKSSIGRWSRVQASGDYNDRLGITILGEAVTVEDEVAVIGSIVLQNKTLNVSVQDDIIL

SEQ ID NO: 43155 - DNA, 1479 bp, Arabidopsis thaliana
  misc_feature (1)..(1479): Ceres Seq. ID no. 13487785
  misc_feature: MA Experiment ID: 108434 Result: Down-regulated in Transcription
  misc_feature: MA Experiment 108434 PARAMETER Experiment Name: At_Root_Tips_cDNA_P Parameter: Tissue Value: Root Tips
  misc_feature: MA Experiment ID: 108462 Result: Up-regulated in Transcription
  misc_feature: MA Experiment 108462 PARAMETER Experiment Name: At_Germinating_Seeds_cDNA_P Parameter: Age (day) Value: 2 vs. 0
  misc_feature: MA Experiment 108462 PARAMETER Experiment Name: At_Germinating_Seeds_cDNA_P Parameter: Tissue Value: Germinating Seeds
  misc_feature: MA Experiment ID: 108463 Result: Up-regulated in Transcription
  misc_feature: MA Experiment 108463 PARAMETER Experiment Name: At_Germinating_Seeds_cDNA_P Parameter: Age (day) Value: 3 vs. 0
  misc_feature: MA Experiment 108463 PARAMETER Experiment Name: At_Germinating_Seeds_cDNA_P Parameter: Tissue Value: Germinating Seeds
  misc_feature: MA Experiment ID: 108469 Result: Up-regulated in Transcription
  misc_feature: MA Experiment ID: 108488 Result: Down-regulated in Transcription
  misc_feature: MA Experiment ID: 108573 Result: Up-regulated in Transcription
  misc_feature: MA Experiment 108573 PARAMETER Experiment Name: At_Drought_cDNA_P Parameter: Timepoint (hr) Value: 6
  misc_feature: MA Experiment 108573 PARAMETER Experiment Name: At_Drought_cDNA_P Parameter: Tissue Value: Aerial
  misc_feature: MA Experiment 108573 PARAMETER Experiment Name: At_Drought_cDNA_P Parameter: Treatment Value: Drought vs. No Drought
  misc_feature: MA Experiment ID: 108576 Result: Up-regulated in Transcription
  misc_feature: MA Experiment 108576 PARAMETER Experiment Name: At_42deg_Heat_cDNA_P Parameter: Temperature (deg C) Value: 42 vs. 22
  misc_feature: MA Experiment 108576 PARAMETER Experiment Name: At_42deg_Heat_cDNA_P Parameter: Timepoint (hr) Value: 1
  misc_feature: MA Experiment 108576 PARAMETER Experiment Name: At_42deg_Heat_cDNA_P Parameter: Tissue Value: Aerial
  misc_feature: MA Experiment ID: 108585 Result: Up-regulated in Transcription
  misc_feature: MA Experiment 108585 PARAMETER Experiment Name: At_5mM_NaNP_cDNA_P Parameter: Timepoint (hr) Value: 6
  misc_feature: MA Experiment 108585 PARAMETER Experiment Name: At_5mM_NaNP_cDNA_P Parameter: Tissue Value: Aerial
  misc_feature: MA Experiment 108585 PARAMETER Experiment Name: At_5mM_NaNP_cDNA_P Parameter: Treatment Value: null
  misc_feature: MA Experiment ID: 108667 Result: Up-regulated in Transcription
  misc_feature: MA Experiment 108667 PARAMETER Experiment Name: At_2mM_SA_cDNA_P Parameter: Plant Line Value: WS
  misc_feature: MA Experiment 108667 PARAMETER Experiment Name: At_2mM_SA_cDNA_P Parameter: Timepoint (hr) Value: 1
  misc_feature: MA Experiment 108667 PARAMETER Experiment Name: At_2mM_SA_cDNA_P Parameter: Treatment Value: 2mM SA vs. No Treatment
  misc_feature: MA Experiment ID: 108668 Result: Up-regulated in Transcription
  misc_feature: MA Experiment 108668 PARAMETER Experiment Name: At_2mM_SA_cDNA_P Parameter: Plant Line Value: WS
  misc_feature: MA Experiment 108668 PARAMETER Experiment Name: At_2mM_SA_cDNA_P Parameter: Timepoint (hr) Value: 6
  misc_feature: MA Experiment 108668 PARAMETER Experiment Name: At_2mM_SA_cDNA_P Parameter: Treatment Value: 2mM SA vs. No Treatment
  misc_feature: MA Experiment ID: 20000087 Result: Down-regulated in Transcription
  misc_feature: MA Experiment 20000087 PARAMETER Experiment Name: At_100uM_ABA_Mutants_cDNA_P Parameter: Plant Line Value: WS
  misc_feature: MA Experiment 20000087 PARAMETER Experiment Name: At_100uM_ABA_Mutants_cDNA_P Parameter: Timepoint (hr) Value: 6
  misc_feature: MA Experiment 20000087 PARAMETER Experiment Name: At_100uM_ABA_Mutants_cDNA_P Parameter: Tissue Value: Aerial
  misc_feature: MA Experiment 20000087 PARAMETER Experiment Name: At_100uM_ABA_Mutants_cDNA_P Parameter: Treatment Value: 100uM ABA vs. No Treatment
  misc_feature: MA Experiment ID: 20000113 Result: Up-regulated in Transcription
  misc_feature: MA Experiment 20000113 PARAMETER Experiment Name: At_42deg_Heat_cDNA_P Parameter: Temperature (deg C) Value: 42 vs. 22
  misc_feature: MA Experiment 20000113 PARAMETER Experiment Name: At_42deg_Heat_cDNA_P Parameter: Timepoint (hr) Value: 8
  misc_feature: MA Experiment 20000113 PARAMETER Experiment Name: At_42deg_Heat_cDNA_P Parameter: Tissue Value: Aerial
  misc_feature: MA Experiment ID: 20000182 Result: Up-regulated in Transcription
  misc_feature: MA Experiment 20000182 PARAMETER Experiment Name: At_2mM_SA_P Parameter: Age (day) Value: 14
  misc_feature: MA Experiment 20000182 PARAMETER Experiment Name: At_2mM_SA_P Parameter: Organism Value: A. thaliana
  misc_feature: MA Experiment 20000182 PARAMETER Experiment Name: At_2mM_SA_P Parameter: Plant Line Value: WS
  misc_feature: MA Experiment 20000182 PARAMETER Experiment Name: At_2mM_SA_P Parameter: Timepoint (hr) Value: 6
  misc_feature: MA Experiment 20000182 PARAMETER Experiment Name: At_2mM_SA_P Parameter: Tissue Value: Aerial
  misc_feature: MA Experiment 20000182 PARAMETER Experiment Name: At_2mM_SA_P Parameter: Treatment Value: 2mM SA vs. No Treatment
  misc_feature: MA Experiment ID: 20000184 Result: Down-regulated in Transcription
  misc_feature: MA Experiment 20000184 PARAMETER Experiment Name: At_Shoots__P Parameter: Age (day) Value: 7
  misc_feature: MA Experiment 20000184 PARAMETER Experiment Name: At_Shoots__P Parameter: Tissue Value: Shoots vs. Whole Plant
  misc_feature: MA Experiment ID: 20000185 Result: Down-regulated in Transcription
  misc_feature: MA Experiment 20000185 PARAMETER Experiment Name: At_Roots__P Parameter: Age (day) Value: 7 vs. 21
  misc_feature: MA Experiment 20000185 PARAMETER Experiment Name: At_Roots__P Parameter: Organism Value: A. thaliana
  misc_feature: MA Experiment 20000185 PARAMETER Experiment Name: At_Roots__P Parameter: Tissue Value: Roots vs. Whole Plant
  misc_feature: MA Experiment ID: 20000234 Result: Down-regulated in Transcription
  misc_feature: MA Experiment 20000234 PARAMETER Experiment Name: At_Siliques_P Parameter: Age (day) Value: 21
  misc_feature: MA Experiment 20000234 PARAMETER Experiment Name: At_Siliques_P Parameter: Organism Value: A. thaliana
  misc_feature: MA Experiment 20000234 PARAMETER Experiment Name: At_Siliques_P Parameter: Plant Line Value: WS
  misc_feature: MA Experiment 20000234 PARAMETER Experiment Name: At_Siliques_P Parameter: Tissue Value: Less Than 5mm Siliques vs. Whole Plant
  misc_feature: MA Experiment ID: 20000235 Result: Down-regulated in Transcription
  misc_feature: MA Experiment 20000235 PARAMETER Experiment Name: At_Siliques_P Parameter: Age (day) Value: 21
  misc_feature: MA Experiment 20000235 PARAMETER Experiment Name: At_Siliques_P Parameter: Organism Value: A. thaliana
  misc_feature: MA Experiment 20000235 PARAMETER Experiment Name: At_Siliques_P Parameter: Plant Line Value: WS
  misc_feature: MA Experiment 20000235 PARAMETER Experiment Name: At_Siliques_P Parameter: Tissue Value: 5-10mm Siliques vs. Whole Plant
  misc_feature: MA Experiment ID: 20000264 Result: Down-regulated in Transcription
  misc_feature: MA Experiment 20000264 PARAMETER Experiment Name: At_Open_Flower_P Parameter: Age (day) Value: 21
  misc_feature: MA Experiment 20000264 PARAMETER Experiment Name: At_Open_Flower_P Parameter: Plant Line Value: WS
  misc_feature: MA Experiment 20000264 PARAMETER Experiment Name: At_Open_Flower_P Parameter: Tissue Value: Open Flower vs. Whole Plant
  misc_feature: MA Experiment ID: 20000265 Result: Down-regulated in Transcription
  misc_feature: MA Experiment 20000265 PARAMETER Experiment Name: At_Open_Flower_P Parameter: Age (day) Value: 21
  misc_feature: MA Experiment 20000265 PARAMETER Experiment Name: At_Open_Flower_P Parameter: Plant Line Value: WS
  misc_feature: MA Experiment 20000265 PARAMETER Experiment Name: At_Open_Flower_P Parameter: Tissue Value: Closed Flower vs. Whole Plant
  misc_feature: MA Experiment ID: 20000286 Result: Down-regulated in Transcription
  misc_feature: MA Experiment 20000286 PARAMETER Experiment Name: At_Open_Flower_P Parameter: Age (day) Value: 21
  misc_feature: MA Experiment 20000286 PARAMETER Experiment Name: At_Open_Flower_P Parameter: Plant Line Value: WS
  misc_feature: MA Experiment 20000286 PARAMETER Experiment Name: At_Open_Flower_P Parameter: Tissue Value: Half Open vs. Whole Plant
  misc_feature: MA Experiment ID: 20000437 Result: Up-regulated in Transcription
  misc_feature: MA Experiment 20000437 PARAMETER Experiment Name: At_Drought_P Parameter: Age (day) Value: 8
  misc_feature: MA Experiment 20000437 PARAMETER Experiment Name: At_Drought_P Parameter: Organism Value: A. thaliana
  misc_feature: MA Experiment 20000437 PARAMETER Experiment Name: At_Drought_P Parameter: Plant Line Value: WS
  misc_feature: MA Experiment 20000437 PARAMETER Experiment Name: At_Drought_P Parameter: Timepoint (hr) Value: 24
  misc_feature: MA Experiment 20000437 PARAMETER Experiment Name: At_Drought_P Parameter: Tissue Value: Whole Plant
  misc_feature: MA Experiment 20000437 PARAMETER Experiment Name: At_Drought_P Parameter: Treatment Value: Drought vs. No Drought
  misc_feature: MA Experiment ID: 20000438 Result: Down-regulated in Transcription
  misc_feature: MA Experiment 20000438 PARAMETER Experiment Name: At_Shoots__P Parameter: Age (day) Value: 14
  misc_feature: MA Experiment 20000438 PARAMETER Experiment Name: At_Shoots__P Parameter: Tissue Value: Shoots vs. Whole Plant
  misc_feature: MA Experiment ID: 20000453 Result: Up-regulated in Transcription
  misc_feature: MA Experiment 20000453 PARAMETER Experiment Name: At_100uM_ABA_P Parameter: Age (day) Value: 15
  misc_feature: MA Experiment 20000453 PARAMETER Experiment Name: At_100uM_ABA_P Parameter: Organism Value: A. thaliana
  misc_feature: MA Experiment 20000453 PARAMETER Experiment Name: At_100uM_ABA_P Parameter: Plant Line Value: WS
  misc_feature: MA Experiment 20000453 PARAMETER Experiment Name: At_100uM_ABA_P Parameter: Timepoint (hr) Value: 24
  misc_feature: MA Experiment 20000453 PARAMETER Experiment Name: At_100uM_ABA_P Parameter: Tissue Value: Aerial
  misc_feature: MA Experiment 20000453 PARAMETER Experiment Name: At_100uM_ABA_P Parameter: Treatment Value: 100uM ABA vs. No Treatment
  misc_feature: MA Experiment ID: 20000575 Result: Down-regulated in Transcription
  misc_feature: MA Experiment 20000575 PARAMETER Experiment Name: At_100uM_ABA_Mutants__P Parameter: Organism Value: A. thaliana
  misc_feature: MA Experiment 20000575 PARAMETER Experiment Name: At_100uM_ABA_Mutants__P Parameter: Plant Line Value: CS22
  misc_feature: MA Experiment 20000575 PARAMETER Experiment Name: At_100uM_ABA_Mutants__P Parameter: Timepoint (hr) Value: 6
  misc_feature: MA Experiment 20000575 PARAMETER Experiment Name: At_100uM_ABA_Mutants__P Parameter: Tissue Value: Whole Plant
  misc_feature: MA Experiment 20000575 PARAMETER Experiment Name: At_100uM_ABA_Mutants__P Parameter: Treatment Value: 1uM ABA vs. No Treatment
  misc_feature: MA Experiment ID: 20000576 Result: Down-regulated in Transcription
  misc_feature: MA Experiment 20000576 PARAMETER Experiment Name: At_100uM_ABA_Mutants__P Parameter: Organism Value: A. thaliana
  misc_feature: MA Experiment 20000576 PARAMETER Experiment Name: At_100uM_ABA_Mutants__P Parameter: Plant Line Value: CS23
  misc_feature: MA Experiment 20000576 PARAMETER Experiment Name: At_100uM_ABA_Mutants__P Parameter: Timepoint (hr) Value: 6
  misc_feature: MA Experiment 20000576 PARAMETER Experiment Name: At_100uM_ABA_Mutants__P Parameter: Tissue Value: Whole Plant
  misc_feature: MA Experiment 20000576 PARAMETER Experiment Name: At_100uM_ABA_Mutants__P Parameter: Treatment Value: 1uM ABA vs. No Treatment
  misc_feature: MA Experiment ID: 20000794 Result: Down-regulated in Transcription
  misc_feature: MA Experiment 20000794 PARAMETER Experiment Name: At_Petals_P Parameter: Age (day) Value: 23-25 days
  misc_feature: MA Experiment 20000794 PARAMETER Experiment Name: At_Petals_P Parameter: Plant Line Value: WS
  misc_feature: MA Experiment 20000794 PARAMETER Experiment Name: At_Petals_P Parameter: Tissue Value: Petals vs. Whole plant
  misc_feature: MA Experiment ID: 20001757 Result: Down-regulated in Transcription
  misc_feature: MA Experiment 20001757 PARAMETER Experiment Name: At_50mM_NH4NO3_L-to-H_P Parameter: Timepoint (hr) Value: 6
  misc_feature: MA Experiment 20001757 PARAMETER Experiment Name: At_50mM_NH4NO3_L-to-H_P Parameter: Tissue Value: Leaf
  misc_feature: MA Experiment 20001757 PARAMETER Experiment Name: At_50mM_NH4NO3_L-to-H_P Parameter: Treatment Value: 50mM NH4NO3 vs 100mM Mannitol
ataacacttccaattcaaaggaagacaacataaactcttattctctacctgtcctctcttctctgcaactcggccatggggaagaagcttgacgctttgcttggtcgcagtttcaagaccaacaagttcaagtctcttatcaccttagctctcacaaggctctctattctcaagaaccagcgtcaagccagactctctcaagccatctctgatgtcaccgagcttcttaagctcggccaacatgagcacgcttaccatagagtcgatcaagtcgtcaaagaccaaaacactctcgacgttctcttcttcatccatggctacttcactctctgtctcgatcgtattcacctctttgaacacaacagagattgtcctgaagagcttctagaagctgtttcgggtttgctatttgcagcttctagaatcggtgaattccctgagcttcaagagattcgtaatgttttgatttcgcgttttggcaaagatctcgcggctcggtctattgagttgcgcagtaattgtggggttgatcccaaaataattcagaagttgtcgacaagacctccaccgaaagaagttagaatgaaggctttgaaggagattgctgcagagaataacattgttctgaaactagaccaagcttctacgtccactgagggaacaacaaatatgcagggaacatcagatgttagtaagactaagctaacaagtaaagatggcagaggagaaggttatggtttatctgattcggtcaagagaggaaagaagaagtacaaagatgtggctgatgctgcacaagcagcgtttgagtcagcagctcatgcagcagaggctgcacaagcggctgtggagctttctcagttttctcctcgtggacatgacagtccgggtaacattggtggggaaaattcatttcatggttctgaaaacaaagagtcagaacaagaacaagaaggtaatgatgattcttcagaaggggaaggggatgtgatgtcagaatctaaaaggtcgatgtcagattcagaagatattattgatgtcccagtgatgtcattcagagaagaccctgtgaagctattggagaaggatactattatctacgatagtgaagaagaaacccaacctagtgttgagactattactattagtaagtctaaagatgagcaaaatcgtatggttggttcgaatagagcggatacaagacatgtggaccacatggttcgttcaattgaagatcctattatgcgtaaagcaggtttgaagggtccagtttcagtcaggacaagacaggttcgtggatactaagtacaaatgttataagtttttcaggtgcatctacggtgtaatcactcagttttgtacttttctatgttctttttgtggtcaaagatgtaagattattgtgttctttatggatataagctttcaatgatgttgtacagttgcatatgtgtgtgtttatacaagaaacgtttctag

SEQ ID NO: 43156 - protein, 409 aa, Arabidopsis thaliana
  peptide (1)..(409): Ceres Seq. ID no. 13487786
  misc_feature (24)..(145): Pfam Name: Eukaryotic protein of unknown function, DUF292 Pfam Description: Eukaryotic protein of unknown function, DUF292
  misc_feature (24)..(183): Homolog of NCBI NO: 15224833 NR Description: hypothetical protein [Arabidopsis thaliana]
  misc_feature (8)..(304): Homolog of NCBI NO: 30688332 NR Description: expressed protein [Arabidopsis thaliana]
  misc_feature (4)..(182): Homolog of NCBI NO: 34910388 NR Description: P0692C11.15 [Oryza sativa (japonica
  misc_feature (5)..(228): Homolog of NCBI NO: 21595428 NR Description: unknown [Arabidopsis thaliana]
  misc_feature (5)..(228): Homolog of NCBI NO: 18395668 NR Description: expressed protein [Arabidopsis thaliana]
  misc_feature (24)..(289): Homolog of NCBI NO: 15237108 NR Description: expressed protein [Arabidopsis thaliana]
  misc_feature (5)..(321): Homolog of NCBI NO: 15218545 NR Description: expressed protein [Arabidopsis thaliana]
  misc_feature (10)..(194): Homolog of NCBI NO: 40253290 NR Description: unknown protein [Oryza sativa (japonica
  misc_feature (1)..(318): Homolog of NCBI NO: 13702817 NR Description: unknown protein [Oryza sativa]
  misc_feature (1)..(409): Homolog of NCBI NO: 15222251 NR Description: expressed protein [Arabidopsis thaliana]
MGKKLDALLGRSFKTNKFKSLITLALTRLSILKNQRQARLSQAISDVTELLKLGQHEHAYHRVDQVVKDQNTLDVLFFIHGYFTLCLDRIHLFEHNRDCPEELLEAVSGLLFAASRIGEFPELQEIRNVLISRFGKDLAARSIELRSNCGVDPKIIQKLSTRPPPKEVRMKALKEIAAENNIVLKLDQASTSTEGTTNMQGTSDVSKTKLTSKDGRGEGYGLSDSVKRGKKKYKDVADAAQAAFESAAHAAEAAQAAVELSQFSPRGHDSPGNIGGENSFHGSENKESEQEQEGNDDSSEGEGDVMSESKRSMSDSEDIIDVPVMSFREDPVKLLEKDTIIYDSEEETQPSVETITISKSKDEQNRMVGSNRADTRHVDHMVRSIEDPIMRKAGLKGPVSVRTRQVRGY

SEQ ID NO: 43157 - protein, 240 aa, Arabidopsis thaliana
  peptide (1)..(240): Ceres Seq. ID no. 13487787
  misc_feature (1)..(14): Homolog of NCBI NO: 15224833 NR Description: hypothetical protein [Arabidopsis thaliana]
  misc_feature (1)..(135): Homolog of NCBI NO: 30688332 NR Description: expressed protein [Arabidopsis thaliana]
  misc_feature (1)..(13): Homolog of NCBI NO: 34910388 NR Description: P0692C11.15 [Oryza sativa (japonica
  misc_feature (1)..(59): Homolog of NCBI NO: 21595428 NR Description: unknown [Arabidopsis thaliana]
  misc_feature (1)..(59): Homolog of NCBI NO: 18395668 NR Description: expressed protein [Arabidopsis thaliana]
  misc_feature (1)..(120): Homolog of NCBI NO: 15237108 NR Description: expressed protein [Arabidopsis thaliana]
  misc_feature (1)..(152): Homolog of NCBI NO: 15218545 NR Description: expressed protein [Arabidopsis thaliana]
  misc_feature (1)..(25): Homolog of NCBI NO: 40253290 NR Description: unknown protein [Oryza sativa (japonica
  misc_feature (1)..(149): Homolog of NCBI NO: 13702817 NR Description: unknown protein [Oryza sativa]
  misc_feature (1)..(240): Homolog of NCBI NO: 15222251 NR Description: expressed protein [Arabidopsis thaliana]
MKALKEIAAENNIVLKLDQASTSTEGTTNMQGTSDVSKTKLTSKDGRGEGYGLSDSVKRGKKKYKDVADAAQAAFESAAHAAEAAQAAVELSQFSPRGHDSPGNIGGENSFHGSENKESEQEQEGNDDSSEGEGDVMSESKRSMSDSEDIIDVPVMSFREDPVKLLEKDTIIYDSEEETQPSVETITISKSKDEQNRMVGSNRADTRHVDHMVRSIEDPIMRKAGLKGPVSVRTRQVRGY

SEQ ID NO: 43158 - protein, 211 aa, Arabidopsis thaliana
  peptide (1)..(211): Ceres Seq. ID no. 13487788
  misc_feature (1)..(75): Homolog of NCBI NO: 34911298 NR Description: P0519D04.18 [Oryza sativa (japonica
  misc_feature (1)..(106): Homolog of NCBI NO: 25407614 NR Description: hypothetical protein AT4g29440 [imported] -
  misc_feature (1)..(41): Homolog of NCBI NO: 15226014 NR Description: hypothetical protein [Arabidopsis thaliana]
  misc_feature (1)..(106): Homolog of NCBI NO: 30688332 NR Description: expressed protein [Arabidopsis thaliana]
  misc_feature (1)..(30): Homolog of NCBI NO: 21595428 NR Description: unknown [Arabidopsis thaliana]
  misc_feature (1)..(30): Homolog of NCBI NO: 18395668 NR Description: expressed protein [Arabidopsis thaliana]
  misc_feature (1)..(91): Homolog of NCBI NO: 15237108 NR Description: expressed protein [Arabidopsis thaliana]
  misc_feature (1)..(123): Homolog of NCBI NO: 15218545 NR Description: expressed protein [Arabidopsis thaliana]
  misc_feature (1)..(120): Homolog of NCBI NO: 13702817 NR Description: unknown protein [Oryza sativa]
  misc_feature (1)..(211): Homolog of NCBI NO: 15222251 NR Description: expressed protein [Arabidopsis thaliana]
MQGTSDVSKTKLTSKDGRGEGYGLSDSVKRGKKKYKDVADAAQAAFESAAHAAEAAQAAVELSQFSPRGHDSPGNIGGENSFHGSENKESEQEQEGNDDSSEGEGDVMSESKRSMSDSEDIIDVPVMSFREDPVKLLEKDTIIYDSEEETQPSVETITISKSKDEQNRMVGSNRADTRHVDHMVRSIEDPIMRKAGLKGPVSVRTRQVRGY

SEQ ID NO: 43159 - DNA, 1453 bp, Arabidopsis thaliana
  misc_feature (1)..(1453): Ceres Seq. ID no. 12394670
  misc_feature: MA Experiment ID: 108434 Result: Up-regulated in Transcription
  misc_feature: MA Experiment 108434 PARAMETER Experiment Name: At_Root_Tips_cDNA_P Parameter: Tissue Value: Root Tips
  misc_feature: MA Experiment ID: 108561 Result: Down-regulated in Transcription
  misc_feature: MA Experiment 108561 PARAMETER Experiment Name: At_100uM_ABA_cDNA_P Parameter: Timepoint (hr) Value: 6
  misc_feature: MA Experiment 108561 PARAMETER Experiment Name: At_100uM_ABA_cDNA_P Parameter: Tissue Value: Aerial
  misc_feature: MA Experiment 108561 PARAMETER Experiment Name: At_100uM_ABA_cDNA_P Parameter: Treatment Value: 100uM ABA vs. No Treatment
  misc_feature: MA Experiment ID: 108595 Result: Up-regulated in Transcription
  misc_feature: MA Experiment 108595 PARAMETER Experiment Name: At_Ler-pi_Ovule_cDNA_P Parameter: Plant Line Value: null
  misc_feature: MA Experiment ID: 20000069 Result: Down-regulated in Transcription
  misc_feature: MA Experiment 20000069 PARAMETER Experiment Name: At_100uM_ABA_Mutants_cDNA_P Parameter: Plant Line Value: CS23
  misc_feature: MA Experiment 20000069 PARAMETER Experiment Name: At_100uM_ABA_Mutants_cDNA_P Parameter: Timepoint (hr) Value: 6
  misc_feature: MA Experiment 20000069 PARAMETER Experiment Name: At_100uM_ABA_Mutants_cDNA_P Parameter: Tissue Value: Aerial
  misc_feature: MA Experiment 20000069 PARAMETER Experiment Name: At_100uM_ABA_Mutants_cDNA_P Parameter: Treatment Value: 100uM ABA vs. No Treatment
  misc_feature: MA Experiment ID: 20000071 Result: Down-regulated in Transcription
  misc_feature: MA Experiment 20000071 PARAMETER Experiment Name: At_100uM_ABA_Mutants_cDNA_P Parameter: Plant Line Value: CS8104
  misc_feature: MA Experiment 20000071 PARAMETER Experiment Name: At_100uM_ABA_Mutants_cDNA_P Parameter: Timepoint (hr) Value: 6
  misc_feature: MA Experiment 20000071 PARAMETER Experiment Name: At_100uM_ABA_Mutants_cDNA_P Parameter: Tissue Value: Aerial
  misc_feature: MA Experiment 20000071 PARAMETER Experiment Name: At_100uM_ABA_Mutants_cDNA_P Parameter: Treatment Value: 100uM ABA vs. No Treatment
  misc_feature: MA Experiment ID: 20000072 Result: Down-regulated in Transcription
  misc_feature: MA Experiment 20000072 PARAMETER Experiment Name: At_100uM_ABA_Mutants_cDNA_P Parameter: Plant Line Value: CS8105
  misc_feature: MA Experiment 20000072 PARAMETER Experiment Name: At_100uM_ABA_Mutants_cDNA_P Parameter: Timepoint (hr) Value: 6
  misc_feature: MA Experiment 20000072 PARAMETER Experiment Name: At_100uM_ABA_Mutants_cDNA_P Parameter: Tissue Value: Aerial
  misc_feature: MA Experiment 20000072 PARAMETER Experiment Name: At_100uM_ABA_Mutants_cDNA_P Parameter: Treatment Value: 100uM ABA vs. No Treatment
  misc_feature: MA Experiment ID: 20000087 Result: Down-regulated in Transcription
  misc_feature: MA Experiment 20000087 PARAMETER Experiment Name: At_100uM_ABA_Mutants_cDNA_P Parameter: Plant Line Value: WS
  misc_feature: MA Experiment 20000087 PARAMETER Experiment Name: At_100uM_ABA_Mutants_cDNA_P Parameter: Timepoint (hr) Value: 6
  misc_feature: MA Experiment 20000087 PARAMETER Experiment Name: At_100uM_ABA_Mutants_cDNA_P Parameter: Tissue Value: Aerial
  misc_feature: MA Experiment 20000087 PARAMETER Experiment Name: At_100uM_ABA_Mutants_cDNA_P Parameter: Treatment Value: 100uM ABA vs. No Treatment
  misc_feature: MA Experiment ID: 20000089 Result: Down-regulated in Transcription
  misc_feature: MA Experiment ID: 20000090 Result: Down-regulated in Transcription
  misc_feature: MA Experiment ID: 20000113 Result: Down-regulated in Transcription
  misc_feature: MA Experiment 20000113 PARAMETER Experiment Name: At_42deg_Heat_cDNA_P Parameter: Temperature (deg C) Value: 42 vs. 22
  misc_feature: MA Experiment 20000113 PARAMETER Experiment Name: At_42deg_Heat_cDNA_P Parameter: Timepoint (hr) Value: 8
  misc_feature: MA Experiment 20000113 PARAMETER Experiment Name: At_42deg_Heat_cDNA_P Parameter: Tissue Value: Aerial
  misc_feature: MA Experiment ID: 20000117 Result: Down-regulated in Transcription
  misc_feature: MA Experiment 20000117 PARAMETER Experiment Name: At_100uM_ABA_Mutants_cDNA_P Parameter: Plant Line Value: Columbia
  misc_feature: MA Experiment 20000117 PARAMETER Experiment Name: At_100uM_ABA_Mutants_cDNA_P Parameter: Timepoint (hr) Value: 6
  misc_feature: MA Experiment 20000117 PARAMETER Experiment Name: At_100uM_ABA_Mutants_cDNA_P Parameter: Tissue Value: Aerial
  misc_feature: MA Experiment 20000117 PARAMETER Experiment Name: At_100uM_ABA_Mutants_cDNA_P Parameter: Treatment Value: 100uM ABA vs. No Treatment
  misc_feature: MA Experiment ID: 20000264 Result: Up-regulated in Transcription
  misc_feature: MA Experiment 20000264 PARAMETER Experiment Name: At_Open_Flower_P Parameter: Age (day) Value: 21
  misc_feature: MA Experiment 20000264 PARAMETER Experiment Name: At_Open_Flower_P Parameter: Plant Line Value: WS
  misc_feature: MA Experiment 20000264 PARAMETER Experiment Name: At_Open_Flower_P Parameter: Tissue Value: Open Flower vs. Whole Plant
  misc_feature: MA Experiment ID: 20000286 Result: Up-regulated in Transcription
  misc_feature: MA Experiment 20000286 PARAMETER Experiment Name: At_Open_Flower_P Parameter: Age (day) Value: 21
  misc_feature: MA Experiment 20000286 PARAMETER Experiment Name: At_Open_Flower_P Parameter: Plant Line Value: WS
  misc_feature: MA Experiment 20000286 PARAMETER Experiment Name: At_Open_Flower_P Parameter: Tissue Value: Half Open vs. Whole Plant
ctgggtgaaacatagaaaagtttctcttgctcaagttaatgataaaagggtgagagcaataaacgctgataagccttgtctggtccttggaattttgaattttctttttctatcttacttatagtattggtagttgagggtgtcgtcgataagttgttgtaggatttgttgctctggctctggtggtaggtctatgaaatcaacccatatcgtgaatggactgcaacatggtatcttcgtcccagtgggattgggagcatttgatcatgtccaatccgtcaaggactgaagatgacagcaaacagctacctactgagtgggaaattgaaaaaggtgaaggaattgaatctatagttccacatttctcaggccttgagagagtcagtagtggctctgccaccagcttctggcacactgctgtatcgaaaagctcacagtcgacctctatcaactcatcatctcccgaagccaaacgatgcaagcttgcatcagaaagttcccctggagattcttgcagcaacatagactttgtccaggtgaaggctcccacagctctcgaggtatccgttgcctcagctgaatcagatctttgtttaaaactaggaaagcggacatactctgaagaatactggggtagaaacaataatgaaatttcagcggtttctatgaagttgttaactccatctgttgtcgctgggaaatccaaattgtgtggtcagagcatgccagtcccgcgttgccaaattgatggctgtgaactggatctctcatctgctaagggttatcatcgtaagcacaaagtctgcgaaaagcattcaaagtgcccgaaagttagcgtgagtggcctggaacgtcggttctgccaacagtgtagcaggttccatgctgtctctgaatttgatgagaagaaacgaagctgccgaaaacgtctttctcatcataatgcgaggcgtcgtaagccacaaggagtattttcaatgaatcccgagagggtgtatgatcgaagacagcatacaaatatgttgtggaatggggtgtcccttaacgcgagatctgaagaaatgtatgaatggggtaataacacttatgatacaaagcctagacaaacggaaaaaagctttactctgagcttccagagaggtaatggctctgaggaccagctggttgctagtagcagccgtatgttctctacatctcaaacctcaggtgggttcccagcaggaaagtccaagtttcaacttcatggcgaagatgtgggagaatactcaggagtcctccatgaatctcaagatatccaccgtgctctctctcttctgtcaacctcttcggatcccctggcccaaccacatgtgcagccattttctctactctgttcatatgatgttgtaccaaaatagatgagtaagtaatgtgtaatttgtaaacctgttactcagttggtggatacttttcc

SEQ ID NO: 43160 - protein, 393 aa, Arabidopsis thaliana; identical to SEQ ID NO: 24209
  peptide (1)..(393): Ceres Seq. ID no. 12394671
  misc_feature (174)..(252): Pfam Name: SBP domain Pfam Description: SBP domain
  misc_feature (127)..(373): Homolog of NCBI NO: 15227896 NR Description: putative squamosa-promoter binding protein
  misc_feature (117)..(381): Homolog of NCBI NO: 21536841 NR Description: unknown [Arabidopsis thaliana]
  misc_feature (117)..(381): Homolog of NCBI NO: 18423163 NR Description: putative protein
  misc_feature (1)..(291): Homolog of NCBI NO: 15239820 NR Description: squamosa promoter binding protein-like 2
  misc_feature (1)..(371): Homolog of NCBI NO: 25456646 NR Description: squamosa promoter binding protein 2
  misc_feature (5)..(378): Homolog of NCBI NO: 9802546 NR Description: F17L21.15 [Arabidopsis thaliana]
  misc_feature (1)..(378): Homolog of NCBI NO: 18650611 NR Description: At1g27370/F17L21_16 [Arabidopsis thaliana]
  misc_feature (1)..(378): Homolog of NCBI NO: 22329813 NR Description: putative squamosa-promoter binding protein 2
  misc_feature (5)..(393): Homolog of NCBI NO: 25403307 NR Description: protein F17L21.14 [imported] - Arabidopsis
  misc_feature (1)..(393): Homolog of NCBI NO: 18396302 NR Description: putative squamosa-promoter binding protein 2

SEQ ID NO: 43161 - protein, 389 aa, Arabidopsis thaliana; identical to SEQ ID NO: 24210
  peptide (1)..(389): Ceres Seq. ID no. 12394672
  misc_feature (170)..(248): Pfam Name: SBP domain Pfam Description: SBP domain
  misc_feature (123)..(369): Homolog of NCBI NO: 15227896 NR Description: putative squamosa-promoter binding protein
  misc_feature (113)..(377): Homolog of NCBI NO: 21536841 NR Description: unknown [Arabidopsis thaliana]
  misc_feature (113)..(377): Homolog of NCBI NO: 18423163 NR Description: putative protein
  misc_feature (1)..(287): Homolog of NCBI NO: 15239820 NR Description: squamosa promoter binding protein-like 2
  misc_feature (1)..(367): Homolog of NCBI NO: 25456646 NR Description: squamosa promoter binding protein 2
  misc_feature (1)..(374): Homolog of NCBI NO: 9802546 NR Description: F17L21.15 [Arabidopsis thaliana]
  misc_feature (1)..(374): Homolog of NCBI NO: 18650611 NR Description: At1g27370/F17L21_16 [Arabidopsis thaliana]
  misc_feature (1)..(374): Homolog of NCBI NO: 22329813 NR Description: putative squamosa-promoter binding protein 2
  misc_feature (1)..(389): Homolog of NCBI NO: 25403307 NR Description: protein F17L21.14 [imported] - Arabidopsis
  misc_feature (1)..(389): Homolog of NCBI NO: 18396302 NR Description: putative squamosa-promoter binding protein 2

SEQ ID NO: 43162 - protein, 376 aa, Arabidopsis thaliana; identical to SEQ ID NO: 24211
  peptide (1)..(376): Ceres Seq. ID no. 12394673
  misc_feature (157)..(235): Pfam Name: SBP domain Pfam Description: SBP domain
  misc_feature (110)..(356): Homolog of NCBI NO: 15227896 NR Description: putative squamosa-promoter binding protein
  misc_feature (100)..(364): Homolog of NCBI NO: 21536841 NR Description: unknown [Arabidopsis thaliana]
  misc_feature (100)..(364): Homolog of NCBI NO: 18423163 NR Description: putative protein
  misc_feature (1)..(274): Homolog of NCBI NO: 15239820 NR Description: squamosa promoter binding protein-like 2
  misc_feature (1)..(354): Homolog of NCBI NO: 25456646 NR Description: squamosa promoter binding protein 2
  misc_feature (1)..(361): Homolog of NCBI NO: 9802546 NR Description: F17L21.15 [Arabidopsis thaliana]
  misc_feature (1)..(361): Homolog of NCBI NO: 18650611 NR Description: At1g27370/F17L21_16 [Arabidopsis thaliana]
  misc_feature (1)..(361): Homolog of NCBI NO: 22329813 NR Description: putative squamosa-promoter binding protein 2
  misc_feature (1)..(376): Homolog of NCBI NO: 25403307 NR Description: protein F17L21.14 [imported] - Arabidopsis
  misc_feature (1)..(376): Homolog of NCBI NO: 18396302 NR Description: putative squamosa-promoter binding protein 2

SEQ ID NO: 43163 - DNA, 1614 bp, Arabidopsis thaliana
  misc_feature (1)..(1614): Ceres Seq. ID no. 12602150
  misc_feature: MA Experiment ID: 20001247 Result: Up-regulated in Transcription
  misc_feature: MA Experiment 20001247 PARAMETER Experiment Name: At_Far-red-induction_P Parameter: Age (day) Value: 7
  misc_feature: MA Experiment 20001247 PARAMETER Experiment Name: At_Far-red-induction_P Parameter: Light Value: Far-red vs. White
  misc_feature: MA Experiment 20001247 PARAMETER Experiment Name: At_Far-red-induction_P Parameter: Organism Value: A. thaliana
  misc_feature: MA Experiment 20001247 PARAMETER Experiment Name: At_Far-red-induction_P Parameter: Plant Line Value: Columbia
  misc_feature: MA Experiment 20001247 PARAMETER Experiment Name: At_Far-red-induction_P Parameter: Timepoint (hr) Value: 1
  misc_feature: MA Experiment 20001247 PARAMETER Experiment Name: At_Far-red-induction_P Parameter: Tissue Value: Whole Plant
  misc_feature: MA Experiment ID: 20001248 Result: Up-regulated in Transcription
  misc_feature: MA Experiment 20001248 PARAMETER Experiment Name: At_Far-red-induction_P Parameter: Age (day) Value: 7
  misc_feature: MA Experiment 20001248 PARAMETER Experiment Name: At_Far-red-induction_P Parameter: Light Value: Far-red vs. White
  misc_feature: MA Experiment 20001248 PARAMETER Experiment Name: At_Far-red-induction_P Parameter: Organism Value: A. thaliana
  misc_feature: MA Experiment 20001248 PARAMETER Experiment Name: At_Far-red-induction_P Parameter: Plant Line Value: Columbia
  misc_feature: MA Experiment 20001248 PARAMETER Experiment Name: At_Far-red-induction_P Parameter: Timepoint (hr) Value: 4
  misc_feature: MA Experiment 20001248 PARAMETER Experiment Name: At_Far-red-induction_P Parameter: Tissue Value: Whole Plant
  misc_feature: MA Experiment ID: 20001450 Result: Up-regulated in Transcription
  misc_feature: MA Experiment 20001450 PARAMETER Experiment Name: At_Far-red-induction_P Parameter: Age (day) Value: 7
  misc_feature: MA Experiment 20001450 PARAMETER Experiment Name: At_Far-red-induction_P Parameter: Light Value: Far-red vs. White
  misc_feature: MA Experiment 20001450 PARAMETER Experiment Name: At_Far-red-induction_P Parameter: Organism Value: A. thaliana
  misc_feature: MA Experiment 20001450 PARAMETER Experiment Name: At_Far-red-induction_P Parameter: Plant Line Value: Columbia
  misc_feature: MA Experiment 20001450 PARAMETER Experiment Name: At_Far-red-induction_P Parameter: Timepoint (hr) Value: 8
  misc_feature: MA Experiment 20001450 PARAMETER Experiment Name: At_Far-red-induction_P Parameter: Tissue Value: Whole Plant
atgattagcttaagctccttcatcttcttctccaattcccgggttttttcttcttcctccgataaccggaaaattcacctctatcgaatttcccaagcatcttgatccaccaagttcatcttaaaatttcttctctttttctcaattgaagaaggtgaagcagccaacaagttactgcaactgtttccacgatttttgcttttttcaagattctcgccgtcgggagttttctcggtgagatcatttcgctccgacggaaaattcaagttgcatatctgatcggagattgaaaagtgttggttcacgcagtatcgattcgtttgtttttgatgccagatctgatatattacttcaccgaagattcaggaactctttcttaggttgaattagcttgagtttagcttcgaattttatctttgatctagctaaagaaacagagagttttcagaggaagaagaaacagagagttttcagaggaagaagaaacagagagtagtgatgacatcagggacgagaatgccgacatggagggaaagagagaacaacaagagaagagaaagacgacggagagcaatcgcagctaagatcttcaccggattaagaatgtacggtaattacgagcttccgaagcattgcgacaacaacgaagtgcttaaagcactctgtaacgaagctggttggatcgtcgaacctgatggaactacttaccgcaagggatgtagtagacctgtagagcgtatggagataggtggtggttcagcaaccgctagtccttgctcttcctatcagccaagtccctgtgcttcttataatcctagtccaggctcctccaacttcatgagtcctgcttcatcctcatttgctaatcttacctctggtgatggccaatctctcatcccatggctaaaacacctctcaacaacatcatcctcatcagcttcttcatcatcaagactccctaattacctctatatccctggaggctccataagcgctcctgtaactcctcctttaagctctccaacagctcgtaccccgagaatgaacactgattggcagcaactcaacaactccttctttgtctcctcaacaccgccaagtcccacgcgtcagatcatccctgactctgaatggttctcagggattcaactagcacaaagtgttccagcttcaccaacgtttagcctcgtctcacaaaacccatttggattcaaagaagaagcagcctctgctgctggaggcggaggagggtcaaggatgtggacaccaggtcaaagcggaacctgctcccctgctattcctcctggtgctgaccagacagcagatgttccaatgtctgaagccgtggctcctccagagtttgcttttgggagtaatacaaacgggctagtgaaagcatgggaaggagagaggatacacgaggagagtggttcagatgatcttgaactcactcttggaaactcaagcaccaggtaattccaaagccacatgtacattttcaaacccggttgaaccaaaaccgttcttgatatgttgctccaaattttatttaaattgttctcttcccatgtaatgctcaaagttaaaacacagcttataatattcgtttatctg

SEQ ID NO: 43164 - protein, 325 aa, Arabidopsis thaliana
  peptide (1)..(325): Ceres Seq. ID no. 12602151
  misc_feature (2)..(147): Pfam Name: Plant protein of unknown function (DUF822) Pfam Description: Plant protein of unknown function (DUF822)
  misc_feature (2)..(147): Pfam Name: Plant protein of unknown function (DUF822) Pfam Description: Plant protein of unknown function (DUF822)
  misc_feature (6)..(321): Homolog of NCBI NO: 21592457 NR Description: unknown [Arabidopsis thaliana]
  misc_feature (6)..(321): Homolog of NCBI NO: 6651069 NR Description: 107 protein [Arabidopsis thaliana]
  misc_feature (6)..(321): Homolog of NCBI NO: 18394728 NR Description: expressed protein
  misc_feature (6)..(325): Homolog of NCBI NO: 18410764 NR Description: expressed protein
  misc_feature (6)..(325): Homolog of NCBI NO: 18086461 NR Description: At1g75080/F9E10_7 [Arabidopsis thaliana]
  misc_feature (6)..(321): Homolog of NCBI NO: 21592457 NR Description: unknown [Arabidopsis thaliana]
  misc_feature (6)..(321): Homolog of NCBI NO: 18394728 NR Description: expressed protein
  misc_feature (6)..(325): Homolog of NCBI NO: 18086461 NR Description: At1g75080/F9E10_7 [Arabidopsis thaliana]
  misc_feature (1)..(325): Homolog of NCBI NO: 18412073 NR Description: expressed protein
  misc_feature (4)..(325): Homolog of NCBI NO: 34903720 NR Description: P0489A05.26 [Oryza sativa (japonica
  misc_feature (1)..(213): Homolog of NCBI NO: 15234055 NR Description: putative protein
  misc_feature (1)..(259): Homolog of NCBI NO: 33146833 NR Description: putative mature anther-specific protein LAT61
  misc_feature (4)..(235): Homolog of NCBI NO: 14626761 NR Description: mature anther-specific protein LAT61
  misc_feature (6)..(325): Homolog of NCBI NO: 18410764 NR Description: expressed protein
  misc_feature (6)..(321): Homolog of NCBI NO: 6651069 NR Description: 107 protein [Arabidopsis thaliana]
  misc_feature (4)..(235): Homolog of NCBI NO: 14626761 NR Description: mature anther-specific protein LAT61
  misc_feature (1)..(259): Homolog of NCBI NO: 33146833 NR Description: putative mature anther-specific protein LAT61
  misc_feature (1)..(213): Homolog of NCBI NO: 15234055 NR Description: putative protein
  misc_feature (4)..(325): Homolog of NCBI NO: 34903720 NR Description: P0489A05.26 [Oryza sativa (japonica
  misc_feature (1)..(325): Homolog of NCBI NO: 18412073 NR Description: expressed protein
MTSGTRMPTWRERENNKRRERRRRAIAAKIFTGLRMYGNYELPKHCDNNEVLKALCNEAGWIVEPDGTTYRKGCSRPVERMEIGGGSATASPCSSYQPSPCASYNPSPGSSNFMSPASSSFANLTSGDGQSLIPWLKHLSTTSSSSASSSSRLPNYLYIPGGSISAPVTPPLSSPTARTPRMNTDWQQLNNSFFVSSTPPSPTRQIIPDSEWFSGIQLAQSVPASPTFSLVSQNPFGFKEEAASAAGGGGGSRMWTPGQSGTCSPAIPPGADQTADVPMSEAVAPPEFAFGSNTNGLVKAWEGERIHEESGSDDLELTLGNSSTR

SEQ ID NO: 43165 - protein, 319 aa, Arabidopsis thaliana
  peptide (1)..(319): Ceres Seq. ID no. 12602152
  misc_feature (1)..(141): Pfam Name: Plant protein of unknown function (DUF822) Pfam Description: Plant protein of unknown function (DUF822)
  misc_feature (1)..(141): Pfam Name: Plant protein of unknown function (DUF822) Pfam Description: Plant protein of unknown function (DUF822)
  misc_feature (1)..(315): Homolog of NCBI NO: 21592457 NR Description: unknown [Arabidopsis thaliana]
  misc_feature (1)..(315): Homolog of NCBI NO: 6651069 NR Description: 107 protein [Arabidopsis thaliana]
  misc_feature (1)..(315): Homolog of NCBI NO: 18394728 NR Description: expressed protein
  misc_feature (1)..(319): Homolog of NCBI NO: 18410764 NR Description: expressed protein
  misc_feature (1)..(319): Homolog of NCBI NO: 18086461 NR Description: At1g75080/F9E10_7 [Arabidopsis thaliana]
  misc_feature (1)..(315): Homolog of NCBI NO: 21592457 NR Description: unknown [Arabidopsis thaliana]
  misc_feature (1)..(315): Homolog of NCBI NO: 18394728 NR Description: expressed protein
  misc_feature (1)..(319): Homolog of NCBI NO: 18086461 NR Description: At1g75080/F9E10_7 [Arabidopsis thaliana]
  misc_feature (1)..(319): Homolog of NCBI NO: 18412073 NR Description: expressed protein
  misc_feature (1)..(319): Homolog of NCBI NO: 34903720 NR Description: P0489A05.26 [Oryza sativa (japonica
  misc_feature (1)..(207): Homolog of NCBI NO: 15234055 NR Description: putative protein
  misc_feature (1)..(253): Homolog of NCBI NO: 33146833 NR Description: putative mature anther-specific protein LAT61
  misc_feature (1)..(229): Homolog of NCBI NO: 14626761 NR Description: mature anther-specific protein LAT61
  misc_feature (1)..(319): Homolog of NCBI NO: 18410764 NR Description: expressed protein
  misc_feature (1)..(315): Homolog of NCBI NO: 6651069 NR Description: 107 protein [Arabidopsis thaliana]
  misc_feature (1)..(229): Homolog of NCBI NO: 14626761 NR Description: mature anther-specific protein LAT61
  misc_feature (1)..(253): Homolog of NCBI NO: 33146833 NR Description: putative mature anther-specific protein LAT61
  misc_feature (1)..(207): Homolog of NCBI NO: 15234055 NR Description: putative protein
  misc_feature (1)..(319): Homolog of NCBI NO: 34903720 NR Description: P0489A05.26 [Oryza sativa (japonica
  misc_feature (1)..(319): Homolog of NCBI NO: 18412073 NR Description: expressed protein
MPTWRERENNKRRERRRRAIAAKIFTGLRMYGNYELPKHCDNNEVLKALCNEAGWIVEPDGTTYRKGCSRPVERMEIGGGSATASPCSSYQPSPCASYNPSPGSSNFMSPASSSFANLTSGDGQSLIPWLKHLSTTSSSSASSSSRLPNYLYIPGGSISAPVTPPLSSPTARTPRMNTDWQQLNNSFFVSSTPPSPTRQIIPDSEWFSGIQLAQSVPASPTFSLVSQNPFGFKEEAASAAGGGGGSRMWTPGQSGTCSPAIPPGADQTADVPMSEAVAPPEFAFGSNTNGLVKAWEGERIHEESGSDDLELTLGNSSTR

SEQ ID NO: 43166 - protein, 290 aa, Arabidopsis thaliana
  peptide (1)..(290): Ceres Seq. ID no. 12602153
  misc_feature (1)..(112): Pfam Name: Plant protein of unknown function (DUF822) Pfam Description: Plant protein of unknown function (DUF822)
  misc_feature (1)..(112): Pfam Name: Plant protein of unknown function (DUF822) Pfam Description: Plant protein of unknown function (DUF822)
  misc_feature (1)..(286): Homolog of NCBI NO: 21592457 NR Description: unknown [Arabidopsis thaliana]
  misc_feature (1)..(286): Homolog of NCBI NO: 6651069 NR Description: 107 protein [Arabidopsis thaliana]
  misc_feature (1)..(286): Homolog of NCBI NO: 18394728 NR Description: expressed protein
  misc_feature (1)..(290): Homolog of NCBI NO: 18410764 NR Description: expressed protein
  misc_feature (1)..(290): Homolog of NCBI NO: 18086461 NR Description: At1g75080/F9E10_7 [Arabidopsis thaliana]
  misc_feature (1)..(286): Homolog of NCBI NO: 21592457 NR Description: unknown [Arabidopsis thaliana]
  misc_feature (1)..(286): Homolog of NCBI NO: 18394728 NR Description: expressed protein
  misc_feature (1)..(290): Homolog of NCBI NO: 18086461 NR Description: At1g75080/F9E10_7 [Arabidopsis thaliana]
  misc_feature (1)..(290): Homolog of NCBI NO: 18412073 NR Description: expressed protein
  misc_feature (1)..(290): Homolog of NCBI NO: 34903720 NR Description: P0489A05.26 [Oryza sativa (japonica
  misc_feature (1)..(178): Homolog of NCBI NO: 15234055 NR Description: putative protein
  misc_feature (1)..(224): Homolog of NCBI NO: 33146833 NR Description: putative mature anther-specific protein LAT61
  misc_feature (1)..(200): Homolog of NCBI NO: 14626761 NR Description: mature anther-specific protein LAT61
  misc_feature (1)..(290): Homolog of NCBI NO: 18410764 NR Description: expressed protein
  misc_feature (1)..(286): Homolog of NCBI NO: 6651069 NR Description: 107 protein [Arabidopsis thaliana]
  misc_feature (1)..(200): Homolog of NCBI NO: 14626761 NR Description: mature anther-specific protein LAT61
  misc_feature (1)..(224): Homolog of NCBI NO: 33146833 NR Description: putative mature anther-specific protein LAT61
  misc_feature (1)..(178): Homolog of NCBI NO: 15234055 NR Description: putative protein
  misc_feature (1)..(290): Homolog of NCBI NO: 34903720 NR Description: P0489A05.26 [Oryza sativa (japonica
  misc_feature (1)..(290): Homolog of NCBI NO: 18412073 NR Description: expressed protein
MYGNYELPKHCDNNEVLKALCNEAGWIVEPDGTTYRKGCSRPVERMEIGGGSATASPCSSYQPSPCASYNPSPGSSNFMSPASSSFANLTSGDGQSLIPWLKHLSTTSSSSASSSSRLPNYLYIPGGSISAPVTPPLSSPTARTPRMNTDWQQLNNSFFVSSTPPSPTRQIIPDSEWFSGIQLAQSVPASPTFSLVSQNPFGFKEEAASAAGGGGGSRMWTPGQSGTCSPAIPPGADQTADVPMSEAVAPPEFAFGSNTNGLVKAWEGERIHEESGSDDLELTLGNSSTR

SEQ ID NO: 43167 - DNA, 1795 bp, Arabidopsis thaliana
  misc_feature (1)..(1795): Ceres Seq. ID no. 13490973
  misc_feature: MA Experiment ID: 108668 Result: Up-regulated in Transcription
  misc_feature: MA Experiment 108668 PARAMETER Experiment Name: At_2mM_SA_cDNA_P Parameter: Plant Line Value: WS
  misc_feature: MA Experiment 108668 PARAMETER Experiment Name: At_2mM_SA_cDNA_P Parameter: Timepoint (hr) Value: 6
  misc_feature: MA Experiment 108668 PARAMETER Experiment Name: At_2mM_SA_cDNA_P Parameter: Treatment Value: 2mM SA vs. No Treatment
  misc_feature: MA Experiment ID: 20000111 Result: Down-regulated in Transcription
  misc_feature: MA Experiment 20000111 PARAMETER Experiment Name: At_42deg_Heat_cDNA_P Parameter: Temperature (deg C) Value: 42 vs. 22
  misc_feature: MA Experiment 20000111 PARAMETER Experiment Name: At_42deg_Heat_cDNA_P Parameter: Timepoint (hr) Value: 6
  misc_feature: MA Experiment 20000111 PARAMETER Experiment Name: At_42deg_Heat_cDNA_P Parameter: Tissue Value: Aerial
  misc_feature: MA Experiment ID: 20000113 Result: Down-regulated in Transcription
  misc_feature: MA Experiment 20000113 PARAMETER Experiment Name: At_42deg_Heat_cDNA_P Parameter: Temperature (deg C) Value: 42 vs. 22
  misc_feature: MA Experiment 20000113 PARAMETER Experiment Name: At_42deg_Heat_cDNA_P Parameter: Timepoint (hr) Value: 8
  misc_feature: MA Experiment 20000113 PARAMETER Experiment Name: At_42deg_Heat_cDNA_P Parameter: Tissue Value: Aerial
  misc_feature: MA Experiment ID: 20000224 Result: Up-regulated in Transcription
  misc_feature: MA Experiment ID: 20000315 Result: Down-regulated in Transcription
  misc_feature: MA Experiment 20000315 PARAMETER Experiment Name: At_14day_Shoots-Roots_Sub_P Parameter: Age (day) Value: 14
  misc_feature: MA Experiment 20000315 PARAMETER Experiment Name: At_14day_Shoots-Roots_Sub_P Parameter: Organism Value: A. thaliana
  misc_feature: MA Experiment 20000315 PARAMETER Experiment Name: At_14day_Shoots-Roots_Sub_P Parameter: Plant Line Value: WS
  misc_feature: MA Experiment 20000315 PARAMETER Experiment Name: At_14day_Shoots-Roots_Sub_P Parameter: Tissue Value: Shoots vs. Whole Plant
  misc_feature: MA Experiment ID: 20000328 Result: Down-regulated in Transcription
  misc_feature: MA Experiment 20000328 PARAMETER Experiment Name: At_42deg_Heat_Sub_P Parameter: Age (day) Value: 14
  misc_feature: MA Experiment 20000328 PARAMETER Experiment Name: At_42deg_Heat_Sub_P Parameter: Organism Value: A. thaliana
  misc_feature: MA Experiment 20000328 PARAMETER Experiment Name: At_42deg_Heat_Sub_P Parameter: Plant Line Value: WS
  misc_feature: MA Experiment 20000328 PARAMETER Experiment Name: At_42deg_Heat_Sub_P Parameter: Temperature (deg C) Value: 42 vs. 22
  misc_feature: MA Experiment 20000328 PARAMETER Experiment Name: At_42deg_Heat_Sub_P Parameter: Timepoint (hr) Value: 6
  misc_feature: MA Experiment 20000328 PARAMETER Experiment Name: At_42deg_Heat_Sub_P Parameter: Tissue Value: Aerial
  misc_feature: MA Experiment ID: 20000347 Result: Up-regulated in Transcription
  misc_feature: MA Experiment 20000347 PARAMETER Experiment Name: At_2mM_SA_Sub_P Parameter: Age (day) Value: 14
  misc_feature: MA Experiment 20000347 PARAMETER Experiment Name: At_2mM_SA_Sub_P Parameter: Organism Value: A. thaliana
  misc_feature: MA Experiment 20000347 PARAMETER Experiment Name: At_2mM_SA_Sub_P Parameter: Plant Line Value: WS
  misc_feature: MA Experiment 20000347 PARAMETER Experiment Name: At_2mM_SA_Sub_P Parameter: Timepoint (hr) Value: 6
  misc_feature: MA Experiment 20000347 PARAMETER Experiment Name: At_2mM_SA_Sub_P Parameter: Tissue Value: Aerial
  misc_feature: MA Experiment 20000347 PARAMETER Experiment Name: At_2mM_SA_Sub_P Parameter: Treatment Value: 2mM SA vs. No Treatment
gggaagcgacgactgactcttcttcctcctcctcctccacctcttgtttaggttcttagcactgaaatttgatcagaaggtgttgacggtgtagagcttcacgaaacataaactttcatttcttctagcttcttgatttgctcttaaaggtgcatgttgaagtgattgaaagcgatttacatgtgacttgcagctcggtcagacattatacattacactcaacacgagattggaaaggatgcttgagaatccaaagttcgatttgcacgctgttggcaatcacaacaacgacaacaattactatgccttcacccaagacttttatcaaaagctcggggaagaaggtacaaacatgtctgttgacagtatgcagacaagtaatgctggagggtctgtgtcaatgtctgtcgataacagtagcgttggttcgagtgatgctcttattggccatcctggtttgaagcctatgcgccatccctactctctctcggatggccaaagcgtatttcggccaggaaaagttactcatgcacttaacgatgatgccttagcacaagcgttgatggatagtaagtatccaaccgagggactggtgaactatgaagagtggacaatagatctgaggaaactacatatgggtcctgcttttgctcaaggggcttttggaaagttatacagagggacttacaacggagaagatgtagccattaagctactcgagaggtcagatagcaaccctgaaaaggcacaagccctcgaacagcagtttcagcaggaagtttctatgcttgcatttttgaagcatcctaacatcgttaggtttattggtgcgtgcattaaaccgatggtgtggtgcatcgtgactgaatatgcaaaaggagggtctgtcagacagtttctgactaagagacaaaaccgagctgtgcctttgaagttagctgttatgcaggcgttggatgttgccaggggtatggcttacgtccatgagcgcaactttatacaccgggatctaaagtcagataacctcctcatatcagctgatcggtccatcaagattgctgattttggtgttgcaagaattgaagttcaaaccgaagggatgacaccagagactggaacttacagatggatggcaccagagatgatccagcacagaccctacactcaaaaagtggacgtgtatagttttggaatcgtgctgtgggagttgattacaggtctgttaccgttccagaacatgacggcggttcaggctgcatttgcagtggtgaacagaggagtccgtccaacagtcccagcagattgtcttcctgtgcttggagagatcatgacacgttgctgggatgcggaccctgaagtccgtccttgttttgcagagattgtcaatcttctggaggcggcggaaactgagataatgacgaatgtgagaaaagcccgtttcagatgttgcatgacgcaaccaatgacagtcgactaatctgttgtgaagaaagagagaggagaagaagaggaatgaacaaagaagagaacataaaagaaaaaaacagagagagagagagagaaagcaagaagggctttagatatatgtaagtttgtgtgtgtatctatctatctatatatatatatccgattgtatctcttttctcaagataggagaagtaacccaaccattttagactactgattttctagattttgtattaagaaagaacaacgaaaaaattagatgtacggtgattgtctcaagtgtttggtttagttttccttgaatttgatgatgcatacttttctccac

SEQ ID NO: 43168 - protein, 412 aa, Arabidopsis thaliana
  peptide (1)..(412): Ceres Seq. ID no. 13490974
  misc_feature (55)..(412): Homolog of NCBI NO: 29367355 NR Description: serine/thronine protein kinase-like protein
  misc_feature (13)..(412): Homolog of NCBI NO: 28864539 NR Description: serine/threonine protein kinase
  misc_feature (5)..(412): Homolog of NCBI NO: 27085282 NR Description: serine/threonine protein kinase
  misc_feature (1)..(412): Homolog of NCBI NO: 14571547 NR Description: serine/threonine protein kinase [Triticum
  misc_feature (1)..(412): Homolog of NCBI NO: 13124865 NR Description: serine/threonine/tyrosine kinase [Arachis
  misc_feature (1)..(412): Homolog of NCBI NO: 27085280 NR Description: serine/threonine protein kinase
  misc_feature (1)..(412): Homolog of NCBI NO: 27085278 NR Description: serine/threonine protein kinase
  misc_feature (1)..(412): Homolog of NCBI NO: 25287646 NR Description: probable protein kinase [imported] - Arabidopsis
  misc_feature (1)..(412): Homolog of NCBI NO: 18400528 NR Description: serine/threonine/tyrosine kinase, putative
  misc_feature (1)..(412): Homolog of NCBI NO: 15235845 NR Description: protein kinase family [Arabidopsis thaliana]
MLENPKFDLHAVGNHNNDNNYYAFTQDFYQKLGEEGTNMSVDSMQTSNAGGSVSMSVDNSSVGSSDALIGHPGLKPMRHPYSLSDGQSVFRPGKVTHALNDDALAQALMDSKYPTEGLVNYEEWTIDLRKLHMGPAFAQGAFGKLYRGTYNGEDVAIKLLERSDSNPEKAQALEQQFQQEVSMLAFLKHPNIVRFIGACIKPMVWCIVTEYAKGGSVRQFLTKRQNRAVPLKLAVMQALDVARGMAYVHERNFIHRDLKSDNLLISADRSIKIADFGVARIEVQTEGMTPETGTYRWMAPEMIQHRPYTQKVDVYSFGIVLWELITGLLPFQNMTAVQAAFAVVNRGVRPTVPADCLPVLGEIMTRCWDADPEVRPCFAEIVNLLEAAETEIMTNVRKARFRCCMTQPMTVD

SEQ ID NO: 43169 - protein, 374 aa, Arabidopsis thaliana
  peptide (1)..(374): Ceres Seq. ID no. 13490975
  misc_feature (17)..(374): Homolog of NCBI NO: 29367355 NR Description: serine/thronine protein kinase-like protein
  misc_feature (1)..(374): Homolog of NCBI NO: 28864539 NR Description: serine/threonine protein kinase
  misc_feature (1)..(374): Homolog of NCBI NO: 27085282 NR Description: serine/threonine protein kinase
  misc_feature (1)..(374): Homolog of NCBI NO: 14571547 NR Description: serine/threonine protein kinase [Triticum
  misc_feature (1)..(374): Homolog of NCBI NO: 13124865 NR Description: serine/threonine/tyrosine kinase [Arachis
  misc_feature (1)..(374): Homolog of NCBI NO: 27085280 NR Description: serine/threonine protein kinase
  misc_feature (1)..(374): Homolog of NCBI NO: 27085278 NR Description: serine/threonine protein kinase
  misc_feature (1)..(374): Homolog of NCBI NO: 25287646 NR Description: probable protein kinase [imported] - Arabidopsis
  misc_feature (1)..(374): Homolog of NCBI NO: 18400528 NR Description: serine/threonine/tyrosine kinase, putative
  misc_feature (1)..(374): Homolog of NCBI NO: 15235845 NR Description: protein kinase family [Arabidopsis thaliana]
MSVDSMQTSNAGGSVSMSVDNSSVGSSDALIGHPGLKPMRHPYSLSDGQSVFRPGKVTHALNDDALAQALMDSKYPTEGLVNYEEWTIDLRKLHMGPAFAQGAFGKLYRGTYNGEDVAIKLLERSDSNPEKAQALEQQFQQEVSMLAFLKHPNIVRFIGACIKPMVWCIVTEYAKGGSVRQFLTKRQNRAVPLKLAVMQALDVARGMAYVHERNFIHRDLKSDNLLISADRSIKIADFGVARIEVQTEGMTPETGTYRWMAPEMIQHRPYTQKVDVYSFGIVLWELITGLLPFQNMTAVQAAFAVVNRGVRPTVPADCLPVLGEIMTRCWDADPEVRPCFAEIVNLLEAAETEIMTNVRKARFRCCMTQPMTVD

SEQ ID NO: 43170 - protein, 369 aa, Arabidopsis thaliana
  peptide (1)..(369): Ceres Seq. ID no. 13490976
  misc_feature (12)..(369): Homolog of NCBI NO: 29367355 NR Description: serine/thronine protein kinase-like protein
  misc_feature (1)..(369): Homolog of NCBI NO: 28864539 NR Description: serine/threonine protein kinase
  misc_feature (1)..(369): Homolog of NCBI NO: 27085282 NR Description: serine/threonine protein kinase
  misc_feature (1)..(369): Homolog of NCBI NO: 14571547 NR Description: serine/threonine protein kinase [Triticum
  misc_feature (1)..(369): Homolog of NCBI NO: 13124865 NR Description: serine/threonine/tyrosine kinase [Arachis
  misc_feature (1)..(369): Homolog of NCBI NO: 27085280 NR Description: serine/threonine protein kinase
  misc_feature (1)..(369): Homolog of NCBI NO: 27085278 NR Description: serine/threonine protein kinase
  misc_feature (1)..(369): Homolog of NCBI NO: 25287646 NR Description: probable protein kinase [imported] - Arabidopsis
  misc_feature (1)..(369): Homolog of NCBI NO: 18400528 NR Description: serine/threonine/tyrosine kinase, putative
  misc_feature (1)..(369): Homolog of NCBI NO: 15235845 NR Description: protein kinase family [Arabidopsis thaliana]
MQTSNAGGSVSMSVDNSSVGSSDALIGHPGLKPMRHPYSLSDGQSVFRPGKVTHALNDDALAQALMDSKYPTEGLVNYEEWTIDLRKLHMGPAFAQGAFGKLYRGTYNGEDVAIKLLERSDSNPEKAQALEQQFQQEVSMLAFLKHPNIVRFIGACIKPMVWCIVTEYAKGGSVRQFLTKRQNRAVPLKLAVMQALDVARGMAYVHERNFIHRDLKSDNLLISADRSIKIADFGVARIEVQTEGMTPETGTYRWMAPEMIQHRPYTQKVDVYSFGIVLWELITGLLPFQNMTAVQAAFAVVNRGVRPTVPADCLPVLGEIMTRCWDADPEVRPCFAEIVNLLEAAETEIMTNVRKARFRCCMTQPMTVD

SEQ ID NO: 43171 - DNA, 1329 bp, Arabidopsis thaliana
  misc_feature (1)..(1329): Ceres Seq. ID no. 12395656
  misc_feature: MA Experiment ID: 108434 Result: Up-regulated in Transcription
  misc_feature: MA Experiment 108434 PARAMETER Experiment Name: At_Root_Tips_cDNA_P Parameter: Tissue Value: Root Tips
  misc_feature: MA Experiment ID: 108576 Result: Up-regulated in Transcription
  misc_feature: MA Experiment 108576 PARAMETER Experiment Name: At_42deg_Heat_cDNA_P Parameter: Temperature (deg C) Value: 42 vs. 22
  misc_feature: MA Experiment 108576 PARAMETER Experiment Name: At_42deg_Heat_cDNA_P Parameter: Timepoint (hr) Value: 1
  misc_feature: MA Experiment 108576 PARAMETER Experiment Name: At_42deg_Heat_cDNA_P Parameter: Tissue Value: Aerial
  misc_feature: MA Experiment ID: 20000093 Result: Up-regulated in Transcription
  misc_feature: MA Experiment 20000093 PARAMETER Experiment Name: At_42deg_Heat_cDNA_P Parameter: Temperature (deg C) Value: 42 vs. 22
  misc_feature: MA Experiment 20000093 PARAMETER Experiment Name: At_42deg_Heat_cDNA_P Parameter: Timepoint (hr) Value: 0.5
  misc_feature: MA Experiment 20000093 PARAMETER Experiment Name: At_42deg_Heat_cDNA_P Parameter: Tissue Value: Aerial
  misc_feature: MA Experiment ID: 20000111 Result: Up-regulated in Transcription
  misc_feature: MA Experiment 20000111 PARAMETER Experiment Name: At_42deg_Heat_cDNA_P Parameter: Temperature (deg C) Value: 42 vs. 22
  misc_feature: MA Experiment 20000111 PARAMETER Experiment Name: At_42deg_Heat_cDNA_P Parameter: Timepoint (hr) Value: 6
  misc_feature: MA Experiment 20000111 PARAMETER Experiment Name: At_42deg_Heat_cDNA_P Parameter: Tissue Value: Aerial
  misc_feature: MA Experiment ID: 20000112 Result: Up-regulated in Transcription
  misc_feature: MA Experiment 20000112 PARAMETER Experiment Name: At_42deg_Heat_cDNA_P Parameter: Temperature (deg C) Value: 42 vs. 22
  misc_feature: MA Experiment 20000112 PARAMETER Experiment Name: At_42deg_Heat_cDNA_P Parameter: Timepoint (hr) Value: 2
  misc_feature: MA Experiment 20000112 PARAMETER Experiment Name: At_42deg_Heat_cDNA_P Parameter: Tissue Value: Aerial
  misc_feature: MA Experiment ID: 20000113 Result: Up-regulated in Transcription
  misc_feature: MA Experiment 20000113 PARAMETER Experiment Name: At_42deg_Heat_cDNA_P Parameter: Temperature (deg C) Value: 42 vs. 22
  misc_feature: MA Experiment 20000113 PARAMETER Experiment Name: At_42deg_Heat_cDNA_P Parameter: Timepoint (hr) Value: 8
  misc_feature: MA Experiment 20000113 PARAMETER Experiment Name: At_42deg_Heat_cDNA_P Parameter: Tissue Value: Aerial
  misc_feature: MA Experiment ID: 20000144 Result: Up-regulated in Transcription
  misc_feature: MA Experiment 20000144 PARAMETER Experiment Name: At_42deg_Heat_cDNA_P Parameter: Temperature (deg C) Value: 42 vs. 22
  misc_feature: MA Experiment 20000144 PARAMETER Experiment Name: At_42deg_Heat_cDNA_P Parameter: Timepoint (hr) Value: 1
  misc_feature: MA Experiment 20000144 PARAMETER Experiment Name: At_42deg_Heat_cDNA_P Parameter: Tissue Value: Aerial
  misc_feature: MA Experiment ID: 20000166 Result: Up-regulated in Transcription
  misc_feature: MA Experiment 20000166 PARAMETER Experiment Name: At_100uM_ABA_P Parameter: Age (day) Value: 14
  misc_feature: MA Experiment 20000166 PARAMETER Experiment Name: At_100uM_ABA_P Parameter: Organism Value: A. thaliana
  misc_feature: MA Experiment 20000166 PARAMETER Experiment Name: At_100uM_ABA_P Parameter: Plant Line Value: WS
  misc_feature: MA Experiment 20000166 PARAMETER Experiment Name: At_100uM_ABA_P Parameter: Timepoint (hr) Value: 1
  misc_feature: MA Experiment 20000166 PARAMETER Experiment Name: At_100uM_ABA_P Parameter: Tissue Value: Aerial
  misc_feature: MA Experiment 20000166 PARAMETER Experiment Name: At_100uM_ABA_P Parameter: Treatment Value: 100uM ABA vs. No Treatment
  misc_feature: MA Experiment ID: 20000171 Result: Up-regulated in Transcription
  misc_feature: MA Experiment 20000171 PARAMETER Experiment Name: At_42deg_Heat_P Parameter: Age (day) Value: 14
  misc_feature: MA Experiment 20000171 PARAMETER Experiment Name: At_42deg_Heat_P Parameter: Organism Value: A. thaliana
  misc_feature: MA Experiment 20000171 PARAMETER Experiment Name: At_42deg_Heat_P Parameter: Plant Line Value: WS
  misc_feature: MA Experiment 20000171 PARAMETER Experiment Name: At_42deg_Heat_P Parameter: Temperature (deg C) Value: 42 vs. 22
  misc_feature: MA Experiment 20000171 PARAMETER Experiment Name: At_42deg_Heat_P Parameter: Timepoint (hr) Value: 1
  misc_feature: MA Experiment 20000171 PARAMETER Experiment Name: At_42deg_Heat_P Parameter: Tissue Value: Aerial
  misc_feature: MA Experiment ID: 20000173 Result: Up-regulated in Transcription
  misc_feature: MA Experiment 20000173 PARAMETER Experiment Name: At_42deg_Heat_P Parameter: Age (day) Value: 14
  misc_feature: MA Experiment 20000173 PARAMETER Experiment Name: At_42deg_Heat_P Parameter: Organism Value: A. thaliana
  misc_feature: MA Experiment 20000173 PARAMETER Experiment Name: At_42deg_Heat_P Parameter: Plant Line Value: WS
  misc_feature: MA Experiment 20000173 PARAMETER Experiment Name: At_42deg_Heat_P Parameter: Temperature (deg C) Value: 42 vs. 22
  misc_feature: MA Experiment 20000173 PARAMETER Experiment Name: At_42deg_Heat_P Parameter: Timepoint (hr) Value: 6
  misc_feature: MA Experiment 20000173 PARAMETER Experiment Name: At_42deg_Heat_P Parameter: Tissue Value: Aerial
  misc_feature: MA Experiment ID: 20000227 Result: Down-regulated in Transcription
  misc_feature: MA Experiment 20000227 PARAMETER Experiment Name: At_Root-Tips-vs-Tops_P Parameter: Tissue Value: Root Tips vs. Root Tops
agtgttgatttctctcctcttggcttatgagtttcgaattcgaatctcaaactaaaaagctttttgaaacaagcaacaaatgttactgacacctaagatgtttagttcttggcttcgacaagatgtgaagaagatcctcaaacgcaaagacagtgatgctggtgaacgaggaaaagcattggaggacttgagagcatcgttattcaacagattccgttcaccggaaactccaaagagacagcaacaacaacaacatcgtatctgtggcccaactgttgctcttactttcaatttcgttgttgctattagcattatcttcatgaacaaatgggttcttaaaaatataggctttgagtttccagtgttcctcacattcattcactacattgtagcttatctactaatggctcttctcaaatccttttcgctccttcctgcttcaccgccttccacgaaatcatcgttgcttccgctctatactcttggcattgtaatgtcactctctacaggactagctaatgttagccttaagtataacagtgttggattctaccagatggcgaaaattgctgttacgccttctatcgtgtttgcagagttcttgtggtatagaaagagagtttctttcatgaaggtggtatcacttacagttgtatctgtgggagttgcggttgcgactgtaacagatttacagtttagtctgtttggtgcttgtgtagcattcgcatggatcataccaagcgcaactaacaaaatcttgtggtctaatatgcagcaacgagaaaactggactgctttggcgttgatgtggaaaacgacgccaatcactctgttgtttcttgtatcgatgattccgttcttggatccgcccggtgctctatcgttcaattggagcttaaccaacacatctgccattcttgtttctgctcttctcggattctttcttcaatggtcaggagccttagctctaggagcaacttctgcaattacgcatgtggtgctaggacagttcaagacttgtgtcctcctccttggaaactactacattttcgggtcgaatagtggtttcattagcgttggcggtgcgtttgtggcgattatgggaacttcgttatatacataccttaacacgagaggtcaatctcttaaaacttcgtcttcttcttctgctctctcggagaagaagtcaagattcagtgatcttaaggatgatgacaagaatcttgaaccttacggctccgaagctgtctagtctaggctaacttttgtattatatagttttgattattccacattacattagattctaattccaactttttgtttttg

SEQ ID NO: 43172 - protein, 390 aa, Arabidopsis thaliana
  peptide (1)..(390): Ceres Seq. ID no. 12395657
  misc_feature (78)..(201): Pfam Name: Integral membrane protein DUF6 Pfam Description: Integral membrane protein DUF6
  misc_feature (63)..(389): Homolog of NCBI NO: 13384378 NR Description: putative phosphate translocator
  misc_feature (63)..(390): Homolog of NCBI NO: 13699188 NR Description: putative glucose-6-phosphate/phosphate-tranlocat
  misc_feature (67)..(381): Homolog of NCBI NO: 30683853 NR Description: transporter-related [Arabidopsis thaliana]
  misc_feature (63)..(374): Homolog of NCBI NO: 22329373 NR Description: unknown protein
  misc_feature (63)..(390): Homolog of NCBI NO: 34896140 NR Description: P0701D05.25 [Oryza sativa (japonica
  misc_feature (7)..(361): Homolog of NCBI NO: 21593061 NR Description: unknown [Arabidopsis thaliana]
  misc_feature (7)..(361): Homolog of NCBI NO: 15241097 NR Description: putative protein
  misc_feature (7)..(390): Homolog of NCBI NO: 21553668 NR Description: unknown [Arabidopsis thaliana]
  misc_feature (1)..(390): Homolog of NCBI NO: 27808610 NR Description: At5g57100 [Arabidopsis thaliana]
  misc_feature (1)..(390): Homolog of NCBI NO: 15242035 NR Description: putative protein
MLLTPKMFSSWLRQDVKKILKRKDSDAGERGKALEDLRASLFNRFRSPETPKRQQQQQHRICGPTVALTFNFVVAISIIFMNKWVLKNIGFEFPVFLTFIHYIVAYLLMALLKSFSLLPASPPSTKSSLLPLYTLGIVMSLSTGLANVSLKYNSVGFYQMAKIAVTPSIVFAEFLWYRKRVSFMKVVSLTVVSVGVAVATVTDLQFSLFGACVAFAWIIPSATNKILWSNMQQRENWTALALMWKTTPITLLFLVSMIPFLDPPGALSFNWSLTNTSAILVSALLGFFLQWSGALALGATSAITHVVLGQFKTCVLLLGNYYIFGSNSGFISVGGAFVAIMGTSLYTYLNTRGQSLKTSSSSSALSEKKSRFSDLKDDDKNLEPYGSEAV

SEQ ID NO: 43173 - protein, 384 aa, Arabidopsis thaliana
  peptide (1)..(384): Ceres Seq. ID no. 12395658
  misc_feature (72)..(195): Pfam Name: Integral membrane protein DUF6 Pfam Description: Integral membrane protein DUF6
  misc_feature (57)..(383): Homolog of NCBI NO: 13384378 NR Description: putative phosphate translocator
  misc_feature (57)..(384): Homolog of NCBI NO: 13699188 NR Description: putative glucose-6-phosphate/phosphate-tranlocat
  misc_feature (61)..(375): Homolog of NCBI NO: 30683853 NR Description: transporter-related [Arabidopsis thaliana]
  misc_feature (57)..(368): Homolog of NCBI NO: 22329373 NR Description: unknown protein
  misc_feature (57)..(384): Homolog of NCBI NO: 34896140 NR Description: P0701D05.25 [Oryza sativa (japonica
  misc_feature (1)..(355): Homolog of NCBI NO: 21593061 NR Description: unknown [Arabidopsis thaliana]
  misc_feature (1)..(355): Homolog of NCBI NO: 15241097 NR Description: putative protein
  misc_feature (1)..(384): Homolog of NCBI NO: 21553668 NR Description: unknown [Arabidopsis thaliana]
  misc_feature (1)..(384): Homolog of NCBI NO: 27808610 NR Description: At5g57100 [Arabidopsis thaliana]
  misc_feature (1)..(384): Homolog of NCBI NO: 15242035 NR Description: putative protein
MFSSWLRQDVKKILKRKDSDAGERGKALEDLRASLFNRFRSPETPKRQQQQQHRICGPTVALTFNFVVAISIIFMNKWVLKNIGFEFPVFLTFIHYIVAYLLMALLKSFSLLPASPPSTKSSLLPLYTLGIVMSLSTGLANVSLKYNSVGFYQMAKIAVTPSIVFAEFLWYRKRVSFMKVVSLTVVSVGVAVATVTDLQFSLFGACVAFAWIIPSATNKILWSNMQQRENWTALALMWKTTPITLLFLVSMIPFLDPPGALSFNWSLTNTSAILVSALLGFFLQWSGALALGATSAITHVVLGQFKTCVLLLGNYYIFGSNSGFISVGGAFVAIMGTSLYTYLNTRGQSLKTSSSSSALSEKKSRFSDLKDDDKNLEPYGSEAV

SEQ ID NO: 43174 - protein, 310 aa, Arabidopsis thaliana
  peptide (1)..(310): Ceres Seq. ID no. 12395659
  misc_feature (1)..(121): Pfam Name: Integral membrane protein DUF6 Pfam Description: Integral membrane protein DUF6
  misc_feature (1)..(309): Homolog of NCBI NO: 13384378 NR Description: putative phosphate translocator
  misc_feature (1)..(310): Homolog of NCBI NO: 13699188 NR Description: putative glucose-6-phosphate/phosphate-tranlocat
  misc_feature (1)..(301): Homolog of NCBI NO: 30683853 NR Description: transporter-related [Arabidopsis thaliana]
  misc_feature (1)..(294): Homolog of NCBI NO: 22329373 NR Description: unknown protein
  misc_feature (1)..(310): Homolog of NCBI NO: 34896140 NR Description: P0701D05.25 [Oryza sativa (japonica
  misc_feature (1)..(281): Homolog of NCBI NO: 21593061 NR Description: unknown [Arabidopsis thaliana]
  misc_feature (1)..(281): Homolog of NCBI NO: 15241097 NR Description: putative protein
  misc_feature (1)..(310): Homolog of NCBI NO: 21553668 NR Description: unknown [Arabidopsis thaliana]
  misc_feature (1)..(310): Homolog of NCBI NO: 27808610 NR Description: At5g57100 [Arabidopsis thaliana]
  misc_feature (1)..(310): Homolog of NCBI NO: 15242035 NR Description: putative protein
MNKWVLKNIGFEFPVFLTFIHYIVAYLLMALLKSFSLLPASPPSTKSSLLPLYTLGIVMSLSTGLANVSLKYNSVGFYQMAKIAVTPSIVFAEFLWYRKRVSFMKVVSLTVVSVGVAVATVTDLQFSLFGACVAFAWIIPSATNKILWSNMQQRENWTALALMWKTTPITLLFLVSMIPFLDPPGALSFNWSLTNTSAILVSALLGFFLQWSGALALGATSAITHVVLGQFKTCVLLLGNYYIFGSNSGFISVGGAFVAIMGTSLYTYLNTRGQSLKTSSSSSALSEKKSRFSDLKDDDKNLEPYGSEAV

SEQ ID NO: 43175 - DNA, 1182 bp, Arabidopsis thaliana
  misc_feature (1)..(1182): Ceres Seq. ID no. 13490977
  misc_feature: MA Experiment ID: 108461 Result: Up-regulated in Transcription
  misc_feature: MA Experiment 108461 PARAMETER Experiment Name: At_Germinating_Seeds_cDNA_P Parameter: Age (day) Value: 1 vs. 0
  misc_feature: MA Experiment 108461 PARAMETER Experiment Name: At_Germinating_Seeds_cDNA_P Parameter: Tissue Value: Germinating Seeds
  misc_feature: MA Experiment ID: 108462 Result: Up-regulated in Transcription
  misc_feature: MA Experiment 108462 PARAMETER Experiment Name: At_Germinating_Seeds_cDNA_P Parameter: Age (day) Value: 2 vs. 0
  misc_feature: MA Experiment 108462 PARAMETER Experiment Name: At_Germinating_Seeds_cDNA_P Parameter: Tissue Value: Germinating Seeds
  misc_feature: MA Experiment ID: 108463 Result: Up-regulated in Transcription
  misc_feature: MA Experiment 108463 PARAMETER Experiment Name: At_Germinating_Seeds_cDNA_P Parameter: Age (day) Value: 3 vs. 0
  misc_feature: MA Experiment 108463 PARAMETER Experiment Name: At_Germinating_Seeds_cDNA_P Parameter: Tissue Value: Germinating Seeds
  misc_feature: MA Experiment ID: 108464 Result: Up-regulated in Transcription
  misc_feature: MA Experiment 108464 PARAMETER Experiment Name: At_Germinating_Seeds_cDNA_P Parameter: Age (day) Value: 4 vs. 0
  misc_feature: MA Experiment 108464 PARAMETER Experiment Name: At_Germinating_Seeds_cDNA_P Parameter: Tissue Value: Germinating Seeds
  misc_feature: MA Experiment ID: 108595 Result: Down-regulated in Transcription
  misc_feature: MA Experiment 108595 PARAMETER Experiment Name: At_Ler-pi_Ovule_cDNA_P Parameter: Plant Line Value: null
  misc_feature: MA Experiment ID: 20000180 Result: Up-regulated in Transcription
  misc_feature: MA Experiment 20000180 PARAMETER Experiment Name: At_Germinating_Seeds_P Parameter: Age (hr) Value: 24 vs. 0
  misc_feature: MA Experiment 20000180 PARAMETER Experiment Name: At_Germinating_Seeds_P Parameter: Tissue Value: Germinating Seeds
  misc_feature: MA Experiment ID: 20001557 Result: Down-regulated in Transcription
  misc_feature: MA Experiment 20001557 PARAMETER Experiment Name: At_Drought_Soil_Dry_P Parameter: Age (day) Value: 27
  misc_feature: MA Experiment 20001557 PARAMETER Experiment Name: At_Drought_Soil_Dry_P Parameter: Organism Value: A. thaliana
  misc_feature: MA Experiment 20001557 PARAMETER Experiment Name: At_Drought_Soil_Dry_P Parameter: Plant Line Value: WS
  misc_feature: MA Experiment 20001557 PARAMETER Experiment Name: At_Drought_Soil_Dry_P Parameter: Post Timepoint (hr) Value: 3
  misc_feature: MA Experiment 20001557 PARAMETER Experiment Name: At_Drought_Soil_Dry_P Parameter: Post-Treatment Value: Re-Water vs. No Drought
  misc_feature: MA Experiment 20001557 PARAMETER Experiment Name: At_Drought_Soil_Dry_P Parameter: Timepoint (day) Value: 13
  misc_feature: MA Experiment 20001557 PARAMETER Experiment Name: At_Drought_Soil_Dry_P Parameter: Treatment Value: Drought vs. No Drought
  misc_feature: MA Experiment ID: 20001558 Result: Down-regulated in Transcription
  misc_feature: MA Experiment 20001558 PARAMETER Experiment Name: At_Drought_Soil_Dry_P Parameter: Age (day) Value: 27
  misc_feature: MA Experiment 20001558 PARAMETER Experiment Name: At_Drought_Soil_Dry_P Parameter: Organism Value: A. thaliana
  misc_feature: MA Experiment 20001558 PARAMETER Experiment Name: At_Drought_Soil_Dry_P Parameter: Plant Line Value: WS
  misc_feature: MA Experiment 20001558 PARAMETER Experiment Name: At_Drought_Soil_Dry_P Parameter: Post Timepoint (hr) Value: 6
  misc_feature: MA Experiment 20001558 PARAMETER Experiment Name: At_Drought_Soil_Dry_P Parameter: Post-Treatment Value: Re-Water vs. No Drought
  misc_feature: MA Experiment 20001558 PARAMETER Experiment Name: At_Drought_Soil_Dry_P Parameter: Timepoint (day) Value: 13
  misc_feature: MA Experiment 20001558 PARAMETER Experiment Name: At_Drought_Soil_Dry_P Parameter: Treatment Value: Drought vs. No Drought
agattaagtcttcttcgtcatcttcgagtgtgagtggatccagagagagaattagatatttccgacacgaggcaaattcctagtggctcatggcgtcatcatctgatcacacggcgaagataatcgacggcaaggcgattgctcataccatcagatcagagatcgccgaggaagttcgcggtctatctgagaaacacggcaaggtcccaggactagctgtagttattgttgggagccgaaaggattcacagacctatgtgaatacgaagaggaaagcgtgcgctgaggttgggattaagtcatttgacgtgggcctaccagaggaagtttctgaagctgatcttattagcaaagttcatgaactaaattcaaatccggatgtccatggcatattagttcaactcccattgccgaaacatattaatgaggagaatatattgggtgcaatcagcattgataaagatgtcgatggcttccatcctttgaatattggtaagctagccatgaaaggcagagaacccctcttccttccttgcaccccaaagggatgtttggaactcctagctagaagcggcgtaaagataaaggggcaacgagcagttgttgtaggtcggagtaacattgttggtttgcccgtttcacttcttttgctcaaggctgatgctactgtcacaactgtacattctcacaccaaggatcctgaggctatcatacgggaagctgacattgttattgctgcatgcggacaagcccacatgattaagggcaactggataaagccaggggctgcagtaattgatgttggaactaatgcagtcagcgacccgagcaagaaatcaggataccggttggttggagatgttgatttcgcagaagcttcaaaagttgcaggtttcataactccggtccctggtggtgtaggcccaatgacagtggcaatgcttctcaggaacaccgtagacggtgccaagcgtgtctttggcgagtaaaacaatctactgtatgtaataaagaaaccaagagtttctccattctgtaattgtgtacttggcttgacgatatttttccactcaaataaattgaaattggcgttccctttggattaccttacattgttctgcaactagctagaacgattatttccgcaattcagttaaatacaagggtgtcatcatgtgaccc

SEQ ID NO: 43176 - protein, 299 aa, Arabidopsis thaliana; identical to SEQ ID NO: 35869
  peptide (1)..(299): Ceres Seq. ID no. 13490978
  misc_feature (129)..(297): Pfam Name: Tetrahydrofolate dehydrogenase/cyclohydrolase, Pfam Description: Tetrahydrofolate dehydrogenase/cyclohydrolase,
  misc_feature (9)..(295): Homolog of NCBI NO: 17137370 NR Description: pugilist CG4067-PA [Drosophila melanogaster]
  misc_feature (9)..(295): Homolog of NCBI NO: 23001349 NR Description: hypothetical protein [Magnetococcus sp. MC-1]
  misc_feature (9)..(295): Homolog of NCBI NO: 9992889 NR Description: C1-THFS protein [Yarrowia lipolytica]
  misc_feature (11)..(297): Homolog of NCBI NO: 30687594 NR Description: tetrahydrofolate dehydrogenase/cyclohydrolase,
  misc_feature (11)..(297): Homolog of NCBI NO: 25284864 NR Description: methylenetetrahydrofolate dehydrogenase
  misc_feature (3)..(296): Homolog of NCBI NO: 15236888 NR Description: tetrahydrofolate dehydrogenase/cyclohydrolase,
  misc_feature (9)..(295): Homolog of NCBI NO: 12083525 NR Description: similar to Pisum sativum
  misc_feature (9)..(299): Homolog of NCBI NO: 11252953 NR Description: methylenetetrahydrofolate dehydrogenase (NADP)
  misc_feature (1)..(299): Homolog of NCBI NO: 15230449 NR Description: tetrahydrofolate dehydrogenase/cyclohydrolase,
  misc_feature (1)..(299): Homolog of NCBI NO: 21553669 NR Description: 5,10-methylenetetrahydrofolate

SEQ ID NO: 43177 - protein, 161 aa, Arabidopsis thaliana; identical to SEQ ID NO: 35870
  peptide (1)..(161): Ceres Seq. ID no. 13490979
  misc_feature (1)..(159): Pfam Name: Tetrahydrofolate dehydrogenase/cyclohydrolase, Pfam Description: Tetrahydrofolate dehydrogenase/cyclohydrolase,
  misc_feature (1)..(157): Homolog of NCBI NO: 17137370 NR Description: pugilist CG4067-PA [Drosophila melanogaster]
  misc_feature (1)..(157): Homolog of NCBI NO: 23001349 NR Description: hypothetical protein [Magnetococcus sp. MC-1]
  misc_feature (1)..(157): Homolog of NCBI NO: 9992889 NR Description: C1-THFS protein [Yarrowia lipolytica]
  misc_feature (1)..(159): Homolog of NCBI NO: 30687594 NR Description: tetrahydrofolate dehydrogenase/cyclohydrolase,
  misc_feature (1)..(159): Homolog of NCBI NO: 25284864 NR Description: methylenetetrahydrofolate dehydrogenase
  misc_feature (1)..(158): Homolog of NCBI NO: 15236888 NR Description: tetrahydrofolate dehydrogenase/cyclohydrolase,
  misc_feature (1)..(157): Homolog of NCBI NO: 12083525 NR Description: similar to Pisum sativum
  misc_feature (1)..(161): Homolog of NCBI NO: 11252953 NR Description: methylenetetrahydrofolate dehydrogenase (NADP)
  misc_feature (1)..(161): Homolog of NCBI NO: 15230449 NR Description: tetrahydrofolate dehydrogenase/cyclohydrolase,
  misc_feature (1)..(161): Homolog of NCBI NO: 21553669 NR Description: 5,10-methylenetetrahydrofolate

SEQ ID NO: 43178 - DNA, 1564 bp, Arabidopsis thaliana
  misc_feature (1)..(1564): Ceres Seq. ID no. 12337540
  misc_feature: MA Experiment ID: 108434 Result: Up-regulated in Transcription
  misc_feature: MA Experiment 108434 PARAMETER Experiment Name: At_Root_Tips_cDNA_P Parameter: Tissue Value: Root Tips
  misc_feature: MA Experiment ID: 108463 Result: Down-regulated in Transcription
  misc_feature: MA Experiment 108463 PARAMETER Experiment Name: At_Germinating_Seeds_cDNA_P Parameter: Age (day) Value: 3 vs. 0
  misc_feature: MA Experiment 108463 PARAMETER Experiment Name: At_Germinating_Seeds_cDNA_P Parameter: Tissue Value: Germinating Seeds
  misc_feature: MA Experiment ID: 108595 Result: Down-regulated in Transcription
  misc_feature: MA Experiment 108595 PARAMETER Experiment Name: At_Ler-pi_Ovule_cDNA_P Parameter: Plant Line Value: null
  misc_feature: MA Experiment ID: 20000087 Result: Down-regulated in Transcription
  misc_feature: MA Experiment 20000087 PARAMETER Experiment Name: At_100uM_ABA_Mutants_cDNA_P Parameter: Plant Line Value: WS
  misc_feature: MA Experiment 20000087 PARAMETER Experiment Name: At_100uM_ABA_Mutants_cDNA_P Parameter: Timepoint (hr) Value: 6
  misc_feature: MA Experiment 20000087 PARAMETER Experiment Name: At_100uM_ABA_Mutants_cDNA_P Parameter: Tissue Value: Aerial
  misc_feature: MA Experiment 20000087 PARAMETER Experiment Name: At_100uM_ABA_Mutants_cDNA_P Parameter: Treatment Value: 100uM ABA vs. No Treatment
  misc_feature: MA Experiment ID: 20000117 Result: Down-regulated in Transcription
  misc_feature: MA Experiment 20000117 PARAMETER Experiment Name: At_100uM_ABA_Mutants_cDNA_P Parameter: Plant Line Value: Columbia
  misc_feature: MA Experiment 20000117 PARAMETER Experiment Name: At_100uM_ABA_Mutants_cDNA_P Parameter: Timepoint (hr) Value: 6
  misc_feature: MA Experiment 20000117 PARAMETER Experiment Name: At_100uM_ABA_Mutants_cDNA_P Parameter: Tissue Value: Aerial
  misc_feature: MA Experiment 20000117 PARAMETER Experiment Name: At_100uM_ABA_Mutants_cDNA_P Parameter: Treatment Value: 100uM ABA vs. No Treatment
  misc_feature: MA Experiment ID: 20001451 Result: Down-regulated in Transcription
  misc_feature: MA Experiment 20001451 PARAMETER Experiment Name: At_Far-red-induction_P Parameter: Age (day) Value: 7
  misc_feature: MA Experiment 20001451 PARAMETER Experiment Name: At_Far-red-induction_P Parameter: Light Value: Far-red vs. White
  misc_feature: MA Experiment 20001451 PARAMETER Experiment Name: At_Far-red-induction_P Parameter: Organism Value: A. thaliana
  misc_feature: MA Experiment 20001451 PARAMETER Experiment Name: At_Far-red-induction_P Parameter: Plant Line Value: Columbia
  misc_feature: MA Experiment 20001451 PARAMETER Experiment Name: At_Far-red-induction_P Parameter: Timepoint (hr) Value: 24
  misc_feature: MA Experiment 20001451 PARAMETER Experiment Name: At_Far-red-induction_P Parameter: Tissue Value: Whole Plant
cttgcgttttcgtcccacaatctttgtcgtggttttctgctgtcttcttctccgtcgaacttctccgaccacttcgtatagagagagagagtgacgaagagtttacggaatcgaatccaataatgagtactgcgtcggcttttagttcaatccaaggatgctggttcaagggcgaaaggaaaattcgtgtagcggataagcgagccaagaggcttactttgggatcccatgtggcttcgccatcttcaatgagcttcagagtttcagctagtagttctgttaaacctgaaaaggatattaggattggtcttcttggtgcaagtggctacactggtgctgagatcgttaggcttcttgcaaatcatccgcatttccaggtcactttgatgactgctgatagaaaagctggccagtcaatggaaagcgttttcccacacctgagagctcaaaaactacctactttggtctcggtaaaggatgcagatttttctactgtggatgctgtattctgctgtttacctcacggaacaactcaggaaatcatcaaggaactgcctactgcattgaaaatcgttgatctttcagcggacttccggttgcgtaatattgcagaatatgaagaatggtatggtcagcctcacaaggcagtagagttacagaaagaagttgtgtatggtctaacagagatactaagggaggacataaaaaaggcacgacttgtggctaacccaggctgttacccgactacgattcaacttcctcttgttcctttactaaaggcaaatctcatcaaacatgaaaacatcattatcgatgcaaaatctggtgttagtggagcaggacgtggtgctaaggaggcaaatctttactctgagatagctgaaggcatttcttcttatggtgtcacccgtcatcgccatgttcctgaaattgaacagggattatctgatgttgcacagtcaaaagtaacagtcagttttacgccacatctcatgccaatgatccgtggaatgcaatcgactatatatgtggaaatggctcccggggttagaaccgaagatttacaccagcaattgaagacgtcttatgaggatgaagaatttgtcaaagtgttggatgaaggagttgttcctcggacacacaacgttagaggatccaactattgtcatatgagtgtctttcctgatcgaattcctggaagagctatcataatctcagtgattgataatcttgtgaaaggagcttcgggacaagcgttgcagaatcttaacataatgttgggatatcccgaaacaacggggctcctacaccagccgcttttcccttaaaaatcccacctttaaatcgatgaccaatctgaagctgttgagacggcaatgttaagcataaagatggttggttatatgattcatatttatagacaataaagcctcttcttttaccattacaaataaatggttttgttgtttgtttattaaggttttgatgaacctttattcttgttatctctattttctgaattgcaattttcgtttgagtcacaaaagaaagttgaacttattcc

SEQ ID NO: 43179 - protein, 441 aa, Arabidopsis thaliana
  peptide (1)..(441): Ceres Seq. ID no. 12337541
  misc_feature (254)..(412): Pfam Name: Semialdehyde dehydrogenase, dimerisation domain Pfam Description: Semialdehyde dehydrogenase, dimerisation domain
  misc_feature (97)..(441): Homolog of NCBI NO: 22998260 NR Description: hypothetical protein [Magnetococcus sp. MC-1]
  misc_feature (101)..(441): Homolog of NCBI NO: 22956652 NR Description: hypothetical protein [Rhodobacter sphaeroides]
  misc_feature (100)..(441): Homolog of NCBI NO: 28376951 NR Description: N-acetyl-gamma-glutamyl-phosphate reductase (N-acetyl-glutamate semialdehyde dehydrogenase) (NAGSA
  misc_feature (83)..(441): Homolog of NCBI NO: 6714965 NR Description: N-acetyl-gamma-glutamyl-phosphate reductase
  misc_feature (167)..(441): Homolog of NCBI NO: 23013472 NR Description: hypothetical protein [Magnetospirillum
  misc_feature (99)..(441): Homolog of NCBI NO: 22968389 NR Description: hypothetical protein [Rhodospirillum rubrum]
  misc_feature (71)..(441): Homolog of NCBI NO: 37535658 NR Description: putative N-acetyl-gamma-glutamyl-phosphate
  misc_feature (63)..(441): Homolog of NCBI NO: 25284367 NR Description: hypothetical protein At2g19940 [imported] -
  misc_feature (83)..(441): Homolog of NCBI NO: 18399202 NR Description: putative N-acetyl-gamma-glutamyl-phosphate
  misc_feature (41)..(441): Homolog of NCBI NO: 16604368 NR Description: At2g19940/F6F22.3 [Arabidopsis thaliana]
CVFVPQSLSWFSAVFFSVELLRPLRIERESDEEFTESNPIMSTASAFSSIQGCWFKGERKIRVADKRAKRLTLGSHVASPSSMSFRVSASSSVKPEKDIRIGLLGASGYTGAEIVRLLANHPHFQVTLMTADRKAGQSMESVFPHLRAQKLPTLVSVKDADFSTVDAVFCCLPHGTTQEIIKELPTALKIVDLSADFRLRNIAEYEEWYGQPHKAVELQKEVVYGLTEILREDIKKARLVANPGCYPTTIQLPLVPLLKANLIKHENIIIDAKSGVSGAGRGAKEANLYSEIAEGISSYGVTRHRHVPEIEQGLSDVAQSKVTVSFTPHLMPMIRGMQSTIYVEMAPGVRTEDLHQQLKTSYEDEEFVKVLDEGVVPRTHNVRGSNYCHMSVFPDRIPGRAIIISVIDNLVKGASGQALQNLNIMLGYPETTGLLHQPLFP

SEQ ID NO: 43180 - protein, 401 aa, Arabidopsis thaliana
  peptide (1)..(401): Ceres Seq. ID no. 12337542
  misc_feature (214)..(372): Pfam Name: Semialdehyde dehydrogenase, dimerisation domain Pfam Description: Semialdehyde dehydrogenase, dimerisation domain
  misc_feature (57)..(401): Homolog of NCBI NO: 22998260 NR Description: hypothetical protein [Magnetococcus sp. MC-1]
  misc_feature (61)..(401): Homolog of NCBI NO: 22956652 NR Description: hypothetical protein [Rhodobacter sphaeroides]
  misc_feature (60)..(401): Homolog of NCBI NO: 28376951 NR Description: N-acetyl-gamma-glutamyl-phosphate reductase (N-acetyl-glutamate semialdehyde dehydrogenase) (NAGSA
  misc_feature (43)..(401): Homolog of NCBI NO: 6714965 NR Description: N-acetyl-gamma-glutamyl-phosphate reductase
  misc_feature (127)..(401): Homolog of NCBI NO: 23013472 NR Description: hypothetical protein [Magnetospirillum
  misc_feature (59)..(401): Homolog of NCBI NO: 22968389 NR Description: hypothetical protein [Rhodospirillum rubrum]
  misc_feature (31)..(401): Homolog of NCBI NO: 37535658 NR Description: putative N-acetyl-gamma-glutamyl-phosphate
  misc_feature (23)..(401): Homolog of NCBI NO: 25284367 NR Description: hypothetical protein At2g19940 [imported] -
  misc_feature (43)..(401): Homolog of NCBI NO: 18399202 NR Description: putative N-acetyl-gamma-glutamyl-phosphate
  misc_feature (1)..(401): Homolog of NCBI NO: 16604368 NR Description: At2g19940/F6F22.3 [Arabidopsis thaliana]
MSTASAFSSIQGCWFKGERKIRVADKRAKRLTLGSHVASPSSMSFRVSASSSVKPEKDIRIGLLGASGYTGAEIVRLLANHPHFQVTLMTADRKAGQSMESVFPHLRAQKLPTLVSVKDADFSTVDAVFCCLPHGTTQEIIKELPTALKIVDLSADFRLRNIAEYEEWYGQPHKAVELQKEVVYGLTEILREDIKKARLVANPGCYPTTIQLPLVPLLKANLIKHENIIIDAKSGVSGAGRGAKEANLYSEIAEGISSYGVTRHRHVPEIEQGLSDVAQSKVTVSFTPHLMPMIRGMQSTIYVEMAPGVRTEDLHQQLKTSYEDEEFVKVLDEGVVPRTHNVRGSNYCHMSVFPDRIPGRAIIISVIDNLVKGASGQALQNLNIMLGYPETTGLLHQPLFP

SEQ ID NO: 43181 - protein, 359 aa, Arabidopsis thaliana
  peptide (1)..(359): Ceres Seq. ID no. 12337543
  misc_feature (172)..(330): Pfam Name: Semialdehyde dehydrogenase, dimerisation domain Pfam Description: Semialdehyde dehydrogenase, dimerisation domain
  misc_feature (15)..(359): Homolog of NCBI NO: 22998260 NR Description: hypothetical protein [Magnetococcus sp. MC-1]
  misc_feature (19)..(359): Homolog of NCBI NO: 22956652 NR Description: hypothetical protein [Rhodobacter sphaeroides]
  misc_feature (18)..(359): Homolog of NCBI NO: 28376951 NR Description: N-acetyl-gamma-glutamyl-phosphate reductase (N-acetyl-glutamate semialdehyde dehydrogenase) (NAGSA
  misc_feature (1)..(359): Homolog of NCBI NO: 6714965 NR Description: N-acetyl-gamma-glutamyl-phosphate reductase
  misc_feature (85)..(359): Homolog of NCBI NO: 23013472 NR Description: hypothetical protein [Magnetospirillum
  misc_feature (17)..(359): Homolog of NCBI NO: 22968389 NR Description: hypothetical protein [Rhodospirillum rubrum]
  misc_feature (1)..(359): Homolog of NCBI NO: 37535658 NR Description: putative N-acetyl-gamma-glutamyl-phosphate
  misc_feature (1)..(359): Homolog of NCBI NO: 25284367 NR Description: hypothetical protein At2g19940 [imported] -
  misc_feature (1)..(359): Homolog of NCBI NO: 18399202 NR Description: putative N-acetyl-gamma-glutamyl-phosphate
  misc_feature (1)..(359): Homolog of NCBI NO: 16604368 NR Description: At2g19940/F6F22.3 [Arabidopsis thaliana]
MSFRVSASSSVKPEKDIRIGLLGASGYTGAEIVRLLANHPHFQVTLMTADRKAGQSMESVFPHLRAQKLPTLVSVKDADFSTVDAVFCCLPHGTTQEIIKELPTALKIVDLSADFRLRNIAEYEEWYGQPHKAVELQKEVVYGLTEILREDIKKARLVANPGCYPTTIQLPLVPLLKANLIKHENIIIDAKSGVSGAGRGAKEANLYSEIAEGISSYGVTRHRHVPEIEQGLSDVAQSKVTVSFTPHLMPMIRGMQSTIYVEMAPGVRTEDLHQQLKTSYEDEEFVKVLDEGVVPRTHNVRGSNYCHMSVFPDRIPGRAIIISVIDNLVKGASGQALQNLNIMLGYPETTGLLHQPLFP

SEQ ID NO: 43182 - DNA, 1224 bp, Arabidopsis thaliana
  misc_feature (1)..(1224): Ceres Seq. ID no. 13489583
  misc_feature: MA Experiment ID: 20000069 Result: Down-regulated in Transcription
  misc_feature: MA Experiment 20000069 PARAMETER Experiment Name: At_100uM_ABA_Mutants_cDNA_P Parameter: Plant Line Value: CS23
  misc_feature: MA Experiment 20000069 PARAMETER Experiment Name: At_100uM_ABA_Mutants_cDNA_P Parameter: Timepoint (hr) Value: 6
  misc_feature: MA Experiment 20000069 PARAMETER Experiment Name: At_100uM_ABA_Mutants_cDNA_P Parameter: Tissue Value: Aerial
  misc_feature: MA Experiment 20000069 PARAMETER Experiment Name: At_100uM_ABA_Mutants_cDNA_P Parameter: Treatment Value: 100uM ABA vs. No Treatment
  misc_feature: MA Experiment ID: 20000072 Result: Down-regulated in Transcription
  misc_feature: MA Experiment 20000072 PARAMETER Experiment Name: At_100uM_ABA_Mutants_cDNA_P Parameter: Plant Line Value: CS8105
  misc_feature: MA Experiment 20000072 PARAMETER Experiment Name: At_100uM_ABA_Mutants_cDNA_P Parameter: Timepoint (hr) Value: 6
  misc_feature: MA Experiment 20000072 PARAMETER Experiment Name: At_100uM_ABA_Mutants_cDNA_P Parameter: Tissue Value: Aerial
  misc_feature: MA Experiment 20000072 PARAMETER Experiment Name: At_100uM_ABA_Mutants_cDNA_P Parameter: Treatment Value: 100uM ABA vs. No Treatment
  misc_feature: MA Experiment ID: 20000111 Result: Up-regulated in Transcription
  misc_feature: MA Experiment 20000111 PARAMETER Experiment Name: At_42deg_Heat_cDNA_P Parameter: Temperature (deg C) Value: 42 vs. 22
  misc_feature: MA Experiment 20000111 PARAMETER Experiment Name: At_42deg_Heat_cDNA_P Parameter: Timepoint (hr) Value: 6
  misc_feature: MA Experiment 20000111 PARAMETER Experiment Name: At_42deg_Heat_cDNA_P Parameter: Tissue Value: Aerial
  misc_feature: MA Experiment ID: 20000113 Result: Up-regulated in Transcription
  misc_feature: MA Experiment 20000113 PARAMETER Experiment Name: At_42deg_Heat_cDNA_P Parameter: Temperature (deg C) Value: 42 vs. 22
  misc_feature: MA Experiment 20000113 PARAMETER Experiment Name: At_42deg_Heat_cDNA_P Parameter: Timepoint (hr) Value: 8
  misc_feature: MA Experiment 20000113 PARAMETER Experiment Name: At_42deg_Heat_cDNA_P Parameter: Tissue Value: Aerial
  misc_feature: MA Experiment ID: 20000171 Result: Up-regulated in Transcription
  misc_feature: MA Experiment 20000171 PARAMETER Experiment Name: At_42deg_Heat_P Parameter: Age (day) Value: 14
  misc_feature: MA Experiment 20000171 PARAMETER Experiment Name: At_42deg_Heat_P Parameter: Organism Value: A. thaliana
  misc_feature: MA Experiment 20000171 PARAMETER Experiment Name: At_42deg_Heat_P Parameter: Plant Line Value: WS
  misc_feature: MA Experiment 20000171 PARAMETER Experiment Name: At_42deg_Heat_P Parameter: Temperature (deg C) Value: 42 vs. 22
  misc_feature: MA Experiment 20000171 PARAMETER Experiment Name: At_42deg_Heat_P Parameter: Timepoint (hr) Value: 1
  misc_feature: MA Experiment 20000171 PARAMETER Experiment Name: At_42deg_Heat_P Parameter: Tissue Value: Aerial
  misc_feature: MA Experiment ID: 20000173 Result: Up-regulated in Transcription
  misc_feature: MA Experiment 20000173 PARAMETER Experiment Name: At_42deg_Heat_P Parameter: Age (day) Value: 14
  misc_feature: MA Experiment 20000173 PARAMETER Experiment Name: At_42deg_Heat_P Parameter: Organism Value: A. thaliana
  misc_feature: MA Experiment 20000173 PARAMETER Experiment Name: At_42deg_Heat_P Parameter: Plant Line Value: WS
  misc_feature: MA Experiment 20000173 PARAMETER Experiment Name: At_42deg_Heat_P Parameter: Temperature (deg C) Value: 42 vs. 22
  misc_feature: MA Experiment 20000173 PARAMETER Experiment Name: At_42deg_Heat_P Parameter: Timepoint (hr) Value: 6
  misc_feature: MA Experiment 20000173 PARAMETER Experiment Name: At_42deg_Heat_P Parameter: Tissue Value: Aerial
  misc_feature: MA Experiment ID: 20000437 Result: Up-regulated in Transcription
  misc_feature: MA Experiment 20000437 PARAMETER Experiment Name: At_Drought_P Parameter: Age (day) Value: 8
  misc_feature: MA Experiment 20000437 PARAMETER Experiment Name: At_Drought_P Parameter: Organism Value: A. thaliana
  misc_feature: MA Experiment 20000437 PARAMETER Experiment Name: At_Drought_P Parameter: Plant Line Value: WS
  misc_feature: MA Experiment 20000437 PARAMETER Experiment Name: At_Drought_P Parameter: Timepoint (hr) Value: 24
  misc_feature: MA Experiment 20000437 PARAMETER Experiment Name: At_Drought_P Parameter: Tissue Value: Whole Plant
  misc_feature: MA Experiment 20000437 PARAMETER Experiment Name: At_Drought_P Parameter: Treatment Value: Drought vs. No Drought
  misc_feature: MA Experiment ID: 20001554 Result: Up-regulated in Transcription
  misc_feature: MA Experiment 20001554 PARAMETER Experiment Name: At_Drought_Soil_Dry_P Parameter: Age (day) Value: 21
  misc_feature: MA Experiment 20001554 PARAMETER Experiment Name: At_Drought_Soil_Dry_P Parameter: Organism Value: A. thaliana
  misc_feature: MA Experiment 20001554 PARAMETER Experiment Name: At_Drought_Soil_Dry_P Parameter: Plant Line Value: WS
  misc_feature: MA Experiment 20001554 PARAMETER Experiment Name: At_Drought_Soil_Dry_P Parameter: Post Timepoint (hr) Value: None
  misc_feature: MA Experiment 20001554 PARAMETER Experiment Name: At_Drought_Soil_Dry_P Parameter: Post-Treatment Value: None
  misc_feature: MA Experiment 20001554 PARAMETER Experiment Name: At_Drought_Soil_Dry_P Parameter: Timepoint (day) Value: 7
  misc_feature: MA Experiment 20001554 PARAMETER Experiment Name: At_Drought_Soil_Dry_P Parameter: Treatment Value: Drought vs. No Drought
  misc_feature: MA Experiment ID: 20001555 Result: Up-regulated in Transcription
  misc_feature: MA Experiment 20001555 PARAMETER Experiment Name: At_Drought_Soil_Dry_P Parameter: Age (day) Value: 24
  misc_feature: MA Experiment 20001555 PARAMETER Experiment Name: At_Drought_Soil_Dry_P Parameter: Organism Value: A. thaliana
  misc_feature: MA Experiment 20001555 PARAMETER Experiment Name: At_Drought_Soil_Dry_P Parameter: Plant Line Value: WS
  misc_feature: MA Experiment 20001555 PARAMETER Experiment Name: At_Drought_Soil_Dry_P Parameter: Post Timepoint (hr) Value: None
  misc_feature: MA Experiment 20001555 PARAMETER Experiment Name: At_Drought_Soil_Dry_P Parameter: Post-Treatment Value: None
  misc_feature: MA Experiment 20001555 PARAMETER Experiment Name: At_Drought_Soil_Dry_P Parameter: Timepoint (day) Value: 10
  misc_feature: MA Experiment 20001555 PARAMETER Experiment Name: At_Drought_Soil_Dry_P Parameter: Treatment Value: Drought vs. No Drought
atgtctcagccttcaaagctatcaaaatcaaaaaaattctatcaaacaaggaaatatatcaatggcggtattgtctaaaccggtagcaataccaaaatccgggttctctctaatcccggttatagatatgtctgacccagaatccaaacatgccctcgtgaaagcatgcgaagacttcggcttcttcaaggtgatcaaccatggcgtttccgcagagctagtctctgttttagaacacgagaccgtcgatttcttctcgttgcccaagtcagagaaaacccaagtcgcaggttatcccttcggatacgggaacagtaagattggtcggaatggtgacgtgggttgggttgagtacttgttgatgaacgctaatcatgattccggttcgggtccactatttccaagtcttctcaaaagcccgggaactttcagaaacgcattggaagagtacacaacatcagtgagaaaaatgacattcgatgttttggagaagatcacagatgggctagggatcaaaccgaggaacacacttagcaagcttgtgtctgaccaaaacacggactcgatattgagacttaatcactatccaccatgtcctcttagcaataagaaaaccaatggtggtaagaatgtgattggttttggtgaacacacagatcctcaaatcatctctgtcttaagatctaacaacacttctggtctccaaattaatctaaatgatggctcatggatctctgtccctcccgatcacacttccttcttcttcaacgttggtgactctctccaggtgatgacaaatgggaggttcaagagcgtgaggcatagggttttagctaactgtaaaaaatctagggtttctatgatttacttcgctggaccttcattgactcagagaatcgctccgttgacatgtttgatagacaatgaggacgagaggttgtacgaggagtttacttggtctgaatacaaaaactctacctacaactctagattgtctgataataggcttcaacaattcgaaaggaagactataaaaaatctcctaaattgattgatatatctatttaatctataagtgtgtgctacatacagacaatgcatctgtatattttgaagttaatgttatttgttaatccaataactgtaaaaacatgcaagagtgtgtttgtttgtttcgtaatatcaacatcgctcccatcttttatggataatatcaagttgttt

SEQ ID NO: 43183 - protein, 349 aa, Arabidopsis thaliana
  peptide (1)..(349): Ceres Seq. ID no. 13489584
  misc_feature (186)..(293): Pfam Name: 2OG-Fe(II) oxygenase superfamily Pfam Description: 2OG-Fe(II) oxygenase superfamily
  misc_feature (21)..(349): Homolog of NCBI NO: 21553670 NR Description: gibberellin 2- oxidase [Arabidopsis thaliana]
  misc_feature (21)..(349): Homolog of NCBI NO: 15218350 NR Description: gibberellin 2-oxidase (GA2-oxidase) (ga2ox1)
CLSLQSYQNQKNSIKQGNISMAVLSKPVAIPKSGFSLIPVIDMSDPESKHALVKACEDFGFFKVINHGVSAELVSVLEHETVDFFSLPKSEKTQVAGYPFGYGNSKIGRNGDVGWVEYLLMNANHDSGSGPLFPSLLKSPGTFRNALEEYTTSVRKMTFDVLEKITDGLGIKPRNTLSKLVSDQNTDSILRLNHYPPCPLSNKKTNGGKNVIGFGEHTDPQIISVLRSNNTSGLQINLNDGSWISVPPDHTSFFFNVGDSLQVMTNGRFKSVRHRVLANCKKSRVSMIYFAGPSLTQRIAPLTCLIDNEDERLYEEFTWSEYKNSTYNSRLSDNRLQQFERKTIKNLLN

SEQ ID NO: 43184 - protein, 329 aa, Arabidopsis thaliana
  peptide (1)..(329): Ceres Seq. ID no. 13489585
  misc_feature (166)..(273): Pfam Name: 2OG-Fe(II) oxygenase superfamily Pfam Description: 2OG-Fe(II) oxygenase superfamily
  misc_feature (1)..(329): Homolog of NCBI NO: 21553670 NR Description: gibberellin 2- oxidase [Arabidopsis thaliana]
  misc_feature (1)..(329): Homolog of NCBI NO: 15218350 NR Description: gibberellin 2-oxidase (GA2-oxidase) (ga2ox1)
MAVLSKPVAIPKSGFSLIPVIDMSDPESKHALVKACEDFGFFKVINHGVSAELVSVLEHETVDFFSLPKSEKTQVAGYPFGYGNSKIGRNGDVGWVEYLLMNANHDSGSGPLFPSLLKSPGTFRNALEEYTTSVRKMTFDVLEKITDGLGIKPRNTLSKLVSDQNTDSILRLNHYPPCPLSNKKTNGGKNVIGFGEHTDPQIISVLRSNNTSGLQINLNDGSWISVPPDHTSFFFNVGDSLQVMTNGRFKSVRHRVLANCKKSRVSMIYFAGPSLTQRIAPLTCLIDNEDERLYEEFTWSEYKNSTYNSRLSDNRLQQFERKTIKNLLN

SEQ ID NO: 43185 - protein, 307 aa, Arabidopsis thaliana
  peptide (1)..(307): Ceres Seq. ID no. 13489586
  misc_feature (144)..(251): Pfam Name: 2OG-Fe(II) oxygenase superfamily Pfam Description: 2OG-Fe(II) oxygenase superfamily
  misc_feature (1)..(307): Homolog of NCBI NO: 21553670 NR Description: gibberellin 2- oxidase [Arabidopsis thaliana]
  misc_feature (1)..(307): Homolog of NCBI NO: 15218350 NR Description: gibberellin 2-oxidase (GA2-oxidase) (ga2ox1)
MSDPESKHALVKACEDFGFFKVINHGVSAELVSVLEHETVDFFSLPKSEKTQVAGYPFGYGNSKIGRNGDVGWVEYLLMNANHDSGSGPLFPSLLKSPGTFRNALEEYTTSVRKMTFDVLEKITDGLGIKPRNTLSKLVSDQNTDSILRLNHYPPCPLSNKKTNGGKNVIGFGEHTDPQIISVLRSNNTSGLQINLNDGSWISVPPDHTSFFFNVGDSLQVMTNGRFKSVRHRVLANCKKSRVSMIYFAGPSLTQRIAPLTCLIDNEDERLYEEFTWSEYKNSTYNSRLSDNRLQQFERKTIKNLLN

SEQ ID NO: 43186 - DNA, 1280 bp, Arabidopsis thaliana
  misc_feature (1)..(1280): Ceres Seq. ID no. 13645880
  misc_feature: MA Experiment ID: 20000441 Result: Down-regulated in Transcription
  misc_feature: MA Experiment 20000441 PARAMETER Experiment Name: At_1uM_BR-BRZ__P Parameter: Tissue Value: Shoot Apices
  misc_feature: MA Experiment 20000441 PARAMETER Experiment Name: At_1uM_BR-BRZ__P Parameter: Treatment Value: 1uM BR vs. No Treatment
  misc_feature: MA Experiment ID: 20000444 Result: Up-regulated in Transcription
  misc_feature: MA Experiment 20000444 PARAMETER Experiment Name: At_100uM_NAA__P Parameter: Age (day) Value: 14
  misc_feature: MA Experiment 20000444 PARAMETER Experiment Name: At_100uM_NAA__P Parameter: Organism Value: A. thaliana
  misc_feature: MA Experiment 20000444 PARAMETER Experiment Name: At_100uM_NAA__P Parameter: Plant Line Value: WS
  misc_feature: MA Experiment 20000444 PARAMETER Experiment Name: At_100uM_NAA__P Parameter: Timepoint (hr) Value: 1
  misc_feature: MA Experiment 20000444 PARAMETER Experiment Name: At_100uM_NAA__P Parameter: Tissue Value: Aerial
  misc_feature: MA Experiment 20000444 PARAMETER Experiment Name: At_100uM_NAA__P Parameter: Treatment Value: 100uM NAA vs. No Treatment
  misc_feature: MA Experiment ID: 20001247 Result: Up-regulated in Transcription
  misc_feature: MA Experiment 20001247 PARAMETER Experiment Name: At_Far-red-induction_P Parameter: Age (day) Value: 7
  misc_feature: MA Experiment 20001247 PARAMETER Experiment Name: At_Far-red-induction_P Parameter: Light Value: Far-red vs. White
  misc_feature: MA Experiment 20001247 PARAMETER Experiment Name: At_Far-red-induction_P Parameter: Organism Value: A. thaliana
  misc_feature: MA Experiment 20001247 PARAMETER Experiment Name: At_Far-red-induction_P Parameter: Plant Line Value: Columbia
  misc_feature: MA Experiment 20001247 PARAMETER Experiment Name: At_Far-red-induction_P Parameter: Timepoint (hr) Value: 1
  misc_feature: MA Experiment 20001247 PARAMETER Experiment Name: At_Far-red-induction_P Parameter: Tissue Value: Whole Plant
acatcctaatcaaaaaaatactactactcactttactataatctctcaaaatggccgtaagtttcgtaacaacatctcctgaggaagaagacaaaccgaagctaggccttggaaatattcaaactccgttaatcttcaacccttcaatgcttaaccttcaagccaatatcccaaaccaattcatctggcctgacgacgaaaaaccttccatcaacgttctcgagcttgatgttcctctcatcgaccttcaaaaccttctctctgatccatcctccactttagatgcttcgagactgatctctgaggcctgtaagaagcacggtttcttcctcgtggtcaatcacggcatcagcgaggagcttatatcagacgctcatgaatacacgagccgcttctttgatatgcctctctccgaaaaacagagggttcttagaaaatccggtgagagtgttggctacgcaagcagtttcaccggacgcttctccaccaagcttccatggaaggagaccctttctttccggttttgcgacgacatgagccgctcaaaatccgttcaagattacttctgcgatgcgttgggacatgggtttcagccatttgggaaggtgtatcaagagtattgtgaagcaatgagttctctatcactgaagatcatggagcttctcgggctaagtttaggcgtaaaacgggactactttagagagtttttcgaagaaaacgattcaataataagactgaattactaccctccatgtataaaaccagatctcacactaggaacaggacctcattgtgatccaacatctcttaccatccttcaccaagaccatgttaatggccttcaagtctttgtggaaaatcaatggcgctccattcgtcccaaccccaaggcctttgtggtcaatatcggcgatactttcatggctctatcgaacgatagatacaagagctgcttgcaccgggcggtggtgaacagcgagagcgagaggaagtcacttgcattcttcttgtgtccgaaaaaagacagagtagtgacgccaccgagagagcttttggacagcatcacatcaagaagataccctgacttcacatggtctatgttccttgagttcactcagaaacattatagagcagacatgaacactctccaagccttttcagattggctcaccaaacccatctaagaaataaaatattcatgtcttgtcttgttagttataactagtatcttctttatatttcatgtatgtatatggtaataggcaataacaccttttagc

SEQ ID NO: 43187 - protein, 377 aa, Arabidopsis thaliana
  peptide (1)..(377): Ceres Seq. ID no. 13645881
  misc_feature (223)..(322): Pfam Name: 2OG-Fe(II) oxygenase superfamily Pfam Description: 2OG-Fe(II) oxygenase superfamily
  misc_feature (1)..(373): Homolog of NCBI NO: 7433211 NR Description: gibberellin 20-oxidase (EC 1.14.11.-) - garden
  misc_feature (1)..(373): Homolog of NCBI NO: 8919865 NR Description: gibberellin 20-oxidase [Citrus sinensis x
  misc_feature (24)..(373): Homolog of NCBI NO: 7433209 NR Description: gibberellin 20-oxidase (EC 1.14.11.-) - kidney
  misc_feature (1)..(271): Homolog of NCBI NO: 9791188 NR Description: gibberellin 20-oxidase [Arabidopsis thaliana]
  misc_feature (1)..(373): Homolog of NCBI NO: 15242189 NR Description: gibberellin 20-oxidase, putative [Arabidopsis
  misc_feature (1)..(377): Homolog of NCBI NO: 9791187 NR Description: gibberellin 20-oxidase [Arabidopsis thaliana]
  misc_feature (1)..(377): Homolog of NCBI NO: 1581592 NR Description: gibberellin 20-oxidase
  misc_feature (1)..(377): Homolog of NCBI NO: 9791186 NR Description: gibberellin 20-oxidase [Arabidopsis thaliana]
  misc_feature (1)..(377): Homolog of NCBI NO: 1109695 NR Description: gibberellin 20-oxidase [Arabidopsis thaliana]
  misc_feature (1)..(377): Homolog of NCBI NO: 15235072 NR Description: gibberellin 20-oxidase [Arabidopsis thaliana]
MAVSFVTTSPEEEDKPKLGLGNIQTPLIFNPSMLNLQANIPNQFIWPDDEKPSINVLELDVPLIDLQNLLSDPSSTLDASRLISEACKKHGFFLVVNHGISEELISDAHEYTSRFFDMPLSEKQRVLRKSGESVGYASSFTGRFSTKLPWKETLSFRFCDDMSRSKSVQDYFCDALGHGFQPFGKVYQEYCEAMSSLSLKIMELLGLSLGVKRDYFREFFEENDSIIRLNYYPPCIKPDLTLGTGPHCDPTSLTILHQDHVNGLQVFVENQWRSIRPNPKAFVVNIGDTFMALSNDRYKSCLHRAVVNSESERKSLAFFLCPKKDRVVTPPRELLDSITSRRYPDFTWSMFLEFTQKHYRADMNTLQAFSDWLTKPI

SEQ ID NO: 43188 - protein, 345 aa, Arabidopsis thaliana
  peptide (1)..(345): Ceres Seq. ID no. 13645882
  misc_feature (191)..(290): Pfam Name: 2OG-Fe(II) oxygenase superfamily Pfam Description: 2OG-Fe(II) oxygenase superfamily
  misc_feature (1)..(341): Homolog of NCBI NO: 7433211 NR Description: gibberellin 20-oxidase (EC 1.14.11.-) - garden
  misc_feature (1)..(341): Homolog of NCBI NO: 8919865 NR Description: gibberellin 20-oxidase [Citrus sinensis x
  misc_feature (1)..(341): Homolog of NCBI NO: 7433209 NR Description: gibberellin 20-oxidase (EC 1.14.11.-) - kidney
  misc_feature (1)..(239): Homolog of NCBI NO: 9791188 NR Description: gibberellin 20-oxidase [Arabidopsis thaliana]
  misc_feature (1)..(341): Homolog of NCBI NO: 15242189 NR Description: gibberellin 20-oxidase, putative [Arabidopsis
  misc_feature (1)..(345): Homolog of NCBI NO: 9791187 NR Description: gibberellin 20-oxidase [Arabidopsis thaliana]
  misc_feature (1)..(345): Homolog of NCBI NO: 1581592 NR Description: gibberellin 20-oxidase
  misc_feature (1)..(345): Homolog of NCBI NO: 9791186 NR Description: gibberellin 20-oxidase [Arabidopsis thaliana]
  misc_feature (1)..(345): Homolog of NCBI NO: 1109695 NR Description: gibberellin 20-oxidase [Arabidopsis thaliana]
  misc_feature (1)..(345): Homolog of NCBI NO: 15235072 NR Description: gibberellin 20-oxidase [Arabidopsis thaliana]
MLNLQANIPNQFIWPDDEKPSINVLELDVPLIDLQNLLSDPSSTLDASRLISEACKKHGFFLVVNHGISEELISDAHEYTSRFFDMPLSEKQRVLRKSGESVGYASSFTGRFSTKLPWKETLSFRFCDDMSRSKSVQDYFCDALGHGFQPFGKVYQEYCEAMSSLSLKIMELLGLSLGVKRDYFREFFEENDSIIRLNYYPPCIKPDLTLGTGPHCDPTSLTILHQDHVNGLQVFVENQWRSIRPNPKAFVVNIGDTFMALSNDRYKSCLHRAVVNSESERKSLAFFLCPKKDRVVTPPRELLDSITSRRYPDFTWSMFLEFTQKHYRADMNTLQAFSDWLTKPI

SEQ ID NO: 43189 - protein, 260 aa, Arabidopsis thaliana
  peptide (1)..(260): Ceres Seq. ID no. 13645883
  misc_feature (106)..(205): Pfam Name: 2OG-Fe(II) oxygenase superfamily Pfam Description: 2OG-Fe(II) oxygenase superfamily
  misc_feature (1)..(256): Homolog of NCBI NO: 7433211 NR Description: gibberellin 20-oxidase (EC 1.14.11.-) - garden
  misc_feature (1)..(256): Homolog of NCBI NO: 8919865 NR Description: gibberellin 20-oxidase [Citrus sinensis x
  misc_feature (1)..(256): Homolog of NCBI NO: 7433209 NR Description: gibberellin 20-oxidase (EC 1.14.11.-) - kidney
  misc_feature (1)..(154): Homolog of NCBI NO: 9791188 NR Description: gibberellin 20-oxidase [Arabidopsis thaliana]
  misc_feature (1)..(256): Homolog of NCBI NO: 15242189 NR Description: gibberellin 20-oxidase, putative [Arabidopsis
  misc_feature (1)..(260): Homolog of NCBI NO: 9791187 NR Description: gibberellin 20-oxidase [Arabidopsis thaliana]
  misc_feature (1)..(260): Homolog of NCBI NO: 1581592 NR Description: gibberellin 20-oxidase
  misc_feature (1)..(260): Homolog of NCBI NO: 9791186 NR Description: gibberellin 20-oxidase [Arabidopsis thaliana]
  misc_feature (1)..(260): Homolog of NCBI NO: 1109695 NR Description: gibberellin 20-oxidase [Arabidopsis thaliana]
  misc_feature (1)..(260): Homolog of NCBI NO: 15235072 NR Description: gibberellin 20-oxidase [Arabidopsis thaliana]
MPLSEKQRVLRKSGESVGYASSFTGRFSTKLPWKETLSFRFCDDMSRSKSVQDYFCDALGHGFQPFGKVYQEYCEAMSSLSLKIMELLGLSLGVKRDYFREFFEENDSIIRLNYYPPCIKPDLTLGTGPHCDPTSLTILHQDHVNGLQVFVENQWRSIRPNPKAFVVNIGDTFMALSNDRYKSCLHRAVVNSESERKSLAFFLCPKKDRVVTPPRELLDSITSRRYPDFTWSMFLEFTQKHYRADMNTLQAFSDWLTKPI

SEQ ID NO: 43190 - DNA, 1281 bp, Arabidopsis thaliana
  misc_feature (1)..(1281): Ceres Seq. ID no. 12340299
  misc_feature: MA Experiment ID: 108435 Result: Up-regulated in Transcription
  misc_feature: MA Experiment 108435 PARAMETER Experiment Name: At_stm_Mutants_cDNA_P Parameter: Plant Line Value: wt Landsburg vs stm
  misc_feature: MA Experiment 108435 PARAMETER Experiment Name: At_stm_Mutants_cDNA_P Parameter: Tissue Value: Shoot Apical Meristem Region
  misc_feature: MA Experiment ID: 108463 Result: Down-regulated in Transcription
  misc_feature: MA Experiment 108463 PARAMETER Experiment Name: At_Germinating_Seeds_cDNA_P Parameter: Age (day) Value: 3 vs. 0
  misc_feature: MA Experiment 108463 PARAMETER Experiment Name: At_Germinating_Seeds_cDNA_P Parameter: Tissue Value: Germinating Seeds
  misc_feature: MA Experiment ID: 108464 Result: Down-regulated in Transcription
  misc_feature: MA Experiment 108464 PARAMETER Experiment Name: At_Germinating_Seeds_cDNA_P Parameter: Age (day) Value: 4 vs. 0
  misc_feature: MA Experiment 108464 PARAMETER Experiment Name: At_Germinating_Seeds_cDNA_P Parameter: Tissue Value: Germinating Seeds
  misc_feature: MA Experiment ID: 108501 Result: Down-regulated in Transcription
  misc_feature: MA Experiment 108501 PARAMETER Experiment Name: At_ap2_floral_buds_cDNA_P Parameter: Plant Line Value: ap2 (Ler.)
  misc_feature: MA Experiment 108501 PARAMETER Experiment Name: At_ap2_floral_buds_cDNA_P Parameter: Tissue Value: Closed Flower
  misc_feature: MA Experiment ID: 20000089 Result: Down-regulated in Transcription
  misc_feature: MA Experiment ID: 20000111 Result: Up-regulated in Transcription
  misc_feature: MA Experiment 20000111 PARAMETER Experiment Name: At_42deg_Heat_cDNA_P Parameter: Temperature (deg C) Value: 42 vs. 22
  misc_feature: MA Experiment 20000111 PARAMETER Experiment Name: At_42deg_Heat_cDNA_P Parameter: Timepoint (hr) Value: 6
  misc_feature: MA Experiment 20000111 PARAMETER Experiment Name: At_42deg_Heat_cDNA_P Parameter: Tissue Value: Aerial
  misc_feature: MA Experiment ID: 20000117 Result: Down-regulated in Transcription
  misc_feature: MA Experiment 20000117 PARAMETER Experiment Name: At_100uM_ABA_Mutants_cDNA_P Parameter: Plant Line Value: Columbia
  misc_feature: MA Experiment 20000117 PARAMETER Experiment Name: At_100uM_ABA_Mutants_cDNA_P Parameter: Timepoint (hr) Value: 6
  misc_feature: MA Experiment 20000117 PARAMETER Experiment Name: At_100uM_ABA_Mutants_cDNA_P Parameter: Tissue Value: Aerial
  misc_feature: MA Experiment 20000117 PARAMETER Experiment Name: At_100uM_ABA_Mutants_cDNA_P Parameter: Treatment Value: 100uM ABA vs. No Treatment
  misc_feature: Phenotype: ROSETTE LEAVES Curled-Curled 3
  misc_feature: Phenotype: ROSETTE LEAVES Curled-Curled 3
  misc_feature: Phenotype: CAULINE LEAVES Curled-Curled 3
  misc_feature: Phenotype: ROSETTE LEAVES Curled-Curled 3
  misc_feature: Phenotype: ROSETTE LEAVES Curled-Curled 3
  misc_feature: Phenotype: CAULINE LEAVES Curled-Curled 3
  misc_feature: Phenotype: ROSETTE LEAVES Curled-Curled 3
  misc_feature: Phenotype: ROSETTE LEAVES Curled-Curled 3
  misc_feature: Phenotype: CAULINE LEAVES Curled-Curled 3
actctctctctatctctatatatcgacacaccataaaagttgttctttctctccgtttccttagcctctgcatctgggcgattttctctttctatctccctacaccttagggagtactgatcctaaactcatcatctttctatgccttcctcttttctttcacttattttcttttctatttttctttctttcttactttgcgtaaaactagcgagtcaaaaataaagacacttgcatgatcctaatataatattatatattgtaattagagaaagagagagaagagaagaaagaaagtggcaatagattcttatggattttggtataaagaaacatgaaaaaatgggtttgaccgaagaaacgttgaggacgctttttgtatgcaaccccaaatagcagcttaaagaaagcagagaggatcttcttttatttcccctctgagcaacagaagccattattcaaagaaaggcttctttaatttactcgcagggagagggaaaagagaaaaaattgaaaaactccattttcaagtcattaaaatggcatcttcttcaacaaactcaccatgcgccgcttgcaaattcctccggcgaaaatgtcaaccggaatgtgtattcgcgccctatttcccaccggaccagccacaaaaattcgcaaacgttcacaaagtgtttggagcaagtaacgtgacaaagctcctcaacgagcttcacccttcacaacgtgaagacgcagtgaactctttggcctatgaagccgacatgcgcctccgtgaccctgtctacggctgcgttggcgtcatctctctcctccaacatcagcttcgtcagcttcagatagatctcagctgtgctaaatctgagctctctaagtaccaaagcctcggtatcctcgccgccactcatcagagtcttggcatcaacttactcgccggagcagcagatggaacagccaccgccgtgagagaccactatcaccaccaccagttttttcctagagaacaaatgtttggtggcttggatgttccggccggtaacaactacgacggtgggattcttgccattggacagatcactcagtttcagcagccgagagccgccgctggagatgatggtcgccgtactgttgatcctcttgagattttagggttttggtggtgttcatcttcgtcgatcgcttggtgatgagaaaactataattttaagaaaatatttgatgtggaaaaccaaaatattttaaacgtatggtacgtctctcttaatgacattaatttcggttttt

SEQ ID NO: 43191 - protein, 214 aa, Arabidopsis thaliana
  peptide (1)..(214): Ceres Seq. ID no. 12340300
  misc_feature (9)..(109): Pfam Name: Protein of unknown function DUF260 Pfam Description: Protein of unknown function DUF260
  misc_feature (7)..(112): Homolog of NCBI NO: 15227870 NR Description: hypothetical protein; protein id: At2g23660.1
  misc_feature (3)..(112): Homolog of NCBI NO: 9294470 NR Description: gb|AAB60912.1~gene_id:MGF10.6~similar to unknown
  misc_feature (1)..(112): Homolog of NCBI NO: 29427827 NR Description: LOB domain protein 25
  misc_feature (1)..(112): Homolog of NCBI NO: 21618134 NR Description: unknown [Arabidopsis thaliana]
  misc_feature (1)..(112): Homolog of NCBI NO: 18405472 NR Description: expressed protein
  misc_feature (1)..(112): Homolog of NCBI NO: 34896184 NR Description: contains ESTs C98868(E3203),C98869(E3203)~similar
  misc_feature (1)..(112): Homolog of NCBI NO: 15242624 NR Description: putative protein
  misc_feature (1)..(152): Homolog of NCBI NO: 15240110 NR Description: putative protein; protein id: At5g66870.1
  misc_feature (2)..(128): Homolog of NCBI NO: 34907508 NR Description: B1099D03.24 [Oryza sativa (japonica
  misc_feature (1)..(198): Homolog of NCBI NO: 15218746 NR Description: unknown protein
MASSSTNSPCAACKFLRRKCQPECVFAPYFPPDQPQKFANVHKVFGASNVTKLLNELHPSQREDAVNSLAYEADMRLRDPVYGCVGVISLLQHQLRQLQIDLSCAKSELSKYQSLGILAATHQSLGINLLAGAADGTATAVRDHYHHHQFFPREQMFGGLDVPAGNNYDGGILAIGQITQFQQPRAAAGDDGRRTVDPLEILGFWWCSSSSIAW

SEQ ID NO: 43192 - protein, 140 aa, Arabidopsis thaliana
  peptide (1)..(140): Ceres Seq. ID no. 12340301
  misc_feature (1)..(38): Homolog of NCBI NO: 15227870 NR Description: hypothetical protein; protein id: At2g23660.1
  misc_feature (1)..(38): Homolog of NCBI NO: 9294470 NR Description: gb|AAB60912.1~gene_id:MGF10.6~similar to unknown
  misc_feature (1)..(38): Homolog of NCBI NO: 29427827 NR Description: LOB domain protein 25
  misc_feature (1)..(38): Homolog of NCBI NO: 21618134 NR Description: unknown [Arabidopsis thaliana]
  misc_feature (1)..(38): Homolog of NCBI NO: 18405472 NR Description: expressed protein
  misc_feature (1)..(38): Homolog of NCBI NO: 34896184 NR Description: contains ESTs C98868(E3203),C98869(E3203)~similar
  misc_feature (1)..(38): Homolog of NCBI NO: 15242624 NR Description: putative protein
  misc_feature (1)..(78): Homolog of NCBI NO: 15240110 NR Description: putative protein; protein id: At5g66870.1
  misc_feature (1)..(54): Homolog of NCBI NO: 34907508 NR Description: B1099D03.24 [Oryza sativa (japonica
  misc_feature (1)..(124): Homolog of NCBI NO: 15218746 NR Description: unknown protein
MRLRDPVYGCVGVISLLQHQLRQLQIDLSCAKSELSKYQSLGILAATHQSLGINLLAGAADGTATAVRDHYHHHQFFPREQMFGGLDVPAGNNYDGGILAIGQITQFQQPRAAAGDDGRRTVDPLEILGFWWCSSSSIAW

SEQ ID NO: 43193 - DNA, 1482 bp, Arabidopsis thaliana; identical to SEQ ID NO: 41343
  misc_feature (1)..(1482): Ceres Seq. ID no. 13500025
  misc_feature: MA Experiment ID: 108434 Result: Up-regulated in Transcription
  misc_feature: MA Experiment 108434 PARAMETER Experiment Name: At_Root_Tips_cDNA_P Parameter: Tissue Value: Root Tips
  misc_feature: MA Experiment ID: 108435 Result: Down-regulated in Transcription
  misc_feature: MA Experiment 108435 PARAMETER Experiment Name: At_stm_Mutants_cDNA_P Parameter: Plant Line Value: wt Landsburg vs stm
  misc_feature: MA Experiment 108435 PARAMETER Experiment Name: At_stm_Mutants_cDNA_P Parameter: Tissue Value: Shoot Apical Meristem Region
  misc_feature: MA Experiment ID: 108462 Result: Up-regulated in Transcription
  misc_feature: MA Experiment 108462 PARAMETER Experiment Name: At_Germinating_Seeds_cDNA_P Parameter: Age (day) Value: 2 vs. 0
  misc_feature: MA Experiment 108462 PARAMETER Experiment Name: At_Germinating_Seeds_cDNA_P Parameter: Tissue Value: Germinating Seeds
  misc_feature: MA Experiment ID: 108488 Result: Up-regulated in Transcription
  misc_feature: MA Experiment ID: 108561 Result: Down-regulated in Transcription
  misc_feature: MA Experiment 108561 PARAMETER Experiment Name: At_100uM_ABA_cDNA_P Parameter: Timepoint (hr) Value: 6
  misc_feature: MA Experiment 108561 PARAMETER Experiment Name: At_100uM_ABA_cDNA_P Parameter: Tissue Value: Aerial
  misc_feature: MA Experiment 108561 PARAMETER Experiment Name: At_100uM_ABA_cDNA_P Parameter: Treatment Value: 100uM ABA vs. No Treatment
  misc_feature: MA Experiment ID: 108573 Result: Down-regulated in Transcription
  misc_feature: MA Experiment 108573 PARAMETER Experiment Name: At_Drought_cDNA_P Parameter: Timepoint (hr) Value: 6
  misc_feature: MA Experiment 108573 PARAMETER Experiment Name: At_Drought_cDNA_P Parameter: Tissue Value: Aerial
  misc_feature: MA Experiment 108573 PARAMETER Experiment Name: At_Drought_cDNA_P Parameter: Treatment Value: Drought vs. No Drought
  misc_feature: MA Experiment ID: 108585 Result: Down-regulated in Transcription
  misc_feature: MA Experiment 108585 PARAMETER Experiment Name: At_5mM_NaNP_cDNA_P Parameter: Timepoint (hr) Value: 6
  misc_feature: MA Experiment 108585 PARAMETER Experiment Name: At_5mM_NaNP_cDNA_P Parameter: Tissue Value: Aerial
  misc_feature: MA Experiment 108585 PARAMETER Experiment Name: At_5mM_NaNP_cDNA_P Parameter: Treatment Value: null
  misc_feature: MA Experiment ID: 108595 Result: Down-regulated in Transcription
  misc_feature: MA Experiment 108595 PARAMETER Experiment Name: At_Ler-pi_Ovule_cDNA_P Parameter: Plant Line Value: null
  misc_feature: MA Experiment ID: 108668 Result: Down-regulated in Transcription
  misc_feature: MA Experiment 108668 PARAMETER Experiment Name: At_2mM_SA_cDNA_P Parameter: Plant Line Value: WS
  misc_feature: MA Experiment 108668 PARAMETER Experiment Name: At_2mM_SA_cDNA_P Parameter: Timepoint (hr) Value: 6
  misc_feature: MA Experiment 108668 PARAMETER Experiment Name: At_2mM_SA_cDNA_P Parameter: Treatment Value: 2mM SA vs. No Treatment
  misc_feature: MA Experiment ID: 20000070 Result: Down-regulated in Transcription
  misc_feature: MA Experiment 20000070 PARAMETER Experiment Name: At_100uM_ABA_Mutants_cDNA_P Parameter: Plant Line Value: CS24
  misc_feature: MA Experiment 20000070 PARAMETER Experiment Name: At_100uM_ABA_Mutants_cDNA_P Parameter: Timepoint (hr) Value: 6
  misc_feature: MA Experiment 20000070 PARAMETER Experiment Name: At_100uM_ABA_Mutants_cDNA_P Parameter: Tissue Value: Aerial
  misc_feature: MA Experiment 20000070 PARAMETER Experiment Name: At_100uM_ABA_Mutants_cDNA_P Parameter: Treatment Value: 100uM ABA vs. No Treatment
  misc_feature: MA Experiment ID: 20000071 Result: Down-regulated in Transcription
  misc_feature: MA Experiment 20000071 PARAMETER Experiment Name: At_100uM_ABA_Mutants_cDNA_P Parameter: Plant Line Value: CS8104
  misc_feature: MA Experiment 20000071 PARAMETER Experiment Name: At_100uM_ABA_Mutants_cDNA_P Parameter: Timepoint (hr) Value: 6
  misc_feature: MA Experiment 20000071 PARAMETER Experiment Name: At_100uM_ABA_Mutants_cDNA_P Parameter: Tissue Value: Aerial
  misc_feature: MA Experiment 20000071 PARAMETER Experiment Name: At_100uM_ABA_Mutants_cDNA_P Parameter: Treatment Value: 100uM ABA vs. No Treatment
  misc_feature: MA Experiment ID: 20000111 Result: Down-regulated in Transcription
  misc_feature: MA Experiment 20000111 PARAMETER Experiment Name: At_42deg_Heat_cDNA_P Parameter: Temperature (deg C) Value: 42 vs. 22
  misc_feature: MA Experiment 20000111 PARAMETER Experiment Name: At_42deg_Heat_cDNA_P Parameter: Timepoint (hr) Value: 6
  misc_feature: MA Experiment 20000111 PARAMETER Experiment Name: At_42deg_Heat_cDNA_P Parameter: Tissue Value: Aerial
  misc_feature: MA Experiment ID: 20000113 Result: Down-regulated in Transcription
  misc_feature: MA Experiment 20000113 PARAMETER Experiment Name: At_42deg_Heat_cDNA_P Parameter: Temperature (deg C) Value: 42 vs. 22
  misc_feature: MA Experiment 20000113 PARAMETER Experiment Name: At_42deg_Heat_cDNA_P Parameter: Timepoint (hr) Value: 8
  misc_feature: MA Experiment 20000113 PARAMETER Experiment Name: At_42deg_Heat_cDNA_P Parameter: Tissue Value: Aerial
  misc_feature: MA Experiment ID: 20000117 Result: Down-regulated in Transcription
  misc_feature: MA Experiment 20000117 PARAMETER Experiment Name: At_100uM_ABA_Mutants_cDNA_P Parameter: Plant Line Value: Columbia
  misc_feature: MA Experiment 20000117 PARAMETER Experiment Name: At_100uM_ABA_Mutants_cDNA_P Parameter: Timepoint (hr) Value: 6
  misc_feature: MA Experiment 20000117 PARAMETER Experiment Name: At_100uM_ABA_Mutants_cDNA_P Parameter: Tissue Value: Aerial
  misc_feature: MA Experiment 20000117 PARAMETER Experiment Name: At_100uM_ABA_Mutants_cDNA_P Parameter: Treatment Value: 100uM ABA vs. No Treatment
  misc_feature: MA Experiment ID: 20000173 Result: Down-regulated in Transcription
  misc_feature: MA Experiment 20000173 PARAMETER Experiment Name: At_42deg_Heat_P Parameter: Age (day) Value: 14
  misc_feature: MA Experiment 20000173 PARAMETER Experiment Name: At_42deg_Heat_P Parameter: Organism Value: A. thaliana
  misc_feature: MA Experiment 20000173 PARAMETER Experiment Name: At_42deg_Heat_P Parameter: Plant Line Value: WS
  misc_feature: MA Experiment 20000173 PARAMETER Experiment Name: At_42deg_Heat_P Parameter: Temperature (deg C) Value: 42 vs. 22
  misc_feature: MA Experiment 20000173 PARAMETER Experiment Name: At_42deg_Heat_P Parameter: Timepoint (hr) Value: 6
  misc_feature: MA Experiment 20000173 PARAMETER Experiment Name: At_42deg_Heat_P Parameter: Tissue Value: Aerial
  misc_feature: MA Experiment ID: 20000180 Result: Up-regulated in Transcription
  misc_feature: MA Experiment 20000180 PARAMETER Experiment Name: At_Germinating_Seeds_P Parameter: Age (hr) Value: 24 vs. 0
  misc_feature: MA Experiment 20000180 PARAMETER Experiment Name: At_Germinating_Seeds_P Parameter: Tissue Value: Germinating Seeds
  misc_feature: MA Experiment ID: 20000182 Result: Down-regulated in Transcription
  misc_feature: MA Experiment 20000182 PARAMETER Experiment Name: At_2mM_SA_P Parameter: Age (day) Value: 14
  misc_feature: MA Experiment 20000182 PARAMETER Experiment Name: At_2mM_SA_P Parameter: Organism Value: A. thaliana
  misc_feature: MA Experiment 20000182 PARAMETER Experiment Name: At_2mM_SA_P Parameter: Plant Line Value: WS
  misc_feature: MA Experiment 20000182 PARAMETER Experiment Name: At_2mM_SA_P Parameter: Timepoint (hr) Value: 6
  misc_feature: MA Experiment 20000182 PARAMETER Experiment Name: At_2mM_SA_P Parameter: Tissue Value: Aerial
  misc_feature: MA Experiment 20000182 PARAMETER Experiment Name: At_2mM_SA_P Parameter: Treatment Value: 2mM SA vs. No Treatment
  misc_feature: MA Experiment ID: 20000185 Result: Down-regulated in Transcription
  misc_feature: MA Experiment 20000185 PARAMETER Experiment Name: At_Roots__P Parameter: Age (day) Value: 7 vs. 21
  misc_feature: MA Experiment 20000185 PARAMETER Experiment Name: At_Roots__P Parameter: Organism Value: A. thaliana
  misc_feature: MA Experiment 20000185 PARAMETER Experiment Name: At_Roots__P Parameter: Tissue Value: Roots vs. Whole Plant
  misc_feature: MA Experiment ID: 20000436 Result: Down-regulated in Transcription
  misc_feature: MA Experiment 20000436 PARAMETER Experiment Name: At_Drought_P Parameter: Age (day) Value: 7
  misc_feature: MA Experiment 20000436 PARAMETER Experiment Name: At_Drought_P Parameter: Organism Value: A. thaliana
  misc_feature: MA Experiment 20000436 PARAMETER Experiment Name: At_Drought_P Parameter: Plant Line Value: WS
  misc_feature: MA Experiment 20000436 PARAMETER Experiment Name: At_Drought_P Parameter: Timepoint (hr) Value: 12
  misc_feature: MA Experiment 20000436 PARAMETER Experiment Name: At_Drought_P Parameter: Tissue Value: Whole Plant
  misc_feature: MA Experiment 20000436 PARAMETER Experiment Name: At_Drought_P Parameter: Treatment Value: Drought vs. No Drought
  misc_feature: MA Experiment ID: 20000437 Result: Down-regulated in Transcription
  misc_feature: MA Experiment 20000437 PARAMETER Experiment Name: At_Drought_P Parameter: Age (day) Value: 8
  misc_feature: MA Experiment 20000437 PARAMETER Experiment Name: At_Drought_P Parameter: Organism Value: A. thaliana
  misc_feature: MA Experiment 20000437 PARAMETER Experiment Name: At_Drought_P Parameter: Plant Line Value: WS
  misc_feature: MA Experiment 20000437 PARAMETER Experiment Name: At_Drought_P Parameter: Timepoint (hr) Value: 24
  misc_feature: MA Experiment 20000437 PARAMETER Experiment Name: At_Drought_P Parameter: Tissue Value: Whole Plant
  misc_feature: MA Experiment 20000437 PARAMETER Experiment Name: At_Drought_P Parameter: Treatment Value: Drought vs. No Drought
  misc_feature: MA Experiment ID: 20000438 Result: Up-regulated in Transcription
  misc_feature: MA Experiment 20000438 PARAMETER Experiment Name: At_Shoots__P Parameter: Age (day) Value: 14
  misc_feature: MA Experiment 20000438 PARAMETER Experiment Name: At_Shoots__P Parameter: Tissue Value: Shoots vs. Whole Plant
  misc_feature: MA Experiment ID: 20000439 Result: Down-regulated in Transcription
  misc_feature: MA Experiment 20000439 PARAMETER Experiment Name: At_Roots__P Parameter: Age (day) Value: 14 vs. 21
  misc_feature: MA Experiment 20000439 PARAMETER Experiment Name: At_Roots__P Parameter: Organism Value: A. thaliana
  misc_feature: MA Experiment 20000439 PARAMETER Experiment Name: At_Roots__P Parameter: Tissue Value: Roots vs. Whole Plant
  misc_feature: MA Experiment ID: 20001248 Result: Down-regulated in Transcription
  misc_feature: MA Experiment 20001248 PARAMETER Experiment Name: At_Far-red-induction_P Parameter: Age (day) Value: 7
  misc_feature: MA Experiment 20001248 PARAMETER Experiment Name: At_Far-red-induction_P Parameter: Light Value: Far-red vs. White
  misc_feature: MA Experiment 20001248 PARAMETER Experiment Name: At_Far-red-induction_P Parameter: Organism Value: A. thaliana
  misc_feature: MA Experiment 20001248 PARAMETER Experiment Name: At_Far-red-induction_P Parameter: Plant Line Value: Columbia
  misc_feature: MA Experiment 20001248 PARAMETER Experiment Name: At_Far-red-induction_P Parameter: Timepoint (hr) Value: 4
  misc_feature: MA Experiment 20001248 PARAMETER Experiment Name: At_Far-red-induction_P Parameter: Tissue Value: Whole Plant
  misc_feature: MA Experiment ID: 20001450 Result: Down-regulated in Transcription
  misc_feature: MA Experiment 20001450 PARAMETER Experiment Name: At_Far-red-induction_P Parameter: Age (day) Value: 7
  misc_feature: MA Experiment 20001450 PARAMETER Experiment Name: At_Far-red-induction_P Parameter: Light Value: Far-red vs. White
  misc_feature: MA Experiment 20001450 PARAMETER Experiment Name: At_Far-red-induction_P Parameter: Organism Value: A. thaliana
  misc_feature: MA Experiment 20001450 PARAMETER Experiment Name: At_Far-red-induction_P Parameter: Plant Line Value: Columbia
  misc_feature: MA Experiment 20001450 PARAMETER Experiment Name: At_Far-red-induction_P Parameter: Timepoint (hr) Value: 8
  misc_feature: MA Experiment 20001450 PARAMETER Experiment Name: At_Far-red-induction_P Parameter: Tissue Value: Whole Plant
  misc_feature: MA Experiment ID: 20001451 Result: Down-regulated in Transcription
  misc_feature: MA Experiment 20001451 PARAMETER Experiment Name: At_Far-red-induction_P Parameter: Age (day) Value: 7
  misc_feature: MA Experiment 20001451 PARAMETER Experiment Name: At_Far-red-induction_P Parameter: Light Value: Far-red vs. White
  misc_feature: MA Experiment 20001451 PARAMETER Experiment Name: At_Far-red-induction_P Parameter: Organism Value: A. thaliana
  misc_feature: MA Experiment 20001451 PARAMETER Experiment Name: At_Far-red-induction_P Parameter: Plant Line Value: Columbia
  misc_feature: MA Experiment 20001451 PARAMETER Experiment Name: At_Far-red-induction_P Parameter: Timepoint (hr) Value: 24
  misc_feature: MA Experiment 20001451 PARAMETER Experiment Name: At_Far-red-induction_P Parameter: Tissue Value: Whole Plant
  misc_feature: MA Experiment ID: 20001906 Result: Down-regulated in Transcription
  misc_feature: MA Experiment 20001906 PARAMETER Experiment Name: At_Drought_Reproduction_P Parameter: Age (day) Value: 35
  misc_feature: MA Experiment 20001906 PARAMETER Experiment Name: At_Drought_Reproduction_P Parameter: Organism Value: A. thaliana
  misc_feature: MA Experiment 20001906 PARAMETER Experiment Name: At_Drought_Reproduction_P Parameter: Plant Line Value: WS
  misc_feature: MA Experiment 20001906 PARAMETER Experiment Name: At_Drought_Reproduction_P Parameter: Timepoint (day) Value: 5
  misc_feature: MA Experiment 20001906 PARAMETER Experiment Name: At_Drought_Reproduction_P Parameter: Tissue Value: Siliques
  misc_feature: MA Experiment 20001906 PARAMETER Experiment Name: At_Drought_Reproduction_P Parameter: Treatment Value: Drought vs. No Drought
  misc_feature: MA Experiment ID: 20001911 Result: Down-regulated in Transcription
  misc_feature: MA Experiment 20001911 PARAMETER Experiment Name: At_Drought_Reproduction_P Parameter: Age (day) Value: 40
  misc_feature: MA Experiment 20001911 PARAMETER Experiment Name: At_Drought_Reproduction_P Parameter: Organism Value: A. thaliana
  misc_feature: MA Experiment 20001911 PARAMETER Experiment Name: At_Drought_Reproduction_P Parameter: Plant Line Value: WS
  misc_feature: MA Experiment 20001911 PARAMETER Experiment Name: At_Drought_Reproduction_P Parameter: Timepoint (day) Value: 10
  misc_feature: MA Experiment 20001911 PARAMETER Experiment Name: At_Drought_Reproduction_P Parameter: Tissue Value: Flowers
  misc_feature: MA Experiment 20001911 PARAMETER Experiment Name: At_Drought_Reproduction_P Parameter: Treatment Value: Drought vs. No Drought

SEQ ID NO: 43194 - protein, 394 aa, Arabidopsis thaliana; identical to SEQ ID NO: 41344
  peptide (1)..(394): Ceres Seq. ID no. 13500026
  misc_feature (51)..(392): Pfam Name: Uroporphyrinogen decarboxylase (URO-D) Pfam Description: Uroporphyrinogen decarboxylase (URO-D)
  misc_feature (51)..(392): Pfam Name: Uroporphyrinogen decarboxylase (URO-D) Pfam Description: Uroporphyrinogen decarboxylase (URO-D)
  misc_feature (52)..(392): Homolog of NCBI NO: 33240529 NR Description: Uroporphyrinogen decarboxylase
  misc_feature (48)..(392): Homolog of NCBI NO: 231982 NR Description: Uroporphyrinogen decarboxylase (URO-D) (UPD)
  misc_feature (50)..(392): Homolog of NCBI NO: 16332025 NR Description: uroporphyrinogen decarboxylase [Synechocystis sp.
  misc_feature (54)..(392): Homolog of NCBI NO: 23041382 NR Description: hypothetical protein [Trichodesmium erythraeum
  misc_feature (63)..(394): Homolog of NCBI NO: 6014938 NR Description: Uroporphyrinogen decarboxylase, chloroplast
  misc_feature (52)..(392): Homolog of NCBI NO: 33240529 NR Description: Uroporphyrinogen decarboxylase
  misc_feature (50)..(392): Homolog of NCBI NO: 16332025 NR Description: uroporphyrinogen decarboxylase [Synechocystis sp.
  misc_feature (63)..(394): Homolog of NCBI NO: 6014938 NR Description: Uroporphyrinogen decarboxylase, chloroplast
  misc_feature (1)..(394): Homolog of NCBI NO: 15226690 NR Description: uroporphyrinogen decarboxylase (UPD), putative
  misc_feature (1)..(394): Homolog of NCBI NO: 14334768 NR Description: putative uroporphyrinogen decarboxylase
  misc_feature (7)..(394): Homolog of NCBI NO: 2501647 NR Description: Uroporphyrinogen decarboxylase, chloroplast
  misc_feature (42)..(394): Homolog of NCBI NO: 16975230 NR Description: Chain A, Crystal Structure And Substrate Binding Of The Uroporphyrinogen-Iii Decarboxylase From Nicotiana Tabacum:
  misc_feature (65)..(394): Homolog of NCBI NO: 2501646 NR Description: Uroporphyrinogen decarboxylase (UPD)
  misc_feature (54)..(392): Homolog of NCBI NO: 23041382 NR Description: hypothetical protein [Trichodesmium erythraeum
  misc_feature (48)..(392): Homolog of NCBI NO: 231982 NR Description: Uroporphyrinogen decarboxylase (URO-D) (UPD)
  misc_feature (65)..(394): Homolog of NCBI NO: 2501646 NR Description: Uroporphyrinogen decarboxylase (UPD)
  misc_feature (42)..(394): Homolog of NCBI NO: 16975230 NR Description: Chain A, Crystal Structure And Substrate Binding Of The Uroporphyrinogen-Iii Decarboxylase From Nicotiana Tabacum:
  misc_feature (7)..(394): Homolog of NCBI NO: 2501647 NR Description: Uroporphyrinogen decarboxylase, chloroplast
  misc_feature (1)..(394): Homolog of NCBI NO: 14334768 NR Description: putative uroporphyrinogen decarboxylase
  misc_feature (1)..(394): Homolog of NCBI NO: 15226690 NR Description: uroporphyrinogen decarboxylase (UPD), putative

SEQ ID NO: 43195 - protein, 322 aa, Arabidopsis thaliana; identical to SEQ ID NO: 41345
  peptide (1)..(322): Ceres Seq. ID no. 13500027
  misc_feature (1)..(320): Pfam Name: Uroporphyrinogen decarboxylase (URO-D) Pfam Description: Uroporphyrinogen decarboxylase (URO-D)
  misc_feature (1)..(320): Pfam Name: Uroporphyrinogen decarboxylase (URO-D) Pfam Description: Uroporphyrinogen decarboxylase (URO-D)
  misc_feature (1)..(320): Homolog of NCBI NO: 33240529 NR Description: Uroporphyrinogen decarboxylase
  misc_feature (1)..(320): Homolog of NCBI NO: 231982 NR Description: Uroporphyrinogen decarboxylase (URO-D) (UPD)
  misc_feature (1)..(320): Homolog of NCBI NO: 16332025 NR Description: uroporphyrinogen decarboxylase [Synechocystis sp.
  misc_feature (1)..(320): Homolog of NCBI NO: 23041382 NR Description: hypothetical protein [Trichodesmium erythraeum
  misc_feature (1)..(322): Homolog of NCBI NO: 6014938 NR Description: Uroporphyrinogen decarboxylase, chloroplast
  misc_feature (1)..(320): Homolog of NCBI NO: 33240529 NR Description: Uroporphyrinogen decarboxylase
  misc_feature (1)..(320): Homolog of NCBI NO: 16332025 NR Description: uroporphyrinogen decarboxylase [Synechocystis sp.
  misc_feature (1)..(322): Homolog of NCBI NO: 6014938 NR Description: Uroporphyrinogen decarboxylase, chloroplast
  misc_feature (1)..(322): Homolog of NCBI NO: 15226690 NR Description: uroporphyrinogen decarboxylase (UPD), putative
  misc_feature (1)..(322): Homolog of NCBI NO: 14334768 NR Description: putative uroporphyrinogen decarboxylase
  misc_feature (1)..(322): Homolog of NCBI NO: 2501647 NR Description: Uroporphyrinogen decarboxylase, chloroplast
  misc_feature (1)..(322): Homolog of NCBI NO: 16975230 NR Description: Chain A, Crystal Structure And Substrate Binding Of The Uroporphyrinogen-Iii Decarboxylase From Nicotiana Tabacum:
  misc_feature (1)..(322): Homolog of NCBI NO: 2501646 NR Description: Uroporphyrinogen decarboxylase (UPD)
  misc_feature (1)..(320): Homolog of NCBI NO: 23041382 NR Description: hypothetical protein [Trichodesmium erythraeum
  misc_feature (1)..(320): Homolog of NCBI NO: 231982 NR Description: Uroporphyrinogen decarboxylase (URO-D) (UPD)
  misc_feature (1)..(322): Homolog of NCBI NO: 2501646 NR Description: Uroporphyrinogen decarboxylase (UPD)
  misc_feature (1)..(322): Homolog of NCBI NO: 16975230 NR Description: Chain A, Crystal Structure And Substrate Binding Of The Uroporphyrinogen-Iii Decarboxylase From Nicotiana Tabacum:
  misc_feature (1)..(322): Homolog of NCBI NO: 2501647 NR Description: Uroporphyrinogen decarboxylase, chloroplast
  misc_feature (1)..(322): Homolog of NCBI NO: 14334768 NR Description: putative uroporphyrinogen decarboxylase
  misc_feature (1)..(322): Homolog of NCBI NO: 15226690 NR Description: uroporphyrinogen decarboxylase (UPD), putative

SEQ ID NO: 43196 - protein, 315 aa, Arabidopsis thaliana; identical to SEQ ID NO: 41346
  peptide (1)..(315): Ceres Seq. ID no. 13500028
  misc_feature (1)..(313): Pfam Name: Uroporphyrinogen decarboxylase (URO-D) Pfam Description: Uroporphyrinogen decarboxylase (URO-D)
  misc_feature (1)..(313): Pfam Name: Uroporphyrinogen decarboxylase (URO-D) Pfam Description: Uroporphyrinogen decarboxylase (URO-D)
  misc_feature (1)..(313): Homolog of NCBI NO: 33240529 NR Description: Uroporphyrinogen decarboxylase
  misc_feature (1)..(313): Homolog of NCBI NO: 231982 NR Description: Uroporphyrinogen decarboxylase (URO-D) (UPD)
  misc_feature (1)..(313): Homolog of NCBI NO: 16332025 NR Description: uroporphyrinogen decarboxylase [Synechocystis sp.
  misc_feature (1)..(313): Homolog of NCBI NO: 23041382 NR Description: hypothetical protein [Trichodesmium erythraeum
  misc_feature (1)..(315): Homolog of NCBI NO: 6014938 NR Description: Uroporphyrinogen decarboxylase, chloroplast
  misc_feature (1)..(313): Homolog of NCBI NO: 33240529 NR Description: Uroporphyrinogen decarboxylase
  misc_feature (1)..(313): Homolog of NCBI NO: 16332025 NR Description: uroporphyrinogen decarboxylase [Synechocystis sp.
  misc_feature (1)..(315): Homolog of NCBI NO: 6014938 NR Description: Uroporphyrinogen decarboxylase, chloroplast
  misc_feature (1)..(315): Homolog of NCBI NO: 15226690 NR Description: uroporphyrinogen decarboxylase (UPD), putative
  misc_feature (1)..(315): Homolog of NCBI NO: 14334768 NR Description: putative uroporphyrinogen decarboxylase
  misc_feature (1)..(315): Homolog of NCBI NO: 2501647 NR Description: Uroporphyrinogen decarboxylase, chloroplast
  misc_feature (1)..(315): Homolog of NCBI NO: 16975230 NR Description: Chain A, Crystal Structure And Substrate Binding Of The Uroporphyrinogen-Iii Decarboxylase From Nicotiana Tabacum:
  misc_feature (1)..(315): Homolog of NCBI NO: 2501646 NR Description: Uroporphyrinogen decarboxylase (UPD)
  misc_feature (1)..(313): Homolog of NCBI NO: 23041382 NR Description: hypothetical protein [Trichodesmium erythraeum
  misc_feature (1)..(313): Homolog of NCBI NO: 231982 NR Description: Uroporphyrinogen decarboxylase (URO-D) (UPD)
  misc_feature (1)..(315): Homolog of NCBI NO: 2501646 NR Description: Uroporphyrinogen decarboxylase (UPD)
  misc_feature (1)..(315): Homolog of NCBI NO: 16975230 NR Description: Chain A, Crystal Structure And Substrate Binding Of The Uroporphyrinogen-Iii Decarboxylase From Nicotiana Tabacum:
  misc_feature (1)..(315): Homolog of NCBI NO: 2501647 NR Description: Uroporphyrinogen decarboxylase, chloroplast
  misc_feature (1)..(315): Homolog of NCBI NO: 14334768 NR Description: putative uroporphyrinogen decarboxylase
  misc_feature (1)..(315): Homolog of NCBI NO: 15226690 NR Description: uroporphyrinogen decarboxylase (UPD), putative

SEQ ID NO: 43197 - DNA, 1274 bp, Arabidopsis thaliana
  misc_feature (1)..(1274): Ceres Seq. ID no. 12330715
  misc_feature: MA Experiment ID: 108434 Result: Up-regulated in Transcription
  misc_feature: MA Experiment 108434 PARAMETER Experiment Name: At_Root_Tips_cDNA_P Parameter: Tissue Value: Root Tips
  misc_feature: MA Experiment ID: 108461 Result: Down-regulated in Transcription
  misc_feature: MA Experiment 108461 PARAMETER Experiment Name: At_Germinating_Seeds_cDNA_P Parameter: Age (day) Value: 1 vs. 0
  misc_feature: MA Experiment 108461 PARAMETER Experiment Name: At_Germinating_Seeds_cDNA_P Parameter: Tissue Value: Germinating Seeds
  misc_feature: MA Experiment ID: 108462 Result: Down-regulated in Transcription
  misc_feature: MA Experiment 108462 PARAMETER Experiment Name: At_Germinating_Seeds_cDNA_P Parameter: Age (day) Value: 2 vs. 0
  misc_feature: MA Experiment 108462 PARAMETER Experiment Name: At_Germinating_Seeds_cDNA_P Parameter: Tissue Value: Germinating Seeds
  misc_feature: MA Experiment ID: 108463 Result: Down-regulated in Transcription
  misc_feature: MA Experiment 108463 PARAMETER Experiment Name: At_Germinating_Seeds_cDNA_P Parameter: Age (day) Value: 3 vs. 0
  misc_feature: MA Experiment 108463 PARAMETER Experiment Name: At_Germinating_Seeds_cDNA_P Parameter: Tissue Value: Germinating Seeds
  misc_feature: MA Experiment ID: 108464 Result: Down-regulated in Transcription
  misc_feature: MA Experiment 108464 PARAMETER Experiment Name: At_Germinating_Seeds_cDNA_P Parameter: Age (day) Value: 4 vs. 0
  misc_feature: MA Experiment 108464 PARAMETER Experiment Name: At_Germinating_Seeds_cDNA_P Parameter: Tissue Value: Germinating Seeds
  misc_feature: MA Experiment ID: 20000111 Result: Up-regulated in Transcription
  misc_feature: MA Experiment 20000111 PARAMETER Experiment Name: At_42deg_Heat_cDNA_P Parameter: Temperature (deg C) Value: 42 vs. 22
  misc_feature: MA Experiment 20000111 PARAMETER Experiment Name: At_42deg_Heat_cDNA_P Parameter: Timepoint (hr) Value: 6
  misc_feature: MA Experiment 20000111 PARAMETER Experiment Name: At_42deg_Heat_cDNA_P Parameter: Tissue Value: Aerial
  misc_feature: MA Experiment ID: 20000227 Result: Up-regulated in Transcription
  misc_feature: MA Experiment 20000227 PARAMETER Experiment Name: At_Root-Tips-vs-Tops_P Parameter: Tissue Value: Root Tips vs. Root Tops
cctccagaagcctaaaaccttcaccaccaaatcggtgcctccttgaatagtcgccgccgtcgtctatcatcgccgcttgtgactccgatgagaagctaggttattgaatcagagattatggctgcttcaatttcaagaaggatttttcgcacttttggatccttttcagctctaggacgttcctcttcaccaaatttgtctgcgaatacatctggaaatggtttagcttctcttactaatgatctaaagtatggaatggctttactttccaaccgaaagctctccacttctattttgactcctgatgattcatttccttctgatttacttaccaaaaagactgtgcttacaccagaccgaaccataggacaatatcaagacttggtcattccagtgactaattttcagaacgaggaaaagggtttcatggttttagcaggtgatgtctttgatgttccaataaggaaagatatcattcacaatgtcgtgcgatggcagcttgcgaaacgccagcagggaactcattcgaccaaaacgttaagtgaggttagtggaactggtagaaagccatggaatcagaagggtacaggtcgagctagacatggtacactacgtggtccgcagttccgaggtggttgtgtaatgcatggacccaaaccaagaagccatgccataaaaatgaataagcaggttcgacggcttggactgaaaatagcattgacagctcgagccgcagaaggaaaactcctcgtgtttgatgatttgggattgcctacgcataaaacaaagaacattgtgaactattacaaccaaatggagaacacaaagaaagtccttgttgtagaaggtggtcctattgatgaaaagctgaagctagccacccaaaatctacactatgtcaacataattccatcaatagggctaaatgtttacagcattctgctacacgatacgcttctgatgtcccgtgatgctgtgaataagatcgttgagcgtatgcacactcctattaaccgttgaagagacaacaatgtcttaaaatggcactctcaataagaatactagatcacaaggaatcccgcatgtagtatctgtaccggttcattgtttgttagctttttggtctggttttgcaacatagaatggtgaaggattgagttttaaaataatgaatggtgatactatttctatgtttttagacattctttttttaccgttttaaatatgacttacgcttttgtgtttttgaaaagcgattttgatagaaaatttct

SEQ ID NO: 43198 - protein, 300 aa, Arabidopsis thaliana
  peptide (1)..(300): Ceres Seq. ID no. 12330716
  misc_feature (103)..(293): Pfam Name: Ribosomal protein L4/L1 family Pfam Description: Ribosomal protein L4/L1 family
  misc_feature (93)..(293): Homolog of NCBI NO: 15889241 NR Description: AGR_C_3553p [Agrobacterium tumefaciens]
  misc_feature (91)..(293): Homolog of NCBI NO: 15965110 NR Description: PROBABLE 50S RIBOSOMAL PROTEIN L4 [Sinorhizobium
  misc_feature (91)..(293): Homolog of NCBI NO: 13470552 NR Description: 50S ribosomal protein L4 [Mesorhizobium loti]
  misc_feature (93)..(294): Homolog of NCBI NO: 23014087 NR Description: hypothetical protein [Magnetospirillum
  misc_feature (93)..(294): Homolog of NCBI NO: 15604504 NR Description: 50S RIBOSOMAL PROTEIN L4 (rplD) [Rickettsia
  misc_feature (93)..(294): Homolog of NCBI NO: 15892928 NR Description: 50S ribosomal protein L4 [Rickettsia conorii]
  misc_feature (93)..(294): Homolog of NCBI NO: 22966121 NR Description: hypothetical protein [Rhodospirillum rubrum]
  misc_feature (36)..(300): Homolog of NCBI NO: 25411960 NR Description: 50S ribosomal protein L4 [imported] - Arabidopsis
  misc_feature (1)..(300): Homolog of NCBI NO: 21553676 NR Description: 50S ribosomal protein L4 [Arabidopsis thaliana]
  misc_feature (1)..(300): Homolog of NCBI NO: 18399235 NR Description: 50S ribosomal protein L4
MAASISRRIFRTFGSFSALGRSSSPNLSANTSGNGLASLTNDLKYGMALLSNRKLSTSILTPDDSFPSDLLTKKTVLTPDRTIGQYQDLVIPVTNFQNEEKGFMVLAGDVFDVPIRKDIIHNVVRWQLAKRQQGTHSTKTLSEVSGTGRKPWNQKGTGRARHGTLRGPQFRGGCVMHGPKPRSHAIKMNKQVRRLGLKIALTARAAEGKLLVFDDLGLPTHKTKNIVNYYNQMENTKKVLVVEGGPIDEKLKLATQNLHYVNIIPSIGLNVYSILLHDTLLMSRDAVNKIVERMHTPINR

SEQ ID NO: 43199 - protein, 254 aa, Arabidopsis thaliana
  peptide (1)..(254): Ceres Seq. ID no. 12330717
  misc_feature (57)..(247): Pfam Name: Ribosomal protein L4/L1 family Pfam Description: Ribosomal protein L4/L1 family
  misc_feature (47)..(247): Homolog of NCBI NO: 15889241 NR Description: AGR_C_3553p [Agrobacterium tumefaciens]
  misc_feature (45)..(247): Homolog of NCBI NO: 15965110 NR Description: PROBABLE 50S RIBOSOMAL PROTEIN L4 [Sinorhizobium
  misc_feature (45)..(247): Homolog of NCBI NO: 13470552 NR Description: 50S ribosomal protein L4 [Mesorhizobium loti]
  misc_feature (47)..(248): Homolog of NCBI NO: 23014087 NR Description: hypothetical protein [Magnetospirillum
  misc_feature (47)..(248): Homolog of NCBI NO: 15604504 NR Description: 50S RIBOSOMAL PROTEIN L4 (rplD) [Rickettsia
  misc_feature (47)..(248): Homolog of NCBI NO: 15892928 NR Description: 50S ribosomal protein L4 [Rickettsia conorii]
  misc_feature (47)..(248): Homolog of NCBI NO: 22966121 NR Description: hypothetical protein [Rhodospirillum rubrum]
  misc_feature (1)..(254): Homolog of NCBI NO: 25411960 NR Description: 50S ribosomal protein L4 [imported] - Arabidopsis
  misc_feature (1)..(254): Homolog of NCBI NO: 21553676 NR Description: 50S ribosomal protein L4 [Arabidopsis thaliana]
  misc_feature (1)..(254): Homolog of NCBI NO: 18399235 NR Description: 50S ribosomal protein L4
MALLSNRKLSTSILTPDDSFPSDLLTKKTVLTPDRTIGQYQDLVIPVTNFQNEEKGFMVLAGDVFDVPIRKDIIHNVVRWQLAKRQQGTHSTKTLSEVSGTGRKPWNQKGTGRARHGTLRGPQFRGGCVMHGPKPRSHAIKMNKQVRRLGLKIALTARAAEGKLLVFDDLGLPTHKTKNIVNYYNQMENTKKVLVVEGGPIDEKLKLATQNLHYVNIIPSIGLNVYSILLHDTLLMSRDAVNKIVERMHTPINR

SEQ ID NO: 43200 - protein, 197 aa, Arabidopsis thaliana
  peptide (1)..(197): Ceres Seq. ID no. 12330718
  misc_feature (1)..(190): Pfam Name: Ribosomal protein L4/L1 family Pfam Description: Ribosomal protein L4/L1 family
  misc_feature (1)..(190): Homolog of NCBI NO: 15889241 NR Description: AGR_C_3553p [Agrobacterium tumefaciens]
  misc_feature (1)..(190): Homolog of NCBI NO: 15965110 NR Description: PROBABLE 50S RIBOSOMAL PROTEIN L4 [Sinorhizobium
  misc_feature (1)..(190): Homolog of NCBI NO: 13470552 NR Description: 50S ribosomal protein L4 [Mesorhizobium loti]
  misc_feature (1)..(191): Homolog of NCBI NO: 23014087 NR Description: hypothetical protein [Magnetospirillum
  misc_feature (1)..(191): Homolog of NCBI NO: 15604504 NR Description: 50S RIBOSOMAL PROTEIN L4 (rplD) [Rickettsia
  misc_feature (1)..(191): Homolog of NCBI NO: 15892928 NR Description: 50S ribosomal protein L4 [Rickettsia conorii]
  misc_feature (1)..(191): Homolog of NCBI NO: 22966121 NR Description: hypothetical protein [Rhodospirillum rubrum]
  misc_feature (1)..(197): Homolog of NCBI NO: 25411960 NR Description: 50S ribosomal protein L4 [imported] - Arabidopsis
  misc_feature (1)..(197): Homolog of NCBI NO: 21553676 NR Description: 50S ribosomal protein L4 [Arabidopsis thaliana]
  misc_feature (1)..(197): Homolog of NCBI NO: 18399235 NR Description: 50S ribosomal protein L4
MVLAGDVFDVPIRKDIIHNVVRWQLAKRQQGTHSTKTLSEVSGTGRKPWNQKGTGRARHGTLRGPQFRGGCVMHGPKPRSHAIKMNKQVRRLGLKIALTARAAEGKLLVFDDLGLPTHKTKNIVNYYNQMENTKKVLVVEGGPIDEKLKLATQNLHYVNIIPSIGLNVYSILLHDTLLMSRDAVNKIVERMHTPINR

SEQ ID NO: 43201 - DNA, 1391 bp, Arabidopsis thaliana
  misc_feature (1)..(1391): Ceres Seq. ID no. 13489448
  misc_feature: MA Experiment ID: 108488 Result: Down-regulated in Transcription
  misc_feature: MA Experiment ID: 108501 Result: Down-regulated in Transcription
  misc_feature: MA Experiment 108501 PARAMETER Experiment Name: At_ap2_floral_buds_cDNA_P Parameter: Plant Line Value: ap2 (Ler.)
  misc_feature: MA Experiment 108501 PARAMETER Experiment Name: At_ap2_floral_buds_cDNA_P Parameter: Tissue Value: Closed Flower
  misc_feature: MA Experiment ID: 108573 Result: Up-regulated in Transcription
  misc_feature: MA Experiment 108573 PARAMETER Experiment Name: At_Drought_cDNA_P Parameter: Timepoint (hr) Value: 6
  misc_feature: MA Experiment 108573 PARAMETER Experiment Name: At_Drought_cDNA_P Parameter: Tissue Value: Aerial
  misc_feature: MA Experiment 108573 PARAMETER Experiment Name: At_Drought_cDNA_P Parameter: Treatment Value: Drought vs. No Drought
  misc_feature: MA Experiment ID: 108595 Result: Down-regulated in Transcription
  misc_feature: MA Experiment 108595 PARAMETER Experiment Name: At_Ler-pi_Ovule_cDNA_P Parameter: Plant Line Value: null
  misc_feature: MA Experiment ID: 20000184 Result: Down-regulated in Transcription
  misc_feature: MA Experiment 20000184 PARAMETER Experiment Name: At_Shoots__P Parameter: Age (day) Value: 7
  misc_feature: MA Experiment 20000184 PARAMETER Experiment Name: At_Shoots__P Parameter: Tissue Value: Shoots vs. Whole Plant
  misc_feature: MA Experiment ID: 20000224 Result: Up-regulated in Transcription
  misc_feature: MA Experiment ID: 20000234 Result: Down-regulated in Transcription
  misc_feature: MA Experiment 20000234 PARAMETER Experiment Name: At_Siliques_P Parameter: Age (day) Value: 21
  misc_feature: MA Experiment 20000234 PARAMETER Experiment Name: At_Siliques_P Parameter: Organism Value: A. thaliana
  misc_feature: MA Experiment 20000234 PARAMETER Experiment Name: At_Siliques_P Parameter: Plant Line Value: WS
  misc_feature: MA Experiment 20000234 PARAMETER Experiment Name: At_Siliques_P Parameter: Tissue Value: Less Than 5mm Siliques vs. Whole Plant
  misc_feature: MA Experiment ID: 20000235 Result: Down-regulated in Transcription
  misc_feature: MA Experiment 20000235 PARAMETER Experiment Name: At_Siliques_P Parameter: Age (day) Value: 21
  misc_feature: MA Experiment 20000235 PARAMETER Experiment Name: At_Siliques_P Parameter: Organism Value: A. thaliana
  misc_feature: MA Experiment 20000235 PARAMETER Experiment Name: At_Siliques_P Parameter: Plant Line Value: WS
  misc_feature: MA Experiment 20000235 PARAMETER Experiment Name: At_Siliques_P Parameter: Tissue Value: 5-10mm Siliques vs. Whole Plant
  misc_feature: MA Experiment ID: 20001557 Result: Down-regulated in Transcription
  misc_feature: MA Experiment 20001557 PARAMETER Experiment Name: At_Drought_Soil_Dry_P Parameter: Age (day) Value: 27
  misc_feature: MA Experiment 20001557 PARAMETER Experiment Name: At_Drought_Soil_Dry_P Parameter: Organism Value: A. thaliana
  misc_feature: MA Experiment 20001557 PARAMETER Experiment Name: At_Drought_Soil_Dry_P Parameter: Plant Line Value: WS
  misc_feature: MA Experiment 20001557 PARAMETER Experiment Name: At_Drought_Soil_Dry_P Parameter: Post Timepoint (hr) Value: 3
  misc_feature: MA Experiment 20001557 PARAMETER Experiment Name: At_Drought_Soil_Dry_P Parameter: Post-Treatment Value: Re-Water vs. No Drought
  misc_feature: MA Experiment 20001557 PARAMETER Experiment Name: At_Drought_Soil_Dry_P Parameter: Timepoint (day) Value: 13
  misc_feature: MA Experiment 20001557 PARAMETER Experiment Name: At_Drought_Soil_Dry_P Parameter: Treatment Value: Drought vs. No Drought
  misc_feature: MA Experiment ID: 20001558 Result: Down-regulated in Transcription
  misc_feature: MA Experiment 20001558 PARAMETER Experiment Name: At_Drought_Soil_Dry_P Parameter: Age (day) Value: 27
  misc_feature: MA Experiment 20001558 PARAMETER Experiment Name: At_Drought_Soil_Dry_P Parameter: Organism Value: A. thaliana
  misc_feature: MA Experiment 20001558 PARAMETER Experiment Name: At_Drought_Soil_Dry_P Parameter: Plant Line Value: WS
  misc_feature: MA Experiment 20001558 PARAMETER Experiment Name: At_Drought_Soil_Dry_P Parameter: Post Timepoint (hr) Value: 6
  misc_feature: MA Experiment 20001558 PARAMETER Experiment Name: At_Drought_Soil_Dry_P Parameter: Post-Treatment Value: Re-Water vs. No Drought
  misc_feature: MA Experiment 20001558 PARAMETER Experiment Name: At_Drought_Soil_Dry_P Parameter: Timepoint (day) Value: 13
  misc_feature: MA Experiment 20001558 PARAMETER Experiment Name: At_Drought_Soil_Dry_P Parameter: Treatment Value: Drought vs. No Drought
  misc_feature: MA Experiment ID: 20001560 Result: Down-regulated in Transcription
  misc_feature: MA Experiment 20001560 PARAMETER Experiment Name: At_Drought_Soil_Dry_P Parameter: Age (day) Value: 28
  misc_feature: MA Experiment 20001560 PARAMETER Experiment Name: At_Drought_Soil_Dry_P Parameter: Organism Value: A. thaliana
  misc_feature: MA Experiment 20001560 PARAMETER Experiment Name: At_Drought_Soil_Dry_P Parameter: Plant Line Value: WS
  misc_feature: MA Experiment 20001560 PARAMETER Experiment Name: At_Drought_Soil_Dry_P Parameter: Post Timepoint (hr) Value: None
  misc_feature: MA Experiment 20001560 PARAMETER Experiment Name: At_Drought_Soil_Dry_P Parameter: Post-Treatment Value: None
  misc_feature: MA Experiment 20001560 PARAMETER Experiment Name: At_Drought_Soil_Dry_P Parameter: Timepoint (day) Value: 14
  misc_feature: MA Experiment 20001560 PARAMETER Experiment Name: At_Drought_Soil_Dry_P Parameter: Treatment Value: Drought vs. No Drought
gtctccgaaacgcaaccgcagagaacccaaatttatatcattctatatcttctcttcttcaccggcgtacaatagcactcaactcttaacttacgcacctctcttctctcatggcggtttcagtctcagctccggttttgtccctctgttacaatcagagcggcgaattgtctcgtagtttgggatatagactaccgaagaaagtgggatttagctctggtcgtcgttcagtgagttatatcggtttcggtgcggagaaagttggaagatttagggttagggttccgatttgcagagctgtacctcctctcttgttcaaagatctcgatgctgatgatttccgacatccttttgataagcagaacacgttgttactaagggctataccggggttgaacgaattcggcaaagctcttttagggtcaatgacggagcagattatgcttcttgagaacattgggacttctgttcttgtttccaagaatcagctctctgatcttcacggtttgttggttgaggctgctgagattttgaatatagaggctcctgatctatatgtgcgacagagtcctgttcctaatgcgtatacgctggcaataagcggtaagaagccgtttattgttgtccacaccagcttgatcgagcttcttactagcgcggagctacaggctgtcttagcccatgaactaggccatctgaagtgtgatcacggcgtgtggctcacatttgcaaatattcttactcttggggcttatacagttcctgcttttgggcaaatgatagctcgaaccttggaagaacagttacttcgttggctacgttcagcagagctgacttgtgatcgcgcagcactactcgtcgcccaagatccaaaggttgttgtatctgttctgatgaaattagccggaggatgtccatcaatcgctgatcagctaaatgttgacgcatttctagaacaagcccgttcatatgacaaagcttcttcaagccccttgggatggtacataagaaatgctcagactagtcaactttcgcatccattgccggttcttcgtgcacgtgagattgatgagtggtccaggagtctcgagtacaaaagtctcctgaaacgggcaaatcgaaaaagcacagtacagaaggtttagtgacgttgttaaagatttaaaaggaaggaagcgaaataaacatgtataggaacaatacagaaggagcaaagaagaaatgagagattggactctaggtctaaataggtactgtaaaactcttgtatttatttagtggcatactggcattgttgtatatcttataactgtaatagataaattcaaatgtatattccggaaaacaaaagggccttagctcaaagataatatatgataaagattgtttgt

SEQ ID NO: 43202 - protein, 344 aa, Arabidopsis thaliana
  peptide (1)..(344): Ceres Seq. ID no. 13489449
  misc_feature (70)..(332): Homolog of NCBI NO: 23017259 NR Description: hypothetical protein [Thermobifida fusca]
  misc_feature (66)..(233): Homolog of NCBI NO: 23124774 NR Description: hypothetical protein [Nostoc punctiforme]
  misc_feature (113)..(333): Homolog of NCBI NO: 23042718 NR Description: hypothetical protein [Trichodesmium erythraeum
  misc_feature (69)..(332): Homolog of NCBI NO: 37523123 NR Description: hypothetical protein glr3554 [Gloeobacter
  misc_feature (64)..(334): Homolog of NCBI NO: 22298181 NR Description: ORF_ID:tll0639~hypothetical protein
  misc_feature (72)..(336): Homolog of NCBI NO: 16330161 NR Description: hypothetical protein [Synechocystis sp. PCC 6803]
  misc_feature (66)..(340): Homolog of NCBI NO: 17227669 NR Description: hypothetical protein [Nostoc sp. PCC 7120]
  misc_feature (53)..(334): Homolog of NCBI NO: 34905986 NR Description: P0518C01.3 [Oryza sativa (japonica
  misc_feature (1)..(344): Homolog of NCBI NO: 21553677 NR Description: unknown [Arabidopsis thaliana]
  misc_feature (1)..(344): Homolog of NCBI NO: 18405231 NR Description: expressed protein [Arabidopsis thaliana]
MAVSVSAPVLSLCYNQSGELSRSLGYRLPKKVGFSSGRRSVSYIGFGAEKVGRFRVRVPICRAVPPLLFKDLDADDFRHPFDKQNTLLLRAIPGLNEFGKALLGSMTEQIMLLENIGTSVLVSKNQLSDLHGLLVEAAEILNIEAPDLYVRQSPVPNAYTLAISGKKPFIVVHTSLIELLTSAELQAVLAHELGHLKCDHGVWLTFANILTLGAYTVPAFGQMIARTLEEQLLRWLRSAELTCDRAALLVAQDPKVVVSVLMKLAGGCPSIADQLNVDAFLEQARSYDKASSSPLGWYIRNAQTSQLSHPLPVLRAREIDEWSRSLEYKSLLKRANRKSTVQKV

SEQ ID NO: 43203 - protein, 239 aa, Arabidopsis thaliana
  peptide (1)..(239): Ceres Seq. ID no. 13489450
  misc_feature (1)..(227): Homolog of NCBI NO: 23017259 NR Description: hypothetical protein [Thermobifida fusca]
  misc_feature (1)..(128): Homolog of NCBI NO: 23124774 NR Description: hypothetical protein [Nostoc punctiforme]
  misc_feature (8)..(228): Homolog of NCBI NO: 23042718 NR Description: hypothetical protein [Trichodesmium erythraeum
  misc_feature (1)..(227): Homolog of NCBI NO: 37523123 NR Description: hypothetical protein glr3554 [Gloeobacter
  misc_feature (1)..(229): Homolog of NCBI NO: 22298181 NR Description: ORF_ID:tll0639~hypothetical protein
  misc_feature (1)..(231): Homolog of NCBI NO: 16330161 NR Description: hypothetical protein [Synechocystis sp. PCC 6803]
  misc_feature (1)..(235): Homolog of NCBI NO: 17227669 NR Description: hypothetical protein [Nostoc sp. PCC 7120]
  misc_feature (1)..(229): Homolog of NCBI NO: 34905986 NR Description: P0518C01.3 [Oryza sativa (japonica
  misc_feature (1)..(239): Homolog of NCBI NO: 21553677 NR Description: unknown [Arabidopsis thaliana]
  misc_feature (1)..(239): Homolog of NCBI NO: 18405231 NR Description: expressed protein [Arabidopsis thaliana]
MTEQIMLLENIGTSVLVSKNQLSDLHGLLVEAAEILNIEAPDLYVRQSPVPNAYTLAISGKKPFIVVHTSLIELLTSAELQAVLAHELGHLKCDHGVWLTFANILTLGAYTVPAFGQMIARTLEEQLLRWLRSAELTCDRAALLVAQDPKVVVSVLMKLAGGCPSIADQLNVDAFLEQARSYDKASSSPLGWYIRNAQTSQLSHPLPVLRAREIDEWSRSLEYKSLLKRANRKSTVQKV

SEQ ID NO: 43204 - protein, 234 aa, Arabidopsis thaliana
  peptide (1)..(234): Ceres Seq. ID no. 13489451
  misc_feature (1)..(222): Homolog of NCBI NO: 23017259 NR Description: hypothetical protein [Thermobifida fusca]
  misc_feature (1)..(123): Homolog of NCBI NO: 23124774 NR Description: hypothetical protein [Nostoc punctiforme]
  misc_feature (3)..(223): Homolog of NCBI NO: 23042718 NR Description: hypothetical protein [Trichodesmium erythraeum
  misc_feature (1)..(222): Homolog of NCBI NO: 37523123 NR Description: hypothetical protein glr3554 [Gloeobacter
  misc_feature (1)..(224): Homolog of NCBI NO: 22298181 NR Description: ORF_ID:tll0639~hypothetical protein
  misc_feature (1)..(226): Homolog of NCBI NO: 16330161 NR Description: hypothetical protein [Synechocystis sp. PCC 6803]
  misc_feature (1)..(230): Homolog of NCBI NO: 17227669 NR Description: hypothetical protein [Nostoc sp. PCC 7120]
  misc_feature (1)..(224): Homolog of NCBI NO: 34905986 NR Description: P0518C01.3 [Oryza sativa (japonica
  misc_feature (1)..(234): Homolog of NCBI NO: 21553677 NR Description: unknown [Arabidopsis thaliana]
  misc_feature (1)..(234): Homolog of NCBI NO: 18405231 NR Description: expressed protein [Arabidopsis thaliana]
MLLENIGTSVLVSKNQLSDLHGLLVEAAEILNIEAPDLYVRQSPVPNAYTLAISGKKPFIVVHTSLIELLTSAELQAVLAHELGHLKCDHGVWLTFANILTLGAYTVPAFGQMIARTLEEQLLRWLRSAELTCDRAALLVAQDPKVVVSVLMKLAGGCPSIADQLNVDAFLEQARSYDKASSSPLGWYIRNAQTSQLSHPLPVLRAREIDEWSRSLEYKSLLKRANRKSTVQKV

SEQ ID NO: 43205 - DNA, 1741 bp, Arabidopsis thaliana
  misc_feature (1)..(1741): Ceres Seq. ID no. 12370765
  misc_feature: MA Experiment ID: 108434 Result: Down-regulated in Transcription
  misc_feature: MA Experiment 108434 PARAMETER Experiment Name: At_Root_Tips_cDNA_P Parameter: Tissue Value: Root Tips
  misc_feature: MA Experiment ID: 108435 Result: Down-regulated in Transcription
  misc_feature: MA Experiment 108435 PARAMETER Experiment Name: At_stm_Mutants_cDNA_P Parameter: Plant Line Value: wt Landsburg vs stm
  misc_feature: MA Experiment 108435 PARAMETER Experiment Name: At_stm_Mutants_cDNA_P Parameter: Tissue Value: Shoot Apical Meristem Region
  misc_feature: MA Experiment ID: 108461 Result: Up-regulated in Transcription
  misc_feature: MA Experiment 108461 PARAMETER Experiment Name: At_Germinating_Seeds_cDNA_P Parameter: Age (day) Value: 1 vs. 0
  misc_feature: MA Experiment 108461 PARAMETER Experiment Name: At_Germinating_Seeds_cDNA_P Parameter: Tissue Value: Germinating Seeds
  misc_feature: MA Experiment ID: 108462 Result: Up-regulated in Transcription
  misc_feature: MA Experiment 108462 PARAMETER Experiment Name: At_Germinating_Seeds_cDNA_P Parameter: Age (day) Value: 2 vs. 0
  misc_feature: MA Experiment 108462 PARAMETER Experiment Name: At_Germinating_Seeds_cDNA_P Parameter: Tissue Value: Germinating Seeds
  misc_feature: MA Experiment ID: 108463 Result: Up-regulated in Transcription
  misc_feature: MA Experiment 108463 PARAMETER Experiment Name: At_Germinating_Seeds_cDNA_P Parameter: Age (day) Value: 3 vs. 0
  misc_feature: MA Experiment 108463 PARAMETER Experiment Name: At_Germinating_Seeds_cDNA_P Parameter: Tissue Value: Germinating Seeds
  misc_feature: MA Experiment ID: 108464 Result: Up-regulated in Transcription
  misc_feature: MA Experiment 108464 PARAMETER Experiment Name: At_Germinating_Seeds_cDNA_P Parameter: Age (day) Value: 4 vs. 0
  misc_feature: MA Experiment 108464 PARAMETER Experiment Name: At_Germinating_Seeds_cDNA_P Parameter: Tissue Value: Germinating Seeds
  misc_feature: MA Experiment ID: 108474 Result: Up-regulated in Transcription
  misc_feature: MA Experiment 108474 PARAMETER Experiment Name: At_Drought_Flowers_cDNA_P Parameter: Timepoint (hr) Value: null
  misc_feature: MA Experiment 108474 PARAMETER Experiment Name: At_Drought_Flowers_cDNA_P Parameter: Treatment Value: Drought vs. No Drought
  misc_feature: MA Experiment ID: 108595 Result: Down-regulated in Transcription
  misc_feature: MA Experiment 108595 PARAMETER Experiment Name: At_Ler-pi_Ovule_cDNA_P Parameter: Plant Line Value: null
  misc_feature: MA Experiment ID: 108668 Result: Down-regulated in Transcription
  misc_feature: MA Experiment 108668 PARAMETER Experiment Name: At_2mM_SA_cDNA_P Parameter: Plant Line Value: WS
  misc_feature: MA Experiment 108668 PARAMETER Experiment Name: At_2mM_SA_cDNA_P Parameter: Timepoint (hr) Value: 6
  misc_feature: MA Experiment 108668 PARAMETER Experiment Name: At_2mM_SA_cDNA_P Parameter: Treatment Value: 2mM SA vs. No Treatment
  misc_feature: MA Experiment ID: 20000069 Result: Down-regulated in Transcription
  misc_feature: MA Experiment 20000069 PARAMETER Experiment Name: At_100uM_ABA_Mutants_cDNA_P Parameter: Plant Line Value: CS23
  misc_feature: MA Experiment 20000069 PARAMETER Experiment Name: At_100uM_ABA_Mutants_cDNA_P Parameter: Timepoint (hr) Value: 6
  misc_feature: MA Experiment 20000069 PARAMETER Experiment Name: At_100uM_ABA_Mutants_cDNA_P Parameter: Tissue Value: Aerial
  misc_feature: MA Experiment 20000069 PARAMETER Experiment Name: At_100uM_ABA_Mutants_cDNA_P Parameter: Treatment Value: 100uM ABA vs. No Treatment
  misc_feature: MA Experiment ID: 20000070 Result: Down-regulated in Transcription
  misc_feature: MA Experiment 20000070 PARAMETER Experiment Name: At_100uM_ABA_Mutants_cDNA_P Parameter: Plant Line Value: CS24
  misc_feature: MA Experiment 20000070 PARAMETER Experiment Name: At_100uM_ABA_Mutants_cDNA_P Parameter: Timepoint (hr) Value: 6
  misc_feature: MA Experiment 20000070 PARAMETER Experiment Name: At_100uM_ABA_Mutants_cDNA_P Parameter: Tissue Value: Aerial
  misc_feature: MA Experiment 20000070 PARAMETER Experiment Name: At_100uM_ABA_Mutants_cDNA_P Parameter: Treatment Value: 100uM ABA vs. No Treatment
  misc_feature: MA Experiment ID: 20000071 Result: Down-regulated in Transcription
  misc_feature: MA Experiment 20000071 PARAMETER Experiment Name: At_100uM_ABA_Mutants_cDNA_P Parameter: Plant Line Value: CS8104
  misc_feature: MA Experiment 20000071 PARAMETER Experiment Name: At_100uM_ABA_Mutants_cDNA_P Parameter: Timepoint (hr) Value: 6
  misc_feature: MA Experiment 20000071 PARAMETER Experiment Name: At_100uM_ABA_Mutants_cDNA_P Parameter: Tissue Value: Aerial
  misc_feature: MA Experiment 20000071 PARAMETER Experiment Name: At_100uM_ABA_Mutants_cDNA_P Parameter: Treatment Value: 100uM ABA vs. No Treatment
  misc_feature: MA Experiment ID: 20000072 Result: Down-regulated in Transcription
  misc_feature: MA Experiment 20000072 PARAMETER Experiment Name: At_100uM_ABA_Mutants_cDNA_P Parameter: Plant Line Value: CS8105
  misc_feature: MA Experiment 20000072 PARAMETER Experiment Name: At_100uM_ABA_Mutants_cDNA_P Parameter: Timepoint (hr) Value: 6
  misc_feature: MA Experiment 20000072 PARAMETER Experiment Name: At_100uM_ABA_Mutants_cDNA_P Parameter: Tissue Value: Aerial
  misc_feature: MA Experiment 20000072 PARAMETER Experiment Name: At_100uM_ABA_Mutants_cDNA_P Parameter: Treatment Value: 100uM ABA vs. No Treatment
  misc_feature: MA Experiment ID: 20000087 Result: Down-regulated in Transcription
  misc_feature: MA Experiment 20000087 PARAMETER Experiment Name: At_100uM_ABA_Mutants_cDNA_P Parameter: Plant Line Value: WS
  misc_feature: MA Experiment 20000087 PARAMETER Experiment Name: At_100uM_ABA_Mutants_cDNA_P Parameter: Timepoint (hr) Value: 6
  misc_feature: MA Experiment 20000087 PARAMETER Experiment Name: At_100uM_ABA_Mutants_cDNA_P Parameter: Tissue Value: Aerial
  misc_feature: MA Experiment 20000087 PARAMETER Experiment Name: At_100uM_ABA_Mutants_cDNA_P Parameter: Treatment Value: 100uM ABA vs. No Treatment
  misc_feature: MA Experiment ID: 20000088 Result: Down-regulated in Transcription
  misc_feature: MA Experiment 20000088 PARAMETER Experiment Name: At_100uM_ABA_Mutants_cDNA_P Parameter: Plant Line Value: Landsberg
  misc_feature: MA Experiment 20000088 PARAMETER Experiment Name: At_100uM_ABA_Mutants_cDNA_P Parameter: Timepoint (hr) Value: 6
  misc_feature: MA Experiment 20000088 PARAMETER Experiment Name: At_100uM_ABA_Mutants_cDNA_P Parameter: Tissue Value: Aerial
  misc_feature: MA Experiment 20000088 PARAMETER Experiment Name: At_100uM_ABA_Mutants_cDNA_P Parameter: Treatment Value: 100uM ABA vs. No Treatment
  misc_feature: MA Experiment ID: 20000090 Result: Down-regulated in Transcription
  misc_feature: MA Experiment ID: 20000111 Result: Down-regulated in Transcription
  misc_feature: MA Experiment 20000111 PARAMETER Experiment Name: At_42deg_Heat_cDNA_P Parameter: Temperature (deg C) Value: 42 vs. 22
  misc_feature: MA Experiment 20000111 PARAMETER Experiment Name: At_42deg_Heat_cDNA_P Parameter: Timepoint (hr) Value: 6
  misc_feature: MA Experiment 20000111 PARAMETER Experiment Name: At_42deg_Heat_cDNA_P Parameter: Tissue Value: Aerial
  misc_feature: MA Experiment ID: 20000113 Result: Down-regulated in Transcription
  misc_feature: MA Experiment 20000113 PARAMETER Experiment Name: At_42deg_Heat_cDNA_P Parameter: Temperature (deg C) Value: 42 vs. 22
  misc_feature: MA Experiment 20000113 PARAMETER Experiment Name: At_42deg_Heat_cDNA_P Parameter: Timepoint (hr) Value: 8
  misc_feature: MA Experiment 20000113 PARAMETER Experiment Name: At_42deg_Heat_cDNA_P Parameter: Tissue Value: Aerial
  misc_feature: MA Experiment ID: 20000117 Result: Down-regulated in Transcription
  misc_feature: MA Experiment 20000117 PARAMETER Experiment Name: At_100uM_ABA_Mutants_cDNA_P Parameter: Plant Line Value: Columbia
  misc_feature: MA Experiment 20000117 PARAMETER Experiment Name: At_100uM_ABA_Mutants_cDNA_P Parameter: Timepoint (hr) Value: 6
  misc_feature: MA Experiment 20000117 PARAMETER Experiment Name: At_100uM_ABA_Mutants_cDNA_P Parameter: Tissue Value: Aerial
  misc_feature: MA Experiment 20000117 PARAMETER Experiment Name: At_100uM_ABA_Mutants_cDNA_P Parameter: Treatment Value: 100uM ABA vs. No Treatment
  misc_feature: MA Experiment ID: 20000180 Result: Up-regulated in Transcription
  misc_feature: MA Experiment 20000180 PARAMETER Experiment Name: At_Germinating_Seeds_P Parameter: Age (hr) Value: 24 vs. 0
  misc_feature: MA Experiment 20000180 PARAMETER Experiment Name: At_Germinating_Seeds_P Parameter: Tissue Value: Germinating Seeds
  misc_feature: MA Experiment ID: 20000185 Result: Down-regulated in Transcription
  misc_feature: MA Experiment 20000185 PARAMETER Experiment Name: At_Roots__P Parameter: Age (day) Value: 7 vs. 21
  misc_feature: MA Experiment 20000185 PARAMETER Experiment Name: At_Roots__P Parameter: Organism Value: A. thaliana
  misc_feature: MA Experiment 20000185 PARAMETER Experiment Name: At_Roots__P Parameter: Tissue Value: Roots vs. Whole Plant
  misc_feature: MA Experiment ID: 20000264 Result: Down-regulated in Transcription
  misc_feature: MA Experiment 20000264 PARAMETER Experiment Name: At_Open_Flower_P Parameter: Age (day) Value: 21
  misc_feature: MA Experiment 20000264 PARAMETER Experiment Name: At_Open_Flower_P Parameter: Plant Line Value: WS
  misc_feature: MA Experiment 20000264 PARAMETER Experiment Name: At_Open_Flower_P Parameter: Tissue Value: Open Flower vs. Whole Plant
  misc_feature: MA Experiment ID: 20000286 Result: Down-regulated in Transcription
  misc_feature: MA Experiment 20000286 PARAMETER Experiment Name: At_Open_Flower_P Parameter: Age (day) Value: 21
  misc_feature: MA Experiment 20000286 PARAMETER Experiment Name: At_Open_Flower_P Parameter: Plant Line Value: WS
  misc_feature: MA Experiment 20000286 PARAMETER Experiment Name: At_Open_Flower_P Parameter: Tissue Value: Half Open vs. Whole Plant
  misc_feature: MA Experiment ID: 20000437 Result: Down-regulated in Transcription
  misc_feature: MA Experiment 20000437 PARAMETER Experiment Name: At_Drought_P Parameter: Age (day) Value: 8
  misc_feature: MA Experiment 20000437 PARAMETER Experiment Name: At_Drought_P Parameter: Organism Value: A. thaliana
  misc_feature: MA Experiment 20000437 PARAMETER Experiment Name: At_Drought_P Parameter: Plant Line Value: WS
  misc_feature: MA Experiment 20000437 PARAMETER Experiment Name: At_Drought_P Parameter: Timepoint (hr) Value: 24
  misc_feature: MA Experiment 20000437 PARAMETER Experiment Name: At_Drought_P Parameter: Tissue Value: Whole Plant
  misc_feature: MA Experiment 20000437 PARAMETER Experiment Name: At_Drought_P Parameter: Treatment Value: Drought vs. No Drought
  misc_feature: MA Experiment ID: 20000438 Result: Up-regulated in Transcription
  misc_feature: MA Experiment 20000438 PARAMETER Experiment Name: At_Shoots__P Parameter: Age (day) Value: 14
  misc_feature: MA Experiment 20000438 PARAMETER Experiment Name: At_Shoots__P Parameter: Tissue Value: Shoots vs. Whole Plant
  misc_feature: MA Experiment ID: 20000439 Result: Down-regulated in Transcription
  misc_feature: MA Experiment 20000439 PARAMETER Experiment Name: At_Roots__P Parameter: Age (day) Value: 14 vs. 21
  misc_feature: MA Experiment 20000439 PARAMETER Experiment Name: At_Roots__P Parameter: Organism Value: A. thaliana
  misc_feature: MA Experiment 20000439 PARAMETER Experiment Name: At_Roots__P Parameter: Tissue Value: Roots vs. Whole Plant
  misc_feature: MA Experiment ID: 20000573 Result: Down-regulated in Transcription
  misc_feature: MA Experiment 20000573 PARAMETER Experiment Name: At_100uM_ABA_Mutants__P Parameter: Organism Value: A. thaliana
  misc_feature: MA Experiment 20000573 PARAMETER Experiment Name: At_100uM_ABA_Mutants__P Parameter: Plant Line Value: CS22 vs. Ler wt
  misc_feature: MA Experiment 20000573 PARAMETER Experiment Name: At_100uM_ABA_Mutants__P Parameter: Timepoint (hr) Value: N/A
  misc_feature: MA Experiment 20000573 PARAMETER Experiment Name: At_100uM_ABA_Mutants__P Parameter: Tissue Value: Whole Plant
  misc_feature: MA Experiment 20000573 PARAMETER Experiment Name: At_100uM_ABA_Mutants__P Parameter: Treatment Value: None
  misc_feature: MA Experiment ID: 20000794 Result: Down-regulated in Transcription
  misc_feature: MA Experiment 20000794 PARAMETER Experiment Name: At_Petals_P Parameter: Age (day) Value: 23-25 days
  misc_feature: MA Experiment 20000794 PARAMETER Experiment Name: At_Petals_P Parameter: Plant Line Value: WS
  misc_feature: MA Experiment 20000794 PARAMETER Experiment Name: At_Petals_P Parameter: Tissue Value: Petals vs. Whole plant
  misc_feature: MA Experiment ID: 20001555 Result: Down-regulated in Transcription
  misc_feature: MA Experiment 20001555 PARAMETER Experiment Name: At_Drought_Soil_Dry_P Parameter: Age (day) Value: 24
  misc_feature: MA Experiment 20001555 PARAMETER Experiment Name: At_Drought_Soil_Dry_P Parameter: Organism Value: A. thaliana
  misc_feature: MA Experiment 20001555 PARAMETER Experiment Name: At_Drought_Soil_Dry_P Parameter: Plant Line Value: WS
  misc_feature: MA Experiment 20001555 PARAMETER Experiment Name: At_Drought_Soil_Dry_P Parameter: Post Timepoint (hr) Value: None
  misc_feature: MA Experiment 20001555 PARAMETER Experiment Name: At_Drought_Soil_Dry_P Parameter: Post-Treatment Value: None
  misc_feature: MA Experiment 20001555 PARAMETER Experiment Name: At_Drought_Soil_Dry_P Parameter: Timepoint (day) Value: 10
  misc_feature: MA Experiment 20001555 PARAMETER Experiment Name: At_Drought_Soil_Dry_P Parameter: Treatment Value: Drought vs. No Drought
  misc_feature: MA Experiment ID: 20001556 Result: Down-regulated in Transcription
  misc_feature: MA Experiment 20001556 PARAMETER Experiment Name: At_Drought_Soil_Dry_P Parameter: Age (day) Value: 26
  misc_feature: MA Experiment 20001556 PARAMETER Experiment Name: At_Drought_Soil_Dry_P Parameter: Organism Value: A. thaliana
  misc_feature: MA Experiment 20001556 PARAMETER Experiment Name: At_Drought_Soil_Dry_P Parameter: Plant Line Value: WS
  misc_feature: MA Experiment 20001556 PARAMETER Experiment Name: At_Drought_Soil_Dry_P Parameter: Post Timepoint (hr) Value: None
  misc_feature: MA Experiment 20001556 PARAMETER Experiment Name: At_Drought_Soil_Dry_P Parameter: Post-Treatment Value: None
  misc_feature: MA Experiment 20001556 PARAMETER Experiment Name: At_Drought_Soil_Dry_P Parameter: Timepoint (day) Value: 12
  misc_feature: MA Experiment 20001556 PARAMETER Experiment Name: At_Drought_Soil_Dry_P Parameter: Treatment Value: Drought vs. No Drought
  misc_feature: MA Experiment ID: 20001557 Result: Down-regulated in Transcription
  misc_feature: MA Experiment 20001557 PARAMETER Experiment Name: At_Drought_Soil_Dry_P Parameter: Age (day) Value: 27
  misc_feature: MA Experiment 20001557 PARAMETER Experiment Name: At_Drought_Soil_Dry_P Parameter: Organism Value: A. thaliana
  misc_feature: MA Experiment 20001557 PARAMETER Experiment Name: At_Drought_Soil_Dry_P Parameter: Plant Line Value: WS
  misc_feature: MA Experiment 20001557 PARAMETER Experiment Name: At_Drought_Soil_Dry_P Parameter: Post Timepoint (hr) Value: 3
  misc_feature: MA Experiment 20001557 PARAMETER Experiment Name: At_Drought_Soil_Dry_P Parameter: Post-Treatment Value: Re-Water vs. No Drought
  misc_feature: MA Experiment 20001557 PARAMETER Experiment Name: At_Drought_Soil_Dry_P Parameter: Timepoint (day) Value: 13
  misc_feature: MA Experiment 20001557 PARAMETER Experiment Name: At_Drought_Soil_Dry_P Parameter: Treatment Value: Drought vs. No Drought
  misc_feature: MA Experiment ID: 20001558 Result: Down-regulated in Transcription
  misc_feature: MA Experiment 20001558 PARAMETER Experiment Name: At_Drought_Soil_Dry_P Parameter: Age (day) Value: 27
  misc_feature: MA Experiment 20001558 PARAMETER Experiment Name: At_Drought_Soil_Dry_P Parameter: Organism Value: A. thaliana
  misc_feature: MA Experiment 20001558 PARAMETER Experiment Name: At_Drought_Soil_Dry_P Parameter: Plant Line Value: WS
  misc_feature: MA Experiment 20001558 PARAMETER Experiment Name: At_Drought_Soil_Dry_P Parameter: Post Timepoint (hr) Value: 6
  misc_feature: MA Experiment 20001558 PARAMETER Experiment Name: At_Drought_Soil_Dry_P Parameter: Post-Treatment Value: Re-Water vs. No Drought
  misc_feature: MA Experiment 20001558 PARAMETER Experiment Name: At_Drought_Soil_Dry_P Parameter: Timepoint (day) Value: 13
  misc_feature: MA Experiment 20001558 PARAMETER Experiment Name: At_Drought_Soil_Dry_P Parameter: Treatment Value: Drought vs. No Drought
  misc_feature: MA Experiment ID: 20001559 Result: Down-regulated in Transcription
  misc_feature: MA Experiment 20001559 PARAMETER Experiment Name: At_Drought_Soil_Dry_P Parameter: Age (day) Value: 28
  misc_feature: MA Experiment 20001559 PARAMETER Experiment Name: At_Drought_Soil_Dry_P Parameter: Organism Value: A. thaliana
  misc_feature: MA Experiment 20001559 PARAMETER Experiment Name: At_Drought_Soil_Dry_P Parameter: Plant Line Value: WS
  misc_feature: MA Experiment 20001559 PARAMETER Experiment Name: At_Drought_Soil_Dry_P Parameter: Post Timepoint (hr) Value: 29
  misc_feature: MA Experiment 20001559 PARAMETER Experiment Name: At_Drought_Soil_Dry_P Parameter: Post-Treatment Value: Re-Water vs. No Drought
  misc_feature: MA Experiment 20001559 PARAMETER Experiment Name: At_Drought_Soil_Dry_P Parameter: Timepoint (day) Value: 14
  misc_feature: MA Experiment 20001559 PARAMETER Experiment Name: At_Drought_Soil_Dry_P Parameter: Treatment Value: Drought vs. No Drought
  misc_feature: MA Experiment ID: 20001757 Result: Up-regulated in Transcription
  misc_feature: MA Experiment 20001757 PARAMETER Experiment Name: At_50mM_NH4NO3_L-to-H_P Parameter: Timepoint (hr) Value: 6
  misc_feature: MA Experiment 20001757 PARAMETER Experiment Name: At_50mM_NH4NO3_L-to-H_P Parameter: Tissue Value: Leaf
  misc_feature: MA Experiment 20001757 PARAMETER Experiment Name: At_50mM_NH4NO3_L-to-H_P Parameter: Treatment Value: 50mM NH4NO3 vs 100mM Mannitol
  misc_feature: MA Experiment ID: 20001904 Result: Down-regulated in Transcription
  misc_feature: MA Experiment 20001904 PARAMETER Experiment Name: At_Drought_Reproduction_P Parameter: Age (day) Value: 37
  misc_feature: MA Experiment 20001904 PARAMETER Experiment Name: At_Drought_Reproduction_P Parameter: Organism Value: A. thaliana
  misc_feature: MA Experiment 20001904 PARAMETER Experiment Name: At_Drought_Reproduction_P Parameter: Plant Line Value: WS
  misc_feature: MA Experiment 20001904 PARAMETER Experiment Name: At_Drought_Reproduction_P Parameter: Timepoint (day) Value: 7
  misc_feature: MA Experiment 20001904 PARAMETER Experiment Name: At_Drought_Reproduction_P Parameter: Tissue Value: Rosettes
  misc_feature: MA Experiment 20001904 PARAMETER Experiment Name: At_Drought_Reproduction_P Parameter: Treatment Value: Drought vs. No Drought
  misc_feature: MA Experiment ID: 20001905 Result: Down-regulated in Transcription
  misc_feature: MA Experiment 20001905 PARAMETER Experiment Name: At_Drought_Reproduction_P Parameter: Age (day) Value: 40
  misc_feature: MA Experiment 20001905 PARAMETER Experiment Name: At_Drought_Reproduction_P Parameter: Organism Value: A. thaliana
  misc_feature: MA Experiment 20001905 PARAMETER Experiment Name: At_Drought_Reproduction_P Parameter: Plant Line Value: WS
  misc_feature: MA Experiment 20001905 PARAMETER Experiment Name: At_Drought_Reproduction_P Parameter: Timepoint (day) Value: 10
  misc_feature: MA Experiment 20001905 PARAMETER Experiment Name: At_Drought_Reproduction_P Parameter: Tissue Value: Rosettes
  misc_feature: MA Experiment 20001905 PARAMETER Experiment Name: At_Drought_Reproduction_P Parameter: Treatment Value: Drought vs. No Drought
  misc_feature: MA Experiment ID: 20001906 Result: Down-regulated in Transcription
  misc_feature: MA Experiment 20001906 PARAMETER Experiment Name: At_Drought_Reproduction_P Parameter: Age (day) Value: 35
  misc_feature: MA Experiment 20001906 PARAMETER Experiment Name: At_Drought_Reproduction_P Parameter: Organism Value: A. thaliana
  misc_feature: MA Experiment 20001906 PARAMETER Experiment Name: At_Drought_Reproduction_P Parameter: Plant Line Value: WS
  misc_feature: MA Experiment 20001906 PARAMETER Experiment Name: At_Drought_Reproduction_P Parameter: Timepoint (day) Value: 5
  misc_feature: MA Experiment 20001906 PARAMETER Experiment Name: At_Drought_Reproduction_P Parameter: Tissue Value: Siliques
  misc_feature: MA Experiment 20001906 PARAMETER Experiment Name: At_Drought_Reproduction_P Parameter: Treatment Value: Drought vs. No Drought
  misc_feature: MA Experiment ID: 20001908 Result: Down-regulated in Transcription
  misc_feature: MA Experiment 20001908 PARAMETER Experiment Name: At_Drought_Reproduction_P Parameter: Age (day) Value: 40
  misc_feature: MA Experiment 20001908 PARAMETER Experiment Name: At_Drought_Reproduction_P Parameter: Organism Value: A. thaliana
  misc_feature: MA Experiment 20001908 PARAMETER Experiment Name: At_Drought_Reproduction_P Parameter: Plant Line Value: WS
  misc_feature: MA Experiment 20001908 PARAMETER Experiment Name: At_Drought_Reproduction_P Parameter: Timepoint (day) Value: 10
  misc_feature: MA Experiment 20001908 PARAMETER Experiment Name: At_Drought_Reproduction_P Parameter: Tissue Value: Siliques
  misc_feature: MA Experiment 20001908 PARAMETER Experiment Name: At_Drought_Reproduction_P Parameter: Treatment Value: Drought vs. No Drought
atggtgtctcatcttcaatgtatggcatccacattgtttacttgaggtacaagcaaaacgtctaagctcgtcgacctcctcttaatggcttcaagttcaacttcattcccgttaaccaccgcgccaccgcagggtgtcaggtttaaccggagaaaaccgaggttaaccgtgtgggctaagcaaacggcgtttcaactcgggaaaacgaagggtgatgatgactcggaggggaaacaaaaagggaacaacccgttccagtttgatttcggtaagttaccggacatgaagtcactgataccggttgtgacgaatccttctactggtttagtgtttggtaataacagaaagaaagatcctggtactatttttgtggctggtgctacgggacaagctggtatacgcatagctcaaacgctcttacaacgaggattcagtgttcgagccggtgttcctgaccttggagctgcccaggacctagctcgtgtcgcggctacttacaagattttatcaaatgatgaagtcaagaggctaaacgcagttcaatcccccttccaagacgctgaatcaatagcaaaagcgattggaaacgcgaccaaagttgttgttacggtcggggcaacagagaatggtccggacgcccaagtctcgacctcagacgcattgctcgtggtccaagcagctgagctagccggcgtaagccacgtggcgatagtctacgacggcaccatcagcgggtctacatacaacgtgctcgacgggattacttcgtttttcggcaatcttttcgcaaaatctcagccattgactatctctgacctcatcgagaaagtagctcaaaccgacgtggcctacacactcataaagacgagtttgacggaggatttctctccggagaaagcttataacgtcgtcgtttcagctgaagggagtaacagcggcagtggcagtagttcgtccgaggcctacaaagttccgaagttgaagattgcgtcgctggtagcagacatttttgcgaatacggccgtggcagaaaataaggtggtggaagtttctacagatccatcagcaccatcgcggccagtggacgagcttttcagtgtaatcccggaagatgggaggagaaaagtgtacgcagatgcgatcgcaagggaaagagcagaggaagaagctaaagttgcagctgacaaagctcgagaggcagcagaagcagcgaaagagttcgagaaacaaatgcaaaagctctccgagaaagaagcagaagctgcaagcttagctgaggatgcgcagcagaaagcagatgccgtgggagtcacagtggacggtttatttaacaaggcgaaagatatcagctcaggtctctcctggaataaactcggctctcagttcgcaactgcgattcagaacgcttcagagacgcctaaagtacaggttgctacgttcagaggacaagcaaaagcgagaaacttgccacccaagaaagcagtggtgaagcagagaccatcatctccgtttgcatccaaaccgaaagaagaacgtccgaagaagccggagaaagaggtgaggaaagtgttcggaggattgtttaagcaagagaccatctacatcgacgatgattgaaaaggccatatgcgatgtcgttttgaagttccgtacagtttcctttttttctctttccttctgtttcaagttaaaattctgtaatcgtatgacaaaattatacataaaaaaccatcattctccc

SEQ ID NO: 43206 - protein, 510 aa, Arabidopsis thaliana
  peptide (1)..(510): Ceres Seq. ID no. 12370766
  misc_feature (73)..(488): Homolog of NCBI NO: 9294698 NR Description: gb|AAC26697.1~gene_id:MCB22.6~similar to unknown
  misc_feature (89)..(341): Homolog of NCBI NO: 37530302 NR Description: putative dehydrogenase [Oryza sativa (japonica
  misc_feature (73)..(488): Homolog of NCBI NO: 30685117 NR Description: expressed protein [Arabidopsis thaliana]
  misc_feature (89)..(387): Homolog of NCBI NO: 21616072 NR Description: Tic62 protein [Pisum sativum]
  misc_feature (1)..(296): Homolog of NCBI NO: 18408279 NR Description: putative protein
  misc_feature (1)..(510): Homolog of NCBI NO: 7487756 NR Description: hypothetical protein T6H20.190 - Arabidopsis
MASSSTSFPLTTAPPQGVRFNRRKPRLTVWAKQTAFQLGKTKGDDDSEGKQKGNNPFQFDFGKLPDMKSLIPVVTNPSTGLVFGNNRKKDPGTIFVAGATGQAGIRIAQTLLQRGFSVRAGVPDLGAAQDLARVAATYKILSNDEVKRLNAVQSPFQDAESIAKAIGNATKVVVTVGATENGPDAQVSTSDALLVVQAAELAGVSHVAIVYDGTISGSTYNVLDGITSFFGNLFAKSQPLTISDLIEKVAQTDVAYTLIKTSLTEDFSPEKAYNVVVSAEGSNSGSGSSSSEAYKVPKLKIASLVADIFANTAVAENKVVEVSTDPSAPSRPVDELFSVIPEDGRRKVYADAIARERAEEEAKVAADKAREAAEAAKEFEKQMQKLSEKEAEAASLAEDAQQKADAVGVTVDGLFNKAKDISSGLSWNKLGSQFATAIQNASETPKVQVATFRGQAKARNLPPKKAVVKQRPSSPFASKPKEERPKKPEKEVRKVFGGLFKQETIYIDDD

SEQ ID NO: 43207 - protein, 444 aa, Arabidopsis thaliana
  peptide (1)..(444): Ceres Seq. ID no. 12370767
  misc_feature (7)..(422): Homolog of NCBI NO: 9294698 NR Description: gb|AAC26697.1~gene_id:MCB22.6~similar to unknown
  misc_feature (23)..(275): Homolog of NCBI NO: 37530302 NR Description: putative dehydrogenase [Oryza sativa (japonica
  misc_feature (7)..(422): Homolog of NCBI NO: 30685117 NR Description: expressed protein [Arabidopsis thaliana]
  misc_feature (23)..(321): Homolog of NCBI NO: 21616072 NR Description: Tic62 protein [Pisum sativum]
  misc_feature (1)..(230): Homolog of NCBI NO: 18408279 NR Description: putative protein
  misc_feature (1)..(444): Homolog of NCBI NO: 7487756 NR Description: hypothetical protein T6H20.190 - Arabidopsis
MKSLIPVVTNPSTGLVFGNNRKKDPGTIFVAGATGQAGIRIAQTLLQRGFSVRAGVPDLGAAQDLARVAATYKILSNDEVKRLNAVQSPFQDAESIAKAIGNATKVVVTVGATENGPDAQVSTSDALLVVQAAELAGVSHVAIVYDGTISGSTYNVLDGITSFFGNLFAKSQPLTISDLIEKVAQTDVAYTLIKTSLTEDFSPEKAYNVVVSAEGSNSGSGSSSSEAYKVPKLKIASLVADIFANTAVAENKVVEVSTDPSAPSRPVDELFSVIPEDGRRKVYADAIARERAEEEAKVAADKAREAAEAAKEFEKQMQKLSEKEAEAASLAEDAQQKADAVGVTVDGLFNKAKDISSGLSWNKLGSQFATAIQNASETPKVQVATFRGQAKARNLPPKKAVVKQRPSSPFASKPKEERPKKPEKEVRKVFGGLFKQETIYIDDD

SEQ ID NO: 43208 - DNA, 1119 bp, Arabidopsis thaliana
  misc_feature (1)..(1119): Ceres Seq. ID no. 12379502
  misc_feature: MA Experiment ID: 108434 Result: Up-regulated in Transcription
  misc_feature: MA Experiment 108434 PARAMETER Experiment Name: At_Root_Tips_cDNA_P Parameter: Tissue Value: Root Tips
  misc_feature: MA Experiment ID: 108461 Result: Up-regulated in Transcription
  misc_feature: MA Experiment 108461 PARAMETER Experiment Name: At_Germinating_Seeds_cDNA_P Parameter: Age (day) Value: 1 vs. 0
  misc_feature: MA Experiment 108461 PARAMETER Experiment Name: At_Germinating_Seeds_cDNA_P Parameter: Tissue Value: Germinating Seeds
  misc_feature: MA Experiment ID: 108462 Result: Up-regulated in Transcription
  misc_feature: MA Experiment 108462 PARAMETER Experiment Name: At_Germinating_Seeds_cDNA_P Parameter: Age (day) Value: 2 vs. 0
  misc_feature: MA Experiment 108462 PARAMETER Experiment Name: At_Germinating_Seeds_cDNA_P Parameter: Tissue Value: Germinating Seeds
  misc_feature: MA Experiment ID: 108488 Result: Down-regulated in Transcription
  misc_feature: MA Experiment ID: 108576 Result: Down-regulated in Transcription
  misc_feature: MA Experiment 108576 PARAMETER Experiment Name: At_42deg_Heat_cDNA_P Parameter: Temperature (deg C) Value: 42 vs. 22
  misc_feature: MA Experiment 108576 PARAMETER Experiment Name: At_42deg_Heat_cDNA_P Parameter: Timepoint (hr) Value: 1
  misc_feature: MA Experiment 108576 PARAMETER Experiment Name: At_42deg_Heat_cDNA_P Parameter: Tissue Value: Aerial
  misc_feature: MA Experiment ID: 108585 Result: Down-regulated in Transcription
  misc_feature: MA Experiment 108585 PARAMETER Experiment Name: At_5mM_NaNP_cDNA_P Parameter: Timepoint (hr) Value: 6
  misc_feature: MA Experiment 108585 PARAMETER Experiment Name: At_5mM_NaNP_cDNA_P Parameter: Tissue Value: Aerial
  misc_feature: MA Experiment 108585 PARAMETER Experiment Name: At_5mM_NaNP_cDNA_P Parameter: Treatment Value: null
  misc_feature: MA Experiment ID: 108595 Result: Down-regulated in Transcription
  misc_feature: MA Experiment 108595 PARAMETER Experiment Name: At_Ler-pi_Ovule_cDNA_P Parameter: Plant Line Value: null
  misc_feature: MA Experiment ID: 108607 Result: Down-regulated in Transcription
  misc_feature: MA Experiment 108607 PARAMETER Experiment Name: At_100uM_ABA_cDNA_P Parameter: Timepoint (hr) Value: 4
  misc_feature: MA Experiment 108607 PARAMETER Experiment Name: At_100uM_ABA_cDNA_P Parameter: Tissue Value: Aerial
  misc_feature: MA Experiment 108607 PARAMETER Experiment Name: At_100uM_ABA_cDNA_P Parameter: Treatment Value: 100uM ABA vs. No Treatment
  misc_feature: MA Experiment ID: 20000071 Result: Down-regulated in Transcription
  misc_feature: MA Experiment 20000071 PARAMETER Experiment Name: At_100uM_ABA_Mutants_cDNA_P Parameter: Plant Line Value: CS8104
  misc_feature: MA Experiment 20000071 PARAMETER Experiment Name: At_100uM_ABA_Mutants_cDNA_P Parameter: Timepoint (hr) Value: 6
  misc_feature: MA Experiment 20000071 PARAMETER Experiment Name: At_100uM_ABA_Mutants_cDNA_P Parameter: Tissue Value: Aerial
  misc_feature: MA Experiment 20000071 PARAMETER Experiment Name: At_100uM_ABA_Mutants_cDNA_P Parameter: Treatment Value: 100uM ABA vs. No Treatment
  misc_feature: MA Experiment ID: 20000086 Result: Down-regulated in Transcription
  misc_feature: MA Experiment 20000086 PARAMETER Experiment Name: At_100uM_ABA_Mutants_cDNA_P Parameter: Plant Line Value: CS22
  misc_feature: MA Experiment 20000086 PARAMETER Experiment Name: At_100uM_ABA_Mutants_cDNA_P Parameter: Timepoint (hr) Value: 6
  misc_feature: MA Experiment 20000086 PARAMETER Experiment Name: At_100uM_ABA_Mutants_cDNA_P Parameter: Tissue Value: Aerial
  misc_feature: MA Experiment 20000086 PARAMETER Experiment Name: At_100uM_ABA_Mutants_cDNA_P Parameter: Treatment Value: 100uM ABA vs. No Treatment
  misc_feature: MA Experiment ID: 20000087 Result: Down-regulated in Transcription
  misc_feature: MA Experiment 20000087 PARAMETER Experiment Name: At_100uM_ABA_Mutants_cDNA_P Parameter: Plant Line Value: WS
  misc_feature: MA Experiment 20000087 PARAMETER Experiment Name: At_100uM_ABA_Mutants_cDNA_P Parameter: Timepoint (hr) Value: 6
  misc_feature: MA Experiment 20000087 PARAMETER Experiment Name: At_100uM_ABA_Mutants_cDNA_P Parameter: Tissue Value: Aerial
  misc_feature: MA Experiment 20000087 PARAMETER Experiment Name: At_100uM_ABA_Mutants_cDNA_P Parameter: Treatment Value: 100uM ABA vs. No Treatment
  misc_feature: MA Experiment ID: 20000112 Result: Down-regulated in Transcription
  misc_feature: MA Experiment 20000112 PARAMETER Experiment Name: At_42deg_Heat_cDNA_P Parameter: Temperature (deg C) Value: 42 vs. 22
  misc_feature: MA Experiment 20000112 PARAMETER Experiment Name: At_42deg_Heat_cDNA_P Parameter: Timepoint (hr) Value: 2
  misc_feature: MA Experiment 20000112 PARAMETER Experiment Name: At_42deg_Heat_cDNA_P Parameter: Tissue Value: Aerial
  misc_feature: MA Experiment ID: 20000117 Result: Down-regulated in Transcription
  misc_feature: MA Experiment 20000117 PARAMETER Experiment Name: At_100uM_ABA_Mutants_cDNA_P Parameter: Plant Line Value: Columbia
  misc_feature: MA Experiment 20000117 PARAMETER Experiment Name: At_100uM_ABA_Mutants_cDNA_P Parameter: Timepoint (hr) Value: 6
  misc_feature: MA Experiment 20000117 PARAMETER Experiment Name: At_100uM_ABA_Mutants_cDNA_P Parameter: Tissue Value: Aerial
  misc_feature: MA Experiment 20000117 PARAMETER Experiment Name: At_100uM_ABA_Mutants_cDNA_P Parameter: Treatment Value: 100uM ABA vs. No Treatment
  misc_feature: MA Experiment ID: 20000214 Result: Up-regulated in Transcription
  misc_feature: MA Experiment 20000214 PARAMETER Experiment Name: At_4deg_Cold_P Parameter: Timepoint (hr) Value: 6
  misc_feature: MA Experiment ID: 20000224 Result: Up-regulated in Transcription
  misc_feature: MA Experiment ID: 20000234 Result: Up-regulated in Transcription
  misc_feature: MA Experiment 20000234 PARAMETER Experiment Name: At_Siliques_P Parameter: Age (day) Value: 21
  misc_feature: MA Experiment 20000234 PARAMETER Experiment Name: At_Siliques_P Parameter: Organism Value: A. thaliana
  misc_feature: MA Experiment 20000234 PARAMETER Experiment Name: At_Siliques_P Parameter: Plant Line Value: WS
  misc_feature: MA Experiment 20000234 PARAMETER Experiment Name: At_Siliques_P Parameter: Tissue Value: Less Than 5mm Siliques vs. Whole Plant
  misc_feature: MA Experiment ID: 20000235 Result: Up-regulated in Transcription
  misc_feature: MA Experiment 20000235 PARAMETER Experiment Name: At_Siliques_P Parameter: Age (day) Value: 21
  misc_feature: MA Experiment 20000235 PARAMETER Experiment Name: At_Siliques_P Parameter: Organism Value: A. thaliana
  misc_feature: MA Experiment 20000235 PARAMETER Experiment Name: At_Siliques_P Parameter: Plant Line Value: WS
  misc_feature: MA Experiment 20000235 PARAMETER Experiment Name: At_Siliques_P Parameter: Tissue Value: 5-10mm Siliques vs. Whole Plant
  misc_feature: MA Experiment ID: 20000264 Result: Up-regulated in Transcription
  misc_feature: MA Experiment 20000264 PARAMETER Experiment Name: At_Open_Flower_P Parameter: Age (day) Value: 21
  misc_feature: MA Experiment 20000264 PARAMETER Experiment Name: At_Open_Flower_P Parameter: Plant Line Value: WS
  misc_feature: MA Experiment 20000264 PARAMETER Experiment Name: At_Open_Flower_P Parameter: Tissue Value: Open Flower vs. Whole Plant
  misc_feature: MA Experiment ID: 20000438 Result: Up-regulated in Transcription
  misc_feature: MA Experiment 20000438 PARAMETER Experiment Name: At_Shoots__P Parameter: Age (day) Value: 14
  misc_feature: MA Experiment 20000438 PARAMETER Experiment Name: At_Shoots__P Parameter: Tissue Value: Shoots vs. Whole Plant
  misc_feature: MA Experiment ID: 20000439 Result: Down-regulated in Transcription
  misc_feature: MA Experiment 20000439 PARAMETER Experiment Name: At_Roots__P Parameter: Age (day) Value: 14 vs. 21
  misc_feature: MA Experiment 20000439 PARAMETER Experiment Name: At_Roots__P Parameter: Organism Value: A. thaliana
  misc_feature: MA Experiment 20000439 PARAMETER Experiment Name: At_Roots__P Parameter: Tissue Value: Roots vs. Whole Plant
  misc_feature: MA Experiment ID: 20001248 Result: Down-regulated in Transcription
  misc_feature: MA Experiment 20001248 PARAMETER Experiment Name: At_Far-red-induction_P Parameter: Age (day) Value: 7
  misc_feature: MA Experiment 20001248 PARAMETER Experiment Name: At_Far-red-induction_P Parameter: Light Value: Far-red vs. White
  misc_feature: MA Experiment 20001248 PARAMETER Experiment Name: At_Far-red-induction_P Parameter: Organism Value: A. thaliana
  misc_feature: MA Experiment 20001248 PARAMETER Experiment Name: At_Far-red-induction_P Parameter: Plant Line Value: Columbia
  misc_feature: MA Experiment 20001248 PARAMETER Experiment Name: At_Far-red-induction_P Parameter: Timepoint (hr) Value: 4
  misc_feature: MA Experiment 20001248 PARAMETER Experiment Name: At_Far-red-induction_P Parameter: Tissue Value: Whole Plant
  misc_feature: MA Experiment ID: 20001450 Result: Down-regulated in Transcription
  misc_feature: MA Experiment 20001450 PARAMETER Experiment Name: At_Far-red-induction_P Parameter: Age (day) Value: 7
  misc_feature: MA Experiment 20001450 PARAMETER Experiment Name: At_Far-red-induction_P Parameter: Light Value: Far-red vs. White
  misc_feature: MA Experiment 20001450 PARAMETER Experiment Name: At_Far-red-induction_P Parameter: Organism Value: A. thaliana
  misc_feature: MA Experiment 20001450 PARAMETER Experiment Name: At_Far-red-induction_P Parameter: Plant Line Value: Columbia
  misc_feature: MA Experiment 20001450 PARAMETER Experiment Name: At_Far-red-induction_P Parameter: Timepoint (hr) Value: 8
  misc_feature: MA Experiment 20001450 PARAMETER Experiment Name: At_Far-red-induction_P Parameter: Tissue Value: Whole Plant
  misc_feature: MA Experiment ID: 20001451 Result: Down-regulated in Transcription
  misc_feature: MA Experiment 20001451 PARAMETER Experiment Name: At_Far-red-induction_P Parameter: Age (day) Value: 7
  misc_feature: MA Experiment 20001451 PARAMETER Experiment Name: At_Far-red-induction_P Parameter: Light Value: Far-red vs. White
  misc_feature: MA Experiment 20001451 PARAMETER Experiment Name: At_Far-red-induction_P Parameter: Organism Value: A. thaliana
  misc_feature: MA Experiment 20001451 PARAMETER Experiment Name: At_Far-red-induction_P Parameter: Plant Line Value: Columbia
  misc_feature: MA Experiment 20001451 PARAMETER Experiment Name: At_Far-red-induction_P Parameter: Timepoint (hr) Value: 24
  misc_feature: MA Experiment 20001451 PARAMETER Experiment Name: At_Far-red-induction_P Parameter: Tissue Value: Whole Plant
gggtgatttcggatgcctaattgggtaattaatataatacagtataagattagatgcctcgaatattcgctctgtgcctaaccacaaaaaccgtaacttttggttttctctgaaacacatcccaaagtaaagaaagcatcactcttttcgtcttctctcgaaaatggcggacaatgattctctagatcagtttttggctgccgccattgatgccgctaaaaaagctggacagatcattcgtaaagggttttacgagactaaacatgttgaacacaaaggccaggtggatttggtgacagagactgataaaggatgtgaagaacttgtgtttaatcatctcaagcagctctttcccaatcacaagttcataggagaagaaactacagctgcatttggtgtgacagaactaactgacgaaccaacttggattgttgatcctcttgatggaacaaccaatttcgttcacgggttccctttcgtgtgtgtttccattggacttacgattggaaaagtccctgttgttggagttgtttataatcctattatggaagagctattcaccggtgtccaagggaaaggagcattcttgaatggaaagcgaatcaaagtgtcagctcaaagcgaacttttaaccgctttgctcgtgacagaggcgggtactaaacgagataaagctacattagacgatacaaccaacagaatcaacagtttgctaaccaaggtcaggtcccttaggatgagtggttcgtgtgcactggacctctgtggcgttgcgtgtggaagggttgatatcttctacgagctcggtttcggtggtccatgggacattgcagcaggaattgttatcgtgaaagaagctggtggactcatctttgatccatccggtaaagatttggacataacatcgcagaggatcgcggcttcaaacgcttctctcaaggagttattcgctgaggcgttgcggcttacaggggcatgaagtcatctgttattattttacaatatggtctcaaccttatatgatcaaactcaattcaaaaacttaacattattgaatatttcttttcggtagaaagaaaacaaactcaattgttgagaaaaaaaaacaaactattttcc

SEQ ID NO: 43209 - protein, 271 aa, Arabidopsis thaliana
  peptide (1)..(271): Ceres Seq. ID no. 12379503
  misc_feature (8)..(267): Homolog of NCBI NO: 7657236 NR Description: inositol(myo)-1(or 4)-monophosphatase 2 [Homo
  misc_feature (1)..(266): Homolog of NCBI NO: 21357329 NR Description: CG9391-PA [Drosophila melanogaster]
  misc_feature (7)..(266): Homolog of NCBI NO: 30143277 NR Description: myo inositol monophosphatase isoform 2
  misc_feature (7)..(266): Homolog of NCBI NO: 1709204 NR Description: Inositol-1(or 4)-monophosphatase 2 (IMPase 2)
  misc_feature (1)..(269): Homolog of NCBI NO: 30143275 NR Description: myo inositol monophosphatase isoform 1
  misc_feature (1)..(269): Homolog of NCBI NO: 1709203 NR Description: Inositol-1(or 4)-monophosphatase 1 (IMPase 1)
  misc_feature (1)..(267): Homolog of NCBI NO: 3914097 NR Description: Inositol-1(or 4)-monophosphatase (IMPase) (IMP)
  misc_feature (1)..(266): Homolog of NCBI NO: 1709205 NR Description: Inositol-1(or 4)-monophosphatase 3 (IMPase 3)
  misc_feature (1)..(271): Homolog of NCBI NO: 21553679 NR Description: putative myo-inositol monophosphatase
  misc_feature (1)..(271): Homolog of NCBI NO: 15232993 NR Description: putative myo-inositol monophosphatase
MADNDSLDQFLAAAIDAAKKAGQIIRKGFYETKHVEHKGQVDLVTETDKGCEELVFNHLKQLFPNHKFIGEETTAAFGVTELTDEPTWIVDPLDGTTNFVHGFPFVCVSIGLTIGKVPVVGVVYNPIMEELFTGVQGKGAFLNGKRIKVSAQSELLTALLVTEAGTKRDKATLDDTTNRINSLLTKVRSLRMSGSCALDLCGVACGRVDIFYELGFGGPWDIAAGIVIVKEAGGLIFDPSGKDLDITSQRIAASNASLKELFAEALRLTGA

SEQ ID NO: 43210 - protein, 144 aa, Arabidopsis thaliana
  peptide (1)..(144): Ceres Seq. ID no. 12379504
  misc_feature (1)..(140): Homolog of NCBI NO: 7657236 NR Description: inositol(myo)-1(or 4)-monophosphatase 2 [Homo
  misc_feature (1)..(139): Homolog of NCBI NO: 21357329 NR Description: CG9391-PA [Drosophila melanogaster]
  misc_feature (1)..(139): Homolog of NCBI NO: 30143277 NR Description: myo inositol monophosphatase isoform 2
  misc_feature (1)..(139): Homolog of NCBI NO: 1709204 NR Description: Inositol-1(or 4)-monophosphatase 2 (IMPase 2)
  misc_feature (1)..(142): Homolog of NCBI NO: 30143275 NR Description: myo inositol monophosphatase isoform 1
  misc_feature (1)..(142): Homolog of NCBI NO: 1709203 NR Description: Inositol-1(or 4)-monophosphatase 1 (IMPase 1)
  misc_feature (1)..(140): Homolog of NCBI NO: 3914097 NR Description: Inositol-1(or 4)-monophosphatase (IMPase) (IMP)
  misc_feature (1)..(139): Homolog of NCBI NO: 1709205 NR Description: Inositol-1(or 4)-monophosphatase 3 (IMPase 3)
  misc_feature (1)..(144): Homolog of NCBI NO: 21553679 NR Description: putative myo-inositol monophosphatase
  misc_feature (1)..(144): Homolog of NCBI NO: 15232993 NR Description: putative myo-inositol monophosphatase
MEELFTGVQGKGAFLNGKRIKVSAQSELLTALLVTEAGTKRDKATLDDTTNRINSLLTKVRSLRMSGSCALDLCGVACGRVDIFYELGFGGPWDIAAGIVIVKEAGGLIFDPSGKDLDITSQRIAASNASLKELFAEALRLTGA

SEQ ID NO: 43211 - DNA, 1072 bp, Arabidopsis thaliana
  misc_feature (1)..(1072): Ceres Seq. ID no. 13646026
  misc_feature: MA Experiment ID: 20000182 Result: Down-regulated in Transcription
  misc_feature: MA Experiment 20000182 PARAMETER Experiment Name: At_2mM_SA_P Parameter: Age (day) Value: 14
  misc_feature: MA Experiment 20000182 PARAMETER Experiment Name: At_2mM_SA_P Parameter: Organism Value: A. thaliana
  misc_feature: MA Experiment 20000182 PARAMETER Experiment Name: At_2mM_SA_P Parameter: Plant Line Value: WS
  misc_feature: MA Experiment 20000182 PARAMETER Experiment Name: At_2mM_SA_P Parameter: Timepoint (hr) Value: 6
  misc_feature: MA Experiment 20000182 PARAMETER Experiment Name: At_2mM_SA_P Parameter: Tissue Value: Aerial
  misc_feature: MA Experiment 20000182 PARAMETER Experiment Name: At_2mM_SA_P Parameter: Treatment Value: 2mM SA vs. No Treatment
  misc_feature: MA Experiment ID: 20000265 Result: Up-regulated in Transcription
  misc_feature: MA Experiment 20000265 PARAMETER Experiment Name: At_Open_Flower_P Parameter: Age (day) Value: 21
  misc_feature: MA Experiment 20000265 PARAMETER Experiment Name: At_Open_Flower_P Parameter: Plant Line Value: WS
  misc_feature: MA Experiment 20000265 PARAMETER Experiment Name: At_Open_Flower_P Parameter: Tissue Value: Closed Flower vs. Whole Plant
  misc_feature: MA Experiment ID: 20000286 Result: Up-regulated in Transcription
  misc_feature: MA Experiment 20000286 PARAMETER Experiment Name: At_Open_Flower_P Parameter: Age (day) Value: 21
  misc_feature: MA Experiment 20000286 PARAMETER Experiment Name: At_Open_Flower_P Parameter: Plant Line Value: WS
  misc_feature: MA Experiment 20000286 PARAMETER Experiment Name: At_Open_Flower_P Parameter: Tissue Value: Half Open vs. Whole Plant
  misc_feature: MA Experiment ID: 20000438 Result: Down-regulated in Transcription
  misc_feature: MA Experiment 20000438 PARAMETER Experiment Name: At_Shoots__P Parameter: Age (day) Value: 14
  misc_feature: MA Experiment 20000438 PARAMETER Experiment Name: At_Shoots__P Parameter: Tissue Value: Shoots vs. Whole Plant
  misc_feature: MA Experiment ID: 20001555 Result: Down-regulated in Transcription
  misc_feature: MA Experiment 20001555 PARAMETER Experiment Name: At_Drought_Soil_Dry_P Parameter: Age (day) Value: 24
  misc_feature: MA Experiment 20001555 PARAMETER Experiment Name: At_Drought_Soil_Dry_P Parameter: Organism Value: A. thaliana
  misc_feature: MA Experiment 20001555 PARAMETER Experiment Name: At_Drought_Soil_Dry_P Parameter: Plant Line Value: WS
  misc_feature: MA Experiment 20001555 PARAMETER Experiment Name: At_Drought_Soil_Dry_P Parameter: Post Timepoint (hr) Value: None
  misc_feature: MA Experiment 20001555 PARAMETER Experiment Name: At_Drought_Soil_Dry_P Parameter: Post-Treatment Value: None
  misc_feature: MA Experiment 20001555 PARAMETER Experiment Name: At_Drought_Soil_Dry_P Parameter: Timepoint (day) Value: 10
  misc_feature: MA Experiment 20001555 PARAMETER Experiment Name: At_Drought_Soil_Dry_P Parameter: Treatment Value: Drought vs. No Drought
  misc_feature: MA Experiment ID: 20001773 Result: Up-regulated in Transcription
  misc_feature: MA Experiment 20001773 PARAMETER Experiment Name: At_Far-red-enriched-adult_P Parameter: Age (day) Value: 30
  misc_feature: MA Experiment 20001773 PARAMETER Experiment Name: At_Far-red-enriched-adult_P Parameter: Light Value: Far-red enriched vs. White
  misc_feature: MA Experiment 20001773 PARAMETER Experiment Name: At_Far-red-enriched-adult_P Parameter: Organism Value: A. thaliana
  misc_feature: MA Experiment 20001773 PARAMETER Experiment Name: At_Far-red-enriched-adult_P Parameter: Plant Line Value: Columbia
  misc_feature: MA Experiment 20001773 PARAMETER Experiment Name: At_Far-red-enriched-adult_P Parameter: Timepoint (hr) Value: 48
  misc_feature: MA Experiment 20001773 PARAMETER Experiment Name: At_Far-red-enriched-adult_P Parameter: Tissue Value: Aerial
  misc_feature: MA Experiment ID: 20001910 Result: Down-regulated in Transcription
  misc_feature: MA Experiment 20001910 PARAMETER Experiment Name: At_Drought_Reproduction_P Parameter: Age (day) Value: 37
  misc_feature: MA Experiment 20001910 PARAMETER Experiment Name: At_Drought_Reproduction_P Parameter: Organism Value: A. thaliana
  misc_feature: MA Experiment 20001910 PARAMETER Experiment Name: At_Drought_Reproduction_P Parameter: Plant Line Value: WS
  misc_feature: MA Experiment 20001910 PARAMETER Experiment Name: At_Drought_Reproduction_P Parameter: Timepoint (day) Value: 7
  misc_feature: MA Experiment 20001910 PARAMETER Experiment Name: At_Drought_Reproduction_P Parameter: Tissue Value: Flowers
  misc_feature: MA Experiment 20001910 PARAMETER Experiment Name: At_Drought_Reproduction_P Parameter: Treatment Value: Drought vs. No Drought
tgctaaacaagttgttagcatggcaacacattatttgtcaccatcaatattatgcattattttgaccactcttgtctccatcgccggagcaaaaatcccggcgattatagtcttcggtgactcttccgtagattccggcaataataacttcatatcaacaatggccagagccaattttgagccttacggtcgtgacttccctggtggtcgcgccaccggacgcttttgtaacggccgtctctcctccgatttcacttccgaggcttatggccttaaaccgaccgtgccagcctacctagatccgtcctataatatatctgattttgctaccggagtttgttttgcctccgccggcaccggttatgataattccacagccgatgtgcttggcgtgattccgttatggaaagaggtcgagtacttcaaggaataccaaagcaacctttccgcctatctcggccatcggagagctgccaaaatcatcagagaatctctgtacatagtaagcataggcaccaacgatttccttgagaactactacacattaccggacaggagatctcaattcagcatcagtcagtaccaagacttcctggtcgagattgctgaggtgttcttaaaggacatttacagacttggagctcggaaaatgtctttcactggaatctcacctatggggtgtctaccgctggagagagtgacaaatcttgacgacccttttagctgtgctcggagttataatgatttggctgtagatttcaatgggagattgagaagattggtgacaaaactgaatagagagcttactggaataaagatttatttcgctaatccttacgatatcatgtgggatattgttaccaaacctaatctttacggtctagagatatcaagttctgcctgttgcggtactggattgttcgagatgggatttctttgcggccaggacaatccgttaacttgcagtgatgccaataagttcgttttctgggacgcatttcacccgaccgagaggactaatcagattgtgtctgatcacttcttcaagcatctcaagaatctgtttcattga

SEQ ID NO: 43212 - protein, 356 aa, Arabidopsis thaliana
  peptide (1)..(356): Ceres Seq. ID no. 13646027
  misc_feature (54)..(347): Pfam Name: GDSL-like Lipase/Acylhydrolase Pfam Description: GDSL-like Lipase/Acylhydrolase
  misc_feature (30)..(355): Homolog of NCBI NO: 15217977 NR Description: lipase, putative [Arabidopsis thaliana]
  misc_feature (19)..(356): Homolog of NCBI NO: 21554186 NR Description: Contains similarity to proline-rich protein APG
  misc_feature (19)..(356): Homolog of NCBI NO: 25336267 NR Description: hypothetical protein [imported] - Arabidopsis
  misc_feature (19)..(356): Homolog of NCBI NO: 18390708 NR Description: GDSL-motif lipase/hydrolase protein [Arabidopsis
  misc_feature (32)..(355): Homolog of NCBI NO: 18406327 NR Description: lipase, putative [Arabidopsis thaliana]
  misc_feature (30)..(350): Homolog of NCBI NO: 7485330 NR Description: hypothetical protein F10M23.130 - Arabidopsis
  misc_feature (30)..(350): Homolog of NCBI NO: 18416824 NR Description: GDSL-motif lipase/hydrolase protein [Arabidopsis
  misc_feature (16)..(345): Homolog of NCBI NO: 15228157 NR Description: GDSL-motif lipase/hydrolase protein [Arabidopsis
  misc_feature (16)..(345): Homolog of NCBI NO: 21593518 NR Description: putative GDSL-motif lipase/hydrolase [Arabidopsis
  misc_feature (54)..(356): Homolog of NCBI NO: 15224201 NR Description: GDSL-motif lipase/hydrolase protein [Arabidopsis
AKQVVSMATHYLSPSILCIILTTLVSIAGAKIPAIIVFGDSSVDSGNNNFISTMARANFEPYGRDFPGGRATGRFCNGRLSSDFTSEAYGLKPTVPAYLDPSYNISDFATGVCFASAGTGYDNSTADVLGVIPLWKEVEYFKEYQSNLSAYLGHRRAAKIIRESLYIVSIGTNDFLENYYTLPDRRSQFSISQYQDFLVEIAEVFLKDIYRLGARKMSFTGISPMGCLPLERVTNLDDPFSCARSYNDLAVDFNGRLRRLVTKLNRELTGIKIYFANPYDIMWDIVTKPNLYGLEISSSACCGTGLFEMGFLCGQDNPLTCSDANKFVFWDAFHPTERTNQIVSDHFFKHLKNLFH

SEQ ID NO: 43213 - protein, 350 aa, Arabidopsis thaliana
  peptide (1)..(350): Ceres Seq. ID no. 13646028
  misc_feature (48)..(341): Pfam Name: GDSL-like Lipase/Acylhydrolase Pfam Description: GDSL-like Lipase/Acylhydrolase
  misc_feature (24)..(349): Homolog of NCBI NO: 15217977 NR Description: lipase, putative [Arabidopsis thaliana]
  misc_feature (13)..(350): Homolog of NCBI NO: 21554186 NR Description: Contains similarity to proline-rich protein APG
  misc_feature (13)..(350): Homolog of NCBI NO: 25336267 NR Description: hypothetical protein [imported] - Arabidopsis
  misc_feature (13)..(350): Homolog of NCBI NO: 18390708 NR Description: GDSL-motif lipase/hydrolase protein [Arabidopsis
  misc_feature (26)..(349): Homolog of NCBI NO: 18406327 NR Description: lipase, putative [Arabidopsis thaliana]
  misc_feature (24)..(344): Homolog of NCBI NO: 7485330 NR Description: hypothetical protein F10M23.130 - Arabidopsis
  misc_feature (24)..(344): Homolog of NCBI NO: 18416824 NR Description: GDSL-motif lipase/hydrolase protein [Arabidopsis
  misc_feature (10)..(339): Homolog of NCBI NO: 15228157 NR Description: GDSL-motif lipase/hydrolase protein [Arabidopsis
  misc_feature (10)..(339): Homolog of NCBI NO: 21593518 NR Description: putative GDSL-motif lipase/hydrolase [Arabidopsis
  misc_feature (48)..(350): Homolog of NCBI NO: 15224201 NR Description: GDSL-motif lipase/hydrolase protein [Arabidopsis
MATHYLSPSILCIILTTLVSIAGAKIPAIIVFGDSSVDSGNNNFISTMARANFEPYGRDFPGGRATGRFCNGRLSSDFTSEAYGLKPTVPAYLDPSYNISDFATGVCFASAGTGYDNSTADVLGVIPLWKEVEYFKEYQSNLSAYLGHRRAAKIIRESLYIVSIGTNDFLENYYTLPDRRSQFSISQYQDFLVEIAEVFLKDIYRLGARKMSFTGISPMGCLPLERVTNLDDPFSCARSYNDLAVDFNGRLRRLVTKLNRELTGIKIYFANPYDIMWDIVTKPNLYGLEISSSACCGTGLFEMGFLCGQDNPLTCSDANKFVFWDAFHPTERTNQIVSDHFFKHLKNLFH

SEQ ID NO: 43214 - protein, 303 aa, Arabidopsis thaliana
  peptide (1)..(303): Ceres Seq. ID no. 13646029
  misc_feature (1)..(294): Pfam Name: GDSL-like Lipase/Acylhydrolase Pfam Description: GDSL-like Lipase/Acylhydrolase
  misc_feature (1)..(302): Homolog of NCBI NO: 15217977 NR Description: lipase, putative [Arabidopsis thaliana]
  misc_feature (1)..(303): Homolog of NCBI NO: 21554186 NR Description: Contains similarity to proline-rich protein APG
  misc_feature (1)..(303): Homolog of NCBI NO: 25336267 NR Description: hypothetical protein [imported] - Arabidopsis
  misc_feature (1)..(303): Homolog of NCBI NO: 18390708 NR Description: GDSL-motif lipase/hydrolase protein [Arabidopsis
  misc_feature (1)..(302): Homolog of NCBI NO: 18406327 NR Description: lipase, putative [Arabidopsis thaliana]
  misc_feature (1)..(297): Homolog of NCBI NO: 7485330 NR Description: hypothetical protein F10M23.130 - Arabidopsis
  misc_feature (1)..(297): Homolog of NCBI NO: 18416824 NR Description: GDSL-motif lipase/hydrolase protein [Arabidopsis
  misc_feature (1)..(292): Homolog of NCBI NO: 15228157 NR Description: GDSL-motif lipase/hydrolase protein [Arabidopsis
  misc_feature (1)..(292): Homolog of NCBI NO: 21593518 NR Description: putative GDSL-motif lipase/hydrolase [Arabidopsis
  misc_feature (1)..(303): Homolog of NCBI NO: 15224201 NR Description: GDSL-motif lipase/hydrolase protein [Arabidopsis
MARANFEPYGRDFPGGRATGRFCNGRLSSDFTSEAYGLKPTVPAYLDPSYNISDFATGVCFASAGTGYDNSTADVLGVIPLWKEVEYFKEYQSNLSAYLGHRRAAKIIRESLYIVSIGTNDFLENYYTLPDRRSQFSISQYQDFLVEIAEVFLKDIYRLGARKMSFTGISPMGCLPLERVTNLDDPFSCARSYNDLAVDFNGRLRRLVTKLNRELTGIKIYFANPYDIMWDIVTKPNLYGLEISSSACCGTGLFEMGFLCGQDNPLTCSDANKFVFWDAFHPTERTNQIVSDHFFKHLKNLFH

SEQ ID NO: 43215 - DNA, 1956 bp, Arabidopsis thaliana
  misc_feature (1)..(1956): Ceres Seq. ID no. 13499824
  misc_feature: MA Experiment ID: 108434 Result: Down-regulated in Transcription
  misc_feature: MA Experiment 108434 PARAMETER Experiment Name: At_Root_Tips_cDNA_P Parameter: Tissue Value: Root Tips
  misc_feature: MA Experiment ID: 108488 Result: Down-regulated in Transcription
  misc_feature: MA Experiment ID: 20000069 Result: Up-regulated in Transcription
  misc_feature: MA Experiment 20000069 PARAMETER Experiment Name: At_100uM_ABA_Mutants_cDNA_P Parameter: Plant Line Value: CS23
  misc_feature: MA Experiment 20000069 PARAMETER Experiment Name: At_100uM_ABA_Mutants_cDNA_P Parameter: Timepoint (hr) Value: 6
  misc_feature: MA Experiment 20000069 PARAMETER Experiment Name: At_100uM_ABA_Mutants_cDNA_P Parameter: Tissue Value: Aerial
  misc_feature: MA Experiment 20000069 PARAMETER Experiment Name: At_100uM_ABA_Mutants_cDNA_P Parameter: Treatment Value: 100uM ABA vs. No Treatment
  misc_feature: MA Experiment ID: 20000111 Result: Down-regulated in Transcription
  misc_feature: MA Experiment 20000111 PARAMETER Experiment Name: At_42deg_Heat_cDNA_P Parameter: Temperature (deg C) Value: 42 vs. 22
  misc_feature: MA Experiment 20000111 PARAMETER Experiment Name: At_42deg_Heat_cDNA_P Parameter: Timepoint (hr) Value: 6
  misc_feature: MA Experiment 20000111 PARAMETER Experiment Name: At_42deg_Heat_cDNA_P Parameter: Tissue Value: Aerial
  misc_feature: MA Experiment ID: 20000113 Result: Down-regulated in Transcription
  misc_feature: MA Experiment 20000113 PARAMETER Experiment Name: At_42deg_Heat_cDNA_P Parameter: Temperature (deg C) Value: 42 vs. 22
  misc_feature: MA Experiment 20000113 PARAMETER Experiment Name: At_42deg_Heat_cDNA_P Parameter: Timepoint (hr) Value: 8
  misc_feature: MA Experiment 20000113 PARAMETER Experiment Name: At_42deg_Heat_cDNA_P Parameter: Tissue Value: Aerial
  misc_feature: MA Experiment ID: 20000184 Result: Down-regulated in Transcription
  misc_feature: MA Experiment 20000184 PARAMETER Experiment Name: At_Shoots__P Parameter: Age (day) Value: 7
  misc_feature: MA Experiment 20000184 PARAMETER Experiment Name: At_Shoots__P Parameter: Tissue Value: Shoots vs. Whole Plant
  misc_feature: MA Experiment ID: 20000224 Result: Up-regulated in Transcription
  misc_feature: MA Experiment ID: 20000438 Result: Down-regulated in Transcription
  misc_feature: MA Experiment 20000438 PARAMETER Experiment Name: At_Shoots__P Parameter: Age (day) Value: 14
  misc_feature: MA Experiment 20000438 PARAMETER Experiment Name: At_Shoots__P Parameter: Tissue Value: Shoots vs. Whole Plant
  misc_feature: MA Experiment ID: 20000573 Result: Up-regulated in Transcription
  misc_feature: MA Experiment 20000573 PARAMETER Experiment Name: At_100uM_ABA_Mutants__P Parameter: Organism Value: A. thaliana
  misc_feature: MA Experiment 20000573 PARAMETER Experiment Name: At_100uM_ABA_Mutants__P Parameter: Plant Line Value: CS22 vs. Ler wt
  misc_feature: MA Experiment 20000573 PARAMETER Experiment Name: At_100uM_ABA_Mutants__P Parameter: Timepoint (hr) Value: N/A
  misc_feature: MA Experiment 20000573 PARAMETER Experiment Name: At_100uM_ABA_Mutants__P Parameter: Tissue Value: Whole Plant
  misc_feature: MA Experiment 20000573 PARAMETER Experiment Name: At_100uM_ABA_Mutants__P Parameter: Treatment Value: None
  misc_feature: MA Experiment ID: 20001247 Result: Up-regulated in Transcription
  misc_feature: MA Experiment 20001247 PARAMETER Experiment Name: At_Far-red-induction_P Parameter: Age (day) Value: 7
  misc_feature: MA Experiment 20001247 PARAMETER Experiment Name: At_Far-red-induction_P Parameter: Light Value: Far-red vs. White
  misc_feature: MA Experiment 20001247 PARAMETER Experiment Name: At_Far-red-induction_P Parameter: Organism Value: A. thaliana
  misc_feature: MA Experiment 20001247 PARAMETER Experiment Name: At_Far-red-induction_P Parameter: Plant Line Value: Columbia
  misc_feature: MA Experiment 20001247 PARAMETER Experiment Name: At_Far-red-induction_P Parameter: Timepoint (hr) Value: 1
  misc_feature: MA Experiment 20001247 PARAMETER Experiment Name: At_Far-red-induction_P Parameter: Tissue Value: Whole Plant
  misc_feature: MA Experiment ID: 20001248 Result: Up-regulated in Transcription
  misc_feature: MA Experiment 20001248 PARAMETER Experiment Name: At_Far-red-induction_P Parameter: Age (day) Value: 7
  misc_feature: MA Experiment 20001248 PARAMETER Experiment Name: At_Far-red-induction_P Parameter: Light Value: Far-red vs. White
  misc_feature: MA Experiment 20001248 PARAMETER Experiment Name: At_Far-red-induction_P Parameter: Organism Value: A. thaliana
  misc_feature: MA Experiment 20001248 PARAMETER Experiment Name: At_Far-red-induction_P Parameter: Plant Line Value: Columbia
  misc_feature: MA Experiment 20001248 PARAMETER Experiment Name: At_Far-red-induction_P Parameter: Timepoint (hr) Value: 4
  misc_feature: MA Experiment 20001248 PARAMETER Experiment Name: At_Far-red-induction_P Parameter: Tissue Value: Whole Plant
  misc_feature: MA Experiment ID: 20001450 Result: Up-regulated in Transcription
  misc_feature: MA Experiment 20001450 PARAMETER Experiment Name: At_Far-red-induction_P Parameter: Age (day) Value: 7
  misc_feature: MA Experiment 20001450 PARAMETER Experiment Name: At_Far-red-induction_P Parameter: Light Value: Far-red vs. White
  misc_feature: MA Experiment 20001450 PARAMETER Experiment Name: At_Far-red-induction_P Parameter: Organism Value: A. thaliana
  misc_feature: MA Experiment 20001450 PARAMETER Experiment Name: At_Far-red-induction_P Parameter: Plant Line Value: Columbia
  misc_feature: MA Experiment 20001450 PARAMETER Experiment Name: At_Far-red-induction_P Parameter: Timepoint (hr) Value: 8
  misc_feature: MA Experiment 20001450 PARAMETER Experiment Name: At_Far-red-induction_P Parameter: Tissue Value: Whole Plant
  misc_feature: MA Experiment ID: 20001451 Result: Up-regulated in Transcription
  misc_feature: MA Experiment 20001451 PARAMETER Experiment Name: At_Far-red-induction_P Parameter: Age (day) Value: 7
  misc_feature: MA Experiment 20001451 PARAMETER Experiment Name: At_Far-red-induction_P Parameter: Light Value: Far-red vs. White
  misc_feature: MA Experiment 20001451 PARAMETER Experiment Name: At_Far-red-induction_P Parameter: Organism Value: A. thaliana
  misc_feature: MA Experiment 20001451 PARAMETER Experiment Name: At_Far-red-induction_P Parameter: Plant Line Value: Columbia
  misc_feature: MA Experiment 20001451 PARAMETER Experiment Name: At_Far-red-induction_P Parameter: Timepoint (hr) Value: 24
  misc_feature: MA Experiment 20001451 PARAMETER Experiment Name: At_Far-red-induction_P Parameter: Tissue Value: Whole Plant
  misc_feature: MA Experiment ID: 20001911 Result: Up-regulated in Transcription
  misc_feature: MA Experiment 20001911 PARAMETER Experiment Name: At_Drought_Reproduction_P Parameter: Age (day) Value: 40
  misc_feature: MA Experiment 20001911 PARAMETER Experiment Name: At_Drought_Reproduction_P Parameter: Organism Value: A. thaliana
  misc_feature: MA Experiment 20001911 PARAMETER Experiment Name: At_Drought_Reproduction_P Parameter: Plant Line Value: WS
  misc_feature: MA Experiment 20001911 PARAMETER Experiment Name: At_Drought_Reproduction_P Parameter: Timepoint (day) Value: 10
  misc_feature: MA Experiment 20001911 PARAMETER Experiment Name: At_Drought_Reproduction_P Parameter: Tissue Value: Flowers
  misc_feature: MA Experiment 20001911 PARAMETER Experiment Name: At_Drought_Reproduction_P Parameter: Treatment Value: Drought vs. No Drought
atgaactggcagctgtatgcaaaaaagtgtttaatttatctttcctttgggtttctcacggagtcacggttcctcgttcgtcctctcccgtcgtctctccgcactaaattgatgggcacatcatctgggtccaatcttcctcaccagatgctacctccacgtcagcaactacaaacatctctttcgcttgtatcttcagatccccacttgtcacggtctaattctggcattgtgcgtgaatcaccagctgaaagtgctagctctcaagaaacttggccaacctcaaaatctattatgggaaggaagacagatagcggaaagacagggcctgactctcatgatcaacatgtgatccgccatgtttccattgctgataaggtatcgctacgggacatagctagagagagacttgacatagtcgctgagagaatgcatcgattaccagaagaatatctcgaggagttaaagaatggtcttaaggctatccttgaaggaaatggtgcgcagcctatagatgagtttatgtttctgcagaagtttgtccagacgagatctgatttaacttcaaagacacttgtcagggctcaccgagtgcagcttgaagttcttgtggttataaacactggtatccaagcattcttgcacccaaacatcaatctctctcagtcatcactcatcgagatctttgtgtacaagagatgcagaaacatagcttgccaaaacgaactcccggctgatggttgtccctgtgagatatgcgctaataggaaaggcttctgcaacctgtgcatgtgtgtgatatgtaacaagtttgactttgcagtcaacacatgccgctggattggctgcgacgtgtgttctcattggactcatacggattgtgctattagggatggggagatttcgatgggagtttctcccaagagcgtatctgggatgggagaaatgctgttcaagtgtcgagcgtgcaaccatacttctgaattgctggggtgggtgaaagatgtgtttcagcactgtgcaccaaactgggatagggaatctttaatgaaggaacttgacttcgttagtaggattttccgtggaagcgaagatacaagaggccggaaactcttctggaagtgtgaggagcttatggagaagattaaaggtggactggctgaagcaacagcggccaagttgatactcatgtttttccaagaaattgaattggactctccaaagagccttgaaagcggagaaggtgggggtacgatagcacctcaagatgcatgcaaccgaattgctgaagttgtaaaggaaacactgaggaaaatggagatagtgggtgaggaaaagacgaggatgtacaagaaagcgcgaatggggcttgaggaatgcgagagagaggtagaagagaaagcaaagcaagtggcggaactgcagatggagaggcagaagaagaaacaacagatagaagaggtggagaggatagtgaggctgaagcaagcagaggcagagatgtttcagttaaaagcaaacgaggcaaaagtggaagcagagagattggaaaggattgtgaaagcgaaaaaggagaaaacagaagaggaatacgcaagtaactatttgaaactgaggctgagcgaggcggaggcagagaaagagtatctgtttgaaaagataaaagagcaggaaagtggtgggaatggtggtgaagcgtcacaagcagtgatgtactcaaagatcagagaaatgctgcatggatacaatgcatcgtcgccaagggtagatccaagatcaaaccagcgaaatcctttcagatccaatccttagatgtttgtattgtctctctttgtttgtattaaaaaaaaaatccgaatcaattaaggttggatttgtgtgtgaagtattgtggtctttgtattcaaattttgcacatgatcgtctatgttgggccataatgttatgcaagctttg

SEQ ID NO: 43216 - protein, 603 aa, Arabidopsis thaliana
  peptide (1)..(603): Ceres Seq. ID no. 13499825
  misc_feature (440)..(601): Pfam Name: Myosin tail Pfam Description: Myosin tail
  misc_feature (426)..(562): Homolog of NCBI NO: 33339558 NR Description: ABRH1 [Marsilea quadrifolia]
  misc_feature (104)..(544): Homolog of NCBI NO: 18394157 NR Description: expressed protein [Arabidopsis thaliana]
  misc_feature (104)..(559): Homolog of NCBI NO: 25402780 NR Description: protein F10B6.14 [imported] - Arabidopsis
  misc_feature (129)..(560): Homolog of NCBI NO: 15229445 NR Description: expressed protein [Arabidopsis thaliana]
  misc_feature (129)..(560): Homolog of NCBI NO: 30695820 NR Description: expressed protein [Arabidopsis thaliana]
  misc_feature (129)..(560): Homolog of NCBI NO: 28973711 NR Description: unknown protein [Arabidopsis thaliana]
  misc_feature (50)..(579): Homolog of NCBI NO: 30385711 NR Description: Potyvirus VPg interacting protein [Nicotiana
  misc_feature (93)..(603): Homolog of NCBI NO: 30385713 NR Description: Potyvirus VPg interacting protein [Pisum sativum]
  misc_feature (38)..(603): Homolog of NCBI NO: 15238905 NR Description: expressed protein [Arabidopsis thaliana]
  misc_feature (38)..(603): Homolog of NCBI NO: 18398053 NR Description: expressed protein [Arabidopsis thaliana]
MNWQLYAKKCLIYLSFGFLTESRFLVRPLPSSLRTKLMGTSSGSNLPHQMLPPRQQLQTSLSLVSSDPHLSRSNSGIVRESPAESASSQETWPTSKSIMGRKTDSGKTGPDSHDQHVIRHVSIADKVSLRDIARERLDIVAERMHRLPEEYLEELKNGLKAILEGNGAQPIDEFMFLQKFVQTRSDLTSKTLVRAHRVQLEVLVVINTGIQAFLHPNINLSQSSLIEIFVYKRCRNIACQNELPADGCPCEICANRKGFCNLCMCVICNKFDFAVNTCRWIGCDVCSHWTHTDCAIRDGEISMGVSPKSVSGMGEMLFKCRACNHTSELLGWVKDVFQHCAPNWDRESLMKELDFVSRIFRGSEDTRGRKLFWKCEELMEKIKGGLAEATAAKLILMFFQEIELDSPKSLESGEGGGTIAPQDACNRIAEVVKETLRKMEIVGEEKTRMYKKARMGLEECEREVEEKAKQVAELQMERQKKKQQIEEVERIVRLKQAEAEMFQLKANEAKVEAERLERIVKAKKEKTEEEYASNYLKLRLSEAEAEKEYLFEKIKEQESGGNGGEASQAVMYSKIREMLHGYNASSPRVDPRSNQRNPFRSNP

SEQ ID NO: 43217 - protein, 566 aa, Arabidopsis thaliana
  peptide (1)..(566): Ceres Seq. ID no. 13499826
  misc_feature (403)..(564): Pfam Name: Myosin tail Pfam Description: Myosin tail
  misc_feature (389)..(525): Homolog of NCBI NO: 33339558 NR Description: ABRH1 [Marsilea quadrifolia]
  misc_feature (67)..(507): Homolog of NCBI NO: 18394157 NR Description: expressed protein [Arabidopsis thaliana]
  misc_feature (67)..(522): Homolog of NCBI NO: 25402780 NR Description: protein F10B6.14 [imported] - Arabidopsis
  misc_feature (92)..(523): Homolog of NCBI NO: 15229445 NR Description: expressed protein [Arabidopsis thaliana]
  misc_feature (92)..(523): Homolog of NCBI NO: 30695820 NR Description: expressed protein [Arabidopsis thaliana]
  misc_feature (92)..(523): Homolog of NCBI NO: 28973711 NR Description: unknown protein [Arabidopsis thaliana]
  misc_feature (13)..(542): Homolog of NCBI NO: 30385711 NR Description: Potyvirus VPg interacting protein [Nicotiana
  misc_feature (56)..(566): Homolog of NCBI NO: 30385713 NR Description: Potyvirus VPg interacting protein [Pisum sativum]
  misc_feature (1)..(566): Homolog of NCBI NO: 15238905 NR Description: expressed protein [Arabidopsis thaliana]
  misc_feature (1)..(566): Homolog of NCBI NO: 18398053 NR Description: expressed protein [Arabidopsis thaliana]
MGTSSGSNLPHQMLPPRQQLQTSLSLVSSDPHLSRSNSGIVRESPAESASSQETWPTSKSIMGRKTDSGKTGPDSHDQHVIRHVSIADKVSLRDIARERLDIVAERMHRLPEEYLEELKNGLKAILEGNGAQPIDEFMFLQKFVQTRSDLTSKTLVRAHRVQLEVLVVINTGIQAFLHPNINLSQSSLIEIFVYKRCRNIACQNELPADGCPCEICANRKGFCNLCMCVICNKFDFAVNTCRWIGCDVCSHWTHTDCAIRDGEISMGVSPKSVSGMGEMLFKCRACNHTSELLGWVKDVFQHCAPNWDRESLMKELDFVSRIFRGSEDTRGRKLFWKCEELMEKIKGGLAEATAAKLILMFFQEIELDSPKSLESGEGGGTIAPQDACNRIAEVVKETLRKMEIVGEEKTRMYKKARMGLEECEREVEEKAKQVAELQMERQKKKQQIEEVERIVRLKQAEAEMFQLKANEAKVEAERLERIVKAKKEKTEEEYASNYLKLRLSEAEAEKEYLFEKIKEQESGGNGGEASQAVMYSKIREMLHGYNASSPRVDPRSNQRNPFRSNP

SEQ ID NO: 43218 - protein, 554 aa, Arabidopsis thaliana
  peptide (1)..(554): Ceres Seq. ID no. 13499827
  misc_feature (391)..(552): Pfam Name: Myosin tail Pfam Description: Myosin tail
  misc_feature (377)..(513): Homolog of NCBI NO: 33339558 NR Description: ABRH1 [Marsilea quadrifolia]
  misc_feature (55)..(495): Homolog of NCBI NO: 18394157 NR Description: expressed protein [Arabidopsis thaliana]
  misc_feature (55)..(510): Homolog of NCBI NO: 25402780 NR Description: protein F10B6.14 [imported] - Arabidopsis
  misc_feature (80)..(511): Homolog of NCBI NO: 15229445 NR Description: expressed protein [Arabidopsis thaliana]
  misc_feature (80)..(511): Homolog of NCBI NO: 30695820 NR Description: expressed protein [Arabidopsis thaliana]
  misc_feature (80)..(511): Homolog of NCBI NO: 28973711 NR Description: unknown protein [Arabidopsis thaliana]
  misc_feature (1)..(530): Homolog of NCBI NO: 30385711 NR Description: Potyvirus VPg interacting protein [Nicotiana
  misc_feature (44)..(554): Homolog of NCBI NO: 30385713 NR Description: Potyvirus VPg interacting protein [Pisum sativum]
  misc_feature (1)..(554): Homolog of NCBI NO: 15238905 NR Description: expressed protein [Arabidopsis thaliana]
  misc_feature (1)..(554): Homolog of NCBI NO: 18398053 NR Description: expressed protein [Arabidopsis thaliana]
MLPPRQQLQTSLSLVSSDPHLSRSNSGIVRESPAESASSQETWPTSKSIMGRKTDSGKTGPDSHDQHVIRHVSIADKVSLRDIARERLDIVAERMHRLPEEYLEELKNGLKAILEGNGAQPIDEFMFLQKFVQTRSDLTSKTLVRAHRVQLEVLVVINTGIQAFLHPNINLSQSSLIEIFVYKRCRNIACQNELPADGCPCEICANRKGFCNLCMCVICNKFDFAVNTCRWIGCDVCSHWTHTDCAIRDGEISMGVSPKSVSGMGEMLFKCRACNHTSELLGWVKDVFQHCAPNWDRESLMKELDFVSRIFRGSEDTRGRKLFWKCEELMEKIKGGLAEATAAKLILMFFQEIELDSPKSLESGEGGGTIAPQDACNRIAEVVKETLRKMEIVGEEKTRMYKKARMGLEECEREVEEKAKQVAELQMERQKKKQQIEEVERIVRLKQAEAEMFQLKANEAKVEAERLERIVKAKKEKTEEEYASNYLKLRLSEAEAEKEYLFEKIKEQESGGNGGEASQAVMYSKIREMLHGYNASSPRVDPRSNQRNPFRSNP

SEQ ID NO: 43219 - DNA, 1902 bp, Arabidopsis thaliana
  misc_feature (1)..(1902): Ceres Seq. ID no. 13645915
  misc_feature: MA Experiment ID: 20000437 Result: Down-regulated in Transcription
  misc_feature: MA Experiment 20000437 PARAMETER Experiment Name: At_Drought_P Parameter: Age (day) Value: 8
  misc_feature: MA Experiment 20000437 PARAMETER Experiment Name: At_Drought_P Parameter: Organism Value: A. thaliana
  misc_feature: MA Experiment 20000437 PARAMETER Experiment Name: At_Drought_P Parameter: Plant Line Value: WS
  misc_feature: MA Experiment 20000437 PARAMETER Experiment Name: At_Drought_P Parameter: Timepoint (hr) Value: 24
  misc_feature: MA Experiment 20000437 PARAMETER Experiment Name: At_Drought_P Parameter: Tissue Value: Whole Plant
  misc_feature: MA Experiment 20000437 PARAMETER Experiment Name: At_Drought_P Parameter: Treatment Value: Drought vs. No Drought
  misc_feature: MA Experiment ID: 20001451 Result: Down-regulated in Transcription
  misc_feature: MA Experiment 20001451 PARAMETER Experiment Name: At_Far-red-induction_P Parameter: Age (day) Value: 7
  misc_feature: MA Experiment 20001451 PARAMETER Experiment Name: At_Far-red-induction_P Parameter: Light Value: Far-red vs. White
  misc_feature: MA Experiment 20001451 PARAMETER Experiment Name: At_Far-red-induction_P Parameter: Organism Value: A. thaliana
  misc_feature: MA Experiment 20001451 PARAMETER Experiment Name: At_Far-red-induction_P Parameter: Plant Line Value: Columbia
  misc_feature: MA Experiment 20001451 PARAMETER Experiment Name: At_Far-red-induction_P Parameter: Timepoint (hr) Value: 24
  misc_feature: MA Experiment 20001451 PARAMETER Experiment Name: At_Far-red-induction_P Parameter: Tissue Value: Whole Plant
agagaaaactctcactctgcaacttcgtttctcttctcctttcttaaacctctcacgcggtttcagacttccgttcgcttaccgaagacggctcggaaattctttcctgaagaatcagcgacgaccttagcattatctacaagtcatcttttctgctagatctgttgtgtatactactcgcgatttcattttgaatttgttccagccaatgctgaaggctagactaaaatgagcgtgtcaaaagcatcgaggacgcaacattcgctcgttcctcttgcgaccctgattggtagggagctgaggagcgagaaagtagagaagccttttgtcaagtatggtcaagcagctctcgctaagaaaggagaggactactttttgatcaaaactgactgtgaaagggtacctggtgatccatcatcggctttttcagttttcgggatatttgacggacacaatggtaattcagctgccatatatactaaggaacatcttctggaaaacgtggtgagtgcaattcctcaaggcgcaagcagggatgagtggcttcaagctcttcctagggctttagttgctggctttgtgaaaactgacattgaatttcagcagaaaggggaaacttcaggaacaaccgtgacttttgttataattgatggttggactattactgttgcttctgttggtgactcgcgctgcatattggacacccaaggtggtgtggtttctctactgactgttgatcacaggctagaagagaatgttgaagaaagagaacgcataactgctagtggaggtgaggtcggaagactcaatgtatttggtggcaatgaggtcggcccactacgatgctggcctggtggtttatgtctttcgaggtccattggtgatacggatgtgggagaatttattgtccctataccacacgttaagcaagtgaaacttcctgatgctggagggagactcatcatagcttcagatggtatatgggatatactgtcttctgatgtggctgccaaagcttgtcgtggtttatctgccgatcttgctgctaaacttgttgttaaggaagcattgcgaacaaaagggttgaaagatgatacgacttgtgtagtcgttgacatagttccatctggtcatctttccttggctccagcacccatgaagaaacagaacccatttacctcatttctttcaaggaaaaaccatatggataccaacaacaaaaatggcaacaagctttctgctgttggagttgtagaagaattgtttgaagaaggttctgctgtgcttgcagatagattgggaaaggatcttctctcaaatacggaaactgggctcttaaaatgtgctgtatgccaaatagatgaatctccgagtgaagatttatcaagcaatgggggttccatcatttcctcagcatctaaacgatgggaaggtcccttcctatgcacaatatgcaagaaaaagaaagacgccatggaaggaaaaagaccaagcaaaggttcagtgactacttgaagccacttgcgtgcgtgaaaaaaatcataaaatccggtaagaaatttgtatgtttctcattttcttatctaacttcttctcttgtgctctgtaagagtagcttggttttgtgttcttttcccaggtattgattggaaagtagtagtaatagtagaagtttatgcaaatgtttgtagagagagagagagagagtgtgtgacaatagatccaattcttatccattgtttaagatttccctggattgcgttcttggcattatgctgaccatttaccttcgtagatgtgtttttgtttgggaaattgctgatatactaacaagagtttccaagttgtaagtagaattcatattttgttattgtcactcaatcctattgcactcattcattg

SEQ ID NO: 43220 - protein, 428 aa, Arabidopsis thaliana
  peptide (1)..(428): Ceres Seq. ID no. 13645916
  misc_feature (22)..(290): Pfam Name: Protein phosphatase 2C Pfam Description: Protein phosphatase 2C
  misc_feature (27)..(425): Homolog of NCBI NO: 38344839 NR Description: OSJNBa0064H22.20 [Oryza sativa (japonica
  misc_feature (14)..(420): Homolog of NCBI NO: 14029015 NR Description: Unknown protein [Oryza sativa]
  misc_feature (6)..(422): Homolog of NCBI NO: 15292869 NR Description: unknown protein [Arabidopsis thaliana]
  misc_feature (6)..(422): Homolog of NCBI NO: 18401703 NR Description: protein phosphatase 2C (PP2C) -related
  misc_feature (3)..(356): Homolog of NCBI NO: 34898168 NR Description: protein phosphatase 2C-like
  misc_feature (31)..(422): Homolog of NCBI NO: 34914644 NR Description: OSJNBa0054L14.21 [Oryza sativa (japonica
  misc_feature (3)..(422): Homolog of NCBI NO: 34394411 NR Description: protein phosphatase 2C-like
  misc_feature (13)..(422): Homolog of NCBI NO: 15221404 NR Description: protein phosphatase 2C (PP2C) -related
  misc_feature (1)..(354): Homolog of NCBI NO: 16930415 NR Description: At1g09160/T12M4_13 [Arabidopsis thaliana]
  misc_feature (1)..(428): Homolog of NCBI NO: 15217454 NR Description: protein phosphatase 2C (PP2C) -related
MSVSKASRTQHSLVPLATLIGRELRSEKVEKPFVKYGQAALAKKGEDYFLIKTDCERVPGDPSSAFSVFGIFDGHNGNSAAIYTKEHLLENVVSAIPQGASRDEWLQALPRALVAGFVKTDIEFQQKGETSGTTVTFVIIDGWTITVASVGDSRCILDTQGGVVSLLTVDHRLEENVEERERITASGGEVGRLNVFGGNEVGPLRCWPGGLCLSRSIGDTDVGEFIVPIPHVKQVKLPDAGGRLIIASDGIWDILSSDVAAKACRGLSADLAAKLVVKEALRTKGLKDDTTCVVVDIVPSGHLSLAPAPMKKQNPFTSFLSRKNHMDTNNKNGNKLSAVGVVEELFEEGSAVLADRLGKDLLSNTETGLLKCAVCQIDESPSEDLSSNGGSIISSASKRWEGPFLCTICKKKKDAMEGKRPSKGSVTT

SEQ ID NO: 43221 - DNA, 1528 bp, Arabidopsis thaliana
  misc_feature (1)..(1528): Ceres Seq. ID no. 12394685
  misc_feature: MA Experiment ID: 20000180 Result: Up-regulated in Transcription
  misc_feature: MA Experiment 20000180 PARAMETER Experiment Name: At_Germinating_Seeds_P Parameter: Age (hr) Value: 24 vs. 0
  misc_feature: MA Experiment 20000180 PARAMETER Experiment Name: At_Germinating_Seeds_P Parameter: Tissue Value: Germinating Seeds
  misc_feature: MA Experiment ID: 20000184 Result: Up-regulated in Transcription
  misc_feature: MA Experiment 20000184 PARAMETER Experiment Name: At_Shoots__P Parameter: Age (day) Value: 7
  misc_feature: MA Experiment 20000184 PARAMETER Experiment Name: At_Shoots__P Parameter: Tissue Value: Shoots vs. Whole Plant
  misc_feature: MA Experiment ID: 20000185 Result: Down-regulated in Transcription
  misc_feature: MA Experiment 20000185 PARAMETER Experiment Name: At_Roots__P Parameter: Age (day) Value: 7 vs. 21
  misc_feature: MA Experiment 20000185 PARAMETER Experiment Name: At_Roots__P Parameter: Organism Value: A. thaliana
  misc_feature: MA Experiment 20000185 PARAMETER Experiment Name: At_Roots__P Parameter: Tissue Value: Roots vs. Whole Plant
  misc_feature: MA Experiment ID: 20000438 Result: Up-regulated in Transcription
  misc_feature: MA Experiment 20000438 PARAMETER Experiment Name: At_Shoots__P Parameter: Age (day) Value: 14
  misc_feature: MA Experiment 20000438 PARAMETER Experiment Name: At_Shoots__P Parameter: Tissue Value: Shoots vs. Whole Plant
  misc_feature: MA Experiment ID: 20000439 Result: Down-regulated in Transcription
  misc_feature: MA Experiment 20000439 PARAMETER Experiment Name: At_Roots__P Parameter: Age (day) Value: 14 vs. 21
  misc_feature: MA Experiment 20000439 PARAMETER Experiment Name: At_Roots__P Parameter: Organism Value: A. thaliana
  misc_feature: MA Experiment 20000439 PARAMETER Experiment Name: At_Roots__P Parameter: Tissue Value: Roots vs. Whole Plant
  misc_feature: MA Experiment ID: 20001451 Result: Down-regulated in Transcription
  misc_feature: MA Experiment 20001451 PARAMETER Experiment Name: At_Far-red-induction_P Parameter: Age (day) Value: 7
  misc_feature: MA Experiment 20001451 PARAMETER Experiment Name: At_Far-red-induction_P Parameter: Light Value: Far-red vs. White
  misc_feature: MA Experiment 20001451 PARAMETER Experiment Name: At_Far-red-induction_P Parameter: Organism Value: A. thaliana
  misc_feature: MA Experiment 20001451 PARAMETER Experiment Name: At_Far-red-induction_P Parameter: Plant Line Value: Columbia
  misc_feature: MA Experiment 20001451 PARAMETER Experiment Name: At_Far-red-induction_P Parameter: Timepoint (hr) Value: 24
  misc_feature: MA Experiment 20001451 PARAMETER Experiment Name: At_Far-red-induction_P Parameter: Tissue Value: Whole Plant
  misc_feature: MA Experiment ID: 20001556 Result: Down-regulated in Transcription
  misc_feature: MA Experiment 20001556 PARAMETER Experiment Name: At_Drought_Soil_Dry_P Parameter: Age (day) Value: 26
  misc_feature: MA Experiment 20001556 PARAMETER Experiment Name: At_Drought_Soil_Dry_P Parameter: Organism Value: A. thaliana
  misc_feature: MA Experiment 20001556 PARAMETER Experiment Name: At_Drought_Soil_Dry_P Parameter: Plant Line Value: WS
  misc_feature: MA Experiment 20001556 PARAMETER Experiment Name: At_Drought_Soil_Dry_P Parameter: Post Timepoint (hr) Value: None
  misc_feature: MA Experiment 20001556 PARAMETER Experiment Name: At_Drought_Soil_Dry_P Parameter: Post-Treatment Value: None
  misc_feature: MA Experiment 20001556 PARAMETER Experiment Name: At_Drought_Soil_Dry_P Parameter: Timepoint (day) Value: 12
  misc_feature: MA Experiment 20001556 PARAMETER Experiment Name: At_Drought_Soil_Dry_P Parameter: Treatment Value: Drought vs. No Drought
  misc_feature: MA Experiment ID: 20001557 Result: Down-regulated in Transcription
  misc_feature: MA Experiment 20001557 PARAMETER Experiment Name: At_Drought_Soil_Dry_P Parameter: Age (day) Value: 27
  misc_feature: MA Experiment 20001557 PARAMETER Experiment Name: At_Drought_Soil_Dry_P Parameter: Organism Value: A. thaliana
  misc_feature: MA Experiment 20001557 PARAMETER Experiment Name: At_Drought_Soil_Dry_P Parameter: Plant Line Value: WS
  misc_feature: MA Experiment 20001557 PARAMETER Experiment Name: At_Drought_Soil_Dry_P Parameter: Post Timepoint (hr) Value: 3
  misc_feature: MA Experiment 20001557 PARAMETER Experiment Name: At_Drought_Soil_Dry_P Parameter: Post-Treatment Value: Re-Water vs. No Drought
  misc_feature: MA Experiment 20001557 PARAMETER Experiment Name: At_Drought_Soil_Dry_P Parameter: Timepoint (day) Value: 13
  misc_feature: MA Experiment 20001557 PARAMETER Experiment Name: At_Drought_Soil_Dry_P Parameter: Treatment Value: Drought vs. No Drought
  misc_feature: MA Experiment ID: 20001558 Result: Down-regulated in Transcription
  misc_feature: MA Experiment 20001558 PARAMETER Experiment Name: At_Drought_Soil_Dry_P Parameter: Age (day) Value: 27
  misc_feature: MA Experiment 20001558 PARAMETER Experiment Name: At_Drought_Soil_Dry_P Parameter: Organism Value: A. thaliana
  misc_feature: MA Experiment 20001558 PARAMETER Experiment Name: At_Drought_Soil_Dry_P Parameter: Plant Line Value: WS
  misc_feature: MA Experiment 20001558 PARAMETER Experiment Name: At_Drought_Soil_Dry_P Parameter: Post Timepoint (hr) Value: 6
  misc_feature: MA Experiment 20001558 PARAMETER Experiment Name: At_Drought_Soil_Dry_P Parameter: Post-Treatment Value: Re-Water vs. No Drought
  misc_feature: MA Experiment 20001558 PARAMETER Experiment Name: At_Drought_Soil_Dry_P Parameter: Timepoint (day) Value: 13
  misc_feature: MA Experiment 20001558 PARAMETER Experiment Name: At_Drought_Soil_Dry_P Parameter: Treatment Value: Drought vs. No Drought
  misc_feature: MA Experiment ID: 20001559 Result: Down-regulated in Transcription
  misc_feature: MA Experiment 20001559 PARAMETER Experiment Name: At_Drought_Soil_Dry_P Parameter: Age (day) Value: 28
  misc_feature: MA Experiment 20001559 PARAMETER Experiment Name: At_Drought_Soil_Dry_P Parameter: Organism Value: A. thaliana
  misc_feature: MA Experiment 20001559 PARAMETER Experiment Name: At_Drought_Soil_Dry_P Parameter: Plant Line Value: WS
  misc_feature: MA Experiment 20001559 PARAMETER Experiment Name: At_Drought_Soil_Dry_P Parameter: Post Timepoint (hr) Value: 29
  misc_feature: MA Experiment 20001559 PARAMETER Experiment Name: At_Drought_Soil_Dry_P Parameter: Post-Treatment Value: Re-Water vs. No Drought
  misc_feature: MA Experiment 20001559 PARAMETER Experiment Name: At_Drought_Soil_Dry_P Parameter: Timepoint (day) Value: 14
  misc_feature: MA Experiment 20001559 PARAMETER Experiment Name: At_Drought_Soil_Dry_P Parameter: Treatment Value: Drought vs. No Drought
  misc_feature: MA Experiment ID: 20001904 Result: Down-regulated in Transcription
  misc_feature: MA Experiment 20001904 PARAMETER Experiment Name: At_Drought_Reproduction_P Parameter: Age (day) Value: 37
  misc_feature: MA Experiment 20001904 PARAMETER Experiment Name: At_Drought_Reproduction_P Parameter: Organism Value: A. thaliana
  misc_feature: MA Experiment 20001904 PARAMETER Experiment Name: At_Drought_Reproduction_P Parameter: Plant Line Value: WS
  misc_feature: MA Experiment 20001904 PARAMETER Experiment Name: At_Drought_Reproduction_P Parameter: Timepoint (day) Value: 7
  misc_feature: MA Experiment 20001904 PARAMETER Experiment Name: At_Drought_Reproduction_P Parameter: Tissue Value: Rosettes
  misc_feature: MA Experiment 20001904 PARAMETER Experiment Name: At_Drought_Reproduction_P Parameter: Treatment Value: Drought vs. No Drought
  misc_feature: MA Experiment ID: 20001905 Result: Down-regulated in Transcription
  misc_feature: MA Experiment 20001905 PARAMETER Experiment Name: At_Drought_Reproduction_P Parameter: Age (day) Value: 40
  misc_feature: MA Experiment 20001905 PARAMETER Experiment Name: At_Drought_Reproduction_P Parameter: Organism Value: A. thaliana
  misc_feature: MA Experiment 20001905 PARAMETER Experiment Name: At_Drought_Reproduction_P Parameter: Plant Line Value: WS
  misc_feature: MA Experiment 20001905 PARAMETER Experiment Name: At_Drought_Reproduction_P Parameter: Timepoint (day) Value: 10
  misc_feature: MA Experiment 20001905 PARAMETER Experiment Name: At_Drought_Reproduction_P Parameter: Tissue Value: Rosettes
  misc_feature: MA Experiment 20001905 PARAMETER Experiment Name: At_Drought_Reproduction_P Parameter: Treatment Value: Drought vs. No Drought
  misc_feature: MA Experiment ID: 20001906 Result: Down-regulated in Transcription
  misc_feature: MA Experiment 20001906 PARAMETER Experiment Name: At_Drought_Reproduction_P Parameter: Age (day) Value: 35
  misc_feature: MA Experiment 20001906 PARAMETER Experiment Name: At_Drought_Reproduction_P Parameter: Organism Value: A. thaliana
  misc_feature: MA Experiment 20001906 PARAMETER Experiment Name: At_Drought_Reproduction_P Parameter: Plant Line Value: WS
  misc_feature: MA Experiment 20001906 PARAMETER Experiment Name: At_Drought_Reproduction_P Parameter: Timepoint (day) Value: 5
  misc_feature: MA Experiment 20001906 PARAMETER Experiment Name: At_Drought_Reproduction_P Parameter: Tissue Value: Siliques
  misc_feature: MA Experiment 20001906 PARAMETER Experiment Name: At_Drought_Reproduction_P Parameter: Treatment Value: Drought vs. No Drought
  misc_feature: MA Experiment ID: 20001908 Result: Down-regulated in Transcription
  misc_feature: MA Experiment 20001908 PARAMETER Experiment Name: At_Drought_Reproduction_P Parameter: Age (day) Value: 40
  misc_feature: MA Experiment 20001908 PARAMETER Experiment Name: At_Drought_Reproduction_P Parameter: Organism Value: A. thaliana
  misc_feature: MA Experiment 20001908 PARAMETER Experiment Name: At_Drought_Reproduction_P Parameter: Plant Line Value: WS
  misc_feature: MA Experiment 20001908 PARAMETER Experiment Name: At_Drought_Reproduction_P Parameter: Timepoint (day) Value: 10
  misc_feature: MA Experiment 20001908 PARAMETER Experiment Name: At_Drought_Reproduction_P Parameter: Tissue Value: Siliques
  misc_feature: MA Experiment 20001908 PARAMETER Experiment Name: At_Drought_Reproduction_P Parameter: Treatment Value: Drought vs. No Drought
aacgcattattgacacgtgtcttttcatttctcttcttccggcgtttttctctccgccgtttcgccaccgtacgtgacaatgtctgtttctctctccgccgcctctcacttactctgttcctccaccagagtctctctttcccccgccgtcacctcttcgtcctcgtcccctgtcgttgctctttcttcctctacatcgccacattctcttggaagcgtcgcatcttcttctctgtttcctcactcctccttcgtgcttcagaaaaaacatccgatcaatgggacgagcacgaggatgatttcaccaaaatgtgccgcttctgatgcagctcaattgataagcgctaaagaagatatcaaagttcttctccggactaagttttgccatcccatcttggttagattggggtggcacgatgctggtacttataacaagaatattgaggagtggccactgagaggtggagctaatggaagtcttaggtttgaggctgagcttaagcatgctgcaaatgctggtctgcttaatgctttaaagctcattcagcctctcaaagacaagtatcctaacatctcttatgcggacttattccagttagctagtgccacagcaatagaggaggctggtggtcctgatatcccgatgaaatatgggagagttgatgttgtagcacctgaacagtgtccagaagaaggaagactccctgatgctggacctccttcaccagctgatcatttgagagatgttttctacagaatgggacttgatgacaaggaaatagttgccttgtctggtgcacataccttagggagagccagaccagaccgtagtggttggggaaaacctgagacaaagtacacgaaaactggacctggagaagcaggaggacagtcatggacagtgaaatggctcaagttcgacaactcttatttcaaggatatcaaagaaaagagggacgacgatcttctggtgttacccactgatgcggcgctatttgaagatccttcattcaagaactatgcagagaagtatgctgaagatgtggctgcatttttcaaggactacgctgaagcccatgccaagcttagcaatctcggtgcaaaatttgatcctcccgagggcatagtcattgaaaacgttccagagaagttcgtagctgcaaagtattctacgggaaagaaggagctttcggattcgatgaaaaagaagataagagcagagtatgaagcaattggaggaagcccagataagccattacccacaaattacttcctcaacatcataattgccattggcgttttggtcctcttgtccactctctttggtggtaataacaactccgatttctctggtttctaattgacaaattatatattttgatttctcttacctacatacataattacgtggtgatcatatattccttgcaaacaaaaacatcattgtaaagtttgcttgaataaaatcaccttataaataacattgtttatttggtttttagaattttgagattagtgtgagtttctt

SEQ ID NO: 43222 - protein, 426 aa, Arabidopsis thaliana
  peptide (1)..(426): Ceres Seq. ID no. 12394686
  misc_feature (89)..(321): Pfam Name: Peroxidase Pfam Description: Peroxidase
  misc_feature (355)..(416): Homolog of NCBI NO: 32879783 NR Description: thylakoid-bound ascorbate peroxidase
  misc_feature (7)..(355): Homolog of NCBI NO: 32879783 NR Description: thylakoid-bound ascorbate peroxidase
  misc_feature (14)..(416): Homolog of NCBI NO: 2832920 NR Description: thylakoid-bound ascorbate peroxidase [Spinacia
  misc_feature (14)..(416): Homolog of NCBI NO: 1944507 NR Description: thylakoid-bound ascorbate peroxidase [Spinacia
  misc_feature (1)..(416): Homolog of NCBI NO: 2146725 NR Description: L-ascorbate peroxidase (EC 1.11.1.11) precursor -
  misc_feature (2)..(416): Homolog of NCBI NO: 7484766 NR Description: L-ascorbate peroxidase (EC 1.11.1.11) precursor -
  misc_feature (2)..(416): Homolog of NCBI NO: 7484621 NR Description: L-ascorbate peroxidase (EC 1.11.1.11) precursor -
  misc_feature (1)..(416): Homolog of NCBI NO: 4996602 NR Description: thylakoid-bound ascorbate peroxidase [Nicotiana
  misc_feature (1)..(426): Homolog of NCBI NO: 1419390 NR Description: thylakoid-bound ascorbate peroxidase [Arabidopsis
  misc_feature (1)..(426): Homolog of NCBI NO: 15223971 NR Description: thylakoid-bound ascorbate peroxidase, putative
MSVSLSAASHLLCSSTRVSLSPAVTSSSSSPVVALSSSTSPHSLGSVASSSLFPHSSFVLQKKHPINGTSTRMISPKCAASDAAQLISAKEDIKVLLRTKFCHPILVRLGWHDAGTYNKNIEEWPLRGGANGSLRFEAELKHAANAGLLNALKLIQPLKDKYPNISYADLFQLASATAIEEAGGPDIPMKYGRVDVVAPEQCPEEGRLPDAGPPSPADHLRDVFYRMGLDDKEIVALSGAHTLGRARPDRSGWGKPETKYTKTGPGEAGGQSWTVKWLKFDNSYFKDIKEKRDDDLLVLPTDAALFEDPSFKNYAEKYAEDVAAFFKDYAEAHAKLSNLGAKFDPPEGIVIENVPEKFVAAKYSTGKKELSDSMKKKIRAEYEAIGGSPDKPLPTNYFLNIIIAIGVLVLLSTLFGGNNNSDFSGF

SEQ ID NO: 43223 - protein, 354 aa, Arabidopsis thaliana
  peptide (1)..(354): Ceres Seq. ID no. 12394687
  misc_feature (17)..(249): Pfam Name: Peroxidase Pfam Description: Peroxidase
  misc_feature (283)..(344): Homolog of NCBI NO: 32879783 NR Description: thylakoid-bound ascorbate peroxidase
  misc_feature (1)..(283): Homolog of NCBI NO: 32879783 NR Description: thylakoid-bound ascorbate peroxidase
  misc_feature (1)..(344): Homolog of NCBI NO: 2832920 NR Description: thylakoid-bound ascorbate peroxidase [Spinacia
  misc_feature (1)..(344): Homolog of NCBI NO: 1944507 NR Description: thylakoid-bound ascorbate peroxidase [Spinacia
  misc_feature (1)..(344): Homolog of NCBI NO: 2146725 NR Description: L-ascorbate peroxidase (EC 1.11.1.11) precursor -
  misc_feature (1)..(344): Homolog of NCBI NO: 7484766 NR Description: L-ascorbate peroxidase (EC 1.11.1.11) precursor -
  misc_feature (1)..(344): Homolog of NCBI NO: 7484621 NR Description: L-ascorbate peroxidase (EC 1.11.1.11) precursor -
  misc_feature (1)..(344): Homolog of NCBI NO: 4996602 NR Description: thylakoid-bound ascorbate peroxidase [Nicotiana
  misc_feature (1)..(354): Homolog of NCBI NO: 1419390 NR Description: thylakoid-bound ascorbate peroxidase [Arabidopsis
  misc_feature (1)..(354): Homolog of NCBI NO: 15223971 NR Description: thylakoid-bound ascorbate peroxidase, putative
MISPKCAASDAAQLISAKEDIKVLLRTKFCHPILVRLGWHDAGTYNKNIEEWPLRGGANGSLRFEAELKHAANAGLLNALKLIQPLKDKYPNISYADLFQLASATAIEEAGGPDIPMKYGRVDVVAPEQCPEEGRLPDAGPPSPADHLRDVFYRMGLDDKEIVALSGAHTLGRARPDRSGWGKPETKYTKTGPGEAGGQSWTVKWLKFDNSYFKDIKEKRDDDLLVLPTDAALFEDPSFKNYAEKYAEDVAAFFKDYAEAHAKLSNLGAKFDPPEGIVIENVPEKFVAAKYSTGKKELSDSMKKKIRAEYEAIGGSPDKPLPTNYFLNIIIAIGVLVLLSTLFGGNNNSDFSGF

SEQ ID NO: 43224 - protein, 238 aa, Arabidopsis thaliana
  peptide (1)..(238): Ceres Seq. ID no. 12394688
  misc_feature (1)..(133): Pfam Name: Peroxidase Pfam Description: Peroxidase
  misc_feature (167)..(228): Homolog of NCBI NO: 32879783 NR Description: thylakoid-bound ascorbate peroxidase
  misc_feature (1)..(167): Homolog of NCBI NO: 32879783 NR Description: thylakoid-bound ascorbate peroxidase
  misc_feature (1)..(228): Homolog of NCBI NO: 2832920 NR Description: thylakoid-bound ascorbate peroxidase [Spinacia
  misc_feature (1)..(228): Homolog of NCBI NO: 1944507 NR Description: thylakoid-bound ascorbate peroxidase [Spinacia
  misc_feature (1)..(228): Homolog of NCBI NO: 2146725 NR Description: L-ascorbate peroxidase (EC 1.11.1.11) precursor -
  misc_feature (1)..(228): Homolog of NCBI NO: 7484766 NR Description: L-ascorbate peroxidase (EC 1.11.1.11) precursor -
  misc_feature (1)..(228): Homolog of NCBI NO: 7484621 NR Description: L-ascorbate peroxidase (EC 1.11.1.11) precursor -
  misc_feature (1)..(228): Homolog of NCBI NO: 4996602 NR Description: thylakoid-bound ascorbate peroxidase [Nicotiana
  misc_feature (1)..(238): Homolog of NCBI NO: 1419390 NR Description: thylakoid-bound ascorbate peroxidase [Arabidopsis
  misc_feature (1)..(238): Homolog of NCBI NO: 15223971 NR Description: thylakoid-bound ascorbate peroxidase, putative
MKYGRVDVVAPEQCPEEGRLPDAGPPSPADHLRDVFYRMGLDDKEIVALSGAHTLGRARPDRSGWGKPETKYTKTGPGEAGGQSWTVKWLKFDNSYFKDIKEKRDDDLLVLPTDAALFEDPSFKNYAEKYAEDVAAFFKDYAEAHAKLSNLGAKFDPPEGIVIENVPEKFVAAKYSTGKKELSDSMKKKIRAEYEAIGGSPDKPLPTNYFLNIIIAIGVLVLLSTLFGGNNNSDFSGF

SEQ ID NO: 43225 - DNA, 1522 bp, Arabidopsis thaliana
  misc_feature (1)..(1522): Ceres Seq. ID no. 13489540
  misc_feature: MA Experiment ID: 108462 Result: Down-regulated in Transcription
  misc_feature: MA Experiment 108462 PARAMETER Experiment Name: At_Germinating_Seeds_cDNA_P Parameter: Age (day) Value: 2 vs. 0
  misc_feature: MA Experiment 108462 PARAMETER Experiment Name: At_Germinating_Seeds_cDNA_P Parameter: Tissue Value: Germinating Seeds
  misc_feature: MA Experiment ID: 108463 Result: Down-regulated in Transcription
  misc_feature: MA Experiment 108463 PARAMETER Experiment Name: At_Germinating_Seeds_cDNA_P Parameter: Age (day) Value: 3 vs. 0
  misc_feature: MA Experiment 108463 PARAMETER Experiment Name: At_Germinating_Seeds_cDNA_P Parameter: Tissue Value: Germinating Seeds
  misc_feature: MA Experiment ID: 20000184 Result: Down-regulated in Transcription
  misc_feature: MA Experiment 20000184 PARAMETER Experiment Name: At_Shoots__P Parameter: Age (day) Value: 7
  misc_feature: MA Experiment 20000184 PARAMETER Experiment Name: At_Shoots__P Parameter: Tissue Value: Shoots vs. Whole Plant
ctctctcctccaacttggaacttcccgtcttcgatcttctcttctctctctcttcatcgcacgctgtgcccagccagctcaaaacactgcacttccgctttttatcaagatcaatctctaccaatacttagaaaagttctttcctttttgtcaaattctttcaatttctctcttcaattccctacgaattactcacttcggatccaatcagctctttatagcctctgcgtttgggagtcaatctttctctcttcgacaattaagggtttcgtataaagattgctgttttacgacaggattctgaataaggagaagaagggttggtttcatttggatggaaagtatatggtaggtctacacattaatatggaagcgcagattcatatacttgagcaggaagcttattctgctgtattaagagcttttcaagcacaggctgatgaattttcttgggataaagcaaccgtgatgacaaacctacgtaaagaattgaggatatctgatgatgaaaaccgacaactgttgaacaatgtccataatgatgatcttatcaaaagaataagagattcgagaccaagaggtggaaaccaggttgttagacatcagtccctcgatgttcatcctagtccgactttttcagcttctcggaagaaacagaagacgttccaatcctatccgtcgattggttctactagaagtaagtcattcaataaccgtgtagtatcagcaaatgaacctgcggaagctcttattggaagaaaagtgtggacaaaatggcctgaagacaacagcttttatgaagcagtagttacacaatacaatgcaaatgagggtcgacatgcgttggtatatgatataaacacagtgaatgagacatgggaatgggttgatcttaatgagattccaacgaaagatataagatgggatggagaggaagatggggtaactttgaatgtaggacatggcggtggaacaactcgtgggaatcgaaggaccttaagccatggtggtagagggagaggtccaagaactcagccaagaagagaacatttagcaacggaaaacggtggtgggaggaagtttttcggtgagattgaattgttcaacacagactcacttgtgaaagaggtcgagagagtttttgattcaaaccttcctgatccacatgagcttgataaggccaagaagctactcaaggaacatgaacaggcgcttattgctgccattgcaaggcttacggatgcttctgattacgaaagcgatggagaagaaccgtattcgcatgagcttccaatgctgctggggtgagtatgtatgacaccatcacccctaggaaaaatgactagcaatatttctttttcttctgttttgctttaagggatcccagaaaatgattttgttcatatatgatgaacaattagtagtattcttctaatttgtggtttcagaatgtatgaaaataatcgttaggaattttgtttgtaaaaacactatttttaaaaaaaaattctgaacttgtgtg

SEQ ID NO: 43226 - protein, 320 aa, Arabidopsis thaliana
  peptide (1)..(320): Ceres Seq. ID no. 13489541
  misc_feature (8)..(81): Pfam Name: ENT domain Pfam Description: ENT domain
  misc_feature (7)..(112): Homolog of NCBI NO: 38637206 NR Description: unknown protein [Oryza sativa (japonica
  misc_feature (105)..(313): Homolog of NCBI NO: 38637206 NR Description: unknown protein [Oryza sativa (japonica
  misc_feature (4)..(113): Homolog of NCBI NO: 30684221 NR Description: expressed protein [Arabidopsis thaliana]
  misc_feature (102)..(305): Homolog of NCBI NO: 30684221 NR Description: expressed protein [Arabidopsis thaliana]
  misc_feature (4)..(113): Homolog of NCBI NO: 11358228 NR Description: hypothetical protein T24H18.190 - Arabidopsis
  misc_feature (102)..(306): Homolog of NCBI NO: 11358228 NR Description: hypothetical protein T24H18.190 - Arabidopsis
  misc_feature (8)..(304): Homolog of NCBI NO: 9294111 NR Description: emb|CAB88266.1~gene_id:T23B7.8~similar to unknown
  misc_feature (8)..(320): Homolog of NCBI NO: 15229958 NR Description: expressed protein [Arabidopsis thaliana]
  misc_feature (8)..(320): Homolog of NCBI NO: 21553685 NR Description: unknown [Arabidopsis thaliana]
  misc_feature (1)..(320): Homolog of NCBI NO: 15240146 NR Description: expressed protein [Arabidopsis thaliana]
MVGLHINMEAQIHILEQEAYSAVLRAFQAQADEFSWDKATVMTNLRKELRISDDENRQLLNNVHNDDLIKRIRDSRPRGGNQVVRHQSLDVHPSPTFSASRKKQKTFQSYPSIGSTRSKSFNNRVVSANEPAEALIGRKVWTKWPEDNSFYEAVVTQYNANEGRHALVYDINTVNETWEWVDLNEIPTKDIRWDGEEDGVTLNVGHGGGTTRGNRRTLSHGGRGRGPRTQPRREHLATENGGGRKFFGEIELFNTDSLVKEVERVFDSNLPDPHELDKAKKLLKEHEQALIAAIARLTDASDYESDGEEPYSHELPMLLG

SEQ ID NO: 43227 - protein, 313 aa, Arabidopsis thaliana
  peptide (1)..(313): Ceres Seq. ID no. 13489542
  misc_feature (1)..(74): Pfam Name: ENT domain Pfam Description: ENT domain
  misc_feature (1)..(105): Homolog of NCBI NO: 38637206 NR Description: unknown protein [Oryza sativa (japonica
  misc_feature (98)..(306): Homolog of NCBI NO: 38637206 NR Description: unknown protein [Oryza sativa (japonica
  misc_feature (1)..(106): Homolog of NCBI NO: 30684221 NR Description: expressed protein [Arabidopsis thaliana]
  misc_feature (95)..(298): Homolog of NCBI NO: 30684221 NR Description: expressed protein [Arabidopsis thaliana]
  misc_feature (1)..(106): Homolog of NCBI NO: 11358228 NR Description: hypothetical protein T24H18.190 - Arabidopsis
  misc_feature (95)..(299): Homolog of NCBI NO: 11358228 NR Description: hypothetical protein T24H18.190 - Arabidopsis
  misc_feature (1)..(297): Homolog of NCBI NO: 9294111 NR Description: emb|CAB88266.1~gene_id:T23B7.8~similar to unknown
  misc_feature (1)..(313): Homolog of NCBI NO: 15229958 NR Description: expressed protein [Arabidopsis thaliana]
  misc_feature (1)..(313): Homolog of NCBI NO: 21553685 NR Description: unknown [Arabidopsis thaliana]
  misc_feature (1)..(313): Homolog of NCBI NO: 15240146 NR Description: expressed protein [Arabidopsis thaliana]
MEAQIHILEQEAYSAVLRAFQAQADEFSWDKATVMTNLRKELRISDDENRQLLNNVHNDDLIKRIRDSRPRGGNQVVRHQSLDVHPSPTFSASRKKQKTFQSYPSIGSTRSKSFNNRVVSANEPAEALIGRKVWTKWPEDNSFYEAVVTQYNANEGRHALVYDINTVNETWEWVDLNEIPTKDIRWDGEEDGVTLNVGHGGGTTRGNRRTLSHGGRGRGPRTQPRREHLATENGGGRKFFGEIELFNTDSLVKEVERVFDSNLPDPHELDKAKKLLKEHEQALIAAIARLTDASDYESDGEEPYSHELPMLLG

SEQ ID NO: 43228 - protein, 279 aa, Arabidopsis thaliana
  peptide (1)..(279): Ceres Seq. ID no. 13489543
  misc_feature (1)..(71): Homolog of NCBI NO: 38637206 NR Description: unknown protein [Oryza sativa (japonica
  misc_feature (64)..(272): Homolog of NCBI NO: 38637206 NR Description: unknown protein [Oryza sativa (japonica
  misc_feature (1)..(72): Homolog of NCBI NO: 30684221 NR Description: expressed protein [Arabidopsis thaliana]
  misc_feature (61)..(264): Homolog of NCBI NO: 30684221 NR Description: expressed protein [Arabidopsis thaliana]
  misc_feature (1)..(72): Homolog of NCBI NO: 11358228 NR Description: hypothetical protein T24H18.190 - Arabidopsis
  misc_feature (61)..(265): Homolog of NCBI NO: 11358228 NR Description: hypothetical protein T24H18.190 - Arabidopsis
  misc_feature (1)..(263): Homolog of NCBI NO: 9294111 NR Description: emb|CAB88266.1~gene_id:T23B7.8~similar to unknown
  misc_feature (1)..(279): Homolog of NCBI NO: 15229958 NR Description: expressed protein [Arabidopsis thaliana]
  misc_feature (1)..(279): Homolog of NCBI NO: 21553685 NR Description: unknown [Arabidopsis thaliana]
  misc_feature (1)..(279): Homolog of NCBI NO: 15240146 NR Description: expressed protein [Arabidopsis thaliana]
MTNLRKELRISDDENRQLLNNVHNDDLIKRIRDSRPRGGNQVVRHQSLDVHPSPTFSASRKKQKTFQSYPSIGSTRSKSFNNRVVSANEPAEALIGRKVWTKWPEDNSFYEAVVTQYNANEGRHALVYDINTVNETWEWVDLNEIPTKDIRWDGEEDGVTLNVGHGGGTTRGNRRTLSHGGRGRGPRTQPRREHLATENGGGRKFFGEIELFNTDSLVKEVERVFDSNLPDPHELDKAKKLLKEHEQALIAAIARLTDASDYESDGEEPYSHELPMLLG

SEQ ID NO: 43229 - DNA, 1531 bp, Arabidopsis thaliana
  misc_feature (1)..(1531): Ceres Seq. ID no. 13493824
  misc_feature: MA Experiment ID: 108461 Result: Up-regulated in Transcription
  misc_feature: MA Experiment 108461 PARAMETER Experiment Name: At_Germinating_Seeds_cDNA_P Parameter: Age (day) Value: 1 vs. 0
  misc_feature: MA Experiment 108461 PARAMETER Experiment Name: At_Germinating_Seeds_cDNA_P Parameter: Tissue Value: Germinating Seeds
  misc_feature: MA Experiment ID: 108572 Result: Up-regulated in Transcription
  misc_feature: MA Experiment 108572 PARAMETER Experiment Name: At_Drought_cDNA_P Parameter: Timepoint (hr) Value: 1
  misc_feature: MA Experiment 108572 PARAMETER Experiment Name: At_Drought_cDNA_P Parameter: Tissue Value: Aerial
  misc_feature: MA Experiment 108572 PARAMETER Experiment Name: At_Drought_cDNA_P Parameter: Treatment Value: Drought vs. No Drought
  misc_feature: MA Experiment ID: 108573 Result: Up-regulated in Transcription
  misc_feature: MA Experiment 108573 PARAMETER Experiment Name: At_Drought_cDNA_P Parameter: Timepoint (hr) Value: 6
  misc_feature: MA Experiment 108573 PARAMETER Experiment Name: At_Drought_cDNA_P Parameter: Tissue Value: Aerial
  misc_feature: MA Experiment 108573 PARAMETER Experiment Name: At_Drought_cDNA_P Parameter: Treatment Value: Drought vs. No Drought
  misc_feature: MA Experiment ID: 20000179 Result: Up-regulated in Transcription
  misc_feature: MA Experiment 20000179 PARAMETER Experiment Name: At_Germinating_Seeds_P Parameter: Age (hr) Value: 6 vs. 0
  misc_feature: MA Experiment 20000179 PARAMETER Experiment Name: At_Germinating_Seeds_P Parameter: Tissue Value: Germinating Seeds
  misc_feature: MA Experiment ID: 20000180 Result: Up-regulated in Transcription
  misc_feature: MA Experiment 20000180 PARAMETER Experiment Name: At_Germinating_Seeds_P Parameter: Age (hr) Value: 24 vs. 0
  misc_feature: MA Experiment 20000180 PARAMETER Experiment Name: At_Germinating_Seeds_P Parameter: Tissue Value: Germinating Seeds
  misc_feature: MA Experiment ID: 20000184 Result: Down-regulated in Transcription
  misc_feature: MA Experiment 20000184 PARAMETER Experiment Name: At_Shoots__P Parameter: Age (day) Value: 7
  misc_feature: MA Experiment 20000184 PARAMETER Experiment Name: At_Shoots__P Parameter: Tissue Value: Shoots vs. Whole Plant
  misc_feature: MA Experiment ID: 20000234 Result: Up-regulated in Transcription
  misc_feature: MA Experiment 20000234 PARAMETER Experiment Name: At_Siliques_P Parameter: Age (day) Value: 21
  misc_feature: MA Experiment 20000234 PARAMETER Experiment Name: At_Siliques_P Parameter: Organism Value: A. thaliana
  misc_feature: MA Experiment 20000234 PARAMETER Experiment Name: At_Siliques_P Parameter: Plant Line Value: WS
  misc_feature: MA Experiment 20000234 PARAMETER Experiment Name: At_Siliques_P Parameter: Tissue Value: Less Than 5mm Siliques vs. Whole Plant
  misc_feature: MA Experiment ID: 20000235 Result: Up-regulated in Transcription
  misc_feature: MA Experiment 20000235 PARAMETER Experiment Name: At_Siliques_P Parameter: Age (day) Value: 21
  misc_feature: MA Experiment 20000235 PARAMETER Experiment Name: At_Siliques_P Parameter: Organism Value: A. thaliana
  misc_feature: MA Experiment 20000235 PARAMETER Experiment Name: At_Siliques_P Parameter: Plant Line Value: WS
  misc_feature: MA Experiment 20000235 PARAMETER Experiment Name: At_Siliques_P Parameter: Tissue Value: 5-10mm Siliques vs. Whole Plant
  misc_feature: MA Experiment ID: 20000437 Result: Up-regulated in Transcription
  misc_feature: MA Experiment 20000437 PARAMETER Experiment Name: At_Drought_P Parameter: Age (day) Value: 8
  misc_feature: MA Experiment 20000437 PARAMETER Experiment Name: At_Drought_P Parameter: Organism Value: A. thaliana
  misc_feature: MA Experiment 20000437 PARAMETER Experiment Name: At_Drought_P Parameter: Plant Line Value: WS
  misc_feature: MA Experiment 20000437 PARAMETER Experiment Name: At_Drought_P Parameter: Timepoint (hr) Value: 24
  misc_feature: MA Experiment 20000437 PARAMETER Experiment Name: At_Drought_P Parameter: Tissue Value: Whole Plant
  misc_feature: MA Experiment 20000437 PARAMETER Experiment Name: At_Drought_P Parameter: Treatment Value: Drought vs. No Drought
  misc_feature: MA Experiment ID: 20001451 Result: Down-regulated in Transcription
  misc_feature: MA Experiment 20001451 PARAMETER Experiment Name: At_Far-red-induction_P Parameter: Age (day) Value: 7
  misc_feature: MA Experiment 20001451 PARAMETER Experiment Name: At_Far-red-induction_P Parameter: Light Value: Far-red vs. White
  misc_feature: MA Experiment 20001451 PARAMETER Experiment Name: At_Far-red-induction_P Parameter: Organism Value: A. thaliana
  misc_feature: MA Experiment 20001451 PARAMETER Experiment Name: At_Far-red-induction_P Parameter: Plant Line Value: Columbia
  misc_feature: MA Experiment 20001451 PARAMETER Experiment Name: At_Far-red-induction_P Parameter: Timepoint (hr) Value: 24
  misc_feature: MA Experiment 20001451 PARAMETER Experiment Name: At_Far-red-induction_P Parameter: Tissue Value: Whole Plant
  misc_feature: MA Experiment ID: 20001556 Result: Up-regulated in Transcription
  misc_feature: MA Experiment 20001556 PARAMETER Experiment Name: At_Drought_Soil_Dry_P Parameter: Age (day) Value: 26
  misc_feature: MA Experiment 20001556 PARAMETER Experiment Name: At_Drought_Soil_Dry_P Parameter: Organism Value: A. thaliana
  misc_feature: MA Experiment 20001556 PARAMETER Experiment Name: At_Drought_Soil_Dry_P Parameter: Plant Line Value: WS
  misc_feature: MA Experiment 20001556 PARAMETER Experiment Name: At_Drought_Soil_Dry_P Parameter: Post Timepoint (hr) Value: None
  misc_feature: MA Experiment 20001556 PARAMETER Experiment Name: At_Drought_Soil_Dry_P Parameter: Post-Treatment Value: None
  misc_feature: MA Experiment 20001556 PARAMETER Experiment Name: At_Drought_Soil_Dry_P Parameter: Timepoint (day) Value: 12
  misc_feature: MA Experiment 20001556 PARAMETER Experiment Name: At_Drought_Soil_Dry_P Parameter: Treatment Value: Drought vs. No Drought
  misc_feature: MA Experiment ID: 20001905 Result: Up-regulated in Transcription
  misc_feature: MA Experiment 20001905 PARAMETER Experiment Name: At_Drought_Reproduction_P Parameter: Age (day) Value: 40
  misc_feature: MA Experiment 20001905 PARAMETER Experiment Name: At_Drought_Reproduction_P Parameter: Organism Value: A. thaliana
  misc_feature: MA Experiment 20001905 PARAMETER Experiment Name: At_Drought_Reproduction_P Parameter: Plant Line Value: WS
  misc_feature: MA Experiment 20001905 PARAMETER Experiment Name: At_Drought_Reproduction_P Parameter: Timepoint (day) Value: 10
  misc_feature: MA Experiment 20001905 PARAMETER Experiment Name: At_Drought_Reproduction_P Parameter: Tissue Value: Rosettes
  misc_feature: MA Experiment 20001905 PARAMETER Experiment Name: At_Drought_Reproduction_P Parameter: Treatment Value: Drought vs. No Drought
acctttctatctctctttctctcaaaatccaaaatgttgtaatttgcaattcttcagtttccgtttctctcctgagaaatttattgacttcaaaaaccctaaaaagacttgtgattgttcgtttctctaactcgaatgttgatcgtacgacggtgagtgatcgtagtacaatgacgaagaaatcacagccgcagattccgcctccattgtcccgtcgcggcggcgtcgtgtggctgggatggaaactcgtaatcgctttctccgtcgcgctttgccttcttgctcttcttcgaatccaactacagtacaattccttcacgacattgtcgtttccactctccgtcgcgagatctcagacaccgcttcacaaatactccggtgatcgtcccaagctcgctttccttttcttagctcgccgtgatctcccacttgattttatgtgggatagattcttcaagggagtggatcatgcgaatttctcaatttatatacattcagtacctggtttcgtgttcaatgaagaaactacacgatcacagtatttctataatcgccaattgaacaatagcattaaggtagtatggggagaatcaagcatgattgaagcagaaagattgttgcttgcatctgctttagaggatcactccaatcaaagatttgttcttctctctgacagatgtgctccattatatgactttggctatatatacaaatatcttatctcttcaccgaggagttttgtggatagttttcttcatactaaagagacacggtacagtgtgaaaatgtctcctgtcatacctgaagagaaatggcgaaaaggatcccagtggatagctttgatcagaagtcatgcagaggtcattgtaaatgatggtatcgtattcccagtttttaaggaattctgcaagagatgtccacctttaggtaccaatgaggcatggttgtttcttaaacagaagcgacgcaactgcatccccgatgaacactatgtgcaaacattgcttacgatgcaaggactagagagtgaaatggaacgaagaacagtgacatacactgtatggaacgtttcaggtacaaaatatgaagccaaatcttggcatcccgtcactttcacattggaaaactccggccctgaggaaataaaagaaataaagaaaatagaccatgtctattacgagtctgaatctcgaacggaatggtgtaaggcggattcgaaacccgtcccatgctttctctttgcaaggaagttcacgaatgaagctgctatgcgcattgtgagtgaaggactaataggatcatcagcaaacaaaaccttataactttgcaacagtgtaagcaagtaggtcaagcaacagagcgtatacatagagtaggaatagcattgatacattacaaacatccctcatgaggtttaatggtttatgattatatatgacgcttagtaaaaactaataatcattcttcatggataatcttgtgtttgggtgttaaaatttctatgtgtatatgtctgaagaaactggcttcg

SEQ ID NO: 43230 - protein, 439 aa, Arabidopsis thaliana
  peptide (1)..(439): Ceres Seq. ID no. 13493825
  misc_feature (169)..(278): Pfam Name: Arabidopsis protein of unknown function, DUF266 Pfam Description: Arabidopsis protein of unknown function, DUF266
  misc_feature (128)..(427): Homolog of NCBI NO: 38346557 NR Description: OSJNBa0035M09.18 [Oryza sativa (japonica
  misc_feature (130)..(417): Homolog of NCBI NO: 30680587 NR Description: expressed protein [Arabidopsis thaliana]
  misc_feature (311)..(439): Homolog of NCBI NO: 25402693 NR Description: hypothetical protein [imported] - Arabidopsis
  misc_feature (68)..(154): Homolog of NCBI NO: 22330381 NR Description: hypothetical protein [Arabidopsis thaliana]
  misc_feature (191)..(303): Homolog of NCBI NO: 22330381 NR Description: hypothetical protein [Arabidopsis thaliana]
  misc_feature (71)..(385): Homolog of NCBI NO: 34911442 NR Description: P0431H09.21 [Oryza sativa (japonica
  misc_feature (81)..(385): Homolog of NCBI NO: 30684956 NR Description: expressed protein [Arabidopsis thaliana]
  misc_feature (81)..(431): Homolog of NCBI NO: 15241437 NR Description: expressed protein [Arabidopsis thaliana]
  misc_feature (57)..(358): Homolog of NCBI NO: 25402693 NR Description: hypothetical protein [imported] - Arabidopsis
  misc_feature (57)..(439): Homolog of NCBI NO: 30682534 NR Description: expressed protein [Arabidopsis thaliana]
LSISLSLKIQNVVICNSSVSVSLLRNLLTSKTLKRLVIVRFSNSNVDRTTVSDRSTMTKKSQPQIPPPLSRRGGVVWLGWKLVIAFSVALCLLALLRIQLQYNSFTTLSFPLSVARSQTPLHKYSGDRPKLAFLFLARRDLPLDFMWDRFFKGVDHANFSIYIHSVPGFVFNEETTRSQYFYNRQLNNSIKVVWGESSMIEAERLLLASALEDHSNQRFVLLSDRCAPLYDFGYIYKYLISSPRSFVDSFLHTKETRYSVKMSPVIPEEKWRKGSQWIALIRSHAEVIVNDGIVFPVFKEFCKRCPPLGTNEAWLFLKQKRRNCIPDEHYVQTLLTMQGLESEMERRTVTYTVWNVSGTKYEAKSWHPVTFTLENSGPEEIKEIKKIDHVYYESESRTEWCKADSKPVPCFLFARKFTNEAAMRIVSEGLIGSSANKTL

SEQ ID NO: 43231 - protein, 383 aa, Arabidopsis thaliana
  peptide (1)..(383): Ceres Seq. ID no. 13493826
  misc_feature (113)..(222): Pfam Name: Arabidopsis protein of unknown function, DUF266 Pfam Description: Arabidopsis protein of unknown function, DUF266
  misc_feature (72)..(371): Homolog of NCBI NO: 38346557 NR Description: OSJNBa0035M09.18 [Oryza sativa (japonica
  misc_feature (74)..(361): Homolog of NCBI NO: 30680587 NR Description: expressed protein [Arabidopsis thaliana]
  misc_feature (255)..(383): Homolog of NCBI NO: 25402693 NR Description: hypothetical protein [imported] - Arabidopsis
  misc_feature (12)..(98): Homolog of NCBI NO: 22330381 NR Description: hypothetical protein [Arabidopsis thaliana]
  misc_feature (135)..(247): Homolog of NCBI NO: 22330381 NR Description: hypothetical protein [Arabidopsis thaliana]
  misc_feature (15)..(329): Homolog of NCBI NO: 34911442 NR Description: P0431H09.21 [Oryza sativa (japonica
  misc_feature (25)..(329): Homolog of NCBI NO: 30684956 NR Description: expressed protein [Arabidopsis thaliana]
  misc_feature (25)..(375): Homolog of NCBI NO: 15241437 NR Description: expressed protein [Arabidopsis thaliana]
  misc_feature (1)..(302): Homolog of NCBI NO: 25402693 NR Description: hypothetical protein [imported] - Arabidopsis
  misc_feature (1)..(383): Homolog of NCBI NO: 30682534 NR Description: expressed protein [Arabidopsis thaliana]
MTKKSQPQIPPPLSRRGGVVWLGWKLVIAFSVALCLLALLRIQLQYNSFTTLSFPLSVARSQTPLHKYSGDRPKLAFLFLARRDLPLDFMWDRFFKGVDHANFSIYIHSVPGFVFNEETTRSQYFYNRQLNNSIKVVWGESSMIEAERLLLASALEDHSNQRFVLLSDRCAPLYDFGYIYKYLISSPRSFVDSFLHTKETRYSVKMSPVIPEEKWRKGSQWIALIRSHAEVIVNDGIVFPVFKEFCKRCPPLGTNEAWLFLKQKRRNCIPDEHYVQTLLTMQGLESEMERRTVTYTVWNVSGTKYEAKSWHPVTFTLENSGPEEIKEIKKIDHVYYESESRTEWCKADSKPVPCFLFARKFTNEAAMRIVSEGLIGSSANKTL

SEQ ID NO: 43232 - protein, 294 aa, Arabidopsis thaliana
  peptide (1)..(294): Ceres Seq. ID no. 13493827
  misc_feature (24)..(133): Pfam Name: Arabidopsis protein of unknown function, DUF266 Pfam Description: Arabidopsis protein of unknown function, DUF266
  misc_feature (1)..(281): Homolog of NCBI NO: 26452247 NR Description: unknown protein [Arabidopsis thaliana]
  misc_feature (1)..(282): Homolog of NCBI NO: 38346557 NR Description: OSJNBa0035M09.18 [Oryza sativa (japonica
  misc_feature (1)..(272): Homolog of NCBI NO: 30680587 NR Description: expressed protein [Arabidopsis thaliana]
  misc_feature (166)..(294): Homolog of NCBI NO: 25402693 NR Description: hypothetical protein [imported] - Arabidopsis
  misc_feature (46)..(158): Homolog of NCBI NO: 22330381 NR Description: hypothetical protein [Arabidopsis thaliana]
  misc_feature (1)..(240): Homolog of NCBI NO: 34911442 NR Description: P0431H09.21 [Oryza sativa (japonica
  misc_feature (1)..(240): Homolog of NCBI NO: 30684956 NR Description: expressed protein [Arabidopsis thaliana]
  misc_feature (1)..(286): Homolog of NCBI NO: 15241437 NR Description: expressed protein [Arabidopsis thaliana]
  misc_feature (1)..(213): Homolog of NCBI NO: 25402693 NR Description: hypothetical protein [imported] - Arabidopsis
  misc_feature (1)..(294): Homolog of NCBI NO: 30682534 NR Description: expressed protein [Arabidopsis thaliana]
MWDRFFKGVDHANFSIYIHSVPGFVFNEETTRSQYFYNRQLNNSIKVVWGESSMIEAERLLLASALEDHSNQRFVLLSDRCAPLYDFGYIYKYLISSPRSFVDSFLHTKETRYSVKMSPVIPEEKWRKGSQWIALIRSHAEVIVNDGIVFPVFKEFCKRCPPLGTNEAWLFLKQKRRNCIPDEHYVQTLLTMQGLESEMERRTVTYTVWNVSGTKYEAKSWHPVTFTLENSGPEEIKEIKKIDHVYYESESRTEWCKADSKPVPCFLFARKFTNEAAMRIVSEGLIGSSANKTL

SEQ ID NO: 43233 - DNA, 546 bp, Arabidopsis thaliana
  misc_feature (1)..(546): Ceres Seq. ID no. 12481728
  misc_feature: MA Experiment ID: 20000355 Result: Up-regulated in Transcription
  misc_feature: MA Experiment 20000355 PARAMETER Experiment Name: At_Siliques_Sub_P Parameter: Age (day) Value: 21
  misc_feature: MA Experiment 20000355 PARAMETER Experiment Name: At_Siliques_Sub_P Parameter: Organism Value: A. thaliana
  misc_feature: MA Experiment 20000355 PARAMETER Experiment Name: At_Siliques_Sub_P Parameter: Plant Line Value: WS
  misc_feature: MA Experiment 20000355 PARAMETER Experiment Name: At_Siliques_Sub_P Parameter: Tissue Value: Less Than 5mm Siliques vs. Whole Plant
ctacgtgagagaagacgaaacacaaaagatgcagatcttcgtgaaaaccttgaccggcaagaccatcactctcgaggtcgagagcagcgacaccatcgacaatgtcaaggccaagatccaagacaaagaaggaatccctccggatcagcagagattgatcttcgccggaaagcagctcgaagatggccgtactttggctgactacaacatccagaaagaatctacacttcatcttgtgttgaggcttagaggaggtattattgagccttccttgatgatgcttgctcgtaagtacaatcaggataagatgatttgccgcaagtgctatgctcgtcttcacccaagagctgtcaactgcaggaagaagaagtgtggtcacagcaaccagttgaggcctaagaagaagatcaagtagagagactcttatcaagaatcccatctcttgcttgcttttttttgttgtcttccctttgatagggtttgtttttcttgtttcagtgactttctatgttaaaagataatgtcagtaaaaggatttggttttct

SEQ ID NO: 43234 - protein, 137 aa, Arabidopsis thaliana
  peptide (1)..(137): Ceres Seq. ID no. 12481729
  misc_feature (10)..(83): Pfam Name: Ubiquitin family Pfam Description: Ubiquitin family
  misc_feature (10)..(83): Pfam Name: Ubiquitin family Pfam Description: Ubiquitin family
  misc_feature (10)..(137): Homolog of NCBI NO: 15187109 NR Description: ubiquitin [Branchiostoma belcheri]
  misc_feature (10)..(137): Homolog of NCBI NO: 4507761 NR Description: ubiquitin and ribosomal protein L40 precursor
  misc_feature (10)..(137): Homolog of NCBI NO: 2558539 NR Description: ubiquitin-ribosomal protein fusion protein
  misc_feature (10)..(137): Homolog of NCBI NO: 70654 NR Description: ubiquitin / ribosomal protein CEP52 -
  misc_feature (108)..(137): Homolog of NCBI NO: 20330759 NR Description: Putative ubiquitin / ribosomal protein CEP52
  misc_feature (10)..(137): Homolog of NCBI NO: 15187109 NR Description: ubiquitin [Branchiostoma belcheri]
  misc_feature (10)..(137): Homolog of NCBI NO: 2558539 NR Description: ubiquitin-ribosomal protein fusion protein
  misc_feature (108)..(137): Homolog of NCBI NO: 20330759 NR Description: Putative ubiquitin / ribosomal protein CEP52
  misc_feature (10)..(137): Homolog of NCBI NO: 18404062 NR Description: ubiquitin extension protein (UBQ2)
  misc_feature (10)..(137): Homolog of NCBI NO: 322750 NR Description: ubiquitin / ribosomal protein CEP52 - wood
  misc_feature (10)..(137): Homolog of NCBI NO: 485518 NR Description: ubiquitin / ribosomal protein CEP52 - rice
  misc_feature (10)..(137): Homolog of NCBI NO: 421867 NR Description: ubiquitin / ribosomal protein CEP52 - turnip
  misc_feature (10)..(106): Homolog of NCBI NO: 20330759 NR Description: Putative ubiquitin / ribosomal protein CEP52
  misc_feature (10)..(137): Homolog of NCBI NO: 70654 NR Description: ubiquitin / ribosomal protein CEP52 -
  misc_feature (10)..(137): Homolog of NCBI NO: 4507761 NR Description: ubiquitin and ribosomal protein L40 precursor
  misc_feature (10)..(106): Homolog of NCBI NO: 20330759 NR Description: Putative ubiquitin / ribosomal protein CEP52
  misc_feature (10)..(137): Homolog of NCBI NO: 421867 NR Description: ubiquitin / ribosomal protein CEP52 - turnip
  misc_feature (10)..(137): Homolog of NCBI NO: 485518 NR Description: ubiquitin / ribosomal protein CEP52 - rice
  misc_feature (10)..(137): Homolog of NCBI NO: 322750 NR Description: ubiquitin / ribosomal protein CEP52 - wood
  misc_feature (10)..(137): Homolog of NCBI NO: 18404062 NR Description: ubiquitin extension protein (UBQ2)
YVREDETQKMQIFVKTLTGKTITLEVESSDTIDNVKAKIQDKEGIPPDQQRLIFAGKQLEDGRTLADYNIQKESTLHLVLRLRGGIIEPSLMMLARKYNQDKMICRKCYARLHPRAVNCRKKKCGHSNQLRPKKKIK

SEQ ID NO: 43235 - protein, 128 aa, Arabidopsis thaliana; identical to SEQ ID NO: 26134
  peptide (1)..(128): Ceres Seq. ID no. 12481730
  misc_feature (1)..(74): Pfam Name: Ubiquitin family Pfam Description: Ubiquitin family
  misc_feature (1)..(74): Pfam Name: Ubiquitin family Pfam Description: Ubiquitin family
  misc_feature (1)..(128): Homolog of NCBI NO: 15187109 NR Description: ubiquitin [Branchiostoma belcheri]
  misc_feature (1)..(128): Homolog of NCBI NO: 4507761 NR Description: ubiquitin and ribosomal protein L40 precursor
  misc_feature (1)..(128): Homolog of NCBI NO: 2558539 NR Description: ubiquitin-ribosomal protein fusion protein
  misc_feature (1)..(128): Homolog of NCBI NO: 70654 NR Description: ubiquitin / ribosomal protein CEP52 -
  misc_feature (99)..(128): Homolog of NCBI NO: 20330759 NR Description: Putative ubiquitin / ribosomal protein CEP52
  misc_feature (1)..(128): Homolog of NCBI NO: 15187109 NR Description: ubiquitin [Branchiostoma belcheri]
  misc_feature (1)..(128): Homolog of NCBI NO: 2558539 NR Description: ubiquitin-ribosomal protein fusion protein
  misc_feature (99)..(128): Homolog of NCBI NO: 20330759 NR Description: Putative ubiquitin / ribosomal protein CEP52
  misc_feature (1)..(128): Homolog of NCBI NO: 18404062 NR Description: ubiquitin extension protein (UBQ2)
  misc_feature (1)..(128): Homolog of NCBI NO: 322750 NR Description: ubiquitin / ribosomal protein CEP52 - wood
  misc_feature (1)..(128): Homolog of NCBI NO: 485518 NR Description: ubiquitin / ribosomal protein CEP52 - rice
  misc_feature (1)..(128): Homolog of NCBI NO: 421867 NR Description: ubiquitin / ribosomal protein CEP52 - turnip
  misc_feature (1)..(97): Homolog of NCBI NO: 20330759 NR Description: Putative ubiquitin / ribosomal protein CEP52
  misc_feature (1)..(128): Homolog of NCBI NO: 70654 NR Description: ubiquitin / ribosomal protein CEP52 -
  misc_feature (1)..(128): Homolog of NCBI NO: 4507761 NR Description: ubiquitin and ribosomal protein L40 precursor
  misc_feature (1)..(97): Homolog of NCBI NO: 20330759 NR Description: Putative ubiquitin / ribosomal protein CEP52
  misc_feature (1)..(128): Homolog of NCBI NO: 421867 NR Description: ubiquitin / ribosomal protein CEP52 - turnip
  misc_feature (1)..(128): Homolog of NCBI NO: 485518 NR Description: ubiquitin / ribosomal protein CEP52 - rice
  misc_feature (1)..(128): Homolog of NCBI NO: 322750 NR Description: ubiquitin / ribosomal protein CEP52 - wood
  misc_feature (1)..(128): Homolog of NCBI NO: 18404062 NR Description: ubiquitin extension protein (UBQ2)

SEQ ID NO: 43236 - DNA, 1202 bp, Arabidopsis thaliana
  misc_feature (1)..(1202): Ceres Seq. ID no. 13575150
  misc_feature: MA Experiment ID: 20000184 Result: Up-regulated in Transcription
  misc_feature: MA Experiment 20000184 PARAMETER Experiment Name: At_Shoots__P Parameter: Age (day) Value: 7
  misc_feature: MA Experiment 20000184 PARAMETER Experiment Name: At_Shoots__P Parameter: Tissue Value: Shoots vs. Whole Plant
  misc_feature: MA Experiment ID: 20000185 Result: Up-regulated in Transcription
  misc_feature: MA Experiment 20000185 PARAMETER Experiment Name: At_Roots__P Parameter: Age (day) Value: 7 vs. 21
  misc_feature: MA Experiment 20000185 PARAMETER Experiment Name: At_Roots__P Parameter: Organism Value: A. thaliana
  misc_feature: MA Experiment 20000185 PARAMETER Experiment Name: At_Roots__P Parameter: Tissue Value: Roots vs. Whole Plant
  misc_feature: MA Experiment ID: 20000227 Result: Up-regulated in Transcription
  misc_feature: MA Experiment 20000227 PARAMETER Experiment Name: At_Root-Tips-vs-Tops_P Parameter: Tissue Value: Root Tips vs. Root Tops
  misc_feature: MA Experiment ID: 20000437 Result: Down-regulated in Transcription
  misc_feature: MA Experiment 20000437 PARAMETER Experiment Name: At_Drought_P Parameter: Age (day) Value: 8
  misc_feature: MA Experiment 20000437 PARAMETER Experiment Name: At_Drought_P Parameter: Organism Value: A. thaliana
  misc_feature: MA Experiment 20000437 PARAMETER Experiment Name: At_Drought_P Parameter: Plant Line Value: WS
  misc_feature: MA Experiment 20000437 PARAMETER Experiment Name: At_Drought_P Parameter: Timepoint (hr) Value: 24
  misc_feature: MA Experiment 20000437 PARAMETER Experiment Name: At_Drought_P Parameter: Tissue Value: Whole Plant
  misc_feature: MA Experiment 20000437 PARAMETER Experiment Name: At_Drought_P Parameter: Treatment Value: Drought vs. No Drought
  misc_feature: MA Experiment ID: 20000438 Result: Up-regulated in Transcription
  misc_feature: MA Experiment 20000438 PARAMETER Experiment Name: At_Shoots__P Parameter: Age (day) Value: 14
  misc_feature: MA Experiment 20000438 PARAMETER Experiment Name: At_Shoots__P Parameter: Tissue Value: Shoots vs. Whole Plant
  misc_feature: MA Experiment ID: 20000439 Result: Up-regulated in Transcription
  misc_feature: MA Experiment 20000439 PARAMETER Experiment Name: At_Roots__P Parameter: Age (day) Value: 14 vs. 21
  misc_feature: MA Experiment 20000439 PARAMETER Experiment Name: At_Roots__P Parameter: Organism Value: A. thaliana
  misc_feature: MA Experiment 20000439 PARAMETER Experiment Name: At_Roots__P Parameter: Tissue Value: Roots vs. Whole Plant
  misc_feature: MA Experiment ID: 20000573 Result: Down-regulated in Transcription
  misc_feature: MA Experiment 20000573 PARAMETER Experiment Name: At_100uM_ABA_Mutants__P Parameter: Organism Value: A. thaliana
  misc_feature: MA Experiment 20000573 PARAMETER Experiment Name: At_100uM_ABA_Mutants__P Parameter: Plant Line Value: CS22 vs. Ler wt
  misc_feature: MA Experiment 20000573 PARAMETER Experiment Name: At_100uM_ABA_Mutants__P Parameter: Timepoint (hr) Value: N/A
  misc_feature: MA Experiment 20000573 PARAMETER Experiment Name: At_100uM_ABA_Mutants__P Parameter: Tissue Value: Whole Plant
  misc_feature: MA Experiment 20000573 PARAMETER Experiment Name: At_100uM_ABA_Mutants__P Parameter: Treatment Value: None
accaagtacaagtaaccgagttatatacaacgagtcatcaagagaaagaatccccccaaaaaatggccaagtcattgaacatccttattgcagctctctcgctcattgcattttctcctttttgtttgtgttccaaagcctatggaagtggcggctatctctttcctcagttttatgaccaatcgtgtcctaaagctcaagagattgttcagtccattgtcgctaaagcattcgaacatgatcctcgcatgcctgcctccttgctcagactccatttccacgactgtttcgtcaagggatgtgatgcttccatactattggacagcagtggaaccataatcagcgagaaacgatcaaaccctaacagaaactcagcccgtggtttcgaactcatcgaggaaatcaaacatgccttagaacaagagtgtcctgaaacagtttcttgcgctgatatcttggctctagccgctagagactcaactgttattacgggtggaccgagctgggaagtacctctaggaagaagagacgcgagaggagcaagcttgagtggttccaacaacgacattcctgctccaaacaacactttccaaaccatcctcactaagttcaagcgtcaaggccttgatctcgtcgatcttgtctccctctcaggaagtcacaccattggaaactcgaggtgcacaagtttccgacagaggttatacaatcaatccggcaacggaaagcctgatatgactcttagccaatactatgcaacactattgcgtcaacgatgtccgagatccggaggtgaccagaccctattcttcctcgacttcgcgacaccgttcaagtttgacaaccactacttcaagaacctgataatgtacaaaggtctattgagctctgatgagattctgttcacgaagaacaaacagtccaaggagctggtggagctatacgctgagaatcaagaggccttctttgagcagtttgctaaatcgatggtgaagatgggaaatatctctccgttgacaggcgccaagggagagatcaggcgtatctgtcggagggttaaccatgcttattaatacaaatccatctttataatttatgtacaatataatgctttcgtttctcattgagttttcaatttcttttggctttgtttgcatgagtgtgtatcatatgtttattactcaaatctgattttgtttcgg

SEQ ID NO: 43237 - protein, 356 aa, Arabidopsis thaliana
  peptide (1)..(356): Ceres Seq. ID no. 13575151
  misc_feature (69)..(317): Pfam Name: Peroxidase Pfam Description: Peroxidase
  misc_feature (21)..(353): Homolog of NCBI NO: 25044849 NR Description: peroxidase [Ananas comosus]
  misc_feature (21)..(355): Homolog of NCBI NO: 15224116 NR Description: peroxidase, putative [Arabidopsis thaliana]
  misc_feature (27)..(354): Homolog of NCBI NO: 15230365 NR Description: peroxidase, putative [Arabidopsis thaliana]
  misc_feature (21)..(353): Homolog of NCBI NO: 15234394 NR Description: peroxidase, putative [Arabidopsis thaliana]
  misc_feature (21)..(356): Homolog of NCBI NO: 34913714 NR Description: putative peroxidase [Oryza sativa (japonica
  misc_feature (21)..(354): Homolog of NCBI NO: 7658147 NR Description: peroxidase [Asparagus officinalis]
  misc_feature (21)..(356): Homolog of NCBI NO: 7453853 NR Description: peroxidase prx14 precursor [Spinacia oleracea]
  misc_feature (21)..(356): Homolog of NCBI NO: 7453855 NR Description: peroxidase prx15 precursor [Spinacia oleracea]
  misc_feature (21)..(356): Homolog of NCBI NO: 1402918 NR Description: peroxidase [Arabidopsis thaliana]
  misc_feature (21)..(356): Homolog of NCBI NO: 15239370 NR Description: peroxidase, putative [Arabidopsis thaliana]
QVQVTELYTTSHQEKESPQKMAKSLNILIAALSLIAFSPFCLCSKAYGSGGYLFPQFYDQSCPKAQEIVQSIVAKAFEHDPRMPASLLRLHFHDCFVKGCDASILLDSSGTIISEKRSNPNRNSARGFELIEEIKHALEQECPETVSCADILALAARDSTVITGGPSWEVPLGRRDARGASLSGSNNDIPAPNNTFQTILTKFKRQGLDLVDLVSLSGSHTIGNSRCTSFRQRLYNQSGNGKPDMTLSQYYATLLRQRCPRSGGDQTLFFLDFATPFKFDNHYFKNLIMYKGLLSSDEILFTKNKQSKELVELYAENQEAFFEQFAKSMVKMGNISPLTGAKGEIRRICRRVNHAY

SEQ ID NO: 43238 - protein, 336 aa, Arabidopsis thaliana
  peptide (1)..(336): Ceres Seq. ID no. 13575152
  misc_feature (49)..(297): Pfam Name: Peroxidase Pfam Description: Peroxidase
  misc_feature (1)..(333): Homolog of NCBI NO: 25044849 NR Description: peroxidase [Ananas comosus]
  misc_feature (1)..(335): Homolog of NCBI NO: 15224116 NR Description: peroxidase, putative [Arabidopsis thaliana]
  misc_feature (7)..(334): Homolog of NCBI NO: 15230365 NR Description: peroxidase, putative [Arabidopsis thaliana]
  misc_feature (1)..(333): Homolog of NCBI NO: 15234394 NR Description: peroxidase, putative [Arabidopsis thaliana]
  misc_feature (1)..(336): Homolog of NCBI NO: 34913714 NR Description: putative peroxidase [Oryza sativa (japonica
  misc_feature (1)..(334): Homolog of NCBI NO: 7658147 NR Description: peroxidase [Asparagus officinalis]
  misc_feature (1)..(336): Homolog of NCBI NO: 7453853 NR Description: peroxidase prx14 precursor [Spinacia oleracea]
  misc_feature (1)..(336): Homolog of NCBI NO: 7453855 NR Description: peroxidase prx15 precursor [Spinacia oleracea]
  misc_feature (1)..(336): Homolog of NCBI NO: 1402918 NR Description: peroxidase [Arabidopsis thaliana]
  misc_feature (1)..(336): Homolog of NCBI NO: 15239370 NR Description: peroxidase, putative [Arabidopsis thaliana]
MAKSLNILIAALSLIAFSPFCLCSKAYGSGGYLFPQFYDQSCPKAQEIVQSIVAKAFEHDPRMPASLLRLHFHDCFVKGCDASILLDSSGTIISEKRSNPNRNSARGFELIEEIKHALEQECPETVSCADILALAARDSTVITGGPSWEVPLGRRDARGASLSGSNNDIPAPNNTFQTILTKFKRQGLDLVDLVSLSGSHTIGNSRCTSFRQRLYNQSGNGKPDMTLSQYYATLLRQRCPRSGGDQTLFFLDFATPFKFDNHYFKNLIMYKGLLSSDEILFTKNKQSKELVELYAENQEAFFEQFAKSMVKMGNISPLTGAKGEIRRICRRVNHAY

SEQ ID NO: 43239 - protein, 274 aa, Arabidopsis thaliana
  peptide (1)..(274): Ceres Seq. ID no. 13575153
  misc_feature (1)..(235): Pfam Name: Peroxidase Pfam Description: Peroxidase
  misc_feature (1)..(271): Homolog of NCBI NO: 25044849 NR Description: peroxidase [Ananas comosus]
  misc_feature (1)..(273): Homolog of NCBI NO: 15224116 NR Description: peroxidase, putative [Arabidopsis thaliana]
  misc_feature (1)..(272): Homolog of NCBI NO: 15230365 NR Description: peroxidase, putative [Arabidopsis thaliana]
  misc_feature (1)..(271): Homolog of NCBI NO: 15234394 NR Description: peroxidase, putative [Arabidopsis thaliana]
  misc_feature (1)..(274): Homolog of NCBI NO: 34913714 NR Description: putative peroxidase [Oryza sativa (japonica
  misc_feature (1)..(272): Homolog of NCBI NO: 7658147 NR Description: peroxidase [Asparagus officinalis]
  misc_feature (1)..(274): Homolog of NCBI NO: 7453853 NR Description: peroxidase prx14 precursor [Spinacia oleracea]
  misc_feature (1)..(274): Homolog of NCBI NO: 7453855 NR Description: peroxidase prx15 precursor [Spinacia oleracea]
  misc_feature (1)..(274): Homolog of NCBI NO: 1402918 NR Description: peroxidase [Arabidopsis thaliana]
  misc_feature (1)..(274): Homolog of NCBI NO: 15239370 NR Description: peroxidase, putative [Arabidopsis thaliana]
MPASLLRLHFHDCFVKGCDASILLDSSGTIISEKRSNPNRNSARGFELIEEIKHALEQECPETVSCADILALAARDSTVITGGPSWEVPLGRRDARGASLSGSNNDIPAPNNTFQTILTKFKRQGLDLVDLVSLSGSHTIGNSRCTSFRQRLYNQSGNGKPDMTLSQYYATLLRQRCPRSGGDQTLFFLDFATPFKFDNHYFKNLIMYKGLLSSDEILFTKNKQSKELVELYAENQEAFFEQFAKSMVKMGNISPLTGAKGEIRRICRRVNHAY

SEQ ID NO: 43240 - DNA, 1523 bp, Arabidopsis thaliana
  misc_feature (1)..(1523): Ceres Seq. ID no. 13646158
  misc_feature: MA Experiment ID: 20000171 Result: Down-regulated in Transcription
  misc_feature: MA Experiment 20000171 PARAMETER Experiment Name: At_42deg_Heat_P Parameter: Age (day) Value: 14
  misc_feature: MA Experiment 20000171 PARAMETER Experiment Name: At_42deg_Heat_P Parameter: Organism Value: A. thaliana
  misc_feature: MA Experiment 20000171 PARAMETER Experiment Name: At_42deg_Heat_P Parameter: Plant Line Value: WS
  misc_feature: MA Experiment 20000171 PARAMETER Experiment Name: At_42deg_Heat_P Parameter: Temperature (deg C) Value: 42 vs. 22
  misc_feature: MA Experiment 20000171 PARAMETER Experiment Name: At_42deg_Heat_P Parameter: Timepoint (hr) Value: 1
  misc_feature: MA Experiment 20000171 PARAMETER Experiment Name: At_42deg_Heat_P Parameter: Tissue Value: Aerial
  misc_feature: MA Experiment ID: 20000173 Result: Down-regulated in Transcription
  misc_feature: MA Experiment 20000173 PARAMETER Experiment Name: At_42deg_Heat_P Parameter: Age (day) Value: 14
  misc_feature: MA Experiment 20000173 PARAMETER Experiment Name: At_42deg_Heat_P Parameter: Organism Value: A. thaliana
  misc_feature: MA Experiment 20000173 PARAMETER Experiment Name: At_42deg_Heat_P Parameter: Plant Line Value: WS
  misc_feature: MA Experiment 20000173 PARAMETER Experiment Name: At_42deg_Heat_P Parameter: Temperature (deg C) Value: 42 vs. 22
  misc_feature: MA Experiment 20000173 PARAMETER Experiment Name: At_42deg_Heat_P Parameter: Timepoint (hr) Value: 6
  misc_feature: MA Experiment 20000173 PARAMETER Experiment Name: At_42deg_Heat_P Parameter: Tissue Value: Aerial
  misc_feature: MA Experiment ID: 20000184 Result: Up-regulated in Transcription
  misc_feature: MA Experiment 20000184 PARAMETER Experiment Name: At_Shoots__P Parameter: Age (day) Value: 7
  misc_feature: MA Experiment 20000184 PARAMETER Experiment Name: At_Shoots__P Parameter: Tissue Value: Shoots vs. Whole Plant
  misc_feature: MA Experiment ID: 20000185 Result: Up-regulated in Transcription
  misc_feature: MA Experiment 20000185 PARAMETER Experiment Name: At_Roots__P Parameter: Age (day) Value: 7 vs. 21
  misc_feature: MA Experiment 20000185 PARAMETER Experiment Name: At_Roots__P Parameter: Organism Value: A. thaliana
  misc_feature: MA Experiment 20000185 PARAMETER Experiment Name: At_Roots__P Parameter: Tissue Value: Roots vs. Whole Plant
  misc_feature: MA Experiment ID: 20000267 Result: Down-regulated in Transcription
  misc_feature: MA Experiment 20000267 PARAMETER Experiment Name: At_Drought_P Parameter: Age (day) Value: 7
  misc_feature: MA Experiment 20000267 PARAMETER Experiment Name: At_Drought_P Parameter: Organism Value: A. thaliana
  misc_feature: MA Experiment 20000267 PARAMETER Experiment Name: At_Drought_P Parameter: Plant Line Value: WS
  misc_feature: MA Experiment 20000267 PARAMETER Experiment Name: At_Drought_P Parameter: Timepoint (hr) Value: 6
  misc_feature: MA Experiment 20000267 PARAMETER Experiment Name: At_Drought_P Parameter: Tissue Value: Whole Plant
  misc_feature: MA Experiment 20000267 PARAMETER Experiment Name: At_Drought_P Parameter: Treatment Value: Drought vs. No Drought
  misc_feature: MA Experiment ID: 20000438 Result: Up-regulated in Transcription
  misc_feature: MA Experiment 20000438 PARAMETER Experiment Name: At_Shoots__P Parameter: Age (day) Value: 14
  misc_feature: MA Experiment 20000438 PARAMETER Experiment Name: At_Shoots__P Parameter: Tissue Value: Shoots vs. Whole Plant
  misc_feature: MA Experiment ID: 20000439 Result: Up-regulated in Transcription
  misc_feature: MA Experiment 20000439 PARAMETER Experiment Name: At_Roots__P Parameter: Age (day) Value: 14 vs. 21
  misc_feature: MA Experiment 20000439 PARAMETER Experiment Name: At_Roots__P Parameter: Organism Value: A. thaliana
  misc_feature: MA Experiment 20000439 PARAMETER Experiment Name: At_Roots__P Parameter: Tissue Value: Roots vs. Whole Plant
  misc_feature: MA Experiment ID: 20000495 Result: Up-regulated in Transcription
  misc_feature: MA Experiment 20000495 PARAMETER Experiment Name: At_Guard_Cells_P Parameter: Harvest Date Value: 8/2/2002
  misc_feature: MA Experiment 20000495 PARAMETER Experiment Name: At_Guard_Cells_P Parameter: Organism Value: A. thaliana
  misc_feature: MA Experiment 20000495 PARAMETER Experiment Name: At_Guard_Cells_P Parameter: Tissue Value: Guard Cells vs. Leaves
  misc_feature: MA Experiment ID: 20000527 Result: Down-regulated in Transcription
  misc_feature: MA Experiment 20000527 PARAMETER Experiment Name: At_10percent_PEG_P Parameter: Age (day) Value: 20
  misc_feature: MA Experiment 20000527 PARAMETER Experiment Name: At_10percent_PEG_P Parameter: Organism Value: A. thaliana
  misc_feature: MA Experiment 20000527 PARAMETER Experiment Name: At_10percent_PEG_P Parameter: Plant Line Value: WS
  misc_feature: MA Experiment 20000527 PARAMETER Experiment Name: At_10percent_PEG_P Parameter: Timepoint (day) Value: 20
  misc_feature: MA Experiment 20000527 PARAMETER Experiment Name: At_10percent_PEG_P Parameter: Tissue Value: Whole Plant
  misc_feature: MA Experiment 20000527 PARAMETER Experiment Name: At_10percent_PEG_P Parameter: Treatment Value: 10percent PEG vs. No Treatment
atcataatcatttacttcaaacaacaatctttgcttctctctgagtgatcatctttcttgttcaatggctggtcaaaagatactttctttactggttatagctcttgttgttacttttgcagctgcggctcggcttcttgatgaagaaaatgcattctcagctaccacaaccacccttggctcaggttcaggttccaccggaattggttttggtgcaggaacagggtcaagtggttcaggttccacgggattcggttttggtgcaggatcagggtcatctggttcaggttctactggaagcggtctcggtgcaggtacagggtcaataccatcaagtggttcaggtcctggtcttctaccaactgccagttctgttcctggttctttagcgggtggtggttcaggttccttgcctaccactggttcagccactggtgcaggtgcaggtaccggttcagctcttggaggtggtccaggtgctggctcagctcttggtggtggtgcgggtgccggtccagctcttggtggtggtgcgggtgccggtccagctcttggtggtggtgcaggtgctggttcagctcttggtggtggtggtgcaggtgctggtccagctcttggtggtggtggtgcaggtgctggtccagctcttggtggtggtgttgcaggttctggttcagctcttggtggtggtgcaagtgctggtcctgacaatacgttggtattttttatgcatgatatactcggtggttcaaatcccactgccagagccgtaactggagtcgtcgcaaatccggctttaagcgggcaacttccatttgctaaacccaacggcgcaaaccttcctgtaagcaacggagttccgtcaaacaacaacaacaatgggattgtcaacaacaacaatgtccctttcctcgttggactcggcggaaccacagctaacattctccagaacaacaataacggaaacaacattttaaatggtttccctgttgctagtggcggtcagctcccgagcggttctgctcttcagatgctaatgttcgggacaatgacagtaatcgatgatgaactaactgaaggccatgagctcggatctggcttactcgggaaagcgcagggatattatgtggcgagtgcaattgacggaactagccagacaatggctttcaccgcgatgtttgaaagcggcggttatgaagatagtataagcttctttggggttctcagaacagcggtatcagaatcgcatataggagtaatgggaggtaccggaaagtatgtgaatgcgaggggattcgcgattctgaagacgtttacaggatctagcgggacgcagcagaatcagccgcatcagttcactgatgggcttgagactgttgttgagtgtaccgtttatctttcttactagttttatttttcttcttttgttggggtttgggaatgtttggtgtgtatgttatgtgtgtcatttgtaatctaaatatgaaatttgtgtaagaaaattgtatgtacttttttttttt

SEQ ID NO: 43241 - protein, 447 aa, Arabidopsis thaliana
  peptide (1)..(447): Ceres Seq. ID no. 13646159
  misc_feature (257)..(438): Pfam Name: Dirigent-like protein Pfam Description: Dirigent-like protein
  misc_feature (39)..(213): Homolog of NCBI NO: 765323 NR Description: silk fibroin heavy chain [Bombyx mori]
  misc_feature (38)..(213): Homolog of NCBI NO: 765323 NR Description: silk fibroin heavy chain [Bombyx mori]
  misc_feature (212)..(447): Homolog of NCBI NO: 15236315 NR Description: disease resistance response protein-related
  misc_feature (212)..(447): Homolog of NCBI NO: 15229564 NR Description: disease resistance response protein-related
  misc_feature (196)..(446): Homolog of NCBI NO: 27497202 NR Description: Putative disease resistance response protein
  misc_feature (206)..(447): Homolog of NCBI NO: 15233217 NR Description: disease resistance response protein-related
  misc_feature (188)..(447): Homolog of NCBI NO: 15225466 NR Description: disease resistance response protein-related/
  misc_feature (146)..(445): Homolog of NCBI NO: 34895944 NR Description: P0011G08.13 [Oryza sativa (japonica
  misc_feature (96)..(447): Homolog of NCBI NO: 25407001 NR Description: hypothetical protein [imported] - Arabidopsis
  misc_feature (1)..(447): Homolog of NCBI NO: 15226923 NR Description: fibroin-related [Arabidopsis thaliana]
MAGQKILSLLVIALVVTFAAAARLLDEENAFSATTTTLGSGSGSTGIGFGAGTGSSGSGSTGFGFGAGSGSSGSGSTGSGLGAGTGSIPSSGSGPGLLPTASSVPGSLAGGGSGSLPTTGSATGAGAGTGSALGGGPGAGSALGGGAGAGPALGGGAGAGPALGGGAGAGSALGGGGAGAGPALGGGGAGAGPALGGGVAGSGSALGGGASAGPDNTLVFFMHDILGGSNPTARAVTGVVANPALSGQLPFAKPNGANLPVSNGVPSNNNNNGIVNNNNVPFLVGLGGTTANILQNNNNGNNILNGFPVASGGQLPSGSALQMLMFGTMTVIDDELTEGHELGSGLLGKAQGYYVASAIDGTSQTMAFTAMFESGGYEDSISFFGVLRTAVSESHIGVMGGTGKYVNARGFAILKTFTGSSGTQQNQPHQFTDGLETVVECTVYLSY

SEQ ID NO: 43242 - protein, 226 aa, Arabidopsis thaliana
  peptide (1)..(226): Ceres Seq. ID no. 13646160
  misc_feature (36)..(217): Pfam Name: Dirigent-like protein Pfam Description: Dirigent-like protein
  misc_feature (1)..(98): Homolog of NCBI NO: 7106228 NR Description: flagelliform silk protein [Nephila
  misc_feature (1)..(98): Homolog of NCBI NO: 7106228 NR Description: flagelliform silk protein [Nephila
  misc_feature (1)..(226): Homolog of NCBI NO: 15236315 NR Description: disease resistance response protein-related
  misc_feature (1)..(226): Homolog of NCBI NO: 15229564 NR Description: disease resistance response protein-related
  misc_feature (1)..(225): Homolog of NCBI NO: 27497202 NR Description: Putative disease resistance response protein
  misc_feature (1)..(226): Homolog of NCBI NO: 15233217 NR Description: disease resistance response protein-related
  misc_feature (1)..(226): Homolog of NCBI NO: 15225466 NR Description: disease resistance response protein-related/
  misc_feature (1)..(224): Homolog of NCBI NO: 34895944 NR Description: P0011G08.13 [Oryza sativa (japonica
  misc_feature (1)..(226): Homolog of NCBI NO: 25407001 NR Description: hypothetical protein [imported] - Arabidopsis
  misc_feature (1)..(226): Homolog of NCBI NO: 15226923 NR Description: fibroin-related [Arabidopsis thaliana]
MHDILGGSNPTARAVTGVVANPALSGQLPFAKPNGANLPVSNGVPSNNNNNGIVNNNNVPFLVGLGGTTANILQNNNNGNNILNGFPVASGGQLPSGSALQMLMFGTMTVIDDELTEGHELGSGLLGKAQGYYVASAIDGTSQTMAFTAMFESGGYEDSISFFGVLRTAVSESHIGVMGGTGKYVNARGFAILKTFTGSSGTQQNQPHQFTDGLETVVECTVYLSY

SEQ ID NO: 43243 - DNA, 1495 bp, Arabidopsis thaliana
  misc_feature (1)..(1495): Ceres Seq. ID no. 12394681
  misc_feature: MA Experiment ID: 108434 Result: Down-regulated in Transcription
  misc_feature: MA Experiment 108434 PARAMETER Experiment Name: At_Root_Tips_cDNA_P Parameter: Tissue Value: Root Tips
  misc_feature: MA Experiment ID: 108463 Result: Up-regulated in Transcription
  misc_feature: MA Experiment 108463 PARAMETER Experiment Name: At_Germinating_Seeds_cDNA_P Parameter: Age (day) Value: 3 vs. 0
  misc_feature: MA Experiment 108463 PARAMETER Experiment Name: At_Germinating_Seeds_cDNA_P Parameter: Tissue Value: Germinating Seeds
  misc_feature: MA Experiment ID: 108464 Result: Up-regulated in Transcription
  misc_feature: MA Experiment 108464 PARAMETER Experiment Name: At_Germinating_Seeds_cDNA_P Parameter: Age (day) Value: 4 vs. 0
  misc_feature: MA Experiment 108464 PARAMETER Experiment Name: At_Germinating_Seeds_cDNA_P Parameter: Tissue Value: Germinating Seeds
  misc_feature: MA Experiment ID: 20000086 Result: Down-regulated in Transcription
  misc_feature: MA Experiment 20000086 PARAMETER Experiment Name: At_100uM_ABA_Mutants_cDNA_P Parameter: Plant Line Value: CS22
  misc_feature: MA Experiment 20000086 PARAMETER Experiment Name: At_100uM_ABA_Mutants_cDNA_P Parameter: Timepoint (hr) Value: 6
  misc_feature: MA Experiment 20000086 PARAMETER Experiment Name: At_100uM_ABA_Mutants_cDNA_P Parameter: Tissue Value: Aerial
  misc_feature: MA Experiment 20000086 PARAMETER Experiment Name: At_100uM_ABA_Mutants_cDNA_P Parameter: Treatment Value: 100uM ABA vs. No Treatment
  misc_feature: MA Experiment ID: 20000087 Result: Down-regulated in Transcription
  misc_feature: MA Experiment 20000087 PARAMETER Experiment Name: At_100uM_ABA_Mutants_cDNA_P Parameter: Plant Line Value: WS
  misc_feature: MA Experiment 20000087 PARAMETER Experiment Name: At_100uM_ABA_Mutants_cDNA_P Parameter: Timepoint (hr) Value: 6
  misc_feature: MA Experiment 20000087 PARAMETER Experiment Name: At_100uM_ABA_Mutants_cDNA_P Parameter: Tissue Value: Aerial
  misc_feature: MA Experiment 20000087 PARAMETER Experiment Name: At_100uM_ABA_Mutants_cDNA_P Parameter: Treatment Value: 100uM ABA vs. No Treatment
  misc_feature: MA Experiment ID: 20000184 Result: Up-regulated in Transcription
  misc_feature: MA Experiment 20000184 PARAMETER Experiment Name: At_Shoots__P Parameter: Age (day) Value: 7
  misc_feature: MA Experiment 20000184 PARAMETER Experiment Name: At_Shoots__P Parameter: Tissue Value: Shoots vs. Whole Plant
  misc_feature: MA Experiment ID: 20000185 Result: Up-regulated in Transcription
  misc_feature: MA Experiment 20000185 PARAMETER Experiment Name: At_Roots__P Parameter: Age (day) Value: 7 vs. 21
  misc_feature: MA Experiment 20000185 PARAMETER Experiment Name: At_Roots__P Parameter: Organism Value: A. thaliana
  misc_feature: MA Experiment 20000185 PARAMETER Experiment Name: At_Roots__P Parameter: Tissue Value: Roots vs. Whole Plant
  misc_feature: MA Experiment ID: 20000227 Result: Down-regulated in Transcription
  misc_feature: MA Experiment 20000227 PARAMETER Experiment Name: At_Root-Tips-vs-Tops_P Parameter: Tissue Value: Root Tips vs. Root Tops
  misc_feature: MA Experiment ID: 20000439 Result: Up-regulated in Transcription
  misc_feature: MA Experiment 20000439 PARAMETER Experiment Name: At_Roots__P Parameter: Age (day) Value: 14 vs. 21
  misc_feature: MA Experiment 20000439 PARAMETER Experiment Name: At_Roots__P Parameter: Organism Value: A. thaliana
  misc_feature: MA Experiment 20000439 PARAMETER Experiment Name: At_Roots__P Parameter: Tissue Value: Roots vs. Whole Plant
  misc_feature: MA Experiment ID: 20000527 Result: Down-regulated in Transcription
  misc_feature: MA Experiment 20000527 PARAMETER Experiment Name: At_10percent_PEG_P Parameter: Age (day) Value: 20
  misc_feature: MA Experiment 20000527 PARAMETER Experiment Name: At_10percent_PEG_P Parameter: Organism Value: A. thaliana
  misc_feature: MA Experiment 20000527 PARAMETER Experiment Name: At_10percent_PEG_P Parameter: Plant Line Value: WS
  misc_feature: MA Experiment 20000527 PARAMETER Experiment Name: At_10percent_PEG_P Parameter: Timepoint (day) Value: 20
  misc_feature: MA Experiment 20000527 PARAMETER Experiment Name: At_10percent_PEG_P Parameter: Tissue Value: Whole Plant
  misc_feature: MA Experiment 20000527 PARAMETER Experiment Name: At_10percent_PEG_P Parameter: Treatment Value: 10percent PEG vs. No Treatment
  misc_feature: MA Experiment ID: 20001457 Result: Down-regulated in Transcription
  misc_feature: MA Experiment 20001457 PARAMETER Experiment Name: At_50mM_NH4NO3_L-to-H_P Parameter: Age (day) Value: Undefined
  misc_feature: MA Experiment 20001457 PARAMETER Experiment Name: At_50mM_NH4NO3_L-to-H_P Parameter: Organism Value: Undefined
  misc_feature: MA Experiment 20001457 PARAMETER Experiment Name: At_50mM_NH4NO3_L-to-H_P Parameter: Plant Line Value: Undefined
  misc_feature: MA Experiment 20001457 PARAMETER Experiment Name: At_50mM_NH4NO3_L-to-H_P Parameter: Timepoint (hr) Value: 0.5
  misc_feature: MA Experiment 20001457 PARAMETER Experiment Name: At_50mM_NH4NO3_L-to-H_P Parameter: Tissue Value: Siliques
  misc_feature: MA Experiment 20001457 PARAMETER Experiment Name: At_50mM_NH4NO3_L-to-H_P Parameter: Treatment Value: 50mM NH4NO3 vs. 100mM Manitol
  misc_feature: MA Experiment ID: 20001904 Result: Up-regulated in Transcription
  misc_feature: MA Experiment 20001904 PARAMETER Experiment Name: At_Drought_Reproduction_P Parameter: Age (day) Value: 37
  misc_feature: MA Experiment 20001904 PARAMETER Experiment Name: At_Drought_Reproduction_P Parameter: Organism Value: A. thaliana
  misc_feature: MA Experiment 20001904 PARAMETER Experiment Name: At_Drought_Reproduction_P Parameter: Plant Line Value: WS
  misc_feature: MA Experiment 20001904 PARAMETER Experiment Name: At_Drought_Reproduction_P Parameter: Timepoint (day) Value: 7
  misc_feature: MA Experiment 20001904 PARAMETER Experiment Name: At_Drought_Reproduction_P Parameter: Tissue Value: Rosettes
  misc_feature: MA Experiment 20001904 PARAMETER Experiment Name: At_Drought_Reproduction_P Parameter: Treatment Value: Drought vs. No Drought
  misc_feature: MA Experiment ID: 20001906 Result: Up-regulated in Transcription
  misc_feature: MA Experiment 20001906 PARAMETER Experiment Name: At_Drought_Reproduction_P Parameter: Age (day) Value: 35
  misc_feature: MA Experiment 20001906 PARAMETER Experiment Name: At_Drought_Reproduction_P Parameter: Organism Value: A. thaliana
  misc_feature: MA Experiment 20001906 PARAMETER Experiment Name: At_Drought_Reproduction_P Parameter: Plant Line Value: WS
  misc_feature: MA Experiment 20001906 PARAMETER Experiment Name: At_Drought_Reproduction_P Parameter: Timepoint (day) Value: 5
  misc_feature: MA Experiment 20001906 PARAMETER Experiment Name: At_Drought_Reproduction_P Parameter: Tissue Value: Siliques
  misc_feature: MA Experiment 20001906 PARAMETER Experiment Name: At_Drought_Reproduction_P Parameter: Treatment Value: Drought vs. No Drought
  misc_feature: Phenotype: ROSETTE LEAVES Shape-Oval
  misc_feature: Phenotype: WHOLE PLANT Color-Dark Green
  misc_feature: Phenotype: WHOLE PLANT Size-Small
  misc_feature: Phenotype: INFLORESCENCE Branching-No Branching
  misc_feature: Phenotype: INFLORESCENCE Flowering Time-Late Flowering
  misc_feature: Phenotype: ROSETTE LEAVES Other
  misc_feature: Phenotype: WHOLE PLANT Size-Small
  misc_feature: Phenotype: WHOLE PLANT Size-Small
  misc_feature: Phenotype: INFLORESCENCE Height-Short
  misc_feature: Phenotype: FERTILITY Fertility-Sterile
  misc_feature: Phenotype: ROSETTE LEAVES Shape-Serrate
  misc_feature: Phenotype: ROSETTE LEAVES Other
  misc_feature: Phenotype: ROSETTE LEAVES Shape-Serrate
  misc_feature: Phenotype: ROSETTE LEAVES Other
  misc_feature: Phenotype: ROSETTE LEAVES Disorganized Rosette-Disorganized Rosette
  misc_feature: Phenotype: ROSETTE LEAVES Other
  misc_feature: Phenotype: INFLORESCENCE Flowering Time-Late Flowering
  misc_feature: Phenotype: INFLORESCENCE Height-Short
  misc_feature: Phenotype: FERTILITY Fertility-Sterile
  misc_feature: Phenotype: INFLORESCENCE Other
  misc_feature: Phenotype: FERTILITY Fertility-Sterile
atctttggtttttcttcactgacaaaacccctaaaaatggccgactcattcgagctaattgtaacccgaaaagaacctgttctcgtctctccagcctccgaaactccaaaaggtctccattatctctcaaatctcgatcaaaacatcgccatcattgtcaaaacattctactacttcaaatcaaactcaagatccaacgaagaatcctatgaagtcatcaagaagtcactctccgaggttctcgttcactactatcctgccgcagggagactcacgatcagtcctgaaggaaagatcgctgtggattgcaccggagaaggagttgtagtggtggaagctgaggccaattgtgggatagagaagataaagaaggctatatcggagattgatcaaccagagactcttgaaaagttggtttacgacgttcccggtgctcggaatattctcgagattcctccagtggttgttcaggtgacaaatttcaagtgtggagggttcgtgctaggactaggcatgaaccacaatatgttcgatggtatcgcagccatggagttcctcaactcttgggccgagacggctcgtggccttcctctctccgttccacctttcttggaccgcacacttctccgaccacgaaccccaccaaagatcgaattcccacacaacgagttcgaggacctcgaagacatctccggcaccggaaaactctactccgacgagaaactcgtctacaaatccttcctcttcggacccgaaaaactcgagaggcttaagatcatggcagagacgagatccacgacttttcaaaccctaaccgggtttctgtggagagctcgttgtcaagccttagggcttaaacctgatcaacggatcaagcttctctttgctgcagatggaaggtcgagattcgttccggaacttcctaaaggatattccggtaacgggattgtgttcacttattgcgttacaacggcaggtgaagtgactttaaaccctctttctcattcagtgtgtttggtcaaaagagccgttgaaatggtcaacgacggtttcatgaggtcagcgattgattactttgaggtgactcgagctaggccgagcctaacggcaacacttctgatcacgtcgtgggcaaaactgtcgtttcatactaaggatttcggttggggtgaaccggttgtatctggaccggtcggtttacctgagaaggaagtgattctgtttctgccatgtggtagtgacacgaagagtatcaatgtgctgcttggacttcctggctcggctatgaaagtgttccaagggattatggatatatgaatcattaaaattatttatggtttaatgtttgaatttaaattaactatgatttaaaaagcaaataatgatgatatatcaattacgtgtttgtggtcgtatgaaatattgttcgtcggtggagcaaaaatgtaactaagatgttaaagtatcaagtttaataaagaaagctattgtgttt

SEQ ID NO: 43244 - protein, 438 aa, Arabidopsis thaliana
  peptide (1)..(438): Ceres Seq. ID no. 12394682
  misc_feature (19)..(438): Pfam Name: Transferase family Pfam Description: Transferase family
  misc_feature (14)..(433): Homolog of NCBI NO: 6469032 NR Description: N-hydroxycinnamoyl/benzoyltransferase [Ipomoea
  misc_feature (16)..(437): Homolog of NCBI NO: 22854880 NR Description: benzoyl coenzyme A: benzyl alcohol benzoyl
  misc_feature (24)..(433): Homolog of NCBI NO: 40644084 NR Description: hydroxycinnamoyl CoA quinate transferase
  misc_feature (5)..(437): Homolog of NCBI NO: 20161743 NR Description: N-hydroxycinnamoyl/benzoyltransferase-like
  misc_feature (16)..(433): Homolog of NCBI NO: 30693725 NR Description: transferase family [Arabidopsis thaliana]
  misc_feature (16)..(433): Homolog of NCBI NO: 30693723 NR Description: transferase family [Arabidopsis thaliana]
  misc_feature (13)..(438): Homolog of NCBI NO: 15229017 NR Description: putative protein; protein id: At3g48720.1
  misc_feature (13)..(438): Homolog of NCBI NO: 34222064 NR Description: At3g48720 [Arabidopsis thaliana]
  misc_feature (13)..(438): Homolog of NCBI NO: 21553692 NR Description: acyltransferase-like protein [Arabidopsis
  misc_feature (13)..(438): Homolog of NCBI NO: 15242820 NR Description: acyltransferase-like protein
IFGFSSLTKPLKMADSFELIVTRKEPVLVSPASETPKGLHYLSNLDQNIAIIVKTFYYFKSNSRSNEESYEVIKKSLSEVLVHYYPAAGRLTISPEGKIAVDCTGEGVVVVEAEANCGIEKIKKAISEIDQPETLEKLVYDVPGARNILEIPPVVVQVTNFKCGGFVLGLGMNHNMFDGIAAMEFLNSWAETARGLPLSVPPFLDRTLLRPRTPPKIEFPHNEFEDLEDISGTGKLYSDEKLVYKSFLFGPEKLERLKIMAETRSTTFQTLTGFLWRARCQALGLKPDQRIKLLFAADGRSRFVPELPKGYSGNGIVFTYCVTTAGEVTLNPLSHSVCLVKRAVEMVNDGFMRSAIDYFEVTRARPSLTATLLITSWAKLSFHTKDFGWGEPVVSGPVGLPEKEVILFLPCGSDTKSINVLLGLPGSAMKVFQGIMDI

SEQ ID NO: 43245 - protein, 426 aa, Arabidopsis thaliana
  peptide (1)..(426): Ceres Seq. ID no. 12394683
  misc_feature (7)..(426): Pfam Name: Transferase family Pfam Description: Transferase family
  misc_feature (2)..(421): Homolog of NCBI NO: 6469032 NR Description: N-hydroxycinnamoyl/benzoyltransferase [Ipomoea
  misc_feature (4)..(425): Homolog of NCBI NO: 22854880 NR Description: benzoyl coenzyme A: benzyl alcohol benzoyl
  misc_feature (12)..(421): Homolog of NCBI NO: 40644084 NR Description: hydroxycinnamoyl CoA quinate transferase
  misc_feature (1)..(425): Homolog of NCBI NO: 20161743 NR Description: N-hydroxycinnamoyl/benzoyltransferase-like
  misc_feature (4)..(421): Homolog of NCBI NO: 30693725 NR Description: transferase family [Arabidopsis thaliana]
  misc_feature (4)..(421): Homolog of NCBI NO: 30693723 NR Description: transferase family [Arabidopsis thaliana]
  misc_feature (1)..(426): Homolog of NCBI NO: 15229017 NR Description: putative protein; protein id: At3g48720.1
  misc_feature (1)..(426): Homolog of NCBI NO: 34222064 NR Description: At3g48720 [Arabidopsis thaliana]
  misc_feature (1)..(426): Homolog of NCBI NO: 21553692 NR Description: acyltransferase-like protein [Arabidopsis
  misc_feature (1)..(426): Homolog of NCBI NO: 15242820 NR Description: acyltransferase-like protein
MADSFELIVTRKEPVLVSPASETPKGLHYLSNLDQNIAIIVKTFYYFKSNSRSNEESYEVIKKSLSEVLVHYYPAAGRLTISPEGKIAVDCTGEGVVVVEAEANCGIEKIKKAISEIDQPETLEKLVYDVPGARNILEIPPVVVQVTNFKCGGFVLGLGMNHNMFDGIAAMEFLNSWAETARGLPLSVPPFLDRTLLRPRTPPKIEFPHNEFEDLEDISGTGKLYSDEKLVYKSFLFGPEKLERLKIMAETRSTTFQTLTGFLWRARCQALGLKPDQRIKLLFAADGRSRFVPELPKGYSGNGIVFTYCVTTAGEVTLNPLSHSVCLVKRAVEMVNDGFMRSAIDYFEVTRARPSLTATLLITSWAKLSFHTKDFGWGEPVVSGPVGLPEKEVILFLPCGSDTKSINVLLGLPGSAMKVFQGIMDI

SEQ ID NO: 43246 - protein, 267 aa, Arabidopsis thaliana
  peptide (1)..(267): Ceres Seq. ID no. 12394684
  misc_feature (1)..(267): Pfam Name: Transferase family Pfam Description: Transferase family
  misc_feature (1)..(262): Homolog of NCBI NO: 6469032 NR Description: N-hydroxycinnamoyl/benzoyltransferase [Ipomoea
  misc_feature (1)..(266): Homolog of NCBI NO: 22854880 NR Description: benzoyl coenzyme A: benzyl alcohol benzoyl
  misc_feature (1)..(262): Homolog of NCBI NO: 40644084 NR Description: hydroxycinnamoyl CoA quinate transferase
  misc_feature (1)..(266): Homolog of NCBI NO: 20161743 NR Description: N-hydroxycinnamoyl/benzoyltransferase-like
  misc_feature (1)..(262): Homolog of NCBI NO: 30693725 NR Description: transferase family [Arabidopsis thaliana]
  misc_feature (1)..(262): Homolog of NCBI NO: 30693723 NR Description: transferase family [Arabidopsis thaliana]
  misc_feature (1)..(267): Homolog of NCBI NO: 15229017 NR Description: putative protein; protein id: At3g48720.1
  misc_feature (1)..(267): Homolog of NCBI NO: 34222064 NR Description: At3g48720 [Arabidopsis thaliana]
  misc_feature (1)..(267): Homolog of NCBI NO: 21553692 NR Description: acyltransferase-like protein [Arabidopsis
  misc_feature (1)..(267): Homolog of NCBI NO: 15242820 NR Description: acyltransferase-like protein
MNHNMFDGIAAMEFLNSWAETARGLPLSVPPFLDRTLLRPRTPPKIEFPHNEFEDLEDISGTGKLYSDEKLVYKSFLFGPEKLERLKIMAETRSTTFQTLTGFLWRARCQALGLKPDQRIKLLFAADGRSRFVPELPKGYSGNGIVFTYCVTTAGEVTLNPLSHSVCLVKRAVEMVNDGFMRSAIDYFEVTRARPSLTATLLITSWAKLSFHTKDFGWGEPVVSGPVGLPEKEVILFLPCGSDTKSINVLLGLPGSAMKVFQGIMDI

SEQ ID NO: 43247 - DNA, 1497 bp, Arabidopsis thaliana
  misc_feature (1)..(1497): Ceres Seq. ID no. 12336172
  misc_feature: MA Experiment ID: 108573 Result: Up-regulated in Transcription
  misc_feature: MA Experiment 108573 PARAMETER Experiment Name: At_Drought_cDNA_P Parameter: Timepoint (hr) Value: 6
  misc_feature: MA Experiment 108573 PARAMETER Experiment Name: At_Drought_cDNA_P Parameter: Tissue Value: Aerial
  misc_feature: MA Experiment 108573 PARAMETER Experiment Name: At_Drought_cDNA_P Parameter: Treatment Value: Drought vs. No Drought
  misc_feature: MA Experiment ID: 108574 Result: Up-regulated in Transcription
  misc_feature: MA Experiment 108574 PARAMETER Experiment Name: At_Wounding__cDNA_P Parameter: Timepoint (hr) Value: 1
  misc_feature: MA Experiment 108574 PARAMETER Experiment Name: At_Wounding__cDNA_P Parameter: Tissue Value: Aerial
  misc_feature: MA Experiment 108574 PARAMETER Experiment Name: At_Wounding__cDNA_P Parameter: Treatment Value: Wounding vs. No Wounding
  misc_feature: MA Experiment ID: 108579 Result: Up-regulated in Transcription
  misc_feature: MA Experiment 108579 PARAMETER Experiment Name: At_4deg_Cold_cDNA_P Parameter: Temperature (deg C) Value: 4 vs. 22
  misc_feature: MA Experiment 108579 PARAMETER Experiment Name: At_4deg_Cold_cDNA_P Parameter: Timepoint (hr) Value: 6
  misc_feature: MA Experiment 108579 PARAMETER Experiment Name: At_4deg_Cold_cDNA_P Parameter: Tissue Value: Aerial
  misc_feature: MA Experiment ID: 20000069 Result: Down-regulated in Transcription
  misc_feature: MA Experiment 20000069 PARAMETER Experiment Name: At_100uM_ABA_Mutants_cDNA_P Parameter: Plant Line Value: CS23
  misc_feature: MA Experiment 20000069 PARAMETER Experiment Name: At_100uM_ABA_Mutants_cDNA_P Parameter: Timepoint (hr) Value: 6
  misc_feature: MA Experiment 20000069 PARAMETER Experiment Name: At_100uM_ABA_Mutants_cDNA_P Parameter: Tissue Value: Aerial
  misc_feature: MA Experiment 20000069 PARAMETER Experiment Name: At_100uM_ABA_Mutants_cDNA_P Parameter: Treatment Value: 100uM ABA vs. No Treatment
  misc_feature: MA Experiment ID: 20000070 Result: Down-regulated in Transcription
  misc_feature: MA Experiment 20000070 PARAMETER Experiment Name: At_100uM_ABA_Mutants_cDNA_P Parameter: Plant Line Value: CS24
  misc_feature: MA Experiment 20000070 PARAMETER Experiment Name: At_100uM_ABA_Mutants_cDNA_P Parameter: Timepoint (hr) Value: 6
  misc_feature: MA Experiment 20000070 PARAMETER Experiment Name: At_100uM_ABA_Mutants_cDNA_P Parameter: Tissue Value: Aerial
  misc_feature: MA Experiment 20000070 PARAMETER Experiment Name: At_100uM_ABA_Mutants_cDNA_P Parameter: Treatment Value: 100uM ABA vs. No Treatment
  misc_feature: MA Experiment ID: 20000071 Result: Down-regulated in Transcription
  misc_feature: MA Experiment 20000071 PARAMETER Experiment Name: At_100uM_ABA_Mutants_cDNA_P Parameter: Plant Line Value: CS8104
  misc_feature: MA Experiment 20000071 PARAMETER Experiment Name: At_100uM_ABA_Mutants_cDNA_P Parameter: Timepoint (hr) Value: 6
  misc_feature: MA Experiment 20000071 PARAMETER Experiment Name: At_100uM_ABA_Mutants_cDNA_P Parameter: Tissue Value: Aerial
  misc_feature: MA Experiment 20000071 PARAMETER Experiment Name: At_100uM_ABA_Mutants_cDNA_P Parameter: Treatment Value: 100uM ABA vs. No Treatment
  misc_feature: MA Experiment ID: 20000086 Result: Down-regulated in Transcription
  misc_feature: MA Experiment 20000086 PARAMETER Experiment Name: At_100uM_ABA_Mutants_cDNA_P Parameter: Plant Line Value: CS22
  misc_feature: MA Experiment 20000086 PARAMETER Experiment Name: At_100uM_ABA_Mutants_cDNA_P Parameter: Timepoint (hr) Value: 6
  misc_feature: MA Experiment 20000086 PARAMETER Experiment Name: At_100uM_ABA_Mutants_cDNA_P Parameter: Tissue Value: Aerial
  misc_feature: MA Experiment 20000086 PARAMETER Experiment Name: At_100uM_ABA_Mutants_cDNA_P Parameter: Treatment Value: 100uM ABA vs. No Treatment
  misc_feature: MA Experiment ID: 20000088 Result: Down-regulated in Transcription
  misc_feature: MA Experiment 20000088 PARAMETER Experiment Name: At_100uM_ABA_Mutants_cDNA_P Parameter: Plant Line Value: Landsberg
  misc_feature: MA Experiment 20000088 PARAMETER Experiment Name: At_100uM_ABA_Mutants_cDNA_P Parameter: Timepoint (hr) Value: 6
  misc_feature: MA Experiment 20000088 PARAMETER Experiment Name: At_100uM_ABA_Mutants_cDNA_P Parameter: Tissue Value: Aerial
  misc_feature: MA Experiment 20000088 PARAMETER Experiment Name: At_100uM_ABA_Mutants_cDNA_P Parameter: Treatment Value: 100uM ABA vs. No Treatment
  misc_feature: MA Experiment ID: 20000089 Result: Down-regulated in Transcription
  misc_feature: MA Experiment ID: 20000090 Result: Down-regulated in Transcription
  misc_feature: MA Experiment ID: 20000111 Result: Up-regulated in Transcription
  misc_feature: MA Experiment 20000111 PARAMETER Experiment Name: At_42deg_Heat_cDNA_P Parameter: Temperature (deg C) Value: 42 vs. 22
  misc_feature: MA Experiment 20000111 PARAMETER Experiment Name: At_42deg_Heat_cDNA_P Parameter: Timepoint (hr) Value: 6
  misc_feature: MA Experiment 20000111 PARAMETER Experiment Name: At_42deg_Heat_cDNA_P Parameter: Tissue Value: Aerial
  misc_feature: MA Experiment ID: 20000211 Result: Up-regulated in Transcription
  misc_feature: MA Experiment 20000211 PARAMETER Experiment Name: At_0.001percent_MeJA__P Parameter: Age (day) Value: 14
  misc_feature: MA Experiment 20000211 PARAMETER Experiment Name: At_0.001percent_MeJA__P Parameter: Organism Value: A. thaliana
  misc_feature: MA Experiment 20000211 PARAMETER Experiment Name: At_0.001percent_MeJA__P Parameter: Plant Line Value: WS
  misc_feature: MA Experiment 20000211 PARAMETER Experiment Name: At_0.001percent_MeJA__P Parameter: Timepoint (hr) Value: 1
  misc_feature: MA Experiment 20000211 PARAMETER Experiment Name: At_0.001percent_MeJA__P Parameter: Tissue Value: Aerial
  misc_feature: MA Experiment 20000211 PARAMETER Experiment Name: At_0.001percent_MeJA__P Parameter: Treatment Value: 0.001percent MeJA vs. No Treatment
  misc_feature: MA Experiment ID: 20000264 Result: Up-regulated in Transcription
  misc_feature: MA Experiment 20000264 PARAMETER Experiment Name: At_Open_Flower_P Parameter: Age (day) Value: 21
  misc_feature: MA Experiment 20000264 PARAMETER Experiment Name: At_Open_Flower_P Parameter: Plant Line Value: WS
  misc_feature: MA Experiment 20000264 PARAMETER Experiment Name: At_Open_Flower_P Parameter: Tissue Value: Open Flower vs. Whole Plant
  misc_feature: MA Experiment ID: 20000265 Result: Up-regulated in Transcription
  misc_feature: MA Experiment 20000265 PARAMETER Experiment Name: At_Open_Flower_P Parameter: Age (day) Value: 21
  misc_feature: MA Experiment 20000265 PARAMETER Experiment Name: At_Open_Flower_P Parameter: Plant Line Value: WS
  misc_feature: MA Experiment 20000265 PARAMETER Experiment Name: At_Open_Flower_P Parameter: Tissue Value: Closed Flower vs. Whole Plant
  misc_feature: MA Experiment ID: 20000286 Result: Up-regulated in Transcription
  misc_feature: MA Experiment 20000286 PARAMETER Experiment Name: At_Open_Flower_P Parameter: Age (day) Value: 21
  misc_feature: MA Experiment 20000286 PARAMETER Experiment Name: At_Open_Flower_P Parameter: Plant Line Value: WS
  misc_feature: MA Experiment 20000286 PARAMETER Experiment Name: At_Open_Flower_P Parameter: Tissue Value: Half Open vs. Whole Plant
  misc_feature: MA Experiment ID: 20000453 Result: Down-regulated in Transcription
  misc_feature: MA Experiment 20000453 PARAMETER Experiment Name: At_100uM_ABA_P Parameter: Age (day) Value: 15
  misc_feature: MA Experiment 20000453 PARAMETER Experiment Name: At_100uM_ABA_P Parameter: Organism Value: A. thaliana
  misc_feature: MA Experiment 20000453 PARAMETER Experiment Name: At_100uM_ABA_P Parameter: Plant Line Value: WS
  misc_feature: MA Experiment 20000453 PARAMETER Experiment Name: At_100uM_ABA_P Parameter: Timepoint (hr) Value: 24
  misc_feature: MA Experiment 20000453 PARAMETER Experiment Name: At_100uM_ABA_P Parameter: Tissue Value: Aerial
  misc_feature: MA Experiment 20000453 PARAMETER Experiment Name: At_100uM_ABA_P Parameter: Treatment Value: 100uM ABA vs. No Treatment
  misc_feature: MA Experiment ID: 20000794 Result: Up-regulated in Transcription
  misc_feature: MA Experiment 20000794 PARAMETER Experiment Name: At_Petals_P Parameter: Age (day) Value: 23-25 days
  misc_feature: MA Experiment 20000794 PARAMETER Experiment Name: At_Petals_P Parameter: Plant Line Value: WS
  misc_feature: MA Experiment 20000794 PARAMETER Experiment Name: At_Petals_P Parameter: Tissue Value: Petals vs. Whole plant
  misc_feature: MA Experiment ID: 20001757 Result: Down-regulated in Transcription
  misc_feature: MA Experiment 20001757 PARAMETER Experiment Name: At_50mM_NH4NO3_L-to-H_P Parameter: Timepoint (hr) Value: 6
  misc_feature: MA Experiment 20001757 PARAMETER Experiment Name: At_50mM_NH4NO3_L-to-H_P Parameter: Tissue Value: Leaf
  misc_feature: MA Experiment 20001757 PARAMETER Experiment Name: At_50mM_NH4NO3_L-to-H_P Parameter: Treatment Value: 50mM NH4NO3 vs 100mM Mannitol
  misc_feature: MA Experiment ID: 20001911 Result: Down-regulated in Transcription
  misc_feature: MA Experiment 20001911 PARAMETER Experiment Name: At_Drought_Reproduction_P Parameter: Age (day) Value: 40
  misc_feature: MA Experiment 20001911 PARAMETER Experiment Name: At_Drought_Reproduction_P Parameter: Organism Value: A. thaliana
  misc_feature: MA Experiment 20001911 PARAMETER Experiment Name: At_Drought_Reproduction_P Parameter: Plant Line Value: WS
  misc_feature: MA Experiment 20001911 PARAMETER Experiment Name: At_Drought_Reproduction_P Parameter: Timepoint (day) Value: 10
  misc_feature: MA Experiment 20001911 PARAMETER Experiment Name: At_Drought_Reproduction_P Parameter: Tissue Value: Flowers
  misc_feature: MA Experiment 20001911 PARAMETER Experiment Name: At_Drought_Reproduction_P Parameter: Treatment Value: Drought vs. No Drought
ttaaccttctgcttcatcaaaaagaaagagacacaaagagagagagagatggaggtaatgcgagttcttcacatgaacaaaggaaacggggaaacaagttatgccaagaactccaccgctcagagcaacataatatctctaggcagaagagtaatggacgaggccttgaagaagttaatgatgagcaattcagagatttcgagcattggaatcgccgacttaggctgctcctccggtccgaacagtctcttgtccatctccaacatagttgacacgatccacaacttgtgtcctgacctcgaccgtccagtccctgagctcagagtctctctcaacgacctccctagcaatgacttcaactacatatgtgcttctttgccagagttttacgaccgggttaataataacaaggagggtttagggttcggtcgtggaggaggagaatcgtgttttgtgtcggccgtcccaggttcgttctacggacgtttgtttcctcgccggagccttcactttgtgcattcttcttctagtttacattggttgtctcaggttccatgtcgtgaggcggagaaggaagacaggacaataacagctgatttagaaaacatggggaaaatatacatatcaaagacaagtcctaagagtgcacataaagcttatgctcttcaattccaaactgatttcttggtttttttgaggtcacgatctgaggagttggtcccgggaggccgaatggttttatcgttccttggtagaagatcactggatcccacaaccgaagagagttgctatcaatgggaactcctagctcaagctcttatgtccatggccaaagagggtatcatcgaggaagagaagatcgatgctttcaacgctccttactatgctgcgagctccgaagagttgaaaatggtgatagagaaagaagggtcattttcgatcgataggcttgagataagtccgattgattgggaaggtgggagtatcagtgaggagagttatgaccttgcaataaggtccaaacccgaagccctagctagtggccgaagagtgtctaataccataagagctgtggtcgagccgatgctagaacctactttcggtgaaaatgtgatggacgagctttttgaaaggtatgcaaagatcgtgggagagtacttctatgtaagctcgccacgatacgctattgttattctttcgctcgttagaaccggttgatcgtgttataacatatgccaatatacatgtctttgggcctacaatgacatgatttggtagttttctaatcaagcatatgtaatataatttgcttcgagaataaaataataaaataaagtgtgatgttacggtagacccttttttttttttcttcatttacggtagacctatagtattaaaacaaatagaatcagctggttcggaccttgaaatgagagagcttggatgcatgtagacgcattagtcgtgaattattcaaatagaactaccttttgggcc

SEQ ID NO: 43248 - protein, 405 aa, Arabidopsis thaliana
  peptide (1)..(405): Ceres Seq. ID no. 12336173
  misc_feature (52)..(404): Pfam Name: SAM dependent carboxyl methyltransferase Pfam Description: SAM dependent carboxyl methyltransferase
  misc_feature (9)..(403): Homolog of NCBI NO: 23957318 NR Description: S-adenosyl-L-methionine:salicylic acid
  misc_feature (20)..(185): Homolog of NCBI NO: 15240823 NR Description: S-adenosyl-L-methionine:carboxyl
  misc_feature (150)..(387): Homolog of NCBI NO: 15240823 NR Description: S-adenosyl-L-methionine:carboxyl
  misc_feature (7)..(185): Homolog of NCBI NO: 15237695 NR Description: S-adenosyl-L-methionine:carboxyl
  misc_feature (148)..(403): Homolog of NCBI NO: 15237695 NR Description: S-adenosyl-L-methionine:carboxyl
  misc_feature (280)..(405): Homolog of NCBI NO: 25518363 NR Description: hypothetical protein F14P1.3 - Arabidopsis
  misc_feature (17)..(183): Homolog of NCBI NO: 25518363 NR Description: hypothetical protein F14P1.3 - Arabidopsis
  misc_feature (17)..(405): Homolog of NCBI NO: 6651395 NR Description: floral nectary-specific protein [Brassica rapa
  misc_feature (17)..(405): Homolog of NCBI NO: 15223601 NR Description: S-adenosyl-L-methionine:jasmonic acid carboxyl
  misc_feature (17)..(405): Homolog of NCBI NO: 13676829 NR Description: S-adenosyl-L-methionine:jasmonic acid carboxyl
LTFCFIKKKETQREREMEVMRVLHMNKGNGETSYAKNSTAQSNIISLGRRVMDEALKKLMMSNSEISSIGIADLGCSSGPNSLLSISNIVDTIHNLCPDLDRPVPELRVSLNDLPSNDFNYICASLPEFYDRVNNNKEGLGFGRGGGESCFVSAVPGSFYGRLFPRRSLHFVHSSSSLHWLSQVPCREAEKEDRTITADLENMGKIYISKTSPKSAHKAYALQFQTDFLVFLRSRSEELVPGGRMVLSFLGRRSLDPTTEESCYQWELLAQALMSMAKEGIIEEEKIDAFNAPYYAASSEELKMVIEKEGSFSIDRLEISPIDWEGGSISEESYDLAIRSKPEALASGRRVSNTIRAVVEPMLEPTFGENVMDELFERYAKIVGEYFYVSSPRYAIVILSLVRTG

SEQ ID NO: 43249 - protein, 389 aa, Arabidopsis thaliana
  peptide (1)..(389): Ceres Seq. ID no. 12336174
  misc_feature (36)..(388): Pfam Name: SAM dependent carboxyl methyltransferase Pfam Description: SAM dependent carboxyl methyltransferase
  misc_feature (1)..(387): Homolog of NCBI NO: 23957318 NR Description: S-adenosyl-L-methionine:salicylic acid
  misc_feature (4)..(169): Homolog of NCBI NO: 15240823 NR Description: S-adenosyl-L-methionine:carboxyl
  misc_feature (134)..(371): Homolog of NCBI NO: 15240823 NR Description: S-adenosyl-L-methionine:carboxyl
  misc_feature (1)..(169): Homolog of NCBI NO: 15237695 NR Description: S-adenosyl-L-methionine:carboxyl
  misc_feature (132)..(387): Homolog of NCBI NO: 15237695 NR Description: S-adenosyl-L-methionine:carboxyl
  misc_feature (264)..(389): Homolog of NCBI NO: 25518363 NR Description: hypothetical protein F14P1.3 - Arabidopsis
  misc_feature (1)..(167): Homolog of NCBI NO: 25518363 NR Description: hypothetical protein F14P1.3 - Arabidopsis
  misc_feature (1)..(389): Homolog of NCBI NO: 6651395 NR Description: floral nectary-specific protein [Brassica rapa
  misc_feature (1)..(389): Homolog of NCBI NO: 15223601 NR Description: S-adenosyl-L-methionine:jasmonic acid carboxyl
  misc_feature (1)..(389): Homolog of NCBI NO: 13676829 NR Description: S-adenosyl-L-methionine:jasmonic acid carboxyl
MEVMRVLHMNKGNGETSYAKNSTAQSNIISLGRRVMDEALKKLMMSNSEISSIGIADLGCSSGPNSLLSISNIVDTIHNLCPDLDRPVPELRVSLNDLPSNDFNYICASLPEFYDRVNNNKEGLGFGRGGGESCFVSAVPGSFYGRLFPRRSLHFVHSSSSLHWLSQVPCREAEKEDRTITADLENMGKIYISKTSPKSAHKAYALQFQTDFLVFLRSRSEELVPGGRMVLSFLGRRSLDPTTEESCYQWELLAQALMSMAKEGIIEEEKIDAFNAPYYAASSEELKMVIEKEGSFSIDRLEISPIDWEGGSISEESYDLAIRSKPEALASGRRVSNTIRAVVEPMLEPTFGENVMDELFERYAKIVGEYFYVSSPRYAIVILSLVRTG

SEQ ID NO: 43250 - protein, 386 aa, Arabidopsis thaliana
  peptide (1)..(386): Ceres Seq. ID no. 12336175
  misc_feature (33)..(385): Pfam Name: SAM dependent carboxyl methyltransferase Pfam Description: SAM dependent carboxyl methyltransferase
  misc_feature (1)..(384): Homolog of NCBI NO: 23957318 NR Description: S-adenosyl-L-methionine:salicylic acid
  misc_feature (1)..(166): Homolog of NCBI NO: 15240823 NR Description: S-adenosyl-L-methionine:carboxyl
  misc_feature (131)..(368): Homolog of NCBI NO: 15240823 NR Description: S-adenosyl-L-methionine:carboxyl
  misc_feature (1)..(166): Homolog of NCBI NO: 15237695 NR Description: S-adenosyl-L-methionine:carboxyl
  misc_feature (129)..(384): Homolog of NCBI NO: 15237695 NR Description: S-adenosyl-L-methionine:carboxyl
  misc_feature (261)..(386): Homolog of NCBI NO: 25518363 NR Description: hypothetical protein F14P1.3 - Arabidopsis
  misc_feature (1)..(164): Homolog of NCBI NO: 25518363 NR Description: hypothetical protein F14P1.3 - Arabidopsis
  misc_feature (1)..(386): Homolog of NCBI NO: 6651395 NR Description: floral nectary-specific protein [Brassica rapa
  misc_feature (1)..(386): Homolog of NCBI NO: 15223601 NR Description: S-adenosyl-L-methionine:jasmonic acid carboxyl
  misc_feature (1)..(386): Homolog of NCBI NO: 13676829 NR Description: S-adenosyl-L-methionine:jasmonic acid carboxyl
MRVLHMNKGNGETSYAKNSTAQSNIISLGRRVMDEALKKLMMSNSEISSIGIADLGCSSGPNSLLSISNIVDTIHNLCPDLDRPVPELRVSLNDLPSNDFNYICASLPEFYDRVNNNKEGLGFGRGGGESCFVSAVPGSFYGRLFPRRSLHFVHSSSSLHWLSQVPCREAEKEDRTITADLENMGKIYISKTSPKSAHKAYALQFQTDFLVFLRSRSEELVPGGRMVLSFLGRRSLDPTTEESCYQWELLAQALMSMAKEGIIEEEKIDAFNAPYYAASSEELKMVIEKEGSFSIDRLEISPIDWEGGSISEESYDLAIRSKPEALASGRRVSNTIRAVVEPMLEPTFGENVMDELFERYAKIVGEYFYVSSPRYAIVILSLVRTG

SEQ ID NO: 43251 - DNA, 1353 bp, Arabidopsis thaliana
  misc_feature (1)..(1353): Ceres Seq. ID no. 13645962
  misc_feature: MA Experiment ID: 20000173 Result: Down-regulated in Transcription
  misc_feature: MA Experiment 20000173 PARAMETER Experiment Name: At_42deg_Heat_P Parameter: Age (day) Value: 14
  misc_feature: MA Experiment 20000173 PARAMETER Experiment Name: At_42deg_Heat_P Parameter: Organism Value: A. thaliana
  misc_feature: MA Experiment 20000173 PARAMETER Experiment Name: At_42deg_Heat_P Parameter: Plant Line Value: WS
  misc_feature: MA Experiment 20000173 PARAMETER Experiment Name: At_42deg_Heat_P Parameter: Temperature (deg C) Value: 42 vs. 22
  misc_feature: MA Experiment 20000173 PARAMETER Experiment Name: At_42deg_Heat_P Parameter: Timepoint (hr) Value: 6
  misc_feature: MA Experiment 20000173 PARAMETER Experiment Name: At_42deg_Heat_P Parameter: Tissue Value: Aerial
  misc_feature: MA Experiment ID: 20000179 Result: Down-regulated in Transcription
  misc_feature: MA Experiment 20000179 PARAMETER Experiment Name: At_Germinating_Seeds_P Parameter: Age (hr) Value: 6 vs. 0
  misc_feature: MA Experiment 20000179 PARAMETER Experiment Name: At_Germinating_Seeds_P Parameter: Tissue Value: Germinating Seeds
  misc_feature: MA Experiment ID: 20000182 Result: Up-regulated in Transcription
  misc_feature: MA Experiment 20000182 PARAMETER Experiment Name: At_2mM_SA_P Parameter: Age (day) Value: 14
  misc_feature: MA Experiment 20000182 PARAMETER Experiment Name: At_2mM_SA_P Parameter: Organism Value: A. thaliana
  misc_feature: MA Experiment 20000182 PARAMETER Experiment Name: At_2mM_SA_P Parameter: Plant Line Value: WS
  misc_feature: MA Experiment 20000182 PARAMETER Experiment Name: At_2mM_SA_P Parameter: Timepoint (hr) Value: 6
  misc_feature: MA Experiment 20000182 PARAMETER Experiment Name: At_2mM_SA_P Parameter: Tissue Value: Aerial
  misc_feature: MA Experiment 20000182 PARAMETER Experiment Name: At_2mM_SA_P Parameter: Treatment Value: 2mM SA vs. No Treatment
  misc_feature: MA Experiment ID: 20000184 Result: Down-regulated in Transcription
  misc_feature: MA Experiment 20000184 PARAMETER Experiment Name: At_Shoots__P Parameter: Age (day) Value: 7
  misc_feature: MA Experiment 20000184 PARAMETER Experiment Name: At_Shoots__P Parameter: Tissue Value: Shoots vs. Whole Plant
  misc_feature: MA Experiment ID: 20000185 Result: Up-regulated in Transcription
  misc_feature: MA Experiment 20000185 PARAMETER Experiment Name: At_Roots__P Parameter: Age (day) Value: 7 vs. 21
  misc_feature: MA Experiment 20000185 PARAMETER Experiment Name: At_Roots__P Parameter: Organism Value: A. thaliana
  misc_feature: MA Experiment 20000185 PARAMETER Experiment Name: At_Roots__P Parameter: Tissue Value: Roots vs. Whole Plant
  misc_feature: MA Experiment ID: 20000234 Result: Down-regulated in Transcription
  misc_feature: MA Experiment 20000234 PARAMETER Experiment Name: At_Siliques_P Parameter: Age (day) Value: 21
  misc_feature: MA Experiment 20000234 PARAMETER Experiment Name: At_Siliques_P Parameter: Organism Value: A. thaliana
  misc_feature: MA Experiment 20000234 PARAMETER Experiment Name: At_Siliques_P Parameter: Plant Line Value: WS
  misc_feature: MA Experiment 20000234 PARAMETER Experiment Name: At_Siliques_P Parameter: Tissue Value: Less Than 5mm Siliques vs. Whole Plant
  misc_feature: MA Experiment ID: 20000235 Result: Down-regulated in Transcription
  misc_feature: MA Experiment 20000235 PARAMETER Experiment Name: At_Siliques_P Parameter: Age (day) Value: 21
  misc_feature: MA Experiment 20000235 PARAMETER Experiment Name: At_Siliques_P Parameter: Organism Value: A. thaliana
  misc_feature: MA Experiment 20000235 PARAMETER Experiment Name: At_Siliques_P Parameter: Plant Line Value: WS
  misc_feature: MA Experiment 20000235 PARAMETER Experiment Name: At_Siliques_P Parameter: Tissue Value: 5-10mm Siliques vs. Whole Plant
  misc_feature: MA Experiment ID: 20000264 Result: Down-regulated in Transcription
  misc_feature: MA Experiment 20000264 PARAMETER Experiment Name: At_Open_Flower_P Parameter: Age (day) Value: 21
  misc_feature: MA Experiment 20000264 PARAMETER Experiment Name: At_Open_Flower_P Parameter: Plant Line Value: WS
  misc_feature: MA Experiment 20000264 PARAMETER Experiment Name: At_Open_Flower_P Parameter: Tissue Value: Open Flower vs. Whole Plant
  misc_feature: MA Experiment ID: 20000286 Result: Down-regulated in Transcription
  misc_feature: MA Experiment 20000286 PARAMETER Experiment Name: At_Open_Flower_P Parameter: Age (day) Value: 21
  misc_feature: MA Experiment 20000286 PARAMETER Experiment Name: At_Open_Flower_P Parameter: Plant Line Value: WS
  misc_feature: MA Experiment 20000286 PARAMETER Experiment Name: At_Open_Flower_P Parameter: Tissue Value: Half Open vs. Whole Plant
  misc_feature: MA Experiment ID: 20000438 Result: Down-regulated in Transcription
  misc_feature: MA Experiment 20000438 PARAMETER Experiment Name: At_Shoots__P Parameter: Age (day) Value: 14
  misc_feature: MA Experiment 20000438 PARAMETER Experiment Name: At_Shoots__P Parameter: Tissue Value: Shoots vs. Whole Plant
  misc_feature: MA Experiment ID: 20000445 Result: Up-regulated in Transcription
  misc_feature: MA Experiment 20000445 PARAMETER Experiment Name: At_100uM_NAA__P Parameter: Age (day) Value: 14
  misc_feature: MA Experiment 20000445 PARAMETER Experiment Name: At_100uM_NAA__P Parameter: Organism Value: A. thaliana
  misc_feature: MA Experiment 20000445 PARAMETER Experiment Name: At_100uM_NAA__P Parameter: Plant Line Value: WS
  misc_feature: MA Experiment 20000445 PARAMETER Experiment Name: At_100uM_NAA__P Parameter: Timepoint (hr) Value: 6
  misc_feature: MA Experiment 20000445 PARAMETER Experiment Name: At_100uM_NAA__P Parameter: Tissue Value: Aerial
  misc_feature: MA Experiment 20000445 PARAMETER Experiment Name: At_100uM_NAA__P Parameter: Treatment Value: 100uM NAA vs. No Treatment
  misc_feature: MA Experiment ID: 20000453 Result: Up-regulated in Transcription
  misc_feature: MA Experiment 20000453 PARAMETER Experiment Name: At_100uM_ABA_P Parameter: Age (day) Value: 15
  misc_feature: MA Experiment 20000453 PARAMETER Experiment Name: At_100uM_ABA_P Parameter: Organism Value: A. thaliana
  misc_feature: MA Experiment 20000453 PARAMETER Experiment Name: At_100uM_ABA_P Parameter: Plant Line Value: WS
  misc_feature: MA Experiment 20000453 PARAMETER Experiment Name: At_100uM_ABA_P Parameter: Timepoint (hr) Value: 24
  misc_feature: MA Experiment 20000453 PARAMETER Experiment Name: At_100uM_ABA_P Parameter: Tissue Value: Aerial
  misc_feature: MA Experiment 20000453 PARAMETER Experiment Name: At_100uM_ABA_P Parameter: Treatment Value: 100uM ABA vs. No Treatment
  misc_feature: MA Experiment ID: 20000527 Result: Down-regulated in Transcription
  misc_feature: MA Experiment 20000527 PARAMETER Experiment Name: At_10percent_PEG_P Parameter: Age (day) Value: 20
  misc_feature: MA Experiment 20000527 PARAMETER Experiment Name: At_10percent_PEG_P Parameter: Organism Value: A. thaliana
  misc_feature: MA Experiment 20000527 PARAMETER Experiment Name: At_10percent_PEG_P Parameter: Plant Line Value: WS
  misc_feature: MA Experiment 20000527 PARAMETER Experiment Name: At_10percent_PEG_P Parameter: Timepoint (day) Value: 20
  misc_feature: MA Experiment 20000527 PARAMETER Experiment Name: At_10percent_PEG_P Parameter: Tissue Value: Whole Plant
  misc_feature: MA Experiment 20000527 PARAMETER Experiment Name: At_10percent_PEG_P Parameter: Treatment Value: 10percent PEG vs. No Treatment
  misc_feature: MA Experiment ID: 20000576 Result: Down-regulated in Transcription
  misc_feature: MA Experiment 20000576 PARAMETER Experiment Name: At_100uM_ABA_Mutants__P Parameter: Organism Value: A. thaliana
  misc_feature: MA Experiment 20000576 PARAMETER Experiment Name: At_100uM_ABA_Mutants__P Parameter: Plant Line Value: CS23
  misc_feature: MA Experiment 20000576 PARAMETER Experiment Name: At_100uM_ABA_Mutants__P Parameter: Timepoint (hr) Value: 6
  misc_feature: MA Experiment 20000576 PARAMETER Experiment Name: At_100uM_ABA_Mutants__P Parameter: Tissue Value: Whole Plant
  misc_feature: MA Experiment 20000576 PARAMETER Experiment Name: At_100uM_ABA_Mutants__P Parameter: Treatment Value: 1uM ABA vs. No Treatment
  misc_feature: MA Experiment ID: 20000709 Result: Up-regulated in Transcription
  misc_feature: MA Experiment 20000709 PARAMETER Experiment Name: At_15mM_NH4NO3_L-to-H_P Parameter: Age (hr) Value: 14
  misc_feature: MA Experiment 20000709 PARAMETER Experiment Name: At_15mM_NH4NO3_L-to-H_P Parameter: Organism Value: A. thaliana
  misc_feature: MA Experiment 20000709 PARAMETER Experiment Name: At_15mM_NH4NO3_L-to-H_P Parameter: Plant Line Value: WS
  misc_feature: MA Experiment 20000709 PARAMETER Experiment Name: At_15mM_NH4NO3_L-to-H_P Parameter: Timepoint (hr) Value: 4
  misc_feature: MA Experiment 20000709 PARAMETER Experiment Name: At_15mM_NH4NO3_L-to-H_P Parameter: Tissue Value: Aerial
  misc_feature: MA Experiment 20000709 PARAMETER Experiment Name: At_15mM_NH4NO3_L-to-H_P Parameter: Treatment Value: 15mM NH4NO3 vs. 30mM Mannitol
  misc_feature: MA Experiment ID: 20000794 Result: Down-regulated in Transcription
  misc_feature: MA Experiment 20000794 PARAMETER Experiment Name: At_Petals_P Parameter: Age (day) Value: 23-25 days
  misc_feature: MA Experiment 20000794 PARAMETER Experiment Name: At_Petals_P Parameter: Plant Line Value: WS
  misc_feature: MA Experiment 20000794 PARAMETER Experiment Name: At_Petals_P Parameter: Tissue Value: Petals vs. Whole plant
  misc_feature: MA Experiment ID: 20001248 Result: Up-regulated in Transcription
  misc_feature: MA Experiment 20001248 PARAMETER Experiment Name: At_Far-red-induction_P Parameter: Age (day) Value: 7
  misc_feature: MA Experiment 20001248 PARAMETER Experiment Name: At_Far-red-induction_P Parameter: Light Value: Far-red vs. White
  misc_feature: MA Experiment 20001248 PARAMETER Experiment Name: At_Far-red-induction_P Parameter: Organism Value: A. thaliana
  misc_feature: MA Experiment 20001248 PARAMETER Experiment Name: At_Far-red-induction_P Parameter: Plant Line Value: Columbia
  misc_feature: MA Experiment 20001248 PARAMETER Experiment Name: At_Far-red-induction_P Parameter: Timepoint (hr) Value: 4
  misc_feature: MA Experiment 20001248 PARAMETER Experiment Name: At_Far-red-induction_P Parameter: Tissue Value: Whole Plant
  misc_feature: MA Experiment ID: 20001451 Result: Down-regulated in Transcription
  misc_feature: MA Experiment 20001451 PARAMETER Experiment Name: At_Far-red-induction_P Parameter: Age (day) Value: 7
  misc_feature: MA Experiment 20001451 PARAMETER Experiment Name: At_Far-red-induction_P Parameter: Light Value: Far-red vs. White
  misc_feature: MA Experiment 20001451 PARAMETER Experiment Name: At_Far-red-induction_P Parameter: Organism Value: A. thaliana
  misc_feature: MA Experiment 20001451 PARAMETER Experiment Name: At_Far-red-induction_P Parameter: Plant Line Value: Columbia
  misc_feature: MA Experiment 20001451 PARAMETER Experiment Name: At_Far-red-induction_P Parameter: Timepoint (hr) Value: 24
  misc_feature: MA Experiment 20001451 PARAMETER Experiment Name: At_Far-red-induction_P Parameter: Tissue Value: Whole Plant
  misc_feature: MA Experiment ID: 20001554 Result: Down-regulated in Transcription
  misc_feature: MA Experiment 20001554 PARAMETER Experiment Name: At_Drought_Soil_Dry_P Parameter: Age (day) Value: 21
  misc_feature: MA Experiment 20001554 PARAMETER Experiment Name: At_Drought_Soil_Dry_P Parameter: Organism Value: A. thaliana
  misc_feature: MA Experiment 20001554 PARAMETER Experiment Name: At_Drought_Soil_Dry_P Parameter: Plant Line Value: WS
  misc_feature: MA Experiment 20001554 PARAMETER Experiment Name: At_Drought_Soil_Dry_P Parameter: Post Timepoint (hr) Value: None
  misc_feature: MA Experiment 20001554 PARAMETER Experiment Name: At_Drought_Soil_Dry_P Parameter: Post-Treatment Value: None
  misc_feature: MA Experiment 20001554 PARAMETER Experiment Name: At_Drought_Soil_Dry_P Parameter: Timepoint (day) Value: 7
  misc_feature: MA Experiment 20001554 PARAMETER Experiment Name: At_Drought_Soil_Dry_P Parameter: Treatment Value: Drought vs. No Drought
  misc_feature: MA Experiment ID: 20001557 Result: Up-regulated in Transcription
  misc_feature: MA Experiment 20001557 PARAMETER Experiment Name: At_Drought_Soil_Dry_P Parameter: Age (day) Value: 27
  misc_feature: MA Experiment 20001557 PARAMETER Experiment Name: At_Drought_Soil_Dry_P Parameter: Organism Value: A. thaliana
  misc_feature: MA Experiment 20001557 PARAMETER Experiment Name: At_Drought_Soil_Dry_P Parameter: Plant Line Value: WS
  misc_feature: MA Experiment 20001557 PARAMETER Experiment Name: At_Drought_Soil_Dry_P Parameter: Post Timepoint (hr) Value: 3
  misc_feature: MA Experiment 20001557 PARAMETER Experiment Name: At_Drought_Soil_Dry_P Parameter: Post-Treatment Value: Re-Water vs. No Drought
  misc_feature: MA Experiment 20001557 PARAMETER Experiment Name: At_Drought_Soil_Dry_P Parameter: Timepoint (day) Value: 13
  misc_feature: MA Experiment 20001557 PARAMETER Experiment Name: At_Drought_Soil_Dry_P Parameter: Treatment Value: Drought vs. No Drought
agacaagtcaagagagagagatagttctgacttctgacagagactcatggcggaagcttgcggagtgagaaggattaagctaggaagccaaggccttgaggtatcggcgcaaggtcttggttgcatgggtctctctgctttctacggtactcccaagccggaaaccgaagctatcgctctcatccaccacgccattcactccggcgtcactttccttgacacctccgatatctacggtcctgagaccaacgagcttctcctcagcaaggctctcaaggatggggtgagagaaaaagtggaacttgcgaccaaatatggaatcaggtatgcagaggggaaagtagagtttaagggagatcctgcttatgtaagagctgcgtgtgaggctagtttaatgcgagtagatgttgcctgcattgatctctattatcagcatcgaattgatactcgtgtccctatcgaaatcactattggagagctgaagaagctagttgaagaaggtaaaataaagtatatcggtttgtctgaagcttcagcttcaactatcagaagagcacatgctgttcacccgataaccgctctgcaaatagaatggtccttatggtcgagagacgtggaagaagatataattccaacctgcagggaacttgggattggaattgttgcttacagtcctctgggacgaggtttctttgcttcaggacccaagcttgttgagaacctagacaataatgacgtcagaaaggcaaactctaccaagattccaacaggaaaacttagaccacaacaagattctctttgagaaggtttctgcaatgtctgagaagaaaggatgcactcctgcacaactagcccttgcatgggttcatcaccagggagatgatgtttgccccatcccaggaaccactaagattgaaaacctcaaccagaacattggagctttatcagtgaaacttactcccgaagagatgtctgagctcgaatcccttgcacaaccaggttttgtgaaaggagaaagatccattagcatcctgaccacgttcaaaaactctgagactccaccattgtcttcttggaaagccgcttaaaatcgtctgagtttctctgattgttgtggggttcatgtcatttaagtggtctaagttatgtcagctagatcaaggtaataaaagtgctgtgtcttcgagagtggattatggtaggttcattcccagggaaagccaaaactatcaagggttgatgcctttaagagtaaataatgtatagagttccccaagtgagaacttcaatttacatttcatacattttgaccaaactctataaagaaagttatgtttagactttttttttgcc

SEQ ID NO: 43252 - protein, 251 aa, Arabidopsis thaliana
  peptide (1)..(251): Ceres Seq. ID no. 13645963
  misc_feature (3)..(231): Homolog of NCBI NO: 15219805 NR Description: aldo/keto reductase family [Arabidopsis thaliana]
  misc_feature (1)..(233): Homolog of NCBI NO: 15220214 NR Description: aldo/keto reductase family [Arabidopsis thaliana]
  misc_feature (10)..(237): Homolog of NCBI NO: 25316214 NR Description: hypothetical protein F8A5.20 [imported] -
  misc_feature (1)..(233): Homolog of NCBI NO: 30102704 NR Description: At1g60680 [Arabidopsis thaliana]
  misc_feature (1)..(237): Homolog of NCBI NO: 30696451 NR Description: aldo/keto reductase family [Arabidopsis thaliana]
  misc_feature (1)..(234): Homolog of NCBI NO: 15219786 NR Description: aldo/keto reductase family [Arabidopsis thaliana]
  misc_feature (1)..(234): Homolog of NCBI NO: 6562980 NR Description: auxin-induced atb2 [Arabidopsis thaliana]
  misc_feature (1)..(234): Homolog of NCBI NO: 18406861 NR Description: aldo/keto reductase family [Arabidopsis thaliana]
  misc_feature (1)..(230): Homolog of NCBI NO: 25316216 NR Description: hypothetical protein F8A5.24 [imported] -
  misc_feature (1)..(233): Homolog of NCBI NO: 30696459 NR Description: aldo/keto reductase family [Arabidopsis thaliana]
MAEACGVRRIKLGSQGLEVSAQGLGCMGLSAFYGTPKPETEAIALIHHAIHSGVTFLDTSDIYGPETNELLLSKALKDGVREKVELATKYGIRYAEGKVEFKGDPAYVRAACEASLMRVDVACIDLYYQHRIDTRVPIEITIGELKKLVEEGKIKYIGLSEASASTIRRAHAVHPITALQIEWSLWSRDVEEDIIPTCRELGIGIVAYSPLGRGFFASGPKLVENLDNNDVRKANSTKIPTGKLRPQQDSL

SEQ ID NO: 43253 - protein, 225 aa, Arabidopsis thaliana
  peptide (1)..(225): Ceres Seq. ID no. 13645964
  misc_feature (1)..(205): Homolog of NCBI NO: 15219805 NR Description: aldo/keto reductase family [Arabidopsis thaliana]
  misc_feature (1)..(207): Homolog of NCBI NO: 15220214 NR Description: aldo/keto reductase family [Arabidopsis thaliana]
  misc_feature (1)..(211): Homolog of NCBI NO: 25316214 NR Description: hypothetical protein F8A5.20 [imported] -
  misc_feature (1)..(207): Homolog of NCBI NO: 30102704 NR Description: At1g60680 [Arabidopsis thaliana]
  misc_feature (1)..(211): Homolog of NCBI NO: 30696451 NR Description: aldo/keto reductase family [Arabidopsis thaliana]
  misc_feature (1)..(208): Homolog of NCBI NO: 15219786 NR Description: aldo/keto reductase family [Arabidopsis thaliana]
  misc_feature (1)..(208): Homolog of NCBI NO: 6562980 NR Description: auxin-induced atb2 [Arabidopsis thaliana]
  misc_feature (1)..(208): Homolog of NCBI NO: 18406861 NR Description: aldo/keto reductase family [Arabidopsis thaliana]
  misc_feature (1)..(204): Homolog of NCBI NO: 25316216 NR Description: hypothetical protein F8A5.24 [imported] -
  misc_feature (1)..(207): Homolog of NCBI NO: 30696459 NR Description: aldo/keto reductase family [Arabidopsis thaliana]
MGLSAFYGTPKPETEAIALIHHAIHSGVTFLDTSDIYGPETNELLLSKALKDGVREKVELATKYGIRYAEGKVEFKGDPAYVRAACEASLMRVDVACIDLYYQHRIDTRVPIEITIGELKKLVEEGKIKYIGLSEASASTIRRAHAVHPITALQIEWSLWSRDVEEDIIPTCRELGIGIVAYSPLGRGFFASGPKLVENLDNNDVRKANSTKIPTGKLRPQQDSL

SEQ ID NO: 43254 - protein, 135 aa, Arabidopsis thaliana
  peptide (1)..(135): Ceres Seq. ID no. 13645965
  misc_feature (1)..(115): Homolog of NCBI NO: 15219805 NR Description: aldo/keto reductase family [Arabidopsis thaliana]
  misc_feature (1)..(117): Homolog of NCBI NO: 15220214 NR Description: aldo/keto reductase family [Arabidopsis thaliana]
  misc_feature (1)..(121): Homolog of NCBI NO: 25316214 NR Description: hypothetical protein F8A5.20 [imported] -
  misc_feature (1)..(117): Homolog of NCBI NO: 30102704 NR Description: At1g60680 [Arabidopsis thaliana]
  misc_feature (1)..(121): Homolog of NCBI NO: 30696451 NR Description: aldo/keto reductase family [Arabidopsis thaliana]
  misc_feature (1)..(118): Homolog of NCBI NO: 15219786 NR Description: aldo/keto reductase family [Arabidopsis thaliana]
  misc_feature (1)..(118): Homolog of NCBI NO: 6562980 NR Description: auxin-induced atb2 [Arabidopsis thaliana]
  misc_feature (1)..(118): Homolog of NCBI NO: 18406861 NR Description: aldo/keto reductase family [Arabidopsis thaliana]
  misc_feature (1)..(114): Homolog of NCBI NO: 25316216 NR Description: hypothetical protein F8A5.24 [imported] -
  misc_feature (1)..(117): Homolog of NCBI NO: 30696459 NR Description: aldo/keto reductase family [Arabidopsis thaliana]
MRVDVACIDLYYQHRIDTRVPIEITIGELKKLVEEGKIKYIGLSEASASTIRRAHAVHPITALQIEWSLWSRDVEEDIIPTCRELGIGIVAYSPLGRGFFASGPKLVENLDNNDVRKANSTKIPTGKLRPQQDSL

SEQ ID NO: 43255 - DNA, 1363 bp, Arabidopsis thaliana
  misc_feature (1)..(1363): Ceres Seq. ID no. 12324754
  misc_feature: MA Experiment ID: 108572 Result: Down-regulated in Transcription
  misc_feature: MA Experiment 108572 PARAMETER Experiment Name: At_Drought_cDNA_P Parameter: Timepoint (hr) Value: 1
  misc_feature: MA Experiment 108572 PARAMETER Experiment Name: At_Drought_cDNA_P Parameter: Tissue Value: Aerial
  misc_feature: MA Experiment 108572 PARAMETER Experiment Name: At_Drought_cDNA_P Parameter: Treatment Value: Drought vs. No Drought
  misc_feature: MA Experiment ID: 108585 Result: Down-regulated in Transcription
  misc_feature: MA Experiment 108585 PARAMETER Experiment Name: At_5mM_NaNP_cDNA_P Parameter: Timepoint (hr) Value: 6
  misc_feature: MA Experiment 108585 PARAMETER Experiment Name: At_5mM_NaNP_cDNA_P Parameter: Tissue Value: Aerial
  misc_feature: MA Experiment 108585 PARAMETER Experiment Name: At_5mM_NaNP_cDNA_P Parameter: Treatment Value: null
  misc_feature: MA Experiment ID: 108595 Result: Down-regulated in Transcription
  misc_feature: MA Experiment 108595 PARAMETER Experiment Name: At_Ler-pi_Ovule_cDNA_P Parameter: Plant Line Value: null
  misc_feature: MA Experiment ID: 108668 Result: Down-regulated in Transcription
  misc_feature: MA Experiment 108668 PARAMETER Experiment Name: At_2mM_SA_cDNA_P Parameter: Plant Line Value: WS
  misc_feature: MA Experiment 108668 PARAMETER Experiment Name: At_2mM_SA_cDNA_P Parameter: Timepoint (hr) Value: 6
  misc_feature: MA Experiment 108668 PARAMETER Experiment Name: At_2mM_SA_cDNA_P Parameter: Treatment Value: 2mM SA vs. No Treatment
  misc_feature: MA Experiment ID: 20000069 Result: Down-regulated in Transcription
  misc_feature: MA Experiment 20000069 PARAMETER Experiment Name: At_100uM_ABA_Mutants_cDNA_P Parameter: Plant Line Value: CS23
  misc_feature: MA Experiment 20000069 PARAMETER Experiment Name: At_100uM_ABA_Mutants_cDNA_P Parameter: Timepoint (hr) Value: 6
  misc_feature: MA Experiment 20000069 PARAMETER Experiment Name: At_100uM_ABA_Mutants_cDNA_P Parameter: Tissue Value: Aerial
  misc_feature: MA Experiment 20000069 PARAMETER Experiment Name: At_100uM_ABA_Mutants_cDNA_P Parameter: Treatment Value: 100uM ABA vs. No Treatment
  misc_feature: MA Experiment ID: 20000070 Result: Down-regulated in Transcription
  misc_feature: MA Experiment 20000070 PARAMETER Experiment Name: At_100uM_ABA_Mutants_cDNA_P Parameter: Plant Line Value: CS24
  misc_feature: MA Experiment 20000070 PARAMETER Experiment Name: At_100uM_ABA_Mutants_cDNA_P Parameter: Timepoint (hr) Value: 6
  misc_feature: MA Experiment 20000070 PARAMETER Experiment Name: At_100uM_ABA_Mutants_cDNA_P Parameter: Tissue Value: Aerial
  misc_feature: MA Experiment 20000070 PARAMETER Experiment Name: At_100uM_ABA_Mutants_cDNA_P Parameter: Treatment Value: 100uM ABA vs. No Treatment
  misc_feature: MA Experiment ID: 20000071 Result: Down-regulated in Transcription
  misc_feature: MA Experiment 20000071 PARAMETER Experiment Name: At_100uM_ABA_Mutants_cDNA_P Parameter: Plant Line Value: CS8104
  misc_feature: MA Experiment 20000071 PARAMETER Experiment Name: At_100uM_ABA_Mutants_cDNA_P Parameter: Timepoint (hr) Value: 6
  misc_feature: MA Experiment 20000071 PARAMETER Experiment Name: At_100uM_ABA_Mutants_cDNA_P Parameter: Tissue Value: Aerial
  misc_feature: MA Experiment 20000071 PARAMETER Experiment Name: At_100uM_ABA_Mutants_cDNA_P Parameter: Treatment Value: 100uM ABA vs. No Treatment
  misc_feature: MA Experiment ID: 20000072 Result: Down-regulated in Transcription
  misc_feature: MA Experiment 20000072 PARAMETER Experiment Name: At_100uM_ABA_Mutants_cDNA_P Parameter: Plant Line Value: CS8105
  misc_feature: MA Experiment 20000072 PARAMETER Experiment Name: At_100uM_ABA_Mutants_cDNA_P Parameter: Timepoint (hr) Value: 6
  misc_feature: MA Experiment 20000072 PARAMETER Experiment Name: At_100uM_ABA_Mutants_cDNA_P Parameter: Tissue Value: Aerial
  misc_feature: MA Experiment 20000072 PARAMETER Experiment Name: At_100uM_ABA_Mutants_cDNA_P Parameter: Treatment Value: 100uM ABA vs. No Treatment
  misc_feature: MA Experiment ID: 20000086 Result: Down-regulated in Transcription
  misc_feature: MA Experiment 20000086 PARAMETER Experiment Name: At_100uM_ABA_Mutants_cDNA_P Parameter: Plant Line Value: CS22
  misc_feature: MA Experiment 20000086 PARAMETER Experiment Name: At_100uM_ABA_Mutants_cDNA_P Parameter: Timepoint (hr) Value: 6
  misc_feature: MA Experiment 20000086 PARAMETER Experiment Name: At_100uM_ABA_Mutants_cDNA_P Parameter: Tissue Value: Aerial
  misc_feature: MA Experiment 20000086 PARAMETER Experiment Name: At_100uM_ABA_Mutants_cDNA_P Parameter: Treatment Value: 100uM ABA vs. No Treatment
  misc_feature: MA Experiment ID: 20000087 Result: Down-regulated in Transcription
  misc_feature: MA Experiment 20000087 PARAMETER Experiment Name: At_100uM_ABA_Mutants_cDNA_P Parameter: Plant Line Value: WS
  misc_feature: MA Experiment 20000087 PARAMETER Experiment Name: At_100uM_ABA_Mutants_cDNA_P Parameter: Timepoint (hr) Value: 6
  misc_feature: MA Experiment 20000087 PARAMETER Experiment Name: At_100uM_ABA_Mutants_cDNA_P Parameter: Tissue Value: Aerial
  misc_feature: MA Experiment 20000087 PARAMETER Experiment Name: At_100uM_ABA_Mutants_cDNA_P Parameter: Treatment Value: 100uM ABA vs. No Treatment
  misc_feature: MA Experiment ID: 20000088 Result: Down-regulated in Transcription
  misc_feature: MA Experiment 20000088 PARAMETER Experiment Name: At_100uM_ABA_Mutants_cDNA_P Parameter: Plant Line Value: Landsberg
  misc_feature: MA Experiment 20000088 PARAMETER Experiment Name: At_100uM_ABA_Mutants_cDNA_P Parameter: Timepoint (hr) Value: 6
  misc_feature: MA Experiment 20000088 PARAMETER Experiment Name: At_100uM_ABA_Mutants_cDNA_P Parameter: Tissue Value: Aerial
  misc_feature: MA Experiment 20000088 PARAMETER Experiment Name: At_100uM_ABA_Mutants_cDNA_P Parameter: Treatment Value: 100uM ABA vs. No Treatment
  misc_feature: MA Experiment ID: 20000089 Result: Down-regulated in Transcription
  misc_feature: MA Experiment ID: 20000090 Result: Down-regulated in Transcription
  misc_feature: MA Experiment ID: 20000117 Result: Down-regulated in Transcription
  misc_feature: MA Experiment 20000117 PARAMETER Experiment Name: At_100uM_ABA_Mutants_cDNA_P Parameter: Plant Line Value: Columbia
  misc_feature: MA Experiment 20000117 PARAMETER Experiment Name: At_100uM_ABA_Mutants_cDNA_P Parameter: Timepoint (hr) Value: 6
  misc_feature: MA Experiment 20000117 PARAMETER Experiment Name: At_100uM_ABA_Mutants_cDNA_P Parameter: Tissue Value: Aerial
  misc_feature: MA Experiment 20000117 PARAMETER Experiment Name: At_100uM_ABA_Mutants_cDNA_P Parameter: Treatment Value: 100uM ABA vs. No Treatment
  misc_feature: MA Experiment ID: 20000182 Result: Down-regulated in Transcription
  misc_feature: MA Experiment 20000182 PARAMETER Experiment Name: At_2mM_SA_P Parameter: Age (day) Value: 14
  misc_feature: MA Experiment 20000182 PARAMETER Experiment Name: At_2mM_SA_P Parameter: Organism Value: A. thaliana
  misc_feature: MA Experiment 20000182 PARAMETER Experiment Name: At_2mM_SA_P Parameter: Plant Line Value: WS
  misc_feature: MA Experiment 20000182 PARAMETER Experiment Name: At_2mM_SA_P Parameter: Timepoint (hr) Value: 6
  misc_feature: MA Experiment 20000182 PARAMETER Experiment Name: At_2mM_SA_P Parameter: Tissue Value: Aerial
  misc_feature: MA Experiment 20000182 PARAMETER Experiment Name: At_2mM_SA_P Parameter: Treatment Value: 2mM SA vs. No Treatment
  misc_feature: MA Experiment ID: 20000437 Result: Down-regulated in Transcription
  misc_feature: MA Experiment 20000437 PARAMETER Experiment Name: At_Drought_P Parameter: Age (day) Value: 8
  misc_feature: MA Experiment 20000437 PARAMETER Experiment Name: At_Drought_P Parameter: Organism Value: A. thaliana
  misc_feature: MA Experiment 20000437 PARAMETER Experiment Name: At_Drought_P Parameter: Plant Line Value: WS
  misc_feature: MA Experiment 20000437 PARAMETER Experiment Name: At_Drought_P Parameter: Timepoint (hr) Value: 24
  misc_feature: MA Experiment 20000437 PARAMETER Experiment Name: At_Drought_P Parameter: Tissue Value: Whole Plant
  misc_feature: MA Experiment 20000437 PARAMETER Experiment Name: At_Drought_P Parameter: Treatment Value: Drought vs. No Drought
  misc_feature: MA Experiment ID: 20000573 Result: Down-regulated in Transcription
  misc_feature: MA Experiment 20000573 PARAMETER Experiment Name: At_100uM_ABA_Mutants__P Parameter: Organism Value: A. thaliana
  misc_feature: MA Experiment 20000573 PARAMETER Experiment Name: At_100uM_ABA_Mutants__P Parameter: Plant Line Value: CS22 vs. Ler wt
  misc_feature: MA Experiment 20000573 PARAMETER Experiment Name: At_100uM_ABA_Mutants__P Parameter: Timepoint (hr) Value: N/A
  misc_feature: MA Experiment 20000573 PARAMETER Experiment Name: At_100uM_ABA_Mutants__P Parameter: Tissue Value: Whole Plant
  misc_feature: MA Experiment 20000573 PARAMETER Experiment Name: At_100uM_ABA_Mutants__P Parameter: Treatment Value: None
  misc_feature: MA Experiment ID: 20000574 Result: Down-regulated in Transcription
  misc_feature: MA Experiment 20000574 PARAMETER Experiment Name: At_100uM_ABA_Mutants__P Parameter: Organism Value: A. thaliana
  misc_feature: MA Experiment 20000574 PARAMETER Experiment Name: At_100uM_ABA_Mutants__P Parameter: Plant Line Value: CS23 vs. Ler wt
  misc_feature: MA Experiment 20000574 PARAMETER Experiment Name: At_100uM_ABA_Mutants__P Parameter: Timepoint (hr) Value: N/A
  misc_feature: MA Experiment 20000574 PARAMETER Experiment Name: At_100uM_ABA_Mutants__P Parameter: Tissue Value: Whole Plant
  misc_feature: MA Experiment 20000574 PARAMETER Experiment Name: At_100uM_ABA_Mutants__P Parameter: Treatment Value: None
  misc_feature: MA Experiment ID: 20001248 Result: Down-regulated in Transcription
  misc_feature: MA Experiment 20001248 PARAMETER Experiment Name: At_Far-red-induction_P Parameter: Age (day) Value: 7
  misc_feature: MA Experiment 20001248 PARAMETER Experiment Name: At_Far-red-induction_P Parameter: Light Value: Far-red vs. White
  misc_feature: MA Experiment 20001248 PARAMETER Experiment Name: At_Far-red-induction_P Parameter: Organism Value: A. thaliana
  misc_feature: MA Experiment 20001248 PARAMETER Experiment Name: At_Far-red-induction_P Parameter: Plant Line Value: Columbia
  misc_feature: MA Experiment 20001248 PARAMETER Experiment Name: At_Far-red-induction_P Parameter: Timepoint (hr) Value: 4
  misc_feature: MA Experiment 20001248 PARAMETER Experiment Name: At_Far-red-induction_P Parameter: Tissue Value: Whole Plant
  misc_feature: MA Experiment ID: 20001905 Result: Down-regulated in Transcription
  misc_feature: MA Experiment 20001905 PARAMETER Experiment Name: At_Drought_Reproduction_P Parameter: Age (day) Value: 40
  misc_feature: MA Experiment 20001905 PARAMETER Experiment Name: At_Drought_Reproduction_P Parameter: Organism Value: A. thaliana
  misc_feature: MA Experiment 20001905 PARAMETER Experiment Name: At_Drought_Reproduction_P Parameter: Plant Line Value: WS
  misc_feature: MA Experiment 20001905 PARAMETER Experiment Name: At_Drought_Reproduction_P Parameter: Timepoint (day) Value: 10
  misc_feature: MA Experiment 20001905 PARAMETER Experiment Name: At_Drought_Reproduction_P Parameter: Tissue Value: Rosettes
  misc_feature: MA Experiment 20001905 PARAMETER Experiment Name: At_Drought_Reproduction_P Parameter: Treatment Value: Drought vs. No Drought
  misc_feature: MA Experiment ID: 20001906 Result: Down-regulated in Transcription
  misc_feature: MA Experiment 20001906 PARAMETER Experiment Name: At_Drought_Reproduction_P Parameter: Age (day) Value: 35
  misc_feature: MA Experiment 20001906 PARAMETER Experiment Name: At_Drought_Reproduction_P Parameter: Organism Value: A. thaliana
  misc_feature: MA Experiment 20001906 PARAMETER Experiment Name: At_Drought_Reproduction_P Parameter: Plant Line Value: WS
  misc_feature: MA Experiment 20001906 PARAMETER Experiment Name: At_Drought_Reproduction_P Parameter: Timepoint (day) Value: 5
  misc_feature: MA Experiment 20001906 PARAMETER Experiment Name: At_Drought_Reproduction_P Parameter: Tissue Value: Siliques
  misc_feature: MA Experiment 20001906 PARAMETER Experiment Name: At_Drought_Reproduction_P Parameter: Treatment Value: Drought vs. No Drought
  misc_feature: MA Experiment ID: 20001911 Result: Down-regulated in Transcription
  misc_feature: MA Experiment 20001911 PARAMETER Experiment Name: At_Drought_Reproduction_P Parameter: Age (day) Value: 40
  misc_feature: MA Experiment 20001911 PARAMETER Experiment Name: At_Drought_Reproduction_P Parameter: Organism Value: A. thaliana
  misc_feature: MA Experiment 20001911 PARAMETER Experiment Name: At_Drought_Reproduction_P Parameter: Plant Line Value: WS
  misc_feature: MA Experiment 20001911 PARAMETER Experiment Name: At_Drought_Reproduction_P Parameter: Timepoint (day) Value: 10
  misc_feature: MA Experiment 20001911 PARAMETER Experiment Name: At_Drought_Reproduction_P Parameter: Tissue Value: Flowers
  misc_feature: MA Experiment 20001911 PARAMETER Experiment Name: At_Drought_Reproduction_P Parameter: Treatment Value: Drought vs. No Drought
aaaggcagcacaataatactgtctaaatgcttctctactttctcatcacttgtctctctttctttttctttaccaaatctctttctcttcctccatgggcatctgaaaccaaaaccttgctctccttctacttcatcaagaatccctttatgaacaccctacatcagaccaaacacgatccagcctctccggtgatcgaccaaatgtcggttcttgacctccctgagctggctcttgactgcattcttgaccttcttccaccctctggactctgcagcatggctagggtttgtagctccttgagggagagatgtgttagtgatcatctatgggagaaacatttgaagaccaaatggggcaaaatccttggccctgctgctcacagagagtggcaatgctatatctcctcttccacatatcatcttgattctcctcatcatcaaactgggaatcttggttttgccaaaatcatctctctgatccgatctctttcatccgttttccgagaggataaacaaaggaggggatatgcatcttctctgccacttgattccagcatgagctgctacctctcccttgaaacaggtcgtttttggttcccagctcaagtttacaaccgtgagaatggacatgtagggttcatgttgtcatgctatgatgcggagctcagctatgatactcacacggatacgttccaagccaggtatccaccacatggtagacgagcatctgcgattgaaaagggtgtgacatgggatagaataagagcagctcccattgatgcatcacctcatcttctccatgtatcagattctttaaaagagttgaaacctggagatcacatcgaaatccagtggagaaggaacaaagagttcccatatggatggtggtatggtcttgttcgccacttggaatcctgtgatggagatcataaccattgccattgccatcttagtgagacggtagtgttggaattcaaccagtacacagtcggatcaaggtggagaagaacgatgatcatgagagatcataaagaggaaggtaacgaagaagacgggttctatggaggaatccgaaagctaaattgtaaagaagagattgcaatgtggaaacgtcactggccttgctccatcttggaatagcattaaagaagctttgcttaaacacatggggaaagatattacacatcactatactgagagtaggttgttaaatttagacgtctattctcttttatccaatgtatggttgatcgtgaattatttgttgggaataaagtctatacgtgaaattattgtgtcacttcgatttgagaaatattgtgttgtatagggaaaacttaatacaattgatttgaatactc

SEQ ID NO: 43256 - protein, 371 aa, Arabidopsis thaliana
  peptide (1)..(371): Ceres Seq. ID no. 12324755
  misc_feature (60)..(285): Homolog of NCBI NO: 34909060 NR Description: P0702B09.33 [Oryza sativa (japonica
  misc_feature (60)..(101): Homolog of NCBI NO: 7459607 NR Description: hypothetical protein At2g41170 [imported] -
  misc_feature (309)..(352): Homolog of NCBI NO: 7459607 NR Description: hypothetical protein At2g41170 [imported] -
  misc_feature (154)..(307): Homolog of NCBI NO: 7459607 NR Description: hypothetical protein At2g41170 [imported] -
  misc_feature (58)..(371): Homolog of NCBI NO: 30688559 NR Description: F-box protein family [Arabidopsis thaliana]
  misc_feature (61)..(371): Homolog of NCBI NO: 34903372 NR Description: unnamed protein product [Oryza sativa (japonica
  misc_feature (60)..(286): Homolog of NCBI NO: 7487431 NR Description: hypothetical protein At2g32560 [imported] -
  misc_feature (311)..(371): Homolog of NCBI NO: 15225802 NR Description: unknown protein; protein id: At2g26850.1
  misc_feature (1)..(285): Homolog of NCBI NO: 15225802 NR Description: unknown protein; protein id: At2g26850.1
  misc_feature (1)..(371): Homolog of NCBI NO: 30685347 NR Description: F-box protein family [Arabidopsis thaliana]
MLLYFLITCLSFFFFTKSLSLPPWASETKTLLSFYFIKNPFMNTLHQTKHDPASPVIDQMSVLDLPELALDCILDLLPPSGLCSMARVCSSLRERCVSDHLWEKHLKTKWGKILGPAAHREWQCYISSSTYHLDSPHHQTGNLGFAKIISLIRSLSSVFREDKQRRGYASSLPLDSSMSCYLSLETGRFWFPAQVYNRENGHVGFMLSCYDAELSYDTHTDTFQARYPPHGRRASAIEKGVTWDRIRAAPIDASPHLLHVSDSLKELKPGDHIEIQWRRNKEFPYGWWYGLVRHLESCDGDHNHCHCHLSETVVLEFNQYTVGSRWRRTMIMRDHKEEGNEEDGFYGGIRKLNCKEEIAMWKRHWPCSILE
